United States Patent Application Publication US 2008/0114160 A1 - sequence listing, part 78

SEQ ID NO: 29710 - DNA, 12258 bp, Oryza sativa
agagaaatgagagagctattgcttgaggtgtgtgtgaagtgaagagagtgagctccttatatagaggtagttatgacagttgtggaaggggaattgtccgaagtgccctccaaccgtcattgggatgcaatcctggacgtccaggtcaaaacctggatccaacggcgccaggattggtccaggttcggccgaacctagggatggcccaatccagcccaatttcggctggtgtcctcctctattgctccactccatagacttgtgaattttggcccaattcattgtgtcagttctgagttcttggcccatctattcataagtctggttctcgacatcgttcgattgatttatcatctaagttgatgtcgattctcctccactttattgtcattctctgcaaaaggttagtaaacctaatactggtagaaaattattactctaacatacttatggattgcaagtatcactagttctctcctattttggtagtattgacggtcgaaactgatcgataacgaccgtcacaccaggatacccaccaggatacccaccatatccattgttgccataaaacaaaaagaaaaaataaaataaaataaaataaagttggctcccgcagtgctaaggaacgtacgccccaggatgagcggcgtctcctttcccgtctccatgtccagcaccaggaaatcaaccaggatgaagaaatcccgtatcttgactggcacatcctccgctatccctgccgggtaacggactgacgaatcagccagttgtaggtgcatcggtgttgttgccaacaccgtgaagttgagcttgtcgaaaacgtcttttggcatgacgctaccactggctccatggtcgcacaaggcctgatcgaactgctatgccccgatcgagcaggtgatcgtgggacaccccggatccttcttatttcccgggagcttgtggagtatcacgttgctgcattattttgtcagcttgaccacctccgttgttgggagcggtctctttttgttgagtatgttcttgaaataacgagcttatgttggcacttgcatggcgtccaacaacggcacgttgatgtggatcttttggattacttcaacaaaacgagcgaattgctcgttcactgacggtttcctactccgttgagggaatggcaacaaccttgtgtcgcagtactactgcggcactgtcttttctggctgaacttccttgtcagccgagtcaatagatggtgcttcttttgatatcccatcagttcctgcagggttaggatatggcggatcacgagtggacttacctcccctcgttatgatcaccctaacattttcaacagaggagtcgggttgccccagaaccctcctagattcatttgcagggactaaagatgccaactgagctaagtgggtttctatcattttattgaagctgagttggttttggaatgtggaagcaaagccatctagcttgacatttatgttctctaggatgttatcattggcagcaagctttttgcttagcgcgtcagtggttttagcttgcgcaaaaacaagatccttcaaggaggattggttagagaagttaccgttattgttacctccttgataatatgggcgtggttggttccaccgctgacctccttgtggacgatacccgttgttgttgttgcccatgtacatcgcctcctcacgggtttccgggcagtcattcctagaatggctcgtgttgctgcagacctcacacgtgatgtgatagtccaaggccttgacggtgccttgtggctgtttctcgtggtcatccagccgctttatgaggaggtccagcttggcagcaagcagttccgtctccttgacgatgtgcatgccttgctgatgggtctggagtcgttcctcgctccaacccatatttgagaccatcttctctataagatcaacagctccttgaacagttttagagaagaatgctcctccagctgccgtgtccaggtgatcgcgggacatcagggtgagtccattatagaaattcagcagaatcagccagttgtccatcccatgaagaggacaggcggccacgtactcctgcagtcgttcccatgcttccggaatagactcgtctcttgtctgctggaaactagaaattcgtccacgaagggcgttggttttgcccatcgggaagaacttcgagaggaatgccgtagagcatttatcccaggtgttgatagcagcacggttggcatagaaccactgcttagctctcccgaggagggagaacagaaacagtcgcagcctgacggcgtcgggactgacgcccttgatggtgtacgtgctacatatctctaggaattgttgcagatgagcattggcatcctcattaggcttgccacagaacgggctagcctacgccatcgtgatgaggctggaattcaagtcgaaattcatgtctcccatgttgatctacggcccaatggccacattgtcagcagagggagcagtgaactcgccgagagtcttgctaatgatagtcttgaagattggtggtgctgatacggctggtttctctgtcggtagagttttctgtggagcaacgactcgcggtctgatgctccggaggaaagcttctggattttctttgaagttcttcggcaatttgaaaccagtcatgcactaccctgttttcacaacaaaagtgaaaacaaccaaggttagcctgcaaaggaaaatgattatacagaggcaaatataaagtattagttcaagtaatctctattatgaatcttccccggcaacggtgccagaaatgcttgttggtatttcttaacgatattactagaaatataattcccaacaatggcgcagaaatacttatggtatattatggttacagagttcatccgcaagcgtacggatataccattgtagcatttcacctgagagtattccaagggtatcgtatttattttatccagtgggaagataatgtagagaagacttgactaataatttatatattgcttgtgataatcatattctaagcaggggttcagataatccaaggatagagtgacacacaagctttaactactcattctcataatatattatctatgctaggtggaaagaaaagagaaagataatctattcctatacttctaatatacatagtatacatacatcctagttagctgatatactagctaataccctctttccgatgccctcctggtacttcgagaagccacccctgactgccgagttccttaagacagcccgttataaccatacatcaggggctaaatacggaggagtacccaccccaggaaattaacttaggattatatataggcgtggaggaatacccgtactgatctgtcaccataagcggcccacctctcatccgcaatatataacccctaataatgatatcccgtaatctagacaccacatctaaactaccagatactactctaatatcatcatcatgacatagagtaattgcataagcaaacattatacctgcaccaaagcatctcccagataagctagccgtatattcagtataacaacagcataatgtaaagtaggtactcatatactcggaaagtatttcaataccataaatgtatttagaagagtattctaataaaagtactaggcttacaaaagagaaaaggaaagctgctagagccatacccgaactcttccgaagacttccggactcctgatttctactctattcctattccaacagctagatattactaaactaagcttgagaggaatgagagagctattgcttgaggtgtgtgtgaagtgaagagagtgagctccttatatagaggtagttatgacggttgtggaaggacacttgtccgaagtgccctccaaccgtcattgggatgcaatcctggacgtccaggccaaaacctggatccaactgcgccaggattggtcaggttcggccgaacctggggttggcccaatccagcccaatttcggctggtggcctcctctattgctccactccgtagacttgtgaattttggcccaattcatcttgtcagttctgagttctttgcccatctattcataagtccggttctcgacatcgtccgattgatttatcatctaatttgatgtcgattctcctccactttattgtcattctctgcaaaaggttagtaaacctaatactggtggaaaattattactctaacatacttttgcattgcaagcatcactagttctcttctattttggtagtattgacggtcgaaactgatcgataacgaccgtcacaccaggatacccaccaggatacccaccatatccattgttgccataaaacaaaaagaaaaaataaaataaaataaaataaagttggctccttggtcttcactctcgtctttctttttcttttagtgtcaaatgaagagtcccaggaacaacgacaagtgtgggggtgatcttgcacatcaacgtcgtaactgttggtgcgaaaaacacgtggcctggaagatctgcttaactccaatgcaggtctaggaaatcttgcttttggacctatgagcgtgccaattgatttgatcctgcaatcaagaagaaataaagacaaggaaaccgtggttaaatccataaacgatagccgatcggctaatagccgatgacatatcatttatctttgagccgatgtcatatatgcatcgatcggaaatcatgaataaataataaagaactaaatctactcgatcagctatagatattaacagtatacaatcttggtgtcggtatatatttaaatcaagtgattgggatagatcggacgccaagccgagacagtataaatctcttagatcgaaatatatattaacaagaagattatagacatctatagcatagccgatcaggtaaatctagcatgtattggctaatactccgataccactctatattaagatattaaagcaagcaaaatatatcaaacaagaagcttaatatacctaaaagcagtaagatctcaacataaagggcagatctatcatatcaattaagcacataaaatataaggctaaatctggtaagatcggctgaaactccgatgaaaccctaatcggcaaccaaaaacaggctagagattgaagttctaatcacgacttataagatcagacaactgatgcagccaaaagtatgaaaagaaatacaatatctagataatcaagccattgattgtttcataggatggtagataccctatataatctaagccaacattgatatttaacttaatcggctatcttctaacgatagatattagccggttgaaggttaaataataatattgtcaaagattatataaaatatatgataactcgacaacttacataaacaagattagagtatcataatgatggaagcactaatatcgagaacacaagctgccataataacttttacctctagttgaagatcgaaaccgatgcaactcaatctgaaggcaagaactcgtcgaaaccaaatgaaagttaaagggtggcgattcgccgagattgcattgattgtgtgttcgtttattacatggggctcggggtctatttatacccgagattacaaaatatgtccatgtcggacacgactcttatctctaacaaactataatataccataagtctttgcggtagacttttgcccaaacttatctctaaggaaattacatgaaatatcctaactaatagatacaattgcctttccaggactcaatccgtgtgtggcaatccatatgaagcacattaacttaatccgacaacgtgtatcgaatcatattgtcagaatcggcttgatcggctaacctagtccgactcgaactctgtcgattaaggtcgcagccgattcttgctctgtttccagaacgatatttgtcttggattccgcttcgatctaatcttcatatccgatactcagattagcaaatttggttgttaacacatgccccccaagtccggaatatttggtaatgtttcggatttgccatatattgtctccaagagaatatcgcacttgtcgtttttttaccgttactccagcgctttaaatactaaccgtcaactctgagaaacttcacaccgtttcctccattttcactgctgaagcaaactcctccttctctctcttcggcgatccgctcggcgcgcaaggcgatttccaggcgatctcctctccgaccaagtttccgcccgcggcgatgtcgacttccgccaacccatctgccgtgccatcggccgagtacgcagaggtatgtgcccatcggctagatccctttttcccatgcaatagatcagtttttcttcatcttatcttgttttcttcttctctattccttttggatttgtagcatctttccattctggttgcagtccccagtttgtttcacgatcaccagtattttctcggtccgattggcagtctcgacccctatgagttcattagtgctgagaccaatatgatcccttttagactggccaacccgaacctaaatcacttgaaaaacaccttcaaatcctggccttcacttgagaaaagcaatcccgagaaaagttggcctgtgtggtacaagcgagtatcggctagcaagcaggctcactgggacgaaattggaatcggccaggcacttgcccttactctagctaattcggctaaggatgagccactgatggccgctgcagcctatttttggtccaatactctcaatgctttcctcttcatccaagggccaatgataccaactctgctagatgtcaccatgatcattggcttagatgtgacttcatcagccaacccaataagcttaaacacgaagaatacctttgaattcaaaagcaagagcattggagactggtcgggttacattgcagcgtatatgggcaaagggcctatcacctcccgagagcatatagcctttctgctaatgtggctagaaaaattcttattctgcggatgaagttgtggccccacaaccaactggcagttcttagccgaagccctagagacaaaaaggcaatttcctttaggcaaaatcctcctcggctacttgtatcagatgctgaacaacgcatcagctaagatagctgtcggctcagtcgtcggtgcaggtggaccacggtggctactgcagacttggttaaacttggtagccatgaaagctatcaatcggccagctgtgacagttgttgaattccctagattagagccgatcacagacaatgatggagaagagcgtacccactgcaggtgtatgtcctatggggagtatgcatccacaccagccaatgctggagcaaagttatcggctgagtttctgaaggactggttcttcagtttctatgatggatttcagaagaatgcccgagtttggtttccatatgcagactcgacggatttagatctgctggcagagttcagatttgaagacatcaaccatgagaaatatcaaaagtctagagaaatcttcgctgccaccattagcccctgcattcttcctgttagtatccatcaagggagaaatattcaggtttcttatgagttctaccatccgataagctcggccaggcaatttggaatgggccaactcccaatcggcttgtactttgccgataagacacaatgtagaggagatatttcttcaagcttgatgatggatcggctgctcaacatctcaagacctcccttgggcagcattgagaacatagagctagcaagttttaggagtagggcctttgatagatggtggagtgaatggaaactacatctattccatcaaccagcttccatgtatatgacagacctatttccggatgtcatccctcaggtaaatctttactttgtcaattctgctaaaataaccgtcagccgattggtaccttgactaacttcttcttctatcttgcagacaacagaatcttctcctcctcgtaaaagcaatagggacaaggacatagaatatgctctaggcctcataccagacagaggtggaccatcaaccccaatcatcggctaccatgcccccaagacctcaagtctactccaagggctaataagagaaccgggccgatgctggcaagaagagaaataccaaggtatcggctactgacccatcagctctagctccacagaaaaaagccaagaagaagaagtccaagccaaccgatgatttgcctaccttagatccatctatcgaacaagccctggatgaagaggaaattggagaagatgttgatcaagctgcagccgagctaagtgacctaggagaaaaaacaccatcggctccacctaaaaagacgcctccaactcctgcagctccaactcactttacaagggtaacttatcctgacaagctcttaaaaaatttccatatagccgatcattcattgaacttgtatttgtagaagaagaaaatcgcttcaaagaagacatcagcaaaagcatcatctaaaccagttccatcggtaagactccttctgaagaatcttttaaaatttaatcataaccgatgctaatttacatttgtctttttagcctactcctcctccttcaccccctgtgcagccgatgtcaagcggccgtactccaatggtcatgggcagccatcatattgaagaagaacaacaaccagccgctcctgctatcccagtaaatctttcttttttcaaaaaccccaaatcggctgtacaacatgcttcagtgttaacccttttccaactttcatctttataggtcttagccgatctattctcttttgacatcaaggactacttcgacgaggtggaagaagacaccaccagcagatccctagctcctctatatgaagatgttagaagaagtctcgaagacatttgtcatcgtctagaggcatcattagacagcttggtgaccgactgcggttctattcgggcaagattcaaaacaatccaaacctcaatcccatatgacctatcaaacgtccttaccccagctatataccttgaacaacatcaactcaagctagagaaagcaagacaaagactagctgatcggcgagagaagaaagacatagaggcaacaatccaagccaatcggcagcttgtacatgctgaaaaaatcaagctggatcatcttgccaaagagccaatcaaatctaccattgaccaactaaaatctgagaagattgagctcttagctcgccttgaagaatgcaatgctaagcttgctatggaagaacagaagttagccgatctcccgagggcaattgaagaacaaaaatcgaagttaagatcagctaccaagaacgtagctgatttgaccaagtcccttaaagttattacttgaaccaatgctcaagttgctcacgccatcgaagaaatcgaagaaatcaggcaaaaggcaatatcggccatccaacattatttatctgcataactgatcgactgtaatagggacttagtaacttttgtatccatttgtgtaatcagctaagaaactttaacactttacttaattgtcttgatgatcctttgtgccgattaatataacttgctcaaaaattctcaatttttgtatatatgtgccaccctaattttgcaatgacgaaggcattgataaaattataattcagactaagggcgatatgttacatataggccatcatacatcagcagaacacaaccgattatgaaaaaacaaaaaccactaagggcgatataactatatcggccatctcaaggcgatgcaaacacacatcggctttacacgcatcggcagactcagccgatcatcagttaacccatacactagggtaatatttcttttaatactttccattaagtgctcatccataaacttctccatcaagtccttgcaacatataagctcctttagacacaaccttgtggatttgaaacggtccttccaatttggtgaccacttgccgaatttattatcacgagttcctaccggcaagattaacttccaaacaagctctccctcagaaaaagacttgggcactactttcttgttataatgtcgagcaaccctctccttatccttggtaacttttgcaagagctcgcaatcgtgactgaaccacatcctccctctcatcgggcatgagattataatattcgctggctgtcaattcattttgtaagtctgttcttctcgagctgattctaatctcccatggtaaaactgcttcatgtccataaactagcttataaggaggaacttgaattgatccatgacaagtcatccgataggaccacaatgcttcggccagtctagtatgccattgccgaggataatcagaaatcttcctcttaatcaatttaatcaaactcttgttggatgccttggcttgcccattaacttgcgcataatatgatgaagaattcaacaatttgatacccatgctatcggcaaattgaacaaactcatcggacacaaaaatcgagccttgatcggttgtaatggtctgaggaataccaaatcgataaataatatgctcttggacaaattgtatagcatccccccaatcaactttcttcaaaggaatcgattccacccacttgctaaagtaatcggttgctaccaatataaacttatgtcccttactcgaaggtggattaatcatcccgatcatgtcaattccccaacctctgaatggccaaggtttgatgataggattcataaccgatgctggtgcccttcgaattgctccaaacttttgacaatcttcacaacccttgtaatatttaaaacaatctttcaacattgtcggccaaaaataccctggacgtctgagcaaccacttcatcttatgagccgattgatgagtcccacaaattccttcatgtacctcgcctattgcaaccttggcttgatcaacactcaaacatttaagcaacactccatcaattgtccgataatacaattcatcatccagcaaggtatatttcaaagctttataacacaactttcgtgaagccgattgagacggattctgcaaatatcgaaaaacatcatgccttcaatcatcggctgttattgtagcaacttctactttaacatctttcatcatcggcttgtaccccaatgctccttgagccaaatcattagcttcaacgttttgctcccgagatacatgttttaaagtcaccagccgaaacccatccatcaactttcggcacttctcattatagatcaccaatgtatcattcttgcatttatattctcctgccaattgactaatcaccaacaaaaaatcgcccataatctcgatagcatcggcttcaacttccttgagtaattgcaaccctttgagaaccgcttcgtactcagcctgattattagttgcataaggtttaatagtataggaaaacacgaaacttgcctcccgaggaggaattataaccaagcctataccacaaccatgagtgcacactgacccatcaaagaacaatgtccaaggcacaatgtaaactgagccgattgagccatgacgatgatccactataaaatcggctatagcttgtcccttaatcgccttcggtgaatcataccgaagatcaaactctgttaaagcaaatatccatttaccatcccttcctttcaaaattggagccgatagcatgtatttgaccacatcggctttacatatcacagtgcattcgttggacaatagataatgccttaacttggtgcaagagaaatacaaacacgagcacaacttttccacaggagaataccttgtttctgcatccaagagccttcagcttaaataaaatacagccctctctttgccctcaagctcctgaatcaataccgagccaattgacttctcaccagctgacaggtataatctgaaagatatcctcttttgtggaggaatcaaaactggaggggaactaagatattcctttatattatccaaagctttctgttgctctaccccccaagtgaattgtcgatcggctctcaatctcaataaaggtgtaaacggttccaatcttccagataaattagagataaacctcctgataaaatttatcttgccgatcaactcctgcagcttcttcttgtcatctggaggctggatcttcttaattgctttaatactcctttgaatcacctcaatccccctttcataaataagaaatcccaaaaactggccagctgatacaccaaaagcacactttgtcgggttcatcttcaagccatattttctagttttctcg

SEQ ID NO: 29711 - DNA, 690 bp, Oryza sativa
ccatccgtaaaactcaatatcttatgtcttgaggcagcatcgaccagctgatcggcaaccggcattgggtattcatcctttggggtagctttgttgagatctcgaaaatcaatgcacaccctgactttgccatttttcttgataactggaactatattggaaacccattcagcatatcggcacggacgaataaaaccagcatcatataaacatttgacctcagccttgacagcttcaagcatatcggctttgcatctcctcggcggctgctggtatggtctaacccccggtttgatagggagccgatgttcaacaattgatcggctgagtcctggcatctcataatattcccaagcaaagcaatctcagtattttttcaagagctctatcaacttggttataaatttggaagataagttcttgctgatgaatgtcagccttggtctatctcctggacctatatcaatttcctccaaatcatcagccgacatgaaaccttgtccttgcttgtcatcgagatcatctaccgtgtccttggtgtagacgtttgaaccctccacgacgccctcaaaacaataatttgggctctccatcttcaattggctgtatatcacgatcggacacatttagaaaatctccatcccaaatttttccagacaggcaatcaataccatccatctcccaaagagc

SEQ ID NO: 29712 - DNA, 692 bp, Oryza sativa
ctaccccaaaggatgaatacccaatgcccggttgccgatcagctggtcgatgctgcctcaggacataagatattgagttttacggatggtaatgctggttacaatcaaatctttatggcagaagaagatattcataaaacagcttttagatgtcctggtgcaatcagcttgtttgagtgggttgtgatgacttttgcttgaaaagtgctggagctacatatcgacggcctatgaattatatataccatgatctaatcggctggttggttgaagtttatattgatgatgtggttgttaagtcaaaggaaatagatggccatatagccgatttgaggaaggttttcgagaaaactagaaaatatggcttgaagatgaacccgacaaagtgtgcttttggtgtatcagctggccagtttttgggatttcttatttatgaaagggggattgaggtgattcaaaggagtattaaagcaattaagaagatccagcctccagatgacaagaagaagctgcaggagttgatcggcaagataaattttatcaggagggttatctctaatttatctggaagattggaaccggttacacctttattgagattgagagccgatcgacaattcacttggggggtagagcaacagaaagctttggataatataaaggaatatcttaagttccctccagttttgatt

SEQ ID NO: 29713 - DNA, 4120 bp, Oryza sativa
actggaccgtaagaatgccaaggcttattccaccagccgcagtcccaggatacagagacatgcttaagcaatgttaacaaatggaggaccaaaattcgaccgaaaaaaaagaagagaaggaacacatatctcgactgtcgtattgataatccaccaacaattgcccaatcatatacactctacatttggagaccttcctaaaagatgtagctgtcaccttggggcttggggaggttcgacaacaagcatccatcaaccaaaaaggagatgagactttggatcaaaacagtatgacaagtatcaatatagctcccaccatgacccactggagaaatgaactgagtctgcttctctcccaagaacatctgtgcctcaaaattggccgccaaaaacaactaggccaagcctgcaaaagaataactcaccgcctgcgatcaccgaatcacaggatactgaccagtgccagtgtcacggattggcaaaactggagaaacaaccaagtaatgactctcttcactgcgcattcgccttttccaacttctctttctcaatttcaacttttctttcctcggcatgttgagctaagccattcgcgagtgcctggtagcggaaatctagagtctgcatcaggctctggaacctggctggatcagatgcttgcatacctgtaacagatggtcactaacttgtcaggtaacttcagccatagtagcatagagtaagcacaaacttgtacaagaatgctgttttaccttggatggtatcaacaaagaagatgaatgggtccacctcatcaattggcgattgcaactcctcatcatcgctaaagtcatcatcagaatcatcatcgtcgtcatcatagtgcggctggaaacctcttgcctaaatcacaggaagcatacaaaaacatgagtacagggtacagcataaacatgaaacatttacatgaaataaagatttgaatttcacaagacactatggtaaaaaattagtctagggaagagaaggtgacactttctgtggcgtgctaaaagaagacagcagcaagctcaaaggccagcagagaacaaaggtgattcacgagaaatgtgaggcgctctaatgtagttttttaatatacatatattatggaccacttcacccaccatgcatggtggcaaacacctccagaactgattcaggggtttgcttagaccgtttagcatacttcatggatagatttacacaattttatagtttaggggacaatagtttacaggtttaaatagagcttctcctttttgtttaactagcttttgtgtgtgttatatatgttacagctactgcagtttaggatataaatggccagcaaaacaaactcaaatacactttgttatatatgcaacaactatgcaatttgggattaaacattgctagcaactcaagccgtatatatatagtaatttagtttgtcagctgtaattgtcattattcagaattcagtgatacaacatccttcatagtcaataaaacataagttaatatttatttaaagggaagtatttgtgttactaactttactagtccttttgttgaggggaaaccagactgaaaacacttgttaccagagaccgtgttagttctattaaataataccccatgaaaaacacttgtagaaaaatttaactattttgagcatctaaataaaaaggaacacatttttacatgctaattctacttaagtccatatcacaatacaaacctctcttagtttctgaagattgacactagatacttcatccccatcctcatcatcatatcccatctccttatcagactcaatatcctcatcttcttcatcaccatcaaatccatccaaatcttcagctgcagcctcattttcccatttagattctgcttatgaacaggaatgattaagatcaggcaaaaggaattttaaagacctctcctctacatcgtaattgcaaaaaggagacataagattagaaaattttctcaggtcaacatgttaacagaatggtatcacagagtttttgttcgaagtatttgaattgtcatatgttcatcagaaaataaacaaaagataaaattgaacctgcaacttgatccttgtaagaaacaagaagctctagtgttgctttgaaaatgcgctcaagagcttctggtggaatgtgattagctggaaggctaattagtgaagtcaatcccaagcaacaaaccttcttatcatgttctctgcaaataaagaaaaataatgtacggagtcagtgcagcataaaaacacaacatgtatagtactacaaggtacaaacatatgctaacaagacctacctcttaaagtttgcccttatgccacttttctttacttgctgtaacatgccaaaccaaagattgaagatttcagtagcaactccaagcttatgcaatgttcccaatgtcaatgaaggattgtagtacagtgtattagctatctgcaatcacagtggaaagttttaggtatacatgtcatcagttagcaagagatacagatgccatgtttgaacaaacatgacactacagtgattagattgatgcaacatatgaatatggactaccacattgggaagtgttaggtaaatgcggccaacaaataatagtgattatatgcagttgttctgatggaacataactgaaaattccactgctaatgactaaattgacctatgatattgatcggccagatacagatatgagtttgccccatgcaacatgaaaacctatgttccttgaagacactataatcaaatggttacatcgctttccacaagctggctactgtgctgtctaagctatccctgctttatccctgctttatccctatgtagaaaaactatccctgctttatctataccaaatgacaccctttttgatcaaggagttataaatgctgtctaagctttaagacaaaatgtcatatgatggataatttacatataattgctcataatttctaacttccgctatcactgggtgtaataaagtcaattcatgtgccagatcaatctaaacaacaaagttttattatccagtgatcctgtcacctgctggagttacatagggatgatatgctacaaactagtcacagcacatgcagagtgtcactgtttggaatgcaatagatatcttacaccaattacatcccatagctatacatagcctataggatttgcaactttctatcattttatcaatatctatctattcactgcggtcaagttgtgcaactagtcagacagagcacaacttgagggcacgaccagacttgggccgcttgagagcaaattgggccggcatagtcaatcagaaagggagataggatcccacgtacatagttagatgctagagccagaacgagagcaaggttagaggaagcagcaagagctacacgctggacattggtgctcaggatgcagttgcccatcactttggcaggagcggagccaggtagagaagcttgacagagagctgcacagggctgccaatggccttcctttccccatctgctccctcttttttcatgagcatgatcccttgtaatggactagtcaactcaatcaggactagtgcacaagtcaatacagggatgactcaacttgactttatgacttatacaactatagtttacaaacaaccatgtatttattccttctttttcatcttgcccaccccccccctccccccctttgttctgacagcaagatcactgagtgcctcctgcagtaggcagagccaacaatcttcctgagggggccatcttggcaactgccagtatgaacatgtgttaggtaaactgtggtgccatggatgccttccaacacctttctgccggttgcagtcgcacctcaccatcgtcctcccatagcccattgacaggctgcaattgttggagcaactccatccccattgcaagcaaataatacagcgtcggcaagattcttcttccccttccccaccataaagcctccatgcattctccagcctacatctccagctcccaccttacacctcctcttagagcgagtacaatagtacaagctggactggtgataggagaaacacgtcagctacagtgatgagctgg

SEQ ID NO: 29714 - DNA, 24392 bp, Oryza sativa
cttgggggaggtcaggggtacaaaccttgggttacttcccacttggactaaagacttcactcttaggtgcttccacgtcagtggcaaaaaataattaaatgctacaaaatggcaatcctagaactgatcgattcccatatactgtcaagggagggtggaaggcttaagaatagataagagggaacttagggtgtgtttggttcattgcccaaacaaaaaaaaatgacatggcaaagtactcatacacttggtttgttgccagaaattcaaatttggcaaagcagtatttttacaaagctaaacacaagcttaaagtaacttggccgatatttgggcatcaaaccaaacacccacaccttgccaaaacaatggcattacgaaatatttggcttgccaaaatttggtaaggttaactataacagctcaccctccagaaccgcgtagcatagcccacttacgcataccacgccacttacacttccatcctcacttggtgtaaatgggttaacccaagagtgatgtggttggagggacaaacccttataaattggttccaccttgctaaattagcaatgtggtactaaacatgcaaacacagctcttatagggcacacaggccaaatcctaattgggccaggatgtcacattaacaatggctataatccagaagaataccttaagatctaccaccatgttgaaacgaatggcataaattgcatcttttcaagattacttgccatcatggggtgagattacttgtttgctggttctggaggatgaagtagactggcaggtatcttcagttaatacagaattggcgatttggctggaggcttggagctttaccaatttagactagtttttagcaaaccgcatatctttgtcgcaaacatggtattttagattattcaacataacagttggatttattaagttctcaaggttttcctggcattagatatattagctttgagaagttgcatccctacaaataattagtagctacagacaagcatgtgtaaagtgtgaacaacctctgcaacctagaatgattaaccaaatgcagttatggtatatgcataccaaggcaaccaagtgtacagctgtatggatgcatactatgaagctctctaccaatgacaaatgacacactatattacactacacagtacctgataacaagtcaaaaacttgaaatagaataaagtaatacaagaaaatgtcaactatactatgatcaggaagttagcttcttaccacttgtacaagtaagcttttcagatacggcttcactgcacgacgcagccaatcaattgttagcctgagatacggctcaatccaatgatcgacttgacctttgcaattttgaaaaacgacttcaatcagcttgggagcaggtataatgtcagaatcttccatgttttggtctgtcataatctacaattatttgtaatcaactgtaaaaattacaggaactaggaactttacaaaatatttcagagcaaattttaatgcaacatgaatttaattcactcacagatgacagtgctctccataggctttgctgataatcaggatctttgcatgcaataaattgatcagtgccacgggaaatgtagttgtctaatggtaccagaatatctgcagggcaataagaacattgaataatgtagcaaaaggatgtcaaagataatacaattgcttctgaaaatatagttgatggtaggagattagttccatctagtggcctgagggtagaaccaagcaattttctacagatagaaacagtcttagcagctgactaaaaaaaattctgaaggatagacaaccaagcagttggcatttcaatactttctagtactataccaaatatgtaaaacaaggattccaattcaaaggaacaaccgatgacacaactattcctgatgttcttatctaaaatctggatgcacatgtgaatacaaaattttccttttgcataatggataccagataccggcatgctaaactatcacacagaaatcataatttcaattcaattaaacagaatcttaacaatacaagatggttctagtttcataaattcaattccttactaagtggcataaccatcttatataatcctgacgaatgaataatgtaagaatagacaatgcaaaggctgcatttggtccaaggtattagattggttgaaggtctaatcttgcaaacacatgcacgttaggaagcattaatttaacacaataaatgcctttcgaaccattctaagtgaggaataagttgacccacaaaataggtgcagcaataagcaagccgacctcaactataatagtttgttcttttactaataatcaaaacaacaaagcagatctagccaaacataatctgagactaactagattagtcgctggacacaaaaaaaaaggtttgagctgctaaaatccaggttaaggttaggaaacctaatcattttttattagcgacttggaagaattttataaatgagcacgaaccaaataaaaaaaataatcagaaaataatatgacatgcaaactgaacaaactagtgaagtgggcacatggaaactaatacaaggtgattcagatattattttaaatcatgcatgactttccaaattacaagcattcatacaactaaacaagattgtcattggaaaatagcacaagcaaatataacaaacataaaactgcaagaaaacccaggaatatgcttaatctagaactctcagtttaaaacaaacataattgcttgccattcaaaactagacttactctcaaagaaatcaatggcccaatcattaagggcctccatcatcaaaggccacaagccccacatttccagtgaaatggttggtgagtaaaatgtcatataggagactatctccagaacttcttcatacacatctgcaagacagagtcaaatgcatcagcggaaaactgcaagaaacaccccaaacctgattaaatttaaaacaaacaactcttaaacctttgataacaatttgagttcaaacaattcaattgtaagtttgtaactttgtacaagtatctagcaggttaaaggtatatcaccagggatgagcatgggtcaagcctacccattgacccatcctaagtaaatgaagtgaatagacatgaaatagaaaaggtgcattctagttgattagttgaactgaatatgctatatcttgatctttactcttttcaaagtaagagttggggtgatggcttgtttacttgtacacccatccagccatcctcctccacaaggatcttcattttaaaatgacccttttgcacatgcatacaaattggtgtgaatgatctcatctaatcatgtggacactttttatatttgaaagatagagcctttggtttttttaactgtggatccatagttatgagtgaataattttataccttgaccatctgaagtcaacattcttcgtaaaataggcaacaaagtcggctctatttggggaaacaaatgaggaaggctactaatggactcaaggattgtgcttatcgcacgtaagcaaccaacagcagccaaagcaccagtgtcctcaacttcttcgtcagcttctgaactagccatgcatctccagaaagcagcagcctatcaaaaacagtaacatgaagttcaaaggaacagaagaacttattgggctaaacacaatgcactgaggggcaacataccaaactctggcacaaaccaagtgcatatggtgccatctcttcaccaaatttgtcaacaattgtctcaagggtgaaaacgagatcttcattctcaacttcactcataagcttaaaaaattctgcaaataatacttaaagcatgatttaaccacaataaaattaaaaaaaagttgaagaaagtgatagaataccatcaagtagttgaggaagaattggtcggatctcatctagatctgtagaagaaatacaaaatatagattgtgatctattcgaaagggtgatccaagttaattaggtctctaagaaattaaataaagactacctttgcatgcttcaacaaaagaacggagtgcaaagactgaatccaccctaacaggaagttctggatcacgcaaaccagagattacacaatgcatagctttgcgaaaattgttttgatctgagaaattgatatgagcatactgcccagcaacccatgctgcctacacatcatatggtaaaaatcagcttaatgaaacaagcaaataagaagtactaaagaaaaaacaggggaataactgcattaatagaatacaataatagaacacaaaaaaggctacacaaagtaaaaatataatatatttaagtaaaataggacccttaaggtaacaagtcattcaaatatgataattgcagtcaaataatttgcaagaaagtacattgtggaagaactatcttataatggtactaaaacttagcatttttaaattggaatcttatattacatgtcactgccaacggaccaggggcaccagcggtggggcaagggccaatgatgttggcccttggatgacatcactgcagtgggggcatggtaggataacaaaggcacttgggaggatgactccatagccagcaggggacaaaagatgtcaccagatgtggaacagaagacgatgcacacaggacagcggcacctcaatagaggagaaatcaaatgtgatttgggggagatgtgagagataagggagaatctaaggataatttcgccattaaaaaaactgacagaattgcttctaacggtgtctgtgtaatgtgtatggcatccaagggaagaaaatttttgtttggtggcaatataaggaaaccaatgaatttctaaaggcacatgaggattgttctctttttataaaagagcactgctacacgtactaaatttcttttacaaaactcttataaacaatgatctcaaccgtttgatttaagtagatggaagttacagaaaatctagatgtactcacagcatgaagagtttagtaagacaaaatttagtacgtataaacttttcatttataaatatatgtgcatgcctcaaactaaattactggacaattgcattttggagacattgagaattcaaacttatgaatttcggactaggtagaatacttcaggacagaacctaccaaatgttccaagttttaagtaaaaagaggaagaattagatgcagaagtcatgcagaactacaattgtactaccaaaatatggtggcttcaagaaaaaatgttcatgatctaaaatgcacaccaatttatagcttgttacctttgcacgtaagtgtccaacatgactactgaactccggaaagacatgttgaaccaacattcgctccagctcagccttatatggttcagtttgttttagcctatcacacaatgtcccaattgcaagaagcgcaccatccttttggcggtatggcttcacttcaatggatgcctcattatacctgccaaaatgttcttcaatcagatattagataactcacaaagttaagcacacacatattaatcacaggatgacacatacctcataaatatttccacaataaaatggataaacttttgcagattgcttttccctcgttttcttaccaattcactcacaaagtccatagcagctgttcgaggactatacaaatcttcaataatatctgtacacaaaagtaccaagtagtatcatggctacagaaaactaatggagtgcacatactaccttgcagaacattgagaagaaataatgcaaattctttttaaaaaaagttgcttagatgaacatattaccatagcctttccgaacatattcatgaggatcttcatcccacaacatctggtcactatcattgaagcacattaatgggaagattatctcaaatagaattatgtcaatttgtggttgcataagctgatacatgctgttcttcgtgacactgcaagaaatacttacattcagccacaaagaattcagaaagcactgaatcccccccccctcaacaaaaaacgtatattacatactgactgtacactaaaataatgaaaggcatgtaaatataaatcaggcgaaaattatccatattgcatgaatgaagtggaagttgtgccattacaaatctgatgactagagcaatttgtcatggaactgagataaagactgattgcaaccatgtgaaacatgcggaaaaccagacaaaatggagaaagggagtggcaaaaacaatacgaaggcagaccacagagctactaaggaaatacagaatgctgctgcacagtttttccacaaacctgttggtaagatattgaagaataagattgataaccctatcaggcaaatagccaccagtacgtattgcattgagcaactgcaaatggcaccccaaaatttttccagcatagttcttttggaacatttgagcaaaggctttgctttctggtctctgaagcttcatatcagcaaacctgtaatgaaaaccaggtttagaatacaaatgacaagaatcacaaaaagtttacttgacacagaccgagtgtataaacggttcaatatatggataatccatttcttgactttccaccatccccaagatttcctcgcatcaggatccaatggttgtccttccactggaactggtcgctccagtaagtttaagaacaaaatcatccaagtattgaagacatttggatcaaaaagttgctttggaatttctagctgcagaaaatacatggcataatgagtattgaaaaaaaaatggaaaacataataaggcaaagaacttacataaatggatgaccagaaaattttgcatatcagcttgatcaagtcagctacttcaattggagggttggaaatcggaacaagatttcttaatatattcaacaaacgaggaaagcattcctcaacaatttgatacaaaggtatcctctcgtcctctgacttgaacctaatcatgaagaaagtaatgagatagtgtggcagctcacataaacaaaagacaaaaaggtaagcactgtatgatgttgtccagaaaaatgttcatagagcaaagaattatgttgtgcacccatcattttaagaaaactataacaacaatgttatctttacactatttctttgggtaatctctaaattacaataaagatcacaaagtcagcaaataaaacaaatagagtgaataacatgatgtgtagagatatttcacagcagagtaacagaaacacgtaaatcctaagttttttggagttacagaaaaataattcaaaataggaagacggatagagtgaatacaaacaaataaaaaagaaggtagaattctggcatttagactcactcatatttccgggcaagaatccttagcacatatagtgctccaaatatttgatcctgtgattctagattatgtgttacccaaggaagaagactaggccactgctcaggataatctgcaaggatcaaggtcttgatactttctccaagctgggctctacagaccatgaaatatgtgtcaattacttgtatgcacatttcataaccatcagtactgaagaatattgtgctttgtcatcaggaaaaacacatccactacaaatttcactgaaatactcatcaaaaataaaagtaccacaagttattgtttacaatgtagaacttgacagtgcattccgttcaaacttatgatgcttctgtgaaaaactaacctaaattcaatatctagaaatgctgaaacagtcatataggtctaacaaaactgaacagataacaccttgaaggcccgaaccctattccacagtggttttgattggtatggcagtggaaaagggatcgaggtgttacttatccagttttgaaggttgtaaacaacctgtttttaaaggcagggtgaaaatgaactttgcgaattcaaggaccaaaaatatattctatccaaagtacaaacatgagtcaaaaatggtattttcagactcatcttaactccaattggctggggtctaaattacttaaacaaatgtcagcattcaataatatgtgtaggcaaacattgtgactttgtgagacggccaaccagaatttatagattgacatcaattgtaagaagaaaagtactccagtattgaaataaaatgccttagaagtcaatttatctagaattcagaaacaacagtacaccaaaagcataaggactacgattatagcatttggagagaggcgcaaaaatgttgttcattaagaaaagggtaggtggacagtgagaaataccttagcaatggaggtaattgagtaacaaaacccaatatattctcacggaccatggacttgtcactttctggaattatatgtttttcttctaaagaaggacgaattgtaagtcaacgagacacaaggaattattgctcaaatagtaaccttttcataccaggatcagtaggtgaccaattcttcgcaacaaaattcttgaaatgaatgcttgcgaactgtctaacagccatatcacaatttccatccacaataatctgtagcaatctaaccaagtgttgtggtgtgtactgaaactgcaggaattaaagaaatatgaatacatgagtccgaagcagactgaaatttataaagcatagcaatgagccaatgacatcatcagtatttaatgaaacaaacaggactactcaggaaaaaggaaatagatcaaacacaggtaaaacccaaaaggaagggaggagcaaggacagtatgatgattagtcaccaagcataaaaaccattaaatgatcagctgatgtagagcaattttagcaaacagaaacggtacgtgtggaatgataaaagcccaccactaaaataaatggtcagctgatcagaattctattttatctctgctggtatatgacctagtaatgagttgtagtggatccttatctttcttgaaacaaggataacaacgaatcatcaaagctttctgaacaaattgcggataacaacgaatcatcaaagctttctgaacaaattgcaatggaagctggaagataagaaacatatgaccagtacaatataaaatgtaaatgtgtagtcttttgaatcccccattgtcaagccaaaactagataattcttcccttattggcttgacagttcattttggcaaactgtagtgttgggatatgttattatgtaacataagaaaatagcaaacataaactcagaaaaagagtgggatgcttgctccatatgtgactattaaatatacactagtacactatatattttgattatgaaggcatcaggtagaggtgtctgtttcatataaacttacaagggtctacgtgccaagtgaaagccctcacaaaatggccaactcaatgaaattgatgtccttacacatccaaatgaaattgatgtccttacacatccaaatgaaattgatgtccttatacatccattttgataacatgatatctaaacaaggttgccaccttagcatgtcataccaacaaagatagagctaactacaacaaagaaatgcaaactatttcgaacctaacttcacaaaaaggccaatccttatggatgtgcaaggagatagcaaacaaaaaggctaccctctcttagttcggtcgactttacaaacttgtgaaaggatgccattgcacctttagtatattattgaacagcaaatgggtaaacaaacatcagaatgccacacagagatggccatttcaacaagtttacgcatgtggaatcattataggccactagttgaataaaatatgcatgataacactatattagtggtaaagtgagtatacatgattgaacaggcagctaagctaccaactctgaggcgttaacatggatagcaataatgctaacaataacatctgcaacaagagctaagaactagtaaggcatacaacatgtaacaattctcatgaacaaatcaacaagaccaaaatccaacagcacgacggatttaagctaagcatcaggcacgtgcaggattcacacaccagtcaccgttcaaatttaaccgaattaaaacatcaaacaagccgcagatcgcacgaaacatggcaacagcagtccaaacgaagaaccgatgctttatccgctctttttatgccgttgtgcaactgatatcgaatcgattgatgataggagaatcaaaaagcgaaacgaagcaatcacgcccccaccggccccgctccaactctagctcagcgcgtgaataccccgttgccccccacagataccgagccagcacagaagcaaacgacagaggtagagagagagggggcggggtaggcccaggggctaacgcgtgatcaagcaacggggagcagcgagcgggagcgcgggagcgcgatctcacctgggttaggctggcctcggcggccttgcgctcctcggggacgtggctgagcgccgcgcgcagcaccacggccaggctctgcagatccatctccgggccggcttggggtaccggcggcggcggcgcgcggacgggggcggggggctagggctcctcgcggcggtggcggcggggggagtggagtccggagtcctctccttccccccgcttgtgtgggcgtcgcggagacttgggggaggcgcgtgcgggaaggggaaagaggagaagccgcccgtgcgtgcgtgcgtgcgtgcgggtgcgcgaggcggcaggcagggaaaggggactcaaggaggagggagcaaagatcaacgctagggtttggtcaaggccgcaaggggtttttggctttcgggttcaggcggccgagcgagccaaggtagagcttagctagcaataggccaccggccgcagcgcaggccccggtccgcgagaccgcgcgtacgtgtgcggtgtgcctctgctttccagtcttcatggactccgtgcacggcgacgcgccaaatcgtgagttcgtgacaagtacaaggtgggtggcaaccggcgtgggccttaatttggccgaatgcaacaccgaataggctgaacacaattacacaccgaccaaacaaatactaccttccttttttaataaattacgatgttgatttttttatgggacatttaaccatttatctttattaaaaaaatttacgtaattataatttattttgttgtgagttagtttatgacttaaagtattttaagcatgatttatatcttatacatttgcataaaacttttgaataagacgaatgatcaaacatgtgtttttaaaagttaacggtgtcatttattaaaaaaaaggaggtatgagtagaattgaagtggtagtttttattctgaacaatcctgaatttaggtttctatcctaaacaattataaagcatttaccgataaaaccgaaaagtcccctattttcatgtgcggctcctcaaaaggaccatacggaaaaatcaattttcacatgcgagcctcttaaatggaccgtgggcctattttcgcaggtggttaagagcaaggctaataatacagccgacatgttggctataaggttctttatagtctttctcagcctacccatataatagttagatctttacaattaatatatggcatacctgtctctctcacggagtttcttggttcttgtgttcaagccggctgtaagtctatagcccgcttctcctctctggcctctcttctctcctccaccttagcatttagccagcctatagcctactattatacttgctctaagaggtccacacgcaaaaatactcctccctcttctccctctcactcactttaaatttttcacctcccctccattttatttccactcatctctcactttctctcctctcctctctatctctttctcttctctcctctcctcttctactctcccgggaggggcgggaggcggcgtgcggctggcgacaaggtgatgaggcggcgactggcctcggggaggctggtgagtggtgacgaggcgggaggtggcgggctcgagcgtggtggcgagctgcccggcggacggcggtggttgacgtgctcgggtcggtgggtgcgcgaccgcggccgtgtgcggaaggcggcgaggggcgacggcgaccgtcccccacccagttccggcggcggcggtggcggcggccggcgggcggtggggaggaggcgcggcaacggcggatctggcgacagcgacgggagcaagcggatctggcgaggacgatgacgacgaggaggatgatggagactgcggcttctagggttagggttcggatttattgattttattttttttggtttttaatttttgcgtgagggcgacataagcacccgcacgcgaaaatcagatttctgcgtgcttctagacacttgggtgtgtgcgggtagcccatccgcacgcgaaaaccccttttggccacacggaaaaatcgttttcatagtagtgatttacccacatgaatacaaataaagaaccagattatatatccataactagtataaaactttaagtagaaaaccaaaccacatatccacgaccagcataatacttaaatattaaaccaaattaagaattcaatgcaacttgattcaaatcaccaactttgggtaatatatttcgacttccaaccttcgaatcatcttgaacgttggtggcggttgttaaaacccatttcgatcacaaaccttcggtaataaaacagggaaaacaatattgaatgcatcgatttgatttaaacaaaagtgaaaatatatgatatttttcacaaaagtgaattattttgcttgggtcaagcaaagaatgtcaagattaatattccaacatttttggttgcagactaaggggattccttttagatatcttgatatttctatgtattttagataacttagtaacaaaaatgaaaaataattgagtaaagaattgataaaaaaaacttagtaattggaaaggtaaacatatagctatttctaacaccacaaccaaacaacatctcatactagccaggctagactaatgcaaacaaccaaacgactgcatatgtatcacattaaattgaaaaaaaaaacaaccaggatgagctcaacctggatgagggagatgagccagcctagacagatacgagcaaccaaacacaccccatatgtctgtaggggagattggttttgataaattctgtgttatcttttttttgagatttctaaagtggttcttcacaaattgattattatatatcacgtttcttctggcaaggggatgagcatataaaaagatatatagaccggcaagatgggacattatatgtcagccaaaagattagggtgaacttggtttgaaattttgaaatacaaaaccaatgtttgttgtttaagttaataaatgagtaaggtttttggcaagacttctttaaaagaaaataattaataataaatcaatagcttaagttgagaggaaactaggggataccttttttgtcgggacttatgaaagttaagagtattttttttaaatatgggttcctagataattaataatggtgaacaagtcagattataggaggataagtggatagaaaatatttcctttaaggacagtttgtatcctattatcggatcccaaaactaatgattcggaaaccgacatgtttagtctgtatcaagccctggatcagtaaattgatacaggttcaacaatctgtatcttcatcgcatacatttgatcaaggctccaaatgagatttatttatgtaaaataatagggtatttacaaggttgtggctaactattacatcagaacctacagaatgacttaactctaatgtttggctataaacttaaaccatctatctaatctataattgagaattaagttagaatgaaactaacttatgtgattgaactcccagcttcggcagaaactccaaatagactctaaaaaagaggggttgaagcaagggtgagtacaacgtactcagcaagctattatattcaatatgaaggcatgaaatggtaatatttgagtagggctatgattacttgtagaaagctgagaataaagagggaaaaaacatgtgatgtttttaatgcaacagtatttaataaaatcttgaattatgtttctaaccaaatgccatatgagtctcgatactcaaatccatgagcacagctattcgaatagattcattttcactttactgcagtaaatgtacgttttacccgtagtccataactttccaataatcattagcttagtcatggcccagtatttggttactaacaatagtgacacatgttccatgaactctagtccccatgtgctctgaacatgacgttattagcagcgagatgagttctagtgttcccgaggtttttagagagaactaattgtatgacaccatgttatcgcaatcatggttcacaaacaagtcgcgacatcaatgaatctcatatatttacatgtgcctcagtaaatagcacaattgccctgctcggcataagtttgcctcctgcgcgaggacttaaaaacacgaaccactacacagaggtaccacattgttaattaacataataactaggtctgtccccattctagaagctgcggtcgtacctgttcatttgacataagtacttggtgataattatatcgaccaggacagtactagccacccggaaatcaaccaattcctacgtactgtcccaatctaagttcattaaattttatgcatattctaactaagcatggctaagtaaggtctagcatatatctggcttgctatatgttcaggccttcattcaaaatcataaatgactaacccatataatagagatatagaatatatgacatttatgctcaaaggggacgaataataacttgccttgctccaacgcaaatatatccaagataggcaacctaattattcggtcctcgaaataccacatgttgccatccaaaagacaatagactctactaaggaagaggaagaatcaaattcaataaaagtcattgaataacaagaaaaatgataaaatggcgagaagggctaggtttagggtgtaaacatcttctttatatggtatagggattattgggctaatatttcacatgtaagttctatagagttggaggctagaggggattaagcaactactgtcgcctatatttcatgtgtgggcttggttgctcaaaggataggatgtatattgggtaattgaactggtttaactggtatatggctagtattggctggtggtcggtttagttgtatttgagctgattatggagtagggcagtatctcagctagggtttggttatttactagtcgttgctagagttgggtagcatgacgactaggtttggtatcatttctagccgatgtcgatagacagcatattggctagaagaataggaggtggtgcaggtttagtggggtggaagtgttactccgacaactatgagtggcgacagagcggctaggatcatacagagcttgagagctaactatgtggtgcgctgtggaggtcgaggaaatagtaaaactctgaccgctatacgtattgaggcgtggggtgccaggagcagcacttcgaccttaggtttggttttgccgggctttacaactaacggtccgacgtcggggtcagtagaccgcaggaatgtccccatggaaggcgtaaagttccaaccaacggcttttagtggctaaagggtattttggagtaaaaggagatatttaaaaagcaaatgacatttaaataaatcaaggaaattcaaataaaattataaaatagcacattgggtatcaaaatgtagcttttgaatttagatgaatttaggtccaagtttcatcagaatcggatctacggtttaggatatatgggcttctaaagaataggatttgaattaaatagataaaatgagaaaagtcactgtgcaggggacccacctgtcaggcttttctttttctttttctttttctttttccttctctccttcttcttcctcccgttccttcttttcttctattagtagccgagagggggagaaaggagaggtgagcggggcgctggccctccggtggccggaatgcggcgacgccggcggcatatcgtgttcccgctcgatgcgtactcagggaggtcagtggctggtagagggagtgagagagaaggccagaacggcgcagctaagagctcggctccagccagattgggtggtgacgatggtggcttaaagtgagggggaataaaagggggagatgggcaaaatgagttcgccggagggaggccaacatagtggcgcaaggaaaaggatagaaacgctacggtggaggagatcgaccgtcggcaacgacggccggagcccggacatgggaggagagagagagagctcaaggagctcggcttgtgtggagtaaaggggagggggtgccgggtatttataggcggtgagccggtgaaagcaactccaatagaatggctaaatggctggctaagttaaattttagcaagtatggaggaaaaatgccctccaacagcctctccatcctgttagctaagccatctggatggccaaatctcactcctcattggccaaacttggagagtcactttgcctggatggccccaccactccctctcccaccccatctctctctccctggcaagaaggcagcagaaccgcacgtcggcgacgacaaggaggagagaggcgccggagccagccacgcccgccgccgccgttgtccgcgccgttgcgtccccagccgcgcccgccgccactgccgtccccggccgcgcccgccaccgccaccgtccgcgtcgtccccggccgcgctcgccgccgctgtcgtccgctccgtccccagcagcacccgccgctgccccaccctttgctcatcgccgttgtgtcgggagtacgggaagagaaagaggaagagggagaggaagaatgggtatagaggccgacgcatgggtcccgctgtcatagactcaaaatagagaggatggatggagaggctgttggagtaaacaatcaatttgacttgacaaatgaaatagagagttggccaaatagacatttggagagtcaaatctagagaggctgttggagatgctctgagaagcggtgaatcaagtcggttgcagaggcggtcgtcgatttggtcacgacggcaatggcgtggaaaacaaaggagcgacaccggcctcgttctatggttggttggcgatggcggcgcgagcacgtggaagctgcgtctgagttggcggcggaggaggagggtaaggcacggcgtcggcggaggcgcaagctgtgggcgacgatggacgacggcggtcggcggcgcgagtcgtgggcggcagcgcccatggcgcacggcaacagcgctcacagagaggagagaggcggctgcctctcgggctgggccgatttgggccgaggaaataaagaaaggtctggcccaaaatgaataggaaatcctccgaatttctgtaggaaattttgaatagaatttgtatttggagaggatttgaataggaaggttggacaaaggaacttggacacaatatatatttggaaggaatttgctcagcacttcttggaagggatttgaatattcgaagaaagttaaagataggtttagaatcaaaggatgggtcgacaattaattccaataaaattggaatcgcttggtttaggttctagggcaatagtggagaatttcttggaccataattcataaaaatagaaagggttttcaaactaaatttgaataaaagaattttagtcgaaagaaggttttatattcaaaaataaaattccatcaagaaatacctcaatttaaccaaatatatttttaaatgaaaaacacaaaagagattaaataccacagaaggattttgtgcaagttagttttaggaggtccctctaattatactgtctaggaggtccctctaattatactgtcctaagtttaggaggttattaagaacataagaatcggcatgatgcaagaaaaatgacacattttcaggaagttataaacctacccccttaaataaatctcatcctttagatttctgatgagtccaaatagtagtgtgggaattatattctttctttggttcttcccaaaattccggatatctgactgattaatctgttggtgaacaacttcatgtttttatagtacacgtaattgtatgtactgggtaatagaaagctgtatatcacttgattcaacctcatctgatttaaagttcggaaatccaacattcggtagcttttcccagtagagacatgccatacggtatttttgtatgggattcaatgtttctagcacataaatatgtaatcgtcatacttgttgcggagttttattaagatcttcccgttcttcttactattggggtggtcggacttcttctcgtatcctcagaatagagctgataaatgatctttgtctgttcttggtggcttcaacattttctatcgaacattattttcttccaactatatagaaaatatagatagtatcattagaaggtgtttaaaaaataaaagggtaatcctagggtgatgcagctaggggcccctttcggagggccccggcccgcctaagatttcatatgtgggattctctctagctaaggaggaatattgcatatatgactcaaaactctaagtataaaagtagcttggggcctagcttgggtcccaatcataccccaaatatgccttccttgtaggttctaggtcctcagcaggaaggacgtagaaacatacaagacttatatcttaagagaatgaggtaaggtctgcctcgggcccggcctgagcttgggccgcgggctcaccttagcccgtacaactcacatattactcaaggaagaagagtgacgagacttgccaagcttgaaagcggtttgacttgggctcggccttgttctgggcctcgggctcaccttggtccttgtatagcttgcatcccttgaacgtgtagagatgtagcctagagggggggtgaataggctttcctaaaattttctcaacaattgcagcggttaaattgacagggcccggaacctcctggtgatgaacaccggaactttcgggcaggatgagtagcccgaaacttccggagttcttgagctaggaacttccgggcagtagagataaattaaaactgagatgaaaaaacaggtcctagcaaggaaagtttaggcacacagaggaacaagatgaagatcgcagaatatcagcagattcacacaaagatcatgcacaagagagacaaagacgattttttcccgaagttcggatcacacgaatcctactctccgttgaggtgctccaaagaaccgggtctcgattaaccccttgcctcacttatacaaagatttcagaagaggtccacagccttcaacttaacacttctaggtcattttctagaattgagtgaccaccaagatcaaactcaaaaatccttctagaaaaggccacaagtgcaagttgctctacctaggacaacctctgaaaactcagcacaagaatctttactcacttacctcgtttccttgcggaggtgaggaaaaccttcacaaactttcccgggacatccacaagatctttggaagctcacgggcgacacctaaccgtctaggagaagatctccaagagtaataagcccaagtgacagcccacaaggtatctaaagtgctcaatcaaaacctatcttcaagccatctccaaaacactcctacactctcatctaatctctcaatctcacaagataggctctagatttgagtggagaaagcaaatgaagcttgggagtggctagaaaaccctagaacatgaaagaactgaagtggaatggccaaagggtaccctgggacgaaatccatatatataacggctaggtgacgtcatctagccgttattcacaagtttgaattggaaacctgccaggaggttccgagcaaaagtgccaggaacttccgggcagcacttaggaaattttttacaaataaacggcgcccggaagttccggccagaacctccgggtagccctctctgtcccggggagaaaatcatttttcaaaaacgattacaaaaatcttttgactcatggatatgactaagagcactttgtataccctagaaccacacttgaaacccctcttaatagtacggattttcctaaactcaatttcgaaagtgaaaaacctagtctaatcaccttcggtgattttcgcacttaggaacatttgaattggggggtctccttgcattcttagccatcacaacttgctttgggactaaactcctgtgaataaacttgataaacacgttagtcccctttaaccaccttgtcattaatcaccaaaacccactagggggtttaagtgcatcttcatccctctgcctagaggggtgtcaaaacgtacaaggcgcataatcttggaatattcttccatcaaccataccctctagaagctcatctaagaataatcaaccttctttgagcgcgggaggacaagacctcagaaactaccgggaagttgggcgtgctccatagccagctatgaggcagcacgcctcgccataaatgaaacaggtttatggggggatcctcggccagtctggagttgaaagggcatggacaagacgccaacgctaagttactttggacagtggcgcttgggacacgcgtcgcacatgccccgcgccacctgatttagccaaacgggcagagaagcaaccgtggcattgtttcgggtaggtcgggccttatcgggcccaccacgcaccacgtggtgaacacactggcggaggcccaaccatctaagacggagcccggagcccggggtaatatgaactgtaagacttgaagggtttcttgagaactgcgttagggaagcagccaacaacaacaagacggctgattagacaagactaagagtagatttctaatgatgcgagcccctccttagactataaaaggaaggggactagatacggatgaagggttgcattcttctaggtcagaactattgctttgtagcctaaaaatgcttcctttgtacttagctgatctagagaagacaatgaacaccaacacatgactagggtattacacctccgggtggcttgaacctgtataacctcctgcctctctcttctcgtgaggcggttgggccccacgaatccatcacgatcgcagataccgcgcacctcatgccgactaacccccagtcgaatcttcactctcggggattccccgctgtccgagggactgccccctcgacagttacctcttaatttagtggtgtacgtcatatatgaaactaggtgattccccacgttttgttgcagaatttcctaactaacttataataactttttaataatagagctaaaagtaaaaaatatattagttattaacaacaaatacaactggtttgtcaaactatgttcaaagaaaaatacattgtagatgaaatatgatatcccacactttgattatatggataaatatttattaagtattataaaaatgatcgatatatatatgttaaaaatattgtgtgaaggaagatgattggatgctgatttatagatgatgttaaatgcttgcataaattttgtatataattattgcttgtggatgatgcggtggcatgtttgtatattgagctttataattaatgggttacaactctataagataggattagatgcgatagtcacgtcttctataaaacttgtcataaaaagaacacatccagttgtaattttttctctacctttaattagctttgccataaacgacgtgggagtattattattcaacgctgagtcaaactaatgaagtgagctcccataaccacaaccacagaagaagagccccccccccccccgtttcctttttctcggacacggcgaccacctgacgacgcctactatttccgcgtcgcgtcgtcggcccgtctccgtctccgtctccctccccccgcatccccgggcggaggaggccaccccaccgccaccccgttcctttcccccccttcttcccttcctccctcccttcccccaccttttccgctcccccaattaacctcaagctcacccgcggaggcggaggcggagccggaggaggaggagggaagggccggtggcataaggcagcagcgattcttgccgccgccgccgcccgccgccgcactcccacgatggaccgcccgcccgcgccagcgccagcggtggcgctgctcctcgtcgtcgtcgtcgtcgcggcggcggtaatgctggcggcggtggagggagcgggggcggaagcaacaggggtgttccacgtgcgccgcagcctccccgccggtggtgcgggggcggcggcggaggcgtaccgagcgcacgacgggagccgcagggggaggctcctcgctgccgccgacatccccctcggcggcctcggcctccccaccgacaccgggtacgcggcgccacctccctccccttcgcttggcctctgctgctgccgtgcttgcttgcttgcttggctgatttggtgctctctcgtctcgccgcaggctgtactacacggagatcgggatcgggacgccgaccaagcggtactacgtgcaggtggacaccggcagcgacatcctctgggtgaactgcatctcctgcgatcgatgcccacgcaagagcggcctcggggtaacacaccatctcgttttcttttcttcttcttttagatttttggattctctcaactgtgggcaaaaccgtgcgttgcgtgcagctagagctgacgctgtatgaccccaaggactcgtctactgggagcaaggtttcgtgcgatcaggggttctgcgccgccacctacgggggcttgctgcccgggtgcaccaccagcttgccctgtgagtacagcgtcacgtatggtgacggtagctccaccacagggtacttcgtgtccgacctcctgcagtttgatcaggtgtccggggatgggcagacacgacccgccaactccaccgtcacatttgggtcagtcgtgctctgtccctgtcttaccgctgtttttgtatgagctaccttcgaatgatctactgttacacttagtattgtttcttagaaatgacatcacgttatgaaatctgcatgtgaattccagatagcttatgtctgtcacacgatgtataatgaaacttccctatagttaaggaaaaaaaaaccatgaaactgtttcaattcatcgggtggcaatgcctctggcctctaggtagaatttgtatgtagtaatgttttgttggaaaatgcttacatgattcctcccatgtgccagaggttgcgaatattttcctaactattttgtggctatgttttgttttatataaggtgactaagactcaatagccatgttctttgaagaggggtttttttattgcataatctgccattaagaaaggcatcaaatattgtcttggtgtaaaaaatattcattacatgctcttatgaagaatgtggcaatggagtaagcaaaattaacaattaacatggatgcatgacagtaacagaagtgtacagcaatgtggaatttagtaatcaatttagttatatgtgttgaagatgccaatgcaaataaatgcactcctgtcctttgtaggtgtggttctcagcaaggtggggatttaggcagttcaaaccaagcccttgatggaattatagggttcggtcaatcaaatacgtcaatgctatcacagttatctgctgcagggaaggtgaagaagatatttgctcattgtttggatactataaacggcggtggaattttcgctattggaaatgtggtgcaaccaaaagtcaaaacaacaccattggtgcccaatatgtatgtcaacgttgtaccaacacctcattattctgtttgctttttgctcatagtgaaatttcttaagctactttaaatataaatttttgactctatttgaacaattagttagcgaaacatggttttggagatttatcacagttcagtattagctattaagagacatattatatattttaggagattcatcacatcatgtttcaaaccctcaaaaggacatagaaatgtgatatttccctctgcatcattgcattatcttcttatcaaggacgcatggtccaaatctgatgcactatgtgaaacataattgtcctaattaaacgctctactttttgttcatccgtaactgcaatgtagcgtgagctgtccaattagttgaggttttctaaagtcaagcattcaaggttttttgagaaacgctcaggggtcttccggctagctccacaaggtggtgggctagacgacatgggttcgaagcctcaccccttctaattatttaatattaggtccttccctaat

SEQ ID NO: 29715 - DNA, 3284 bp, Oryza sativa
tattagctattaagagacatattatatattttaggagattcatcacatcatgtttcaaaccctcaaaaggacatagaaatgtgatatttccctctgcatcattgcattatcttcttatcaaggacgcatggtccaaatctgatgcactatgtgaaacataattgtcctaattaaacgctctactttttgttcatccgtaactgcaatgtagcgtgagctgtccaattagttgaggttttctaaagtcaagcattcaaggttttttgagaaacgctcaggggtcttccggctagctccacaaggtggtgggctagacgacatgggttcgaagcctcaccccttctaattatttaatattaggtccttccctaatattcgcgtcttttttttgggtcaaatttaatccagtgaaattaccatctgccttgaactattgagttgagcacttagggaatgaaactattcggaatatacgaataacagcttcaggaagagataatcgttagaggaattttgtatgctagctgaatgcctgtgctttgctacgaatagaaaatatattataatattgtgaaataaatattttttttccatgaaacgtgttacccatcctcctatgctatagggaatattcacctcactttgttttttatgtggctatccatttatggttgtgttttaatattgagaaattcaagggggtaatttgtaaaatttacaatggaagtagatggatggcagattcactgccaccaccactatcttcttttaaggtagtatatagattacctagtacaaatacctcacactggctgtcagcacagtgtagataacaggaacattgcatgctttattttgaaaaaaagtccattttactccgtcaaactatttcgttgaatcacttaacctataaactattttttggctcatcttccccctaaacttttaaaaatgcttcactttactgcttaatagcatttcccttctttgtttctctttgtactacttatattttaagctgaaattttttagagccatagatggctgtattatcaaagttccaaaatatttttaaattcttttcaagactgtttgcttgaagttaaaatctcaacatttaaattagtcttacatgccttcaatctatgtaaacagtgataaagaaaatcgaaaaaatattcataggtactccttccattccaaaatcagaaattccaaattgattatcatataaccatggtcccttcgtttgacgtgtagtatcattgcatttatgcatgcaaattgagtttgcatgcatgcaggtaggagggtagtaaaggtcccgtttcttgtgtatggtggaagttaaagtgtgcatgtttcttgatttttttctcgtaccacagtcacattaaatgaaatataagaaagttaatacttccttggtcttgatgaaaaaaacttatttgataattaatatggaatagagggagtaagttgtaatgcatctaacaacactaccaaatttcagtgcaaaatacaactttgagaaacaaaaaagagatactattagggagtaaggtgaaccgttttcaatagttcggggtgtaaaatgagctgaaaaatagtttaggggggttaagtgctccagtgaaatagttcgggggagtaaaattgattcttttcttttattattgtcatccctttcttttgactctggctcaaattgccatttccttttggaactgatgaacataccaaataactgtaaatcttgacatagatatcttcgaccttagatgtattgggttcatattttgtataatctctcgtactcatatgctgttagcatgattttcatttttatctgtaaaacttgatgtggaaaatgttgtgattctggtttataatatctactgctacaaatgttgagaagaaaatgatacatggtatgctgtagatgttgaagggatggaatcatgtgaaatttgtcgttgatttatttatctttgccgcagattgaaggatactattttggaattgcttgtcacctaactattttagctagaatttgttacttgatgtttttatggtggaaaggtggcttacctttgtagcatgcacatctcatgtgcagaataaatcaatgtgtggtgcagagatgtctttttgccagtatcctactctcttcttcatattttctcctggccagttcaacttaattctattgtctcatttatgaatctctaataacctctttccatggcagttactgatttttagggaatgtacacttttttggcagatagggtacatatgtacctgtgatatgtattgcatgtctgcaactggtttccttttgttccatttacaccattctaatacctatccatgattctactactcaggccacactacaatgtaaacctcaagtcaattgatgttggtggtactgcactaaagcttccgtcacatatgtttgatacaggcgaaaagaagggtaccataattgatagtggtacgaccttaacataccttccggagatagtttacaaggaaataatgcttgcggtatgaaatgagccctgcatttgttttcccatgttatggaggattgcatgcatgcgttctctttacatgttatatttctcaaccaatttcaggtatttgccaagcataaggatataaccttccataatgttcaagaattcctgtgtttccagtatgttgggaggtatactttacaacatactccatccgtttcgcaatgtaagactttctagtattgcctacatacatatagatgtaaatgaacctaaacacatacgtatgtctagattcattaacatctaaatgaatgtgggcaatgctagaaagtcttacattgtgaaacggaggaagtagtatctagctatattgttgagcagcaaaattgttccataatgttatgttcgtgactttcaaataagttgggagaagaatgaattatgagcccaactacaattttattcgttttttcttgaatacgcaggagtgcaattttatttgttacatttctaactatatatttttattcttctatgcagagtggatgatgactttccaaagatcactttccattttgagaatgatcttcctttgaatgtgtatccacacgattacttcttcgaaaatggggtaatgtaacatctcactccagtgatttggtcacctattggtatttctttgccaacttagttgttacaacttatgacacctataaggttataacatgttaaactggaatatgaaatggattcaga

SEQ ID NO: 29716 - DNA, 5258 bp, Oryza sativa
tatttgcaattttgcacactatttaaagaggattaaatttggtttagtaccatctcaaccgctggtgagtcttaaaataccattgctaacatgaggggttttaaaatactataggtataaaattttggagggtggcattgccctaagctttgcagtccatggcaattgttaacatccaattaggacagagggatttcctgaaatgacgttatcactcctacatcctccttttcttcttctttgtaatttgtgtgatattgcacatgaccttaaaaagggggacatgtccatgcactacttacgtggtgaaagtggctatacatggttgaacccacatcttgctccctggtaaacaaaaaatgagggtagattggccattttacacattttcaacggaaaatggactgtgctggtgttttccaaatctgttcactttacaatggtattctgtagccactcttgtttacgattgtattttgcaacttgcaacaactgtgaaggcgatgacaatgttgcagattttcatatccaaattaattttaaactgtaaacctgtacaaaaacatggttcccttgcatactagttgcattgctgtttgcatctctgttacctttttcccaattagtaatagtcattcccttgcatatgtttattttattttatttattatcccttcccttcttttccaattgttcatgtttaatattggcattctctgttctataagatgcattcagccattctctatgacagaaatatttggatcagggttaagggaacttctgaataaccccttcgaaaccctcatatttgattagcttatacaccaatattcttatgattgcctccagttcttaccctagactcagatattccaaataaaattctaagttatataaaatacaaaaaaagagggtaaaattgcctttgacatggtctcgctgagaagctggaactgaccatattccagttttcccccagaaccaagattgcaaaatgtggaattttttgtctgtctcacaaaaggaatttgtttagttatttgaacatttcatactacattttaaaatagaccctccaaggagttaatttcaaaactgaacaattttgccggccacgccatgggtagtgccatcctgcaacatgcttattgttaccacaacattgttggtgacatgggcaaaccattgccacaacaacacatggtacagttttgctgtgccaacactgatggcatgggcaaaaaaaaaggttctgttatggaaatgacttttctaaggaattatttttaaaacattaataagaaaaggttcaaaaaataaaagaaaatccctacagaaattgctatgggttaacagcatagtactatagcattgcaactgttctcatgggtggcttatacagttgtttgcttcaggataagatagtagttttcttgttagtgaagcattagtttccttggaaatgattaaaatgttaggccaaagcctttgtaacaaaggagcagtatattaatttagatcaagcaaaattcaataaatgaagaatctagtgctcttctcgttaatcaaagagccatatgtattgacagtataggaaagagttccttgctagcctgagcttttgggcttttactaatacacacattataatagaattgttaacacttgtcgcacataaatatttcaagagagttggttctcactcacttgaatggactgacctttggatgcatgtttcgccaggatctgaacctgcgttcaaaggcagatgcattttcaatcccacctgagtcagaaatgccaaaatatgtaacattctaatgactgctgtgtcttgaaaaattgcactaattgtgtcgtaggatgcataaatcagactctaaagctctgttgttttgtccctcttcccaactccattccctcgttttccacgcgcacgattcctacactgttaaacagcgtgtttttttttaaaaaatatattctttttagataatggaattaaaaatccggcctttgcttcaacgaacctacagccaattattacaatattctctcaaaaagagcaaacactcaagcaacaaaaataacttaaaaaaataaagccaacacataaggagtaaacaatttctataggaaagttgtttaaaaaaatcatattaatccatttttcaaaaaaagctaatacttaattaattatatgctaatgagtcgctccactttacgtgcgtgagttattagttcccatcctcatatgccgaacgtagcctaaggctgtgttctttcccctcctttccctacttaccccctcgttttctgcacgcatgcttcccaaaccgctaaatggtgtgttttttgcaaaatttttctatacgaaggttgcttttagaaaaatgtattaattcatttttcaaaaaaaaggactaatacttaattaatcatgcgctaatgagtcgctccattctgcatgtcggagggattagttcccatctccaaccaacaaacgcagcctaaacctgccacattcagtggttcaaagtctaattgttccaatcaacgatcatgatagttaatttgaatttaatggagtactatagtttgaaatgatactataccgttgcattcagtcttgtagtagttgttatgttctgtatataacatcataatatgcaggttcacagatatatgttcatgacacttagatttgtgatttttttttttgtatttaagcaggataacttatattgtgttggattccaaaatggtggattacaatcaaaggatgggaagggtatggtgcttttgggaggtttgtcttgctcagcacatgcaaatcctttactcaatgttatatatctgatgtttttttagaactgttatatatatgatgttcgtgctattacctgttttttttccagatctggtcctttcaaataagttagttgtctatgacctggaaaatcaagtcattggctggactgagtacaactgtaagtttaacacattcaaatttgattgttatgagttcattccatagtactttacatgtttagtctattgttcttgctaatgtcttgacaatccgaaaatatatggcaccaaagttggattgagtttcacttcataaggaaaatgggacgctggaaccatgttatactaagcgttgttcagtaaaagagctttgcatgttgcacgcattgcgtgctccaagttctgaacatcttagtcatgggatggaatatgcaacttttagctacaaacatattctgggatggatgaagtacctaacttgtgtgtcataattggcttgtccgctctttgcaggttcctctagcattaaaattaaggatgaacagacaggggcaacatacactgttgacgctcacaacatctcctcaggatggaggtttcattggcagaagcatttggctgtgttgctggtaacaatggtgtacagctatctaatattctaactccggtgtatgtctcgactctagtggaaattcatttgatttaaattcttttcaccaaagagggaaaaagggtaggggtgtttagatggtgttctctgaccactcgagagaactgaaaaggaaacattgtacgctacacaatgtacccgagtgtgtagtgtaatgtaatgtaatgatgtggtgactggtgagaaaatactatggctgaatgtgcttttgggaggttctaggaatgatatcaggcccccatcttttgaatatactctgataatatgccgtacagcatattaaggaaaaaaataatttatatttttttagataatgataatttatatgtaaaacttttataaacttgtacatagcgatttaaaagctaactagcaataattaaatctaactagcaataatcacgagctatgctgcgcgcgtgcataagagactaactatatttgatagccagctagtattttttgtcacgaatatctataatcacacatatttcggtactgagcaaaccaaattttgttcaaattgtaataacataatgcgctaaaagatcaagttaatgtacaatgaggccttgtaataattagaaaacatctattagctagtagatctctatacgggcataaccccacagattgcacttaatgggcacgccaacaacaaaccatctattagatgaactttcatacatgcatatctccacatatatggaatctgatggcatgttaacgctagttctctaaacacttggtaaaactgtctgtacatccgacccttaatttgttctgcaatctttactatccattatttgtgctgcttttgggtacctaattaccaacaaagaatgatgtcagtcccagaacacaaggaaactaaataaaatacatctattggtatcatctatacgaagaaggggaaccaagaagtaaaactggatgtagtagaagtgcataatataaccaatataaggtagaaaaaaagaacatttatgggtcctcagacaactttgatgattataatagttgagaaaagtatgcatttgactaatcactaattattgaaacatatgactctactatatgcattcctaaagaggtaaactatatccaaattcccaaaaatcttggtaaacatgaatcagagaccatgccggatgacaattttagccctgtatgtatgccattcataaggcatagctgagaaaagtatgaccatcttcattgcaacatattcagatcatgtcttgagaaaattaaaataaactaagaaaatgagttaatatcgatgatcaatagtctattaactttatcttgttacctggtttatgatttagctcagaacccatcacattatctcaacagcaaaataagttgatcaatatactccatgttcatgcttttcaacttttcgttagcggcatgaaatttcgataataagtttagaactaatacatcatgtggagaagcatcattgatgcaaaagaatacaaatgtgcttaattatggcgaatcatgtgtagaagacaaatttatattgaatgtttttttttcaaaagaaaaggaataatatatgtgaccacgtttaatacttactgataaactgagcataccaatttataagaataaaagtacctgtggggtaatgaagtcattgatctaacggtaaaaatgaatggcattgatctgttggggtgacttcgatgtctcttatcctgtcattgaaagaaaaccatgctatagaatcagtagcaccatttttaagattagggtcagatat

SEQ ID NO: 29717 - DNA, 5172 bp, Oryza sativa
  unsure (1)..(5172): unsure at all n locations
ggcagaatggaggccaaaagcctcagcaagttagagtagtaggatttattagctctgtgtactgtagataagtaccactaaagagaaggcactgggaagggaaattatcacaagtgccatgttgtaccgataattcattgtgcctcaccatcaggtacatgtacatatggaacttggaacctctttgcttgtttttagtggcaaaatggacagctccatcttacttgcacactcattcagaaacaaacattgattcattccgccagcactacaccggagctgaagagcgcgccgccatgccaattcggagccggaaaagagcacgccgncgncacgccatgccgctccggagacgcggccacgagccgccggtggcaagggtggaggccgaggcgttgagcaagttcaccttcaccttcacctccacctccacgacactatcttcttcctttcccgcgcgctagtctccctcgataactctctgccctgaactgagttcaccagctcaagccaacgtggtggcccaaaagtattgatacccggtccaaactgtataagaaggtaatcatacttggtgctaactgaaaaggtagagttagacctggttcatggtgaaactttggccaaaaaatcaggcccaaagtgaaatttactctaaaataaataaatgcatgaagtaatgctacctatccatcttttatattatcatgtgttgttttttacaataatatgatttattacttgtggaaagagttaaaaatttacgtatatttgttacactattttttatgatcataatcacttgttaagctggccccctcgtgttaaaattctggcttcgccgttgcctaaaaattttatacatgaaaactctctatatataaagttatatatataaactttatatatgaaaacttaataaatagaaacattaggtatataaactttatgcataaaaacagttcgaccatctgcatgggagggagagagagaagagctctcagcaacggctagacacgagtagtggatgtcgatgatggacgtctcgttatctcaatcggcatgtggaaaacaacaacaaaatgccaggaaatcaaatagcggtcagaaattaataatcaatctaataaaaattaaattggaactgccaacccgaatagtgcggcgtggcttggatcgtgagtgatggccggtgacacgccgtgtgcgtcgatcagcttggctggggcgattcaaaaaaattaaccaccaccgcatgtgtgtatctgcccctataggcgatggctatcttgatgccgtcatcagcagtagccggcggatctcatcatcagctgaattggatcttggagcgaagacggtgccgacgactcctgagattagttccatcgcacttgtcgatgggaaactcaacacagcctctacctgacacgtcaactgtagaaactggaattcggcaatatgaaaaggggtagcgcacaagacctaaaagtggatggatgcggagacaatgatttaaacatgtttataccctctcattgagaggtattgatctgacgatcgggttgtgaataccccctaaggggcgtcctgccctccttatataggtgaaggagcagtcttataagatagaaacttattcacttacggtttaagtttcctatatctaatccacaaacttaacaaactaggattacaagtcatttcttgatacacaagaaaacataatacccaagtcctagtcttgtacgtattctatatacattatctatcccctgtaaccagttggatagcccagccgagtgaatatgtggtaaccataatctccaaaaaaaatgaaatgtagttttgatcttgattcattccctagggccaaaggccttaatatgtagcttacaattcaggcgattacatccagctgtacaggtaaaagtaagaagaaataatggaaacaatgagctgcatgatttcagctgaaaataacaacaggtaatcactacagttgtcctggtgtagtgacctccgcctgatctccttcgcttttctctccatcgttgatagtcgtctgatcctcataagtgtacccatcaaatcgttatcccagctgaagcttcctctgcttcccatctataacttcagtcctaagtctgaactccatttcagttcacagctcctgacaatacccttccctcgcaagaaccttgtcctcaaggttcaaaagtaggaaatgctgcttggatgtatgaggtagcctcagcaagagttaaattctgcttaagaattaaccattgtgttactgaagcatcattcctgggaaccgagcttcttttataaccatcctatgacaattgtgaagtcggttggttaacacccctaaccattattggcattgaatgagaagttgccatctgaagggccaagatgagggggccaaaagaggtttggtcaactctctagtcccacctatcggccactccttcggctgggatactgactggagggccctctacatgttgcaccatggattgactcatttgtagtcggttttgattgacacgtggggcctccaatcattgtgatctcttctgattggctggtagtgtgttcttcatatggtgggtggttgttggtatttcttacgaccagagataaatctgcaagtgcatgaaatactgctgtagcacttcaccttcgggtaaccccaaaaggatagcaaacttagggaacgtgtttaatctacctaaggctaagactatatccaaggactacaactattggtagctagctaggctagagaggactttctacatgttttagttatctaagctaagtaaaggtaattttctatccgttgctttgggcaccgaccgctgctggtctgccagcatggttccggctatagttgtatgatatatccgaacatggaggattactaggacgggattcagggctgtcaccccctaccggctacctcttacaaatccgtgggatacacaacaaacaaagataatctctaacctagacatcacgtctaagttattaattactaatctaagggcctgtttggcacagctccagctccagctccacctctcctggagctggagctcagccaaacagtttcagctccacctaaaatgggagcggagctgggtggagctctctcacagaatgaactagagaggtggagttgggtttaggcagctccacaactccactccagacccaacttctggagctaaatttaggagttggagctctaccaaacagactctaatactttcgcaggaactttcccctttatccagagtcttagtactagagcacttagtacaaatactaaacaatgaacccgcaaagatggaaatctatctcacttagactaagtaattaaataacaaaagaaatgatcccaaatgcttacttaagagaagaagtttctccgaatctagagcagagtgtaccgacagctccggtactcctccagaattcctcctagaaagctacacttaccgaggtagaagtcggagagagcaccaaacttccgggcactcctccggagcttttctcactctctacctattttctaatgtacaaaagatataatagagcctcttgtaatttacctcaaagttgtgtgtattggaatgagagcctctcctccttttataggctccaaatgacggttatggccatgaaaaatgaccaaaataccctccaacagtcattggggagtaatcagggccgtccacgtggacacagatggcgggaggcgctaggaatggtttggccaaacccaaaaatactcctcctggcctctccttcggctaggacgttgtttatttgggccccaacatcatgtactatgatttggcccaattctaagtggttttgattgacatataggcccttcaatctgtgtaaacgcgtcctgatggtgcggaggtgcattttgtcgcatgacgggtgtgttttctccttaaaacacctgcatagacatatttcaccaataatagtggaaatgattagtaataatccctatcactaagttggataccatattttatttcattatatgcaggtgttaacgatcagatattatgatttaaggaccgtcaacaacacccccacacttaacctttgctcgtcccgagtgaaggctatggactctacaataggttataacttcattactaataattatgcaaacaaactattcaaagccatacctgtacttgtgagtctttgtagtgtctaccatgcgatcctgggcaattgagaaatggaacaatcttgattcaagttactctaacttttcatgaagaacaacttgaggtttttcaagtaactcaaaattataactttgctttgcttctcaattaattctctcgatcattcaatgtgtatgattcctcacaaaggcttatgattgtgtcttttcattttctaccatctaataaggcttatgtggagctcagggtatggaaaagagtagagcattacttgcatcacatatattgcaaagtcaaataatggatccacggaaatacaagacataccttctagtcaagaatgtgcatgtgtatgtgtatgctaaatttgtgggtggaaaaaaggataatactactactaataataataactccttttgtatacctactcatcctttagcatggcaatcttttttttcttttctttctcttttttcccttttaatcatcatgatgctccatactcatgtgagcaacactttttatttctttctttttgcataggcatgcctctctctgtttttttgttgaaagaactttggagcaagagacataaatgacatgtagtatttattttatggactatggatgaaatgaatgaaaaatgagaaatattaacttccagtagaagtcaagcataggtgggtgtatgtgatcttgacaatgaaagtatgaaaagtatgtcacaagggttacaatatttgacaacgctcagtgtaataacaagcagcgtatgtagcaagctaataatgaatgatcaacctatatatatgtatatatatgtatatacatatatatatgtatatacatatatatatatatatatatatatatatatatatatatatatatatatatatatatatatatatatatatggggcaacatatcctatgcacacagg

SEQ ID NO: 29718 - DNA, 2575 bp, Oryza sativa
catagtatgggcatcgtcggtgctaggatatacgcgagactgaggtaaaagagatggagacgaggatttttatacagattcgggcccctgaactgtcaggtaataaccctacatcctgttggccggagccggagttacttttattcaccataatcacaccagtacaatatgtgaggtagcctatctaactgttgtcgacatggcggtctgaagatttgtctcgtagtcgacaacagggtaaccttgctcctcgagctcgcgcccgacgaaatcagagacagtgttagatccctacggacggcctctgaaggtactggatagggttgatccaggcgtatctctgatgtcgatatccggcggcttgtcttggcgtatgttggcttgtatgctgtggcttctgttgttccgtatattgttgtaggtgtgttgattgtggtggtcgtcgattgtgttgtccgtgtcccctctcctcctagggggccatatatttatacctataggtgtctccttgtccaagtagaactagagaaaccaatatggatacaatccgagtagtccttgtcgtttccatgtagaactctggttgtcttttcttaatccggaactcttctatatccccaggtttgtttcgtataggacatggtatgtggtgggtcctgccgagatgtagtcgactactattaggtatgtggtatccataaccctgacaatagcccccgacttcaatgcaaatgaacaaattcatattctcgaccgctcactatagagtaactgttatcgagctcaagtgaccgttctcggtgagttcagagataatgttagacttcctttgtcagcctcgtgcgggcacctaaagggtttgtttgagtcaatctccgacgtcaaccaagaaagtacatagcgtacgactaagtctcccatcttgctgtaatcgagaatttggattaaagtcaagaaattttatctcggcgggtacaccatctcttcattccgtattccttgtcgagatccagcaaccgttctcgagcgatcgagaaggcgtagagtctgcgacggaaccttgtcaacattggtcgtactcgccttagtcgatcttggtgtagaaccatagagacatggagccttcgtcaatgtcgaataggattttcctgaaatcaatactcagaaaagaatattagatagaaatagcccccgagcgaatgcccaaagggtgacatgttataatatatatggtaaattgaaaatgaattaaatttatcaaccaatgttttgtgtatgagcgtcttccctcttaccgacttcgatcagtcagtttgtagagttatatactctccctagcccccagccttgtcgtcggagaatcgttctcggaggagaaggctcttggacctttgacctgccttggttgaacaagcactgatcctagcccccagccatgaagttggaaaactcaatttccgattacacgacttggttaatacgcacggcgagaactcttacacgactagatcttacatggtcttttgtctctacaggatccgacaaggccttatcggctctgggcgtccccagccgaagttcccttaagttcctcggaggccttgtcaagacggcgtaaagggacagtaggataggtttcaacgctaggtgtcgtcatggtaagggatctctgggtaaaacatttggcgatagtgtgtacctgatatcaactttgttgaagtagaggtagtaggagaattgctacaccgctggtcgaggaccaggtagtagtcgtaactcgaccactagaagtggaaatagtgggagaatcgctacaccgctggtcgagaaccaggaagtagtcataactcgaccactagaagtggaagtagtgggagaaacgctacatcgctggtcgaggaccaggaagtagttgtaactcgaccacttaaagtggaagtagtgggagaaacgctacatcgctggtcgaggaccatgcagtagtcgtaactcgaccacttaaagtggaagtagggggagaaacgctacatcgctggtcgaggaccaggcagtagtcgtaactcgaccacttaaagtgaaagtagtggaagagacgctacatcgctggtcgaggaccaggcagtagtcgtaactcgaccacttaaagtggaagtagtgggagaaacgctacatcgctggtcgaggagcaggcagtagttgtaacttgaacacttaaagtgaggcgagagagatcactacgttttactggttcgagaaccaggagtaggagtcttttaatcacctataggggcgctaaagttggtttattacatgtgcatatcatgtggccagcatgactcacatacccaacttacagcatatccggatgtccgttcgcaatcatgtcgggtgatcaagccgacggcgttcgcgaggaattatccgttaacaaccttttctcgagtagtccagcgatggccggtgctatgagataggtcgtcggtcttcgttggcaggttgggtgcgataacttcgcatttgtcgagaatgttctcgataatggagtgtactcgaccataacctaatcgagtgctca

SEQ ID NO: 29719 - DNA, 13815 bp, Oryza sativa
gatatatgccggatatatctaccaaattagtagatcaattaaattaattaatctactaattaccttgtttgtcatgccgtgcgtccttagtagagattcatgcctgcggtagattaggacgtggattaatatatcaccaggatcatgctgactgtgtacgggttggacacggtgccgagttcggcctggattggccgcaccagccgatgtcgcgggcggagggcctgatcagtagctcaaaccgatcccacatgccgtcatcattggggtgactctccacggcgacgatttcctgaagcttggtcgatcttatgagatcgaattgttgatgatgatgatttcgatctcatcgagggacatactccggtccggttagatctcctatagccgaagttgtcgagtagtatgttgtcggagaatccatctcttgaacccatctcgtcgaaatcctgaagcaccaaaatccccctacctggcgcgccactgtcgacgtttgatgtcgcaattctggtatttgcatagtatggggatcgtcggtgctaggatatacgcgagactgaggtaaaagagatggagacgaggatttttatacaggttcgggcccctgaactgtcaggtaataaccctacatcctgttggccggagccggagttgcttttattcaccataatcacaccagtactatatgtgggtagcctatctaactgttgtcgacatggcggtttgaaggtctgactcgtagtcgacaacagggtaaccttgctcctcgagctcgcgcccgacgaaatcagagacagtgctagatccctacggacggcctctgaaggtaccggatagagttgatccaggcgtatctctgatgtcgatatccggcggcttgtcttggcgtatgttggcttgtatgctgtggcttctgttgttccgtatattgtggtaggtgtgttgattgtggtggtcgtcgattgtgttgtccgtgtcccctctcctcctagggggtcttgtatttatactcataggtgtctccttgtccaagtagaattagggtaaccaatatggatacaatctaagtagttcttgtcgtttccatgtagaactcgggttgtctttccttatccggaactcctcctatatccgcaggttgttttcgtataggacatggtatgtggtgggtcctgccgagatgtagtcgactactattaggtatgtggtatccataaccctgacaattattaattgacagatggcttgcaatccttgcacgctttcaggggcgccggattcacctgatcttcagattgatccccatgagcctgaacgagcaacttgggaggatccactctaatcttgacatcagtgagtttatctgcgtctgtctcctgtgatcagcaaacaagggaaatgattatattggaggtcggaaaaaaaaaagaggtacggatcatgatgcatgaataaaattggaaaaaaaaaaaacccaagaatcgttttgatccgattcatcatctattattttctgcgcattttggaggtattcattctcatcttgcaagccatagtgattgacaaaagccacccaagcattttcaaactcctgtgctgtgcatcctttatcaaggacagagggcatccaatactttgcaaaatcctgtgatgtgtgtgcttgaccaaccttgagttcatctgatcgcatgtacgcagagtgcacatttgcttggactgaactgaaagtgtgccaacgacaacgttcgtcgctatacttccacaatccctgcttgatctcctggcttcgagctgcagtgttcatcttgtccatatgatctgtctgcatgaacataaatagaggaatatattgagtagtaccccagtagcgttgaacacatatcagaaaaacatggatagatggagcacatacctgaacgtcgtcgccgataagattcaacagtaggaactgaaaagccgaaattcttgttggtgacaaaaaccagaggatagaacgtatgagaagaacaaagtcatccggccctgatatttattgtcacctgtagtggcggccttgagttggtagggcggcaaaaattgaaaggaatcaccatgtataaagattgtatttatggatatagatacagctatgaaagtggtacctttcagaatatcatttcttaccatttatatgaatatctccattaagacctggatactgattgcataaatcagtatacagctggtgattttgtttcgtaaatcacatatacatctgatggacaataaaagagaatgaaatccatttcgatctatttcatgccaatttattattctactccaataacaaaattcgaatgttgcacatatacctgacgtatcagtatgataccatgggatgaatacctactgtctcagccatactatttgttaccttgttcctttgttagcttggggttataacatgattagatgttgggttagggattgcttagccatgcttagctcaactagcacataataggggaactacattaatgcatagatttcagattctagattggtgttggactataaccaccgctctggtgttggttaactaaaatatactaaatggtgcgctgtgggtgcatggttttgatggtcgcacccatggaaattaaggaccggttcgtgggatgtcctggaaaaacttaccatacttaccacaaaccagcatgggcaacggctgggcttgtagtgtagctttcctctagctgacgcatccaggcaagggtgagcgtgatggagttcggatgggccctgcgatagcctgtgcggctttcagattcacctaggcacgaaaggggactgcccgatgccttgcgaggagtgggggtgaaacctgaggtgtggtgtgtttggttagaggaggttatgcgaagggtcctgtcacggcctctttccggtatgttgtggtggcatgccggcgcacggaaacatgtcgtggggctgtgtcttttgggtacagttgtccatctctgatcagagtaaaactattcgaatagccgtgcccgtggttatgggcggtcaaccagattcaccgtgattagtctcaccctagcttagtctaatggaattgattagttcaggtggttggttgggcctgttgcaatgcggtgtagcgttggacaatggatggttaatattgattaattattacaactgttttactattttcaactactgtttataaatgctagctttatgcaaatgatcccctttagccttcctttggttatatattgcatcataccctccgttccggtatgacttgttgagtacagtgggtagtactcagtcttgctctatctcccaaccctcagagttcgagtatgcgttagtggtggtttctcagaggagtaggcttcgtccgtgccgtcgaggatgcctatggagtggtgttcccgctgcaatccaagtcaaggcttagctccagttatctttaattttccgctttatttatgtaagacttttattatgtttgtaagacgtggatctgtatgtcaactttgttgtttgtgtaccttggccggtcctggacaggggttataatgcacattctgcttggaattctattcgagaatttctgggcgtgacaagttggtatcagagccgaccttggccgtaggacaagccaaatagaaaccctaagagccaaattgtatttgtttcgggaaaaatttgggtttgttccttgggtccatgggaaaaatcttgatcgctccttcaattgaaatttgttcaaatgaggtcagtctagggttttagtaaaattatttgagaattatttgacagtcagtcgggatttaatgggaggtatgcattaggtcttcactaaggaacatgggttgcaagttatttatgctcttattatcattgttattattattacgtatctaattcctcattatcttattgtaatgtatgtcagtcttatttattcgctctcatgcaaaaatgatctatgcacaaaattctgctcttattcgcttactttatttcagtcctttactgtttattttataattggatttgatcatacattgattctccatcctttgtcttctatagatggccgactgtcccctaaagcaccaaggtcagactatgggaggcttcgttgcagagttgtcccgcatggcgtttgtgattggttttccaagggagctgcagtacaccagcatccaccctcttagtggcgagttcccacgtcaggtccgcttggagattcacggcatacactcctacctgcacaacatggaggtgacagcttgtgggggcacatttgagcatgcttgtgaggaggcctccctcaagatgatggcccatttgagggagcggcatgacggcaccctgaacaccaccgcctaccgcttccaccctcgccgcggttccagctccaacaccagcaccttcaagtcagcttggggagagaacgacgtcaccttcggccacatgagtgaggtgatggagggctacgacaagctgcacgccatgctccacaaggcaaccaagaggctcaacgaccagaagcttgtgaggatcgctgagttgcaggatgagaacggtcgcctcaagaaggaggtagccaggctgcacggatgctcaccgccaggaggagcccgcatccgcaccatgccaaggaagtcgaccatagctccagtgcgcattcagcttgcgcccaggaacccgccaccacctccacctccagcacctcccgcagctccggcgccagctccagctcctgctcccgtgccagctccagcatccgccctctccttcgtgccagcttcagcctacaggggtccagcaggtggcagtggaggatggctgccagcttctcccagtggtggtcgtgtgatcatcagcagttccagctctgaggcaggcagcggcgacacctaccagctatatatgctgattttctttctacagaagtatatactggactctgtatgtactgcttttttctatggagtgctaatatgctgaatttttctatggtcgggtatatactgaactttgttacacaaaagtatatactgcattttccatagatatgctagattttttcaatagagcggcacatactgtcttttctaacaacgaaagagtagtaacatacttaaaaaaaaagaatagtatgtatccccccccaaaaaaaaaaaagaaaagaacagtatatactccgacaaaaaaaatcagtatacactacaaatttagaaaaatggtatatactataaatctagaacaagtggtctctcctaatactctagaaataacggtatatatatactactagtttctgcctctctgctttccatctcgtattacatgtattgatgcgtcaaatattttcttattgatgttgatctaatattttaatattttcgtgtagaacggtcgccattaatttggagtgaggaaattcaaacaaagtactgtgttgaacgccttgaaacagaggaataggaaggtttgcttgttctgatcaactagtaatgccgagggagatcgaggtgtgacaccgtcgccgtccgccagggaatgtcatgggagagtgcggcgagatgtcgcccacctgcgcaagggatgggaacgctgccgatgagatttagtcgtcggcgtcggcgccgccgcctggacactagggtttttattttctactatttccttttgatatcgggaatgatggatttgtgcgatccgttcggtatggacgagtccatttattcaggataattaacaattacggaaattatttctttccacaaaaaccggaacgggttcgtgatgctgcgcctgttagcaggtatggggatactcatcatgcaggttgggatcaacggtggatgagagtaggagtacgtacacctgggagtatagaagcattttttttgaaacatatatatgcataatatatataaactattgttgacggtcattagcgatcagtttcgactgtcaatattactgagatagaggagaactagttatgcttgcattgcatatccatgttagaacaataatattccactagtatttggttcactaaccttttacagagaataatcataaagtggaagagaatcgacatcgaatcagacgataaatcaatcggacgatgtcgagaatcagacttgtatgaattggccaagaactcagaattgacacgatgaattaggccaaaattcacaagtttgcaatgagcaacagaacaggaggccacctgccgagtttgggccaggtgggcccagcccatggtttggccgaacctgccatggtgccgatggatgcagggtttgatggacggctgggattgatccccaatgtcggttggagggtattaccgaccattccaaccgtcataatcgtcattacctgcctataaaatgagctcactctcttcacttcaacatacacctcaagcaagagctctctcgtattctctcaagttagtttagtgttcttaagctagtggaataggaataaagtagaaatcggagtccggaagccttcggaagagttcgggtatggctctagtagctcttctcttctcttttgtaagttttttacttttattagaatactcttatttatacaattatggtatttgtcagggttgtggataccacatacctaatagtagttgactaaatctcggcaggacccaccacataccatgtcttatatggaaactgacctcggatatggagggagttccggataaggaaagacaactagagttctacatgtaaacgtcaaggactactcggattgtatccatattggttttcttagttctacttggacatggggacacctatgggtataaatataaggccccctaggaggagaggacacggaacaatagatcaagacacaagatcaacatacaagccaacatgcgccaagacaagacgccggatattgacttcaaagataagcatggctagtcccctacggtatctacggatactgtcaggagagacatagcgctgtctttgatctcgccggatgcggattcgaggaggaaggctaccctgttgtcgactacgagtcagcacttcagatcgccaagtcgacaacagttagataggctacctcaaatattatactggtgtgattatggtgcataagagcaacgaccggcttcagccaaccggagtagggttattacctgacaattcaggggcccgaacctgtataaaatcctcgcccccatctcttttacctcaatctcgcatatatcctagtaccaatgatccccatactatgcaaataccgtagtcgtgacatcaaacgtcgacagtattgaaatactttccgagtatatgaatgcgaattttacattatgttcgtgttatattgaatatactgctagcttatctgggagatgcgttggtacgggtataatgtttggttatgcaattactctatgtcatgaagatgatattagagtagtatctagtagtttaggcgtggtgtctagattacgggatattattatttacggttatatgctgcggatgagaggtgggccgatgatagtgatagctcagtacgggtattcctccgcgtgtatatatagtcctaagttaatttcccggggagggtactactccgcatttagccccggttgtatggtcatgacgggctgtcgtaaggaactcggcagtcaggggtggcttctcgaagtaccaggagggcatcggatagggggtattagctactatatcagataactaggatgtatatatactatgtatatttgaagtataggaatagattctctttctgttttcttcccacttagcttaaatattttagtatgagaatgagtagctccttgcttgtgtgtcactctaccctttggattttcttaacccctgcatagactatgattattacaagtaacatataaattattagtcaggttctctctactatgatttttccatgggattaaataaatacgatacccttggaatactctcgggtgaaatgctacaatgatatatctgtgtgcttgcggataaactctgtaaccataatataccaagagtatttttgcgccattgctaggaattatatttctagtaatgtcgttaagaaataccaacaacaatgcagcaacatggccatggaaataaaaaaaaatgaatcgatctttagtcccggttggtgttaccaaccgggactaaagatggctcaaccggccacgtggttgagcgatctttagtcccggactaaagatcgatctttacttccggttttttcacctcggactaaagatagcgatatttagttccggattggtgatcccagttggaaaaccgggactacatgggttacaaaccgggactaaagacggtttcttcaccagtgtagtggccagatttatatccattatctgaaaaaaacacacgtgcatttttctcaaccgcaaaaacccatgtagtttccagtttcctcgtactctctcccggcaataattggtgactgcttccacttttagctatttcctgttcacggttccccacatcttttgctagcatgcccctacccattcatattgaagctcatagaatagcccattgccagagatgaggaccagatgaggaaccaacaattaccatttaaaactccataaaatacaaaaagggaagggatagtacgcactttgctgaagagatggcagctcctttgttgttatcaacaatcattttggctctagtggtggtagcatcctctactcatggtaccatggccaatggggtattccaggtgcgccgcaaattccatatcgtggacggtgtgtacaaggggagcgacataggtgcattacaaacccatgatgagaaccgccatcgtcgccgtaaccttatggctgcagagctcccacttggtggcttcaacatcccatacggcactgggtatgcttcaatcatctctgcatttggtcatgtctgtgtttgcttggttggttggtttggttattagggttaaaaaatggatcttggcataggctatactacacggatatagggatcgggacacccgccgtgaagtactatgtgcagttggacaccggtagtaaggcattttgggttaatggcatctcctgcaagcaatgccctcacgagagcgacatattggtaggtttccttgtagtgtttctttagtttcagtcccttaatttgcttgcaaaattcttttgcaatttagggtttttattcattatagaagttgaaattctggattgtaatatgtttttgtttttgtcgtgggtacgtgtatttgcttgtgtgcagagaaagctgacattttatgaccctaggagctcagtaagttcaaaagaggtgaaatgtgacgatacaatatgcacttcgcgaccaccatgcaacatgaccttacgttgtccgtacatcacggggtacgctgatggtggcttaacaatgggcatccttttcactgatcttctgcactatcatcaactgtatgggaatgggcagactcagccaaccagcaccagtgtcacatttgggtgagttattaaagaaagagcactgctacacgtactatgtttttcttactaaatttttactaacaatcatctcaactgtttgattttgctaaatggaagttataaaaaatctagatacactcatagcatgacatatcaatgtattacaattcgtatgtgaaatttattgatttacaactgaagtgatctattgtaaaatgccattgataagcaatagttcaacaatatgttttccatacgtgcaatactctttcttttttaccatcacatcatggttaacctcaaattctgtctctagtttttacaaaatgaccaaaatatcattgagaacacacatatacccttgacagacttcttttattttttacagtgaccaaaacacctttgataactctgttaaaccctcgacagactttcgcgagtgcctgttgcagtttatggtgaaatgaactttccattagaggacaacaaaggccccttaatggttagttcacagcaatggagaaaaggtagaaaaataacatgtatgatggcataacatataactcatatttataaaatcgaaacacaataaccaaatctaccagagagttgtgaatggtacgaacaccaaaaaccaaaatggaataaaaataatcctctaaccttacagagtccacgatgaagtctggtgtgcaccggtctgaccgctctgatgctgtcggtctgaccggtgtagagtcgccggtccaatagccttgcttctccctttgcctgacactgctggtccaaccatctagaagtcacctgtgtgaccactgtgccgccgccggtcagacctcaaggatgctaccagtctaactaccgaaacaaagtaaaatacaaatcaaagaactctttagaagtaaatcaactttattgtttctaattgtgctcacaaagtgtaacaataacactcatttctcaacttttgactatactcaaaatttaggctaaacccttttttttttcaaaactgttatctcacagaatggtaccaagaggctcaacccctcttttatttataccttgaagtggctgcacaaagccacgaattcaacttggataagtagttctaatctcatagaaaacctacccgaacaagtatacaacttatcgctttacaaatcaaactccaatcttttcaaatttggattccttccaaatttgagtcatatttgttgatggcatttcatagagtcgagtggctgcatgttgatggcattttatagagtcgagcacttgcatgctgatggcacttacaatgttccttttcataccaaaggcattccattgcacaagtacacagtaggcaatcactgccggtctaacggttgctataggctagcagtgattaactatatataatgccggttcatgctggcttggatatttttttccctaccaacccatgtgtatgggctatgatagacctagcatctctgtcggttcagcaactggtagtgataggtgaggccaccactgctggatgacctcatctagttcaaaaactgatagtgatgcattagttatgaatcgatggtgatcggagtttccgtactggtattgttttattaaatctgaagcattattttactgcatcacatggcaacaattaaaccatacatatattttttgttcactattgtctataaggtgggtatgctgtattgattgtcttttattgtagatattctttttgagaagccatgctatataagtttgcccacttaggacctgcttgaaattgattattgactgtatttttttcatggattatctgctttgattatatggatagacaaaatattttcagaaatatattcaacagatagcttagaacaagtggtccaataagtatacatgcaatagaagaatgttcaattttagaggcgttgagcaaatccatggctataatccagcgaagtagcagaagagacatggcataagttaatgctcctgtggggggctaccattggatgttgcatcacacaacacactagttctttttcatatgaatggtattttattgcactagcacacatgagctaatcactaccacccatcactactggttgacatgcatagtgccaacaattattgactattaatgccatatcatgccagccgggttgggcatttaccaaatcctatgtgaattcactatgatagcctgagcatcgctgtcggttcggcccccggtagtgatagccgagatcactagtgtcggctggcctctgctggtttagaaattagcgtagatgccggtgatgggttttgtgtaagtatttttatttgcttttcatgtaaatctctgatgaactcatcacatgacaataaccggttatggcggttataggtatattttgatattttctatgccttgttctccataaggtgggcaggctgtattaattgtgttttattatagctgtgctatctaagaaggtgtgctatatatgttggcccactaaggccatgtttgaaacaaattattactagtttatttttgtggattacctacttgagaaacaatcttaacaaatggcttggaaagtaatctaacctatgcagtagaagaatattttttagcaaacatatttttagggacgtggagaaaatccgtgacaataattcgatgaaatggctcccctgtgcttctaggtgtggtttacaacaatctggaagtttaaacaattcagcagtagcgattgatggaattattggttttggcaattctaatcagactgcgctatcacaattggctgcagcagggaagacaaagaaaatattttctcattgccttgattccacaaatggaggtggaattttcgctataggagaagtggtggagccaaaagtaaaaacaacacctatagtaaagaataagtgagttaaccatgcactttattatgtttcttttatggtcacaatttaatttggctctactttaaatacatatatttttaccctggttatagcatcttccggtatacttgtttaagaagcatttatcaacccccctaaaataagatgcatttatccacttaaacatgaactgtgtcaagtggtacatctctggtacaaacgttgtgaaaaaaatgtatgtgttgttgttcttgagtgttcttattaggcacaatgtttcaaagttttgaatgcacatagctatgtgaaaatttatgttggctgtcttcaacatggactgaagggtgctcttaggctggaatcgcttgaaccttaaactataatttttaaaaaagctatttatatactttagtacatgatcttggctctccaccagtccctgttggatgttaggtttatgacaagtagggatatatgcatataatatcaatttgtattgtagtgcacgtatgccttcttacatgttgtaaccttttgagaatacatgtctttctgcgtgtaatccagactcgtggttccaacacaaagaccataaccaaccttgtttggttctattctcgtttccaccaaactaatgctattgtatccattttgaatctgtataataatcactggacccaaagcatggatttacaaatttgagggaatatgcatagttttttatagaaatacttatcatgtttatctgcatcttctgaaaattaaaagcaacaaggcatttggaacttttgagcccactcacacaccacgcacactaactcacatcaattcacgattctatcacatagtgaggtatatcaccttgtgaacctcaagtcgatcaatgttgctggcacaacacttcagcttcctgccaatatttttggaacgaccaaaacaaagggtacattcattgatagcggttcaaccttggtgtaccttccagagattatatattcagaactaatacttgcggtatggcaaaagtactgctattcttttctagtggtagaattgtttgcaattacgtttacatataactctcaaccaattgcaggtatttgccaagcatccggatataaccatgggtgctatgtataattttcaatgttttcattttcttggaaggtatactctataacacaaaatctagctatagtgcagagacattacattcaccaatggactaaataccagaagattcataggattcatattgagttctaattcaatcttttcaatgcctctgaattccgctttatccatcaaataaccccaatttgttggtactccgctaacattacccttgttttaatacccaa

SEQ ID NO: 29720 - DNA, 4887 bp, Oryza sativa
tacccttgttttaatacccaagtaccctatacatttgttgattgtgaggaaaaccagtaattctctaacaattcccattgggtcataacctaataaagaacgctgcctactcaaaccgaagctttgttatggacaattttaagtcttgaataatactctaaatgggtgaagttgcccaaattaccaaaaccttagagtaaaaataaaaataaaagaaacttttgcttttctatatgagtttcagacaaaatataaggtacgatggagaagcagtagtggaaattgttttcattatactatttactcggtaaaagacacataaactgctatttcatctgctacagcagcaaaacctatgtcaaaagtgcagtaagggtttatttagaggatttcctatttcttttcggattacttagactgctccatagttctgagggatggggtatattatatgcaacttagtcttcagatggtagaatataattattccattttactttgtgattattctaactatgttgttgttttcttgtgcagtgttgatgataaatttccaaagataactttccattttgagaatgatcttaccctggacgtgtatccatatgattaccttcttgaatatgaggtaacatgacatttcacccccatgctctaccaaagttggtataaaaatttgttcacaaattggtattgccttgtcttattacttctgacaacttaacacttcaaacttgtcacggccagaaaataccttttccgaatgctagtgtattaatccccgtcgtaggaaaatccggggacaccacaacagacttgatacaaaagacacatctttattaattatcacgatgatatttatattattacataggcacattaggcctatcaacaaaagaaaaacaacagcggactagaggacctatgactccatcttcacaagcgctcaacagtgctataagctaggactccacttaagacttcttcaaagcttctccgattagaggataaaagattaagaatgagtacaaccaccatacttagcaagccacaccaagaaatgcacacataatgcaaatgggtacaagcaataatgatacatgttgacttttgcttaaaacccatttttaaatagtttagttttaaaacacatttcaaagcatgatcctaatctagtcaatttttttagtcaagctgcacacttgcacgtacttgcgttaacccaggccatcaaattgcagttccaatcattccagtttaactaaataaaatctctaacttgggaacattgctaggcttgcccataaccgagggcttggctattcgaatagatgatattctgatcatccatgtccttttgtttctgaccatattaagctatgagttaagccttgcccactagacatgtggttgtaaggaatatgcattgtaacataggcccggggaccaatccttatatatgatggccaaggtgcgactaacagaaccaagcacattgagcccaacctaaaacaagtttgagaattatgaaaagaagtccaacatgtccaggctaacaagcctctaatccaccattaatcaagattatatggttattcccaaagtccagatcattagaaaataactatatgtttatgttagggcattgttaagcataatcctaaaatctctagtaaacaccgcacatagagttctcactagatagttttggttttctagggttgtcaaaggtaattactcaatattcaataaataaggccataacaaagaatataggaaaggctaagtaaaacagttataacgcgataaatttagtaaagcgaatgcaaaaatttaaattaaaatactttccgtaaattgggattcaataaggagagcgtgacttcccttgctcaacggaacaaacttccgagacttcagcaacgaacatgaactgcacgactggaatctccaaaatgacaacaactataggtgacccaaaacaaagccacaactctaagagagaaatgataacaagacataaaaacaacatacatgggtaatttaagttataacaaaagttcaactggtcaatttggagctcatttggccaagagaagacaatccaaaatttaactgtagtttaaatgaagatttctgaattgtttaattattattgttcccataaattatgtgtaacacaacatcgctcgaggagagaaaggatcgagcgactaacagccaggaccaacgggtcagacggctagttcaccgtggatcaggttcaccgagacgatgcacgggaatagagcacctacatgtaagcctcaaagaaaagactgaagagtggatcccacatgatgccaaacaagcagtcacgtgcgtctaaacgcagctacactttacgtcaaaaaaatgcagctacacgcggatggagacgacaactggtgactgcggcacatgactggtagtcacctaaggcaaggaaaataggagggaaagagcggaaaccggattctcaccacaaacatggcgacatccaaaatagcgaggagggaattgttggtgaggaagacaatggcgagcttgagcagtgacgacggcaactggtcaacgacgaggggacaatggagggattggtgctgcagacttgagggaggcggtggtgagtggtgacgtcgggaagcacttggacgaggaggggacagcggccagaggaagatagtggtgacgtcattcgggttgatggcgggggtgcgttccgatggtcttcacttgatgagaaggcacggttgaggaagaggacgatgagggaatcgaagaccgacattgaaggtagacaagttaacgcagtggggtggtgctctggcaaggctggagggactgccgaaggaggaagaagacggcgttcttctctgatcactagcaaggatgaacttccagcgatctccaggcaaaatggtggggttgctgagctataggaggttaatgcgtggccaggggtggcggcgccgaggtcttccatacgtggcttgggtgggtctacgggaaagggtggcaggagctcgccggtgcagtcgagatggcaggagagcaagagagctcgaggtggctgtgaaaatggatcgaagggaggaagacagcgccattttataggctgggagaggaagaaggggaacggtcgtgagaggagccacaggccattaacagcgactatgaattgggaggtttcaaatctgcgatataaagccaaattaataggggggaaaatatgacagaattggagagatgaaagtagggaaatgatttttgcaatcaatttgaagaagagacgtctgggaaggcggatcaacctcggtggcagtgctagtgctagctagggagaggggaactgaattggcgggttggaggtggaagacgacgacgcaacgacttcctgggctggctgagccgtgcccacctaggccgagcaaggtagacccgggagaaggaggggactttgctcatgagccaacggaggaggacaggaagcggactttggctataatcggcccaaagagaggacatacttgtttttaggttttttattttcataaactctgaaatttgttttgctgcatattttaggatgctctgaaaaaatcaaggaaaaactgaggtgacattttagagcatggagaatttaagaaacatactctaagccacattcaaacttttcttgaacatgttcttgaacttttctcaaactattatagcttttaattatttctattattcattttagaatgtgatctttaatttgggatgaatttatcaagacatcacaaaaatgaaacatgaaacaattatatgaagccaaaatagttcaaagtccaaccatggattttatcccatacatattgcgggccacatcatgcgctacatagatatatgtgctagtcatataatgggtacccattaacaaacattcgctaaattgaatatatatgtacttcgtgtcatactttttttcttctttgtactgacagagtaacttaggctcatcgtcattggcattataatgtagagaattgtttaattagttacaagagagataagaaataatctatatacattaaatagacgatgatatctccaaaagtaactgtacggttttgagtttcaccttcagctgtcaaattttagttcttgtttcgtacgtgaagagtcccattctgagattctcaatcaactgacagttagttgtttcagtcatgcatgctactctgtttggtatacatgcttttgtttaatattttatagtgcaagtctatagatatatgttcatcacacttagacttgtttggagcagggtaaccagtattgctttggattccaagatgctggaatacatggatacaaggatatgatcattttgggaggtttgcatatattgctctccaaaagaaaattcctttttcatatttttttttatgctagagccattgccctgttttttttcagacatggtcatctcaaataaggtggtcgtctatgacatggaaaagcaagccattggctggacagagcacaactgtaagtttcaacttgttcaaattttatcgataaattgttatattctgttctaacaccagcggttgaggaggcatgtggcggtagcgagggcctcagcccaataggaaggatgcatggaggcttgtagatggaggcacagaataaagtcattggctaggagtaaggagtatgaattggatgctgaactagctatgcccctgcatcttggctgttctagccatggcaaggatagtgttacggctacaatttaggaggtgatcaaggtatggcgaggttgtataattgtcaaactagtggccaaggccctagcactctaggaatccgaggcgccag

SEQ ID NO: 29721 - DNA, 7932 bp, Oryza sativa
ggaaaaggggggggaaaagacttcttttagggtttttctttttttataaaacctttttaactttgtttatttcttctccattattatttgtgctctgaaaattccactaaaatttatttacgcattttaggcttttaggaaatatacaaaaattctccaagccttatttgacttttaaatttgcacattttaattgttggaggctttcacatgaattttaattattctcggcataattttgaggatgtattttagagtcgttttgggacgcgacaaacctacctcccttaaacggaatctcgaccccgagattcggaaggactggcgaagagatcgggatgggctgccttcagctcgtcttcacgctcccaggtagcttcttcttcggagtggttgctccactggacctagcaaaaacggattacccggttcctggtcctgcgctccatggtgtccaggattttcattggcctctccacgtaggtcaaatcttcgcgaacttcaatttgctctgagtcggcctgctcggatggcactcgaagacatttcttgagttgagacacatgaaacacatcatgcacgttgcccaaggaggcgggcagctccagctggtaagcgacttctccacgccgagcaatgatgcggaaaggacccacataccgaggtgcgagcttcccctttgtctgaaacctatgtacacctcgcaatggcgtgacccgaagatatacaaaatcacccactgcgaattccaggtcacggcgacggttatccgcataacttttctgccgggactgtgccacctttagattatcccgaatgattctgactttagcttcagcttctctcaggatatcagtcccgaacacttgactttccccaacttggtcccacaatagcggtgtccggcatttgcgcccgtacaacgcttcatagggtgccatttgtatgctggcttgatagctgttattgtaggagaactcggcataggggagactcttatcccaagtcttcccgaaatctaggacacatgcgcgaagcatatcttcgaggatctgatttagacgctcggtctgtccatctgtctgcgggtgatacgcggtgctgaaattcagccgggttcccaactccatgcctgcagtttgactctagaaatccccggtgaattggcttcccctgtcagacacgattttcttgggaacgccatggagactcacgatcctagcgaagtagagctcggctagtttgttccctccataggtggtcttcacaggaataaatcgagctaccttggttaatcgatccacaactacccatatagaatcatatccaccttgggtttttggaagtccggtgatgaaatccatcccaatttcatcccatttccattctggtacttggagaggttggagaagtccggccggtcgttggtgctctgccttgacacgctggcacacatcacatagggccacaaactctgcaatttcccgcttcatgctaacccaccagtatttctccttcaagtctaagtacatcttcgtactgcccgggtgaatggaatagggactttcgtgagcttcctagagtatcagctgtttaagttctctgttatctgggacgcatacccgatttccgttccataaggttccgtgttcatcttctgtgaaaccagcagctttaccctgtttcatattcttgaggagtccatgcatgtccggatcattcttctgagcctcgcggatttgatcgagcaaggtgggcttggcttccaacgcagctaagaatccacgacccactatgcttaggttcagggcttccatctgttgattaagttcgggtggaatgcctcgggcgttaagagtgttgcaatggcttttccggcttagagcgtcggcaaccacgttggccttaccaggatgatagtgaattcccacatcataatccttgatgagttctaaccatctcctttgccgaagattcagatctgactgggtgaagatgtatttcaaactcttatgatcagtatatatttcacagcgattcccaatgagatagtgccgccagatttttagagcatgaaccaccgctgctaactccaaatcatgggtagggtagttgccttcatggggccgtagctggcgtgaggcataggccaccacatgaccatcctgcatgagcacgcaccccaatccttggcgcgaagcatcacagtacaccatgaaatccttgcgagtatccggcaagattaacactggcgaggaaaccagcttttctttgagagtttggaatgccttctcgcattgcgggctccacacaaatttctcttctttcttcaacaattgtgtcatgggccgagcgattttggagaaattctcgatgaatctccggtagtatcctgccaaacctaagaaactgcgaatttgagtgactgtcttgggttgcttccaatcggtgacggcggtcactgtttcggggtccacagcaactccttcagcagatatcacatgccctaagaatttgacttcggacaaccagaactcacacttgctaagcttggcatacaattgatgttcccgcaactttcccaacaccagacggagatggtgctgatggtcttcctcagattgtgagtatatcagaatgtcatcaatgaaaaccacaacaaacttgtccaagtattccatgaacactttgttcattaagttcatgaagaaggcaggtgcattggttagaccgaatgacatcaccgtgaattcatacagcccgtatcgcgtggtgaatgcggtcttcggaatatcttcttcccgaatacgtaattggtgatatccggaacgaagatcgatcttggagaatacagtggcacctttaagttgatcgaacagatcatcgatccggggaagaggatatttgttcttgatggtgacttcattgagagctctgtagtcaacgcacatcctcttcgtcttgtctttcttctccacaaaaatcacaggagcaccccatggggaagtactcggacgtatataccctttttctttcaactcttccaactatttctttacttcggccagttcatttgctgccatgcggtagggtcgcttgtacagaggagtggttcctggagcaagatctatccggaactcaatctctcgcttgggcggcataccaggtagttcttccggaaacacgtctccgaactctccgactatggggatttctgacagtcctatctgatgcagttctgaacttctaacagaggttgggggtgcaaagaagacaaccggttgttccggccctcggtacagggtgacagtgcgtctcgcgcaatccactactccttggaattgagccaaccaattcatcccaaggatcacatccaagttcttggtgtctagcagaatcagatccgagggaaaaggaatcccctgaatttctatagggacggcagggctataatactttgctgtcataacccctccaggggtggtgattagcagagggtttctaagcctttctacccccaactgatttctccccacgaatggcacagatataaacgagtgggaagctccagagtcgaacaaagtggtagcagggacggaatggatgaggaacgtaccaacgatgacgtctggagttgtcagcacgtcctcggccgtcacatggttcacacgaccccgagtgacatccttcccaccgttgttggagcgaggaggcgcttggccttgctgacgcctcggctttgggcatttatccgcaaaatgcccgggctcgaagcagttgaagcacagacgctgctgaccttgagcgtccctgcggccttgaccaggctgcacggctggcgtaggaggacggggcacacgagtcccttgttgattctgctgctgctgcggctgtgggacgcgcaccacgaattgaggtcgaggcgcggagcgaggttgttgctgctgctgctgcgaagaggatccccctgggtagggattggtgtagcgaacccgctggttagcaccctgttgattgcggaaattcgccaagcggcgcttgtgcgactccagttccttgtgcttggcttccaagcggatgctcttgtccaccagacgttggaaatccggatagtccccggagactagacggacggacagctcagggtccattcccgccaagaacttctcttgcttctcctcatcttcccgcacatcctccggagcgtaacgggccaggttgttgaactcgtgcaaatactccatcacggagcggttgccttgcttcaactcccggaactccctcttcttgagggccacgactccggcgggcacatgggttctccggaaagcggcggtgaagcgagcccaggtgataggttgcccctctggctgcgtagcctggaagtggtcccaccatagagatgcgggcccctgcagctggtgggcggcgaagatgactttctcctcatcgctgcactgcaccgtgtctagctttttccccacggcatgcaaccaatccaacgcatccacggggttgttggagctcgagaaggtaggtgggcggatgcggaggaattcggcgagtttagagtgttgtggaggtggtggtggagcattctgttgtggcggattttggaggtggtggaggaaagcagtcatcatgttggcctgctgagcgaggatttgggtgagaatggcattggtatctggtggtggtggtggaggcgaagcagaaggtgaaggtgggttgccctggtggttggggttgctgccttcaggttgattgccatcaccggtgttaacatttctcctggtcgtcaccatctgaaaaccccacacagaaccagcaaacagagagagctaacaattaaaactaaccacccacgactactataattcttgaatttattactgatattaaatgagttcattaaagttcaagttgcttaggcaaataaaataaagacaggctccgacacagttataccacaaccggcataaccatgccccacacgactccaacaagaagacaaacgagaaagaacacacacgcaagcctactaactgctcgtctaccgctgcgacgggccagggcggaaggtgagcaacagcgcatcctccgtgctaccaacgccggaggtttccccctcctggggaaccacgggcgcaggctcggcacgaggggtctcgacgaagcaggtccacgccagggactgacgaacaagctcgggcctggaggtgctcttgcgggcggtgatcttctggctgcggcagacgcttgggacggcagtcctctccctgagcgatcttgagctgatgcagctgcgcctccaccgcatctaggtccttcttgagctgcaggttctcctgacgcagctccaggatcttcatgttgttctcgaccatcccgcggcgcaccatctgatggaaatcgatacgagccgcgtcgtacgcctccaccatgcgcgccaggtgcacgatggtagcgtcatcctccgagctagcatcccggaaggtggcgtagtcgcgggctcctccgcgacgagggtggtagcggtagggcgagtgctgcaactcgtccgggtagtgctggtgaagagtgccgatggcgaggagagcggcgttctgacaagcggcggggaaggaatctccacccgcggtgactgccagcgaggtccgctcgggagagccggagaggatcactgcagtgacctcccaaccagcgtggggctctgcatcctcaccctcctgctccgggagtggcctggcctggtaatccactccatgtggataccccaagaccacgcacatgcctcgcagctccaagacgaagccagtcatgtccaaaccacgacgggtgacgctgccggccatctacaaacaaaacaaaaagaaaaacaacattttagagatcagattttgggcgataaatgaagcagcaagacagagagagactagaggattttcacaaatacaagagatttttatttcgaaaatactgctaaggcttgggatctaaggctcgtcctagggtcaagggggctctgataccaacttgtcacgaccggaaataacccaacgggcgttcctgacgtgcgtgcattaatccttgtcccaggaggcaaggtacaccaaaagttgatacaattcagagtttaacaagcggaagcgtaaatagttaacttattacatgggcagcgaaggcccggcacacaaagacaaacgagaaacagcggaagactagggtgacaaccacaggcgcttgacggcaggcacgagctagacaccaaagccttcatcttcaaggaactcctcttctggggttgggaaaaattgagcaagactaagtacaaccaccgtactcaacaagacacacccgcaagtgcagaataaatgcaagggagtacaagggaatcatactgtagagggttagggttgcagtaaacagcatttaaagacatttagttgctcaaagctattttgtaaacgcgattctagaactatacaatgttattaatcaaggccgtgaacccacacgaacctgccttaatccaaggcctatgatgatttcgaccgaactggcaacccgaccctgggtcccagctcgtcccaagccaacccaggccaaccattccacattttagttgataagcaggttttaagaattgaaacactaacttgggtacattgctcggcttgcccataaccgagggcgcgtctattcgaatagattatactctgatcagaggtgtacatctttacccacaagacacatcttcctcacgtgcacccacgtgccacataccaccacggtatacagacggaagacgtgacatagtttccaacccatcctagccatagacaagagtaccgacccaatcccacctacggccggaacccccgggacaggcaggcaggactgagcccctagcagcaggacaccggccctgtgccatgacatctcgactaccgggccgcagctcgtgtagccttcatttgccctggagaatgtccatcgacccccgacttcatccacctccatccgtgtacttttgtttataaccagactgagccacaaactaagccttacccactagacatgtggaagtacggtagtgctttgcaacagaggcccgaagaccggtccttatatggccgaggtgctactatcaaaaccatgcaccccgagcccagcctaaaaccattttggggattttgaatagaaggagcggtgtgaagccaattccacaataaccagaccattccagagtatccaggtgatatgaatatttcccaaagtctaaagttgtaaaaccacctaatgttacctaattaacttgcgaagcatctacctaaaattaaactagtggtgccatgagtagggtgtccactagttgaggttttgtttaatctagggtggacaaggtaataataacaataacaataataatatggtcataacaaaggtaaataggcatggctaaataaaacagtggtaacgcgggaatttaaataaagcgataatgcattaagttaaaattaaaataatgttataaactgggattcaatatgctcaaggatgatgtgacttgccttgctcgctttcccaaacgtcggcttcaacttccacgaagagcggatcctccgaagctgcagcgtctacacgaccaacggaaaagaaaaggcttttactctaaataactccatataacagcaaaaataaagcacaaaagtgggttctcgacttcttaaggaaaaattagagacttgaatggtccaattccgagttcaaatggccaagttatggccatttgaagtttatatgctctttaaatggatatttgcgaatttcttcatttaaattttaattaaaaatccatttattgcgtcagccgggagaggaggcgcgcggaccgggtccacgggagtggggcccacgcgtcagccccat

SEQ ID NO: 29722 - DNA, 1816 bp, Oryza sativa
ttaggaaatatacaaaaattctccaagccttatttgacttttaaatttgcacattttaattgttggaggctttcacatgaattttaattattctcggcataattttgaggatgtattttagagtcgttttgggacgcgacaatggccgaccacagtgcaagttataagagaggttgacgctagtggtaggcccacggcgcccaggactgtcattggaagatggtctaactgctgcgggctagcggcacgtgagaacttcgggatcctccataaaaatatcgggaaggtcacagaagccgagaaagaacgagcttggatggcaatggagaaatggttcacatttccagccaaagcaaaggataggctcaagcggaaggcattccaaaagatgggcaaagcttggaagaattggaagtcgaagctcttcaccgagtttgtcaacccgcccggcaatcatacgccgttcgatgaataccctcaaataaccgaagcggtgtgggaggaattctgctctctcaagaccacccaagagtttagggaatcaagcgaggcacatcgcgtactgcaacagcggaatgagcacccgcatcggctgggcaccgcagggtacatcggcaaggaggcaatatgggcccaagaagatgcagccgctgcagcagtgaatgtccctgccccgttttcagacatccctgaacaaagagctcgcaactgggcgcgggcaaggggtaaggtcaacccggacggctctgtcacatttgagaacaaaagtgatgccgtcgtctatcaggaactagtgagttcactacttaacctaactaatttccgttcgtataaagtacaagttcgtataaacgactatcttcttttctagttgggcttggttgctgaacaagcttcacaaagcgaggttgagtccgtgccgaaaaggcgcgaagatgacatcctcacaaaggcgctcggaaccaaagaacatcctggccgaactcggggaattggtagcgatgtgccctggaagcatggactccctcagtacagctcccaatacaggaaacggaaagtctccaaggaaagagagggacgctcgtttgaaggccgaacttaaggttgaggtcattcaagaactagaagctagcatgaatgcaagggtggaagaaagggttaacaaggtcctcgccgacatgaatataccccgagtcacaacacctgctgtgcaaccaactcctcgtgtacaatacgacgcgagtccgtcacagcataggagtagttgtgcatccacagaggtgccggcccctggtctcccgatcgcaccactagctgcagtggaccacatcgaggtaattgttgttatccgatccatatctaataaaagacatttacacattccaatattaaattcattctttcacctaatgcagggcgcagcacagtgtgtcctactagcgagagtccacccaactttcgctcctgaagtcgctgagggcatggctttcaagccctcggttatagacaaggtccacggcgcagacctgctagctaggtatgccaaggtgtccatcgatacagtaaaggacacctggtcaggctatccgctgcccgtgcccccaaatgatgaaatcatgactttgggcgatgcgtgcaagacgttcatacaatggcccaaagaagacatagttgtgaagatgactcctcgtccaagtcgaccgacggagcttacacctcccaagtctaagctatcaattgaggctccccgtggaccggcattgtcagtacctcattctcccggtggagctgatatggacttggcagatatagctca

SEQ ID NO: 29723 - DNA, 983 bp, Oryza sativa
ggtaccctgctggtgaatcaggtgacaaaggtggtggttttcaggagggaatggtcgaagatcttggtccgaatggcaatggattacaaccgcagttcaacattttccaggaccggatcgactacgtggtgcaacatgctttgatcaaccaatcaggagtcttggtgaataccttaactaacatggtaaaatcaggggttgatggcaaaatagctgagcatcaagttacagggccagtatatttgccaggtggtgtttttccaaattacagacctttggttacaggcaaccaacagggttcttctagcgcaccaccaacacagtcgatggcaccagctgcggcttctgctccagctgcacaggttgcaccatcattggcaccgggacaaataaccaatcctaggctgttgaccagagaacagccacagcatggtggacaaaacatcaatcggctaacccaggagaaggtggctgctatgttctatccaaatcaaccaactgccgatctagcgctgccgaaccagcatacgtcagcagcaaaccttgctaaatgcatcggctaggatgaggacacctgataatcagctaaggcagcatgttgcaaatcgagttatccctgagcacttggttcataatgtgcagccagatcagtcagtgatacctcaagttatacctgaacatttggtgcgtaacatccagctgaatactcagaactacaaacggggtcacttaaattatcattaccagcctccttcacctcatgtgcatcaaagggggtcacctcaacctcagtttgctccccagtttaatcagtttgagccaatatcacagcaaacacaaggggaacctcagcagagacagtgggccgatatgattgcagatgtgatgagggagcaatttgggtttaagccgaaggatactgggaacttgtatcggcatccatatcctgagtggtttgagagaattccattacctgcccgata

SEQ ID NO: 29724 - DNA, 13920 bp, Oryza sativa
aaggataagatggggccacatgtcaggtgtaactgtcctcgaaaccgtcataactgccacaaccatcatagggacccacttgtcagtgccctagagtagtttggaggcctgttgggccggcccaagtatggccgaaccctggtgacgctagcttcgactggccttacacatggacgctcctgatcgctccccaatgacggattgacggtttcagggcatattggacatttcgcataggctacaaccatcatacctgcctatttaaggaggagctcattcacacttcaaaacacacttaagaaagctcaacatttctatctatactttagtttagtattctagtgctaagtggagtagagtggaatagctcttgaagtcctcggagtctttaggggggaattcgagtatggcggtagtagcttttctttattcttttgtaagacttttggaattaatggaatattattctatatatatttatatattcttggtgctttagtttatgtaagtatcgactttactttatatctgtatcggtatagttgtgtagctagcctaccagagaggtgcaatggtgtgggtttaatgttccattattcggttgctctatgtcatcctaggggatatagagtagtatttaataatgtagacgtggtgtttagattattaagtatcattatctaggcatatatgctgcgggacagtagaggtgggccgctgatggtgaaagtttagtacgggtattcctccatgttagtatatattcctaagataaattcctggggagggtactcctccgtatttagtcccggttggacagccatgataagttgtcgtaaggaactcggcaacccaggatggtctctcaaaacaccaggagggcattgttagagggtattggccatacaactgtatactagcggatataaactaattgatggaacgtatactagaagcataggaattaattgcttttttatttcttcttccacatagcgtaggattgattaatgagagatatgagttctttgctttgtgccactctacccttatgattatattaacccctgtttagactctgatcatacaagtggcatatatacattattagcatagttcttttttacaatcttcccttgggattaaataaataaggctaaattgtttcaggacattgaaaatttgtgtaattggctgtgggacaccacaaaattgtgtcactgctaaaggacataaaaaatagtgtaattgtctgtaggacaccaaacacattatttaataatttccatgacaaagtggagagagaattttaaaatgacaagctctttctcccctagctaagaggaggtggcggcggcgagtagctgtgcaagcaggcagcggcccgctgctatgggcggcccgctttggggacgtcgcccacctgagcaatgctagcctggcgctgggcctgtcccttggcagcggccaaggaggaggaacgaccaacgcgccggcacaccatggtggctaccggtggccgtattgctgtcgctgcagccatcgttgcacgctcgacaaaacgagggacgcagctgcgacggcgaccgtggccctacgcatagcgtgtacacattgttgtccgtgggcgtggtgctaaagagggagtgtgtggaggagatctacggtgagcggatgttgctggagttgttgtcgtcggcgggtggtcggacgagcaagacaacaacaactacgtagggcaacatccgcaagaagctccggtattgatttgtatttgttcatccgcaaagcacggtcttcctggtacatcacatatgtcgacacgttcttgttagactctattgatttgtatttgttcatcttttgttgatcgaatacatgcgagtcactaaaccaaagctttgtttctttgagcagaagcagaaagtcccaacttaagctcaggccaagccaggagcaaacttgtcttttttaaatttctctctccgctttttcttaaaaattataaaataatgtatctagtgttctacagacaattacatcatttttatggtgtcttttggcaatggcacgatcttacggtgtccctcagccaattatacaaaatttggatatcacgtagcaaattttgcctaataaatacgataccttggaatactcccggataaaatactacaatgatatatctgtgcgcttgcggattccttctgtaactgtatatatagcaggaccatttctagcgctattgctggaaattcatatttatagtaatgtcgttaagaaatatcagcaccccacatgtaaacgggaagaagatagaaaatatgacggtgatggcatggttccaatttcgtaaaatttaagttgcacgcttagaaattgaagaattgtaatgactttttttttaataaccacatttgcaatggcatggatcgaactaatgaatatgcacataacgacagatgttgtagcactagcactgttcggaagaattagtgccagtaatttcttcaaaactacttcttccgggttgataatacttatcgttttggactagagacggtcttgaaaactaacattgaccattattttttattataatatatataaaagtgttaacagctatataattttattaaaatattttttaagactaatctatacatgtagttatcatatttgaaagataaatattttaaaaatgatttataataaaaattctaaagtttgatctcaccttgtttaaaacgacaagtattatcggtgcggatggagtattttggagaagacttcaattgtgaaaactctaccctcgtactgacaaattaatggcactactccagtgcactaggaacagtacacatgtgcgtgcatgctctgttcttatttcgagtttgtcctgcagaaaacctcgcacccgactatccaagcacagaggcccccgacacgagtacacgacacgccgtcatgcgccacgccgccgccgccgccgtgccgctggcgaccaccgtcgccatgctgtacgcccgcctcgccgcctccctgaccggccctggcccccgccgcctcgccgcgctcctcccggcgatggcactcctccccgtcctccctctcgccctcccgtactacagctaccgcggcttctccgccttcgtcttcgtctggctcggcgagttcaagctcctcctcctcgccttcggccacggcccgctccacccggcgctccgccctctcccgttcgtcttcactgccgcgctccccgtcaagctcgtcgacgccgccgcggcagcagcaggcgcgtcggcgtcgaggccaccgccagctgcacctgcagctacgttcaagttcgtcgtctcgtccgccatcaaggtcggcgccatggcggccatcgtccgcgtcctccacgccaaggaggagatgcaccgctacgcggcgttctccctcaacgccgtcttcatgtactgcttcctcgacgtcgtcctgccggccctcggcgcggcgggcgtggcgctgggcatggagatggagccgcagttcgaccggccgtacctgtcggcctcgctgcgggacttctggggccggcggtggaacctcgtggcgtcggcggtgctccgcgccgccgtctacgaccccgtcagggcgcgctccggcgacccggcggccggcgtgctcgccgcgttcctcgtgtcggggctgatgcacgaggtggtgatactctacctgacctcccgggctcccacggggcgcgtcacggcgttcttcgcgctccacggcgtgtgcgtctgcgccgagcggtggtggtgcgcgcgccagcacaagcgcgaggcgaggccgcagctgcctcgcgcggtggccgcgccgctcgtactgggtttcgtcgccggcacggcgttctggctgttcttcccggcgatctacggcggcgggatggacgacctgtacctcgcggagattgcagggtttgcaaaaggcctcggccttggcggaagctggacaggggaaaactaattctaatatgtcccatcgtgtacatttttttcttcaaattcaatgcaactaattgtaaaatgggacgcggatactatatgcaagtatgcattagtagtatatacatcggtttcaaaatatagtaatttctagctatctatctgaataaattagtcagaagttgttatattttagaatagagtttcaagcaacacataccaatgagaagtccatagaattttagagggcaactaactaaagatactccctccgtcccctaatataaaggattttgatattttattttgcattgtttaaccattcgtcttattaaaaaaatttagaattattatttattttaattgtgacttactttattattcaaagtactttcagcacaacttttctttttttatatttacacaattttttaaaataagacgagtagttaaatagtgcaaacagaatgtcaaaatcccttatattaggggacggagggagtaaaatttaccgctaatgttctacccaatctactggtataataattccataataataaaaagatagctcgaagaggagttgttaacttctgtagaagaatgtctgcattatagatccaagatcacacaagacagatgtttggagttcaatgttaaccttaacagagacgaatgtgaggtgaagtacacatgtgacatgccatcattttgaagttcaacgaatcctgtgttggcctcaacttcttgaggatcaaacaagttccatccaactgtattgcagaggcggagaaaagacttgaaacagaaagattttttttttccaatgttcatatcatgatatggttaatacatcgctggcaagacgttctaatgagcttatgctatactccctccgtcctaaaatacaagggattttcgatgtgtcatatccacccaaaattccttatatttaggacggagggagtacgaccttttcttcccagctctatgctcaaatgtacatttggattggatgaatcttgagcttgtggaccgtgggtagttcttccatgaagtggctaggatgcagcagagtcagattgacttctggtgataaaatagcagtggagatgtaaaaaaagaaaagaaagcaaaacatccatcagattcagaaatctaatcttttggaacatctagattatcggatgtcaaaccaaagcaacttttctactagctcaaagaactcttcaagcggtacagaaaatgagaggaaagaatcaaggtaaacgattcacaagcaaaactgtaccacagaaaggacaattaacttaatgaagtgagcgatggccgatggacaagggcgctctgacgaatcagatcttgaggagttcgcaactgttcagacatcagcatcaatttgacgagttgatgaactgatggcactcgctggagcagcatccttggtagactattcctgggagcagagcagcccgccagctcatcctgtggcctgtaatatgcatagccgagaattgtgacaggggaaaacatttggaaaattttttaaaggaaaaatggaggaagttcacaggatttgaacccaataggaaattctatcagattagcagtagcaccatgaattccatttgatagacagtgttgcatcaactgctacaagaagacatccagatacatcctatacggatctatcataaatatctgtgaacaatcaagcattacaattcaaagaacgcagccgactcaatgagtggcacaccatgagatcagtatgatttctatcttcaaaacattgtgccacctagctctgcctctggatatgcagcgagagtttcttaactttgcagctcatctttcttagctcattgtttccgtttgcttgctatctttgtggcttctcttccgcttcctaactctctttcgctttgcctccccatcagctttgggcccctgtaggacacatgttctcatcagtcctcgtgttgcatcgacagcaaacagctcttctagacatgcttttccaacaacataatagatactaataatgggcatgttaatctgaaagtaacagttttaggtattattacgtacaactactgagagaaaaacaacagtgatataaaatgaaaattacctgattttgagcagctgacaattggggctttggtttctttttcttacaggagagtgggtttggtccctgcagaaatgacaagcaataaaaattacttacggaagcggaactgttgtagcaaactttctttccacactattatggatagttaaataatgggaaaaattggattcaattgtcaagcggtcctatcgaaaataggattgactatggagtaaggctgatgatgccaactagatcatacgtattgttgcgcttgcgtatacatctaatacatcagaagccagaagaaaataacagaaaatattaacctttggtcttttcttcttaaatttgcttttgtcggccaccccaagtgcattttctacaagagaactgataggccttctgttcttttcatcatcacttgcgttttcactggcagccgcctttccatccgatggaaccttcagtagcttctgatattctgatttacccatatgcagacgcttctcctcgtccaactgagcaaatttacgttgctgcacagagggttgttcaatgaacaaggagctcttcagaccatatatcacaggaacaccaggaacctgcatccagtcaaaacacacatgaacacataaactgattcaagagaatatgtaatggcaacatgtacattattgtgcaccctccgttccatagtgtaaggcgttttgggtttgtcctaagtcaaacttctttatgtttgatcaactttatagaaaaaagttgcagtacttccaacataaaacagatatactacaaaaaatatatattcaaatgtggatttaatgaaactaatttggtattgaagacattgctatgtattttttaaaaacttggtcaaacgtgatgaagtttggccctgtttagttcccaaaacaaaaaattttcacctatcacatcgaatgtttggacacatgcatggagtattaaatgtgggaaaaaaaaccaattacacagtttgcgtgtaaattgcgagacgaatcttttaagcctaattgcgccatgatttgacaatgtggtgctacagtaaacatttgctaatgacagattaattaggcttaataaattcgtctcgcagtttcctggcagaatctgtaatttgttttgtcattagacaatgtttaatacttcaaatgtgtgtccgtatatccgatgtgacaccccaaaacaaaaatttttgccaactaaaccgggccactgactgtccctgtcaggggcgggcgcagctatgattcaagggtattcagatgtatgcccaagaattttacacaaaaaataggtatatatactatatatttcgtatatgaattcaaacaaataaaaaagagcctcaaatacccaataagcaagcaaactagttttcttgggcttgcttcatcctccctcctcattcacccattagcccaaatgtattgggcccaaattccccacttccctccctctctccagctctcctctcccctacccacttccagcctcacccatcaatctcacacatcccattccctcagtctcccctaaccctagccgacgggcggtcggcgcaggcgcacagcctcgcggacgttgggtggccggtggctggacggcggtggcgcgggcgcgcaagtggccaaacacgcagcggcgatgctcgggcgcaagcgtaggcatggcgtggcggcaagacggcgacggcagcgcggggcaaccgaacaggctcgtggtgtcggtgccgcattggcgagctgacgacgtaggcaccaggcaggcagcatcgcagctcgcatggaccaagaggcagggacgctgggatttgggagcctgggatgttagtacttcactgatttcattttttgttctgcacttctacttttctagtattctactaattgttcactgagtacttggaagttgattcatcataattgctaacttgcagacttgatttaagtaactagttaggcgcatgtaggggaatagtaagtaggatttgtaagattacatatcattttaccattttcaaaatatcaagaattgaaaagttcatctctaaattgaaagatttcttatcattttaccattttctattcttttgtgtgtacttcatccaattagtacttacatatgtgctatatattataaaattatatcaatatacgaacttatgtgtattttgtgttatatatgctatatattatataattactggtgtgttatattatatacatcatttattaggctcttgggtgtaggaaatttttttaccctactcctatttcgaatacacaagttctaaatcctgggcccgccactgactccctgtccagatgcttttgcataacataattaaggtgataattcttaaattactctgaaacagcgtgttggcacgagcacgaaagggtagtgaatttccatacctcccgtagctttgcacggagatcagaatcctgggtggcaacaaagaagtgttcgggattcttttcacctatcagtgacagaacacaatccactgcactgactactttgtcatgctcacacctgaacccacaaacaaaaatttccaatggaacaaaaccctcattgcctcataagagaaaaaaaaaaaccatcgttagaagtagaagtgtgctactacttacttggccgtggcgagcagggcggcggcgtcgaaggcgtcggcgtgggacttgccgaggcgcctgagctcggcgaggacgcacttggaggtgaagaggggagggggcctggaggcggagaggagggactggagggcgtcgtcggcggggaggaggctgtgactgaggaggtggtggacgaaggtgccgtcgacgagcaccctgtagggctcgcggaagccgaagcaggtggcgtagaacctgaccaccttgcggttcttggaccgcctcttcaccctcatccttctcgcgtctccctcgcgggcggcggcggcggcggcggcgaagggcggcgctagtggcacgaggcagggaaggaggggagggggctcggtcgcctcgccggcgcgggaggggcggacaacgacgtcgcggttcaagataaaggtggcaggcgcagcgcgacgtcggcgtggaggtcgaagagtcgaacggcgccggcggtctgtgacggtggaggttgtgcttgaaggagttagggttgatggatttgggctttgatgggcctggattgaattggttggtttcttcgcgctggaaggggttttcccttggaaaaggtgcacttaaggcccctcattctgtggacgagctacaaaatcatccttgaacccaaaaaatactctataacatatcccttatcttataaaaccggatcactttgggtcctaaattagtactgttcccgattttaggtgacgtggtggctgagtcaatgtgaaacccacctatcatactcacaaaaaatcattgccttttctcctcactctctccctcactcaacgggtgtccttggcgccggcccagtcgatgttgcgggagattaggtgccatggcgaggaggaacacatggcgcttgtcgtagccatcgccgtccccacgcacaaccagcaacaggtgtcgccacgtcggctccgacgcaaacatgatgagcgagtggatggcgcagtaggtaatctcctgagagggccgggagtggttgccaatgaggtggccgaggagcgctggcggcgcggtgaggaagctgtaccaggctccaggcacaaatagggcgctctgttgggtagtgatgtcacagtaggtgacatagcagtcgcaatcgtgcttgttgttggggcactagacttggacgagcgggccacaaccgtcgacgagtgccctccctacccccacggaccctaacgacaacgtcaacaaggcagacaagatggtaggcgaggctcagggtggcaaggtgaagcgagaggacgggtgtgcttggcgccagccccattggtgtcatgagatacaaggcgccatcgagaggagaaggccaggggcaggcggagccacggaggcggcgaagcccgtcttcggagaagctctgtcgagctccagtgcagagtggcacccatcttgaggaggagcagcgagggcccctccttgcccccacgaacccaacaacggcatcggcaaggcgaacaagaagggagcttctccaatcaaggtcccctccagctacaccaccggcgtcaacaccaccttctacgtaagtactcgtcgtcttcgtattcatttcataagtcaatttgtattgccgtccatcactacccactcgtcacccaaggtggccagatcttccccgaccgctagatgtgagatgcctctgattgggccactgacggcgagcgcttcaagtccgactactgctaccatatgttcgtctcgtgctatagagacctcaagatcgctggctgtgaggttgacgcatcggcgagctgtcacctggtgccggcatcgctgtcgggcggcaccaggctgagtgcgcaatagaacgacaccatgagctagacacaacatatactaatggagctcgacatagcttctcagaagacgggcttcgccgcctccacccgctgttggcgttatcttctccatggcgcctcgtctcccgcaacaccgacagggccagtgccgagcatgcccgcttgtgcggactcatgctgtggatggtgggtggagcgggagagattggggactcatgaagaggatttttttttgtgagtatgacatatgggtaccatactgattcagccaccatgtcacctaaaaatggaagcaatactgtcttagaactcaaaatgatctgattttgtaaggcaaggaaggcgttatatctttcttttttttttcttttagggatgattttgtaactcggcagtaaactgaggaacctgaggtgaacttttttccttctcccttcgggcatgatactaggccgtgatgggctgggagcctgggacgtttttactgccaaagtggacctattgggccactatcctatgatagtgggatgaaaaattggactggatttaggccgtgttcttttctaacagagatgcatgctttctattaccaagcttttctaattgctgagcgatatgttccgtgcaaaaattttctatattgaagttactctaaaatattaaataaatttaatttttaagtttataataattaaaacttaattaatcatacactaataactttcttatcatgtatggccttatttaatctttatcttcattagtacgaataggtttttacaactttgtgacatgcctttactactatgttatgggttcctagcgcttgtacgtttttcatagaaaaaatagatataatattttaggggtgactataaaaacttatcaaaatttctaatgccaaatctcgataacagtaaatcaaacatcaactacacctgcgggtaggtcttaaatatcagcaatagctattatagacacggtactacagagaacgacattattctcccgctattaaggatttggggtttagatttcattgattggtttgtttacttgaaacaaggtgcatgaaaaatcatgctattacattctacaatgatatggctcctcaacacatgtaagcataaagttgatccaaccatttagaaaacatcctcttacatacaagcgttatcataactctaacgtcctcttacatacaagcgttatcataactcttccataaatagttagtcccatcacatctaacaaataaaaccattttttaagtacataacaaaatatcaccagcaagtaactttagaactggatttttcacattttggtccttttgaaaaacttatttcgcaaatagacctctgaaaaaacttattccagaaatggtcctttttgggacgccagagtggttggcgccgtccctcttttgaaaaacttatttcacaaatagacctctgaaaaaacttattctagaaatggtcctttttgggacgccagagtggttggcgccgtcccccttttgaaaaacttatttcacaaatagacctctgaaaaaacttattccacaaatggtcctttttgggacgccagagtggctggcgccgtcctcctgccaccgtggcactcgcgaaccgacgtggcaggaagagggcgccagccatgctggcgccgccccccccccaacccctcgcctccatccctgtttctctgtatgtagttgcaacagtgtcatttttgttttattttttcggatattttttcacacttaggatcatgatacaaccaaccataaaaaaaatataaactcgaactaccacttagctaagtctgaaaatagctagcataccacttagtctactttgcaccttcactaaaattagactataactcctttagtaaaaccctttgcataactcctttagtaatatcctttgatcagcatgttacacataatgcactctatcactatatgaaattacttaatctaattcaaaatatagccaaatgaaatgatagccataagttaaacagtacaaaaagatacaattttttttatttttatttcatttatttgatattttttcacacttaggagaacataggaaccaaccatataaaaaataaactcaaatggacaaaatatgtgacttgtagaattttccaaaactctaccggaacagacaaaatatgtcatttattaaaataggcgtaactttctcatatggactcggaatcaggcaaataatatattcacggacatctacagaaaaagttacatccgattctccatggcttcgccgggtttggcgatattaaaacctctgaattccgcttgcaagattgtgtttttgaggagagaagtttttcggtaaagctttcgaaaattccacaggccacatatttcgtccgtttaagtttattttttatatggttggttcttgtgagtttctaagtgtgaaaaaaatatcaaaaaaataataataaaaaaatttgcacatctctctcctctgtactagttcggagagagatgagaggagaaaaaaaattctacaagtcacatattatgtccatttgagttcattttttctatggttggttcttatgtgtccctaagcgtgaaaaaaaaataaaagaaaaataaaaaaaattcgggggggaggggcgccagccactatggcgtgctccccctagccacctcagcatcgccccgccacgtcggcagggggacggctggcgccgtctagttggacgacggcgccagccactctggcgccccaaaaaggatcatttctgggataagtttttccagggatctatttgcgaaataagttttttcaaaggaccaaaaagtgaaaaatccagaaattcagaaactattttaaaagcttgactacgatggatgatcccaagagcttgtagcacgccataatttcataagcaaaggataatgatcacgaatgaatatacgtataattgacaactaaaaattcccggcccatgtatatcttttgaaaacttccactaaatcaatctacaccattacctctttttagagaaacatcccagacgcgagaaaaacactgctcacagaaatagtgagcattatcctataattacgtcgctgcccacactcccagaaattccaaatgcccccattttcttcggttccatcgcttcgcctcctcctctttttctttttcttttttttttctctcgcccatccatcgtctcctttttcctcgctttctcccccgccacgaaaggaaccaaccctcctccgcagcccaacaaagcgcccgcggcggtcgctcgcg

SEQ ID NO: 29725 - DNA, 90249 bp, Oryza sativa
tgctgacgcagtctcctcctcctccgccgccgccgccgccgtcgtcaccgcggactccgccccaggctccgccgcagggtttggtcccctccgctccttggccctctcgcgcggggttttttttttttgagcgagaatgtgatttgatcagggtttgctccgtgggggtgtggatttcgcaggatggatggccttgtgacggagggcgatctgcgggagctggtgggcaacctcggggtggccgcgcgtgagccggagagggaggggtggcagcaggtggtcgccaaagggaacgatgacgtctcctacagggtgtggtgcgacaagcccatggtagctctatctcctcctgttcttgttgaatccattgatcttgttttatattgttgcgggtcactggaaatgttttattgttttatattgttgctggccaatggaaatgttctaatgatctgcttcttatcgtaaggcggattgtgaatttactctgcctacttgtgtccatgcgatttactagctgcgaaaggccacaactaatgcttactgtatgggtagttcatacttcatagtgcaagagtacaagtcgatcgagaaaattaagattgtaggtattagaataattcaaccccatccaccctgccttaatgctttaaaagtggatgcgtagttgtagggtgtcatttgatatcactgtttggagctaattttggtatcaccttctcaatatcccttggtctattcccctaatgggcttaaatttttatgggacggtgggagcatgccaactctgtgggtgagatcttagaaccacactagaattattgatattggtttatgtgtgctctaggtacttgatcatgatttttttggttaagaattgacaaaagaaactaaagctatttaggctctgtttgcaagaacatgttcccaacccaaacagtaaaaacggaacacggagcggtccattagcacgtgattaattaagtatttgttaatttttttgttcaaaaatggatcaatatgatttttgaagcaactttcgtatagaatttttttgtaaaaaacacactgtttatcagtttgaaaagcgtgcgcgtggaaaacgtaagtatggagttgggaaccagcttttgcaaacaaagccttaatactttagaattcaaaatagttgggggattaattactgatcagctgatgcagtctacgtgaagttacctagggtttaggaattttcgctgggttctgccatgattggattttgatgcctggtttcattttgtgatgctatttccatgatgtcctttgacccattacatttttgggaacatcacaattcccaagattctatttgcttgctcaagtttaacaattcagtttctttatgtaacagttatattcccctatgcaggaaggccctcctagatatcttagtgtgacaacatatgagagatgctcaacagagctattgagggacttttacatggataatgagtatagaatggagtgggataacactgtgataaagcatgagcagctacagtttgatgaaaatagtggaatagagatagggcgtacaatcaagaagtttccgctcttaacaccaagggagtacatattggcatggcgagtttgggaaggaaatgacaagtctttctactgtttggtgaaggttagtcacatctctctctccatcctttctcgtcattaaattctcaactgtttaaaagcgatattttttttgcgaggtaaaagtgtgatatactttggtgtcattgttttggcttttgtacttatgcagtaatgtaaacattgtagattattcgttcagtaatgtacttatataaggtctaagctttcggtaatgctcatggagtcagttgcagaagaaaccaatgatgccacaattgttgattgtgtcctaactacatcttcaattctaatatgaaattcaagttgaattggttttgatcctatgcttgacatttttaaatgaactaaggacctgtttaggatgtgggaatttcacctattgtgggaagtaaactgctccctgtagaattcctgcattctgcattgtaaacaaacagcctaaaacaccactgatatagccgagaatacacaaattctagggataatgcactgtacacgcccaatttgagaaaatacaaaatcagttgaaatctaattgaatatacaaccttagaatgaactcaccaatttcacacgagtatttcatatgcaattttgatgacattaaccttatccccattatcttattttctttgaccactcagtcattttttacaatttgttctgttgttgccaatttgttaacctggacaggaatgtgagcatcctgttgcaccaagacagcggaaatttgttcgagtgcaacttttgagatcaggatggtgcattaggaaaagtaagtcaactctaatattcatagaaggccttctttttgcggtccttattgagtttagaatgacctatcttgtttcagtggtatgtattgcgtcgatgtaatttctaaaaaatacgcatagaataacttcaaatgatctaattgtttggtaatgctttaccagcctctagtatctacagtatatattttatactttaatatttagattgaaatgcagttggatgaatttgttagctgataagaatgaaaggcttgtaatttttgtttctgcatccatgagttaatacactaatagttctgttgtacttgttaaccaaacagaatgggaagagttctactgaagctataagcaggctgtgtatcaactgaaaataaaacaaatattcttttaagtgtttatttttgaagaataaataccattgtcacacatttcttctccttgccatcaattttctttatgaccttgaatatgcaactgaaagttgagccattatgacatgccatttttgctagcttatctcgactctcaattttctttgttataattatgatcaaaaggcatctataaattgttattttctggggatgtatctcatatatgttcaactacttttaaatttgatgttgcttatatgctttatgttactttacagtccctggaagggatgcatgccgaattacagtgctgcatcatgaagacaacggcatgaacatagagatggcaaaactggcatttgccaagggcatttggaattacatttgtaaaatgaacagtgcactacgtcgctatcctcaacgtaacatttcatcaatatcaattctgaccatgcaaagacttaccaagaaggtaaatagtcttgacctattgaccaatctgtggttgatatttctttaggaattggtctatttatgttcctataagcatgaatctgtttttgttaaaaatcatatgtacagtgtgtgtccagtttattttatttgttttatgtatacaatcttttaggtttgaggataatgattatattttttgaatttagaatatatgttatagccagtcgagatcataaattcatacaataatttatgtgcttatgttgtatgctagcctgctgaagcctaccatgtcttgtagattgtctgtcctttacttttgttcacaaattacagctactgaaataggcaatgataatctttctggagatagaatctgttttttaaagtttgaattatgtagtatgtaccccccacaaacctgtgaacggtttactgtcctattatttcgaattatggccattttatggttcatgctctgatgacgcttgtttttgcacatcagtttcctcaggccttggagactgatgtagatgcaaatcatcatcctcaaggaaatacaagagcaaatgttgttcctacacattttgcaagaacttcatcacgccaacagccagggaagaagtcatctcgggcaacgattgcaagtggacttctgcttatcggaagcattgtttgtctatcccgaggccgatctaaccttggggcccagcttgcaatggcattcttcttgaagaaggcgttcaaacaagataaaggatcgagctcgcagaggagcataagtagaactgatgtgactgaacccaggcacttggaatagtattggttaaccttggagacgttttaccttgaccttttcttcctctttcttgagaaaaagtgggaatatcgtttgcttgataaggcatatctgtacacagcatgacggattatgtaaataataggtttgtagttgtctgtgtttgccaatgagtacttctgtggagtactacatcgtctcactgtagaaatcgggtacctgagaatattaatgtatgaaagttaattttggagcaaaagagttctgattgaagaaggtgactgcaagatatgtttggatggaatgctgcaaggattgttatagacatttccaaaactgtacccctcatctcaaggtaaaccgtagcctcaggctgggtccgctgggatgcaatttactttccgatttaccgcatgataccgaccccagcggtaggcggtttttgtatttcgaacaagttcggtccaatttattaagttgggatttatactagacaactgacggctaacaaaaaaaattcagccgactgtcagctagtcagtccctattaagtttatgaaaaaaccttttgaaaatttgatcgaaacctgctttcgcctacgttgaaaccttaaaatttggcggttttggacggccgtcggaaacatgaacaaaccaggtgccgctctcgtgctgcaggcagagtggcgggtactggtgcccattggaataattgaaaattgaaaactgaaattataaaaaaatatattttttttcaatgtcaagcataaggtagtatattaatgtattttatctgccggatctatgaggaaaaaatgaattagtcatgcaagaggtttgaatcaaatatagtattaattttgaaaccacttttcgatctgattaggaaagcaaaaccgcctgctcgctgcacttctgtacttgtatgtgtcgactttggtagcattgtttatcaatttgagtaaggatgatctgcaatgaaggggcaactatctacgaactacgggacacacacaatcaacaacttctgtgattgatcaattacactcatgtgagcttcggtggatcttcaaactcatcctcggttccactgtgtgtccattggtagctatccatgattatgtggtctagcattaattatctctcaagtctgccacctcttgcttgttgtagtatcctcgtgttctaatgtagtgcagtaacaagctatgtgtagttttaaccctgaggtcccgtgtttaatcctaacacgctcacaatttttttaattttttcttaaaagaatgtttgaagacacgtatctccctccaaacagtggcgaggccacatgggttcaccacagggggtgccggggagggcctggcacccctcatcctctgatcctcccccctcctcccccctcccttccctagataaataattaatagatgcaagagtatatatcggtagctagcaactcactaactgcgagtatggatatgtgtagctgaatgcgtatgcatagctctagctgggagcatcgatcagcaactcactaaaactcccgcaagcagctgggtgaagcttttgatgtgatgcgacaaattaacaggatggagtcttcaaattaaagaagtaattgagatgttttgtagtgcatcaaatctcagtgctagactgctagtatagaactactttctccgtttcacaatgtaagtcattctatcatttcccatattcatatttatggtaatgaatctagatagatatatatgtctagattcattaacatcaatatgaatgtgggaatgctagaatgacttacattgtgaaacggagggagtacataaattgtgtttaactctctcttgcatgattcaattatgtaattcttaggttgcattcgattcagcgattggaagtatatttctaacggcagcatatgattaattaggtattaattattagaaacttataaaatatattaagaaacttatataaaaaactttcctacaaacaatttatttaaccgtttaggtagtacctcatgaaaaaccgagaagttgtccaaaacaactcagccttactaaagaagtggatggatggagataaaccgcctagacgtccacacaagattgattgcaaggacaccattctgtaggggggtgaaaactgatcatgcatacaacacgttgttcaccaagcagccaataagctttcttttggatacattgaccttatggttggcccccctaatacctaaatcctggcttcgccgctgcctccaaatctccttttttttaaagtatcctcgtgatctgaaagagagactgtcatgtaaacgtggtagatgccgatcattcccaaagctgcctcacaatcccactcctatgcattgcacatacgacctacgggcatccagtgccacacctatcttatgtggaaatacacaccaacaaacaaatgtaagcattgggtaaatacttgatagccctacatcattatctatcaaaccgagaaaggcatgtacctcacattagagaatgtcacaatgctgttctccttcactctactaaaacttgagttcttttgactctccagcacctccacggctccacattattcttggcttataactagaggttgctgctctcctcatcacccaggtaatttacaatggagaaacattggcatgcataggaattggaactcttgcagcagagaaggtgaagccacatggttttgcctttatggcagcagagtactcctacgtttctttgtgctgtgctagcatgtgccttggtgaggatcgagatctacgactgcatgtttagcagttgcagtgcagccgatggataaaaaactgacggctcagatggtaagaaagtattgttcataaaatactgtggcaaacttacactgtagcggttactgtagcatcgatggtgcaacgggatggtagagcgaatccgagctgttgggtccatcgatccaacggttataatgtgctccgactgccaaggttgcagttgttactactacagcaccggatctcaattcgtcagtagatgttgaaatcaagtaaatatggcttccatgtgtgtttctaaaatataaaccatccgtatatatcaattaaaatatattaagttttatacctttgattcatggatatatacactttattgctactttcaactttatcaagttttgatatgactaggttttggtagggaaacaaactaaatataatgttatcattgtcaccctaacaaagattggcaattccggaagttctctcacaaaaactcaaccaaaatttgataaggtttcaaataaacacaaccgatagtataaaaatccggtaacgtcaaaacgtgtcaaaatttggcatcatcaaaatttggtaaagttgattttgactataaaatgaacaatccctatgtttctacaagatttctgagctggcgaatgaatcaaccaaagataatttatgggcaagtttttatatctatgtttagagctttaaaagtaaacgccgaaagatacaatacgatgagagaacctataaattaactttaatttaaaaccacaaatttaacttaaaattaaattcaagttctaaaatttaatttttcatgtggttgataagctaaccagaaaacaatgagagatataggcccggctcaattgtacttaatttcactgttgtgcggccaacacaaatagtgtattgtgtctgcaactgtactgaaccgccgaacaaacccatagtgttagtaggatcaatcttttaattaggcgttgtcagtatagttggagagcacaagtgatttcttcccaatgagcatgcaagaaattggagctagcaagcagggccggtcctgagtttttaaggtcccgatgcgaaactaaatgtagaggttgttaacgtatatatatgagttattgccataaacgtttaaattgcattcagaaatagaatttttatagaaaacattgtacatattaccttaaaattatatttgcttgacgttcacgtgttacctcttaaaaatttgtccaatgctcctttctaggcttttattaaaccatccactctttttcgtttttccccttttctcgctatccgatgcatactttatcgacaatatggcctaatgattgaaaaaattaacataactacagtgttttaactcgtataaagtatgctagaaaattacaaatctagatttagtatatcttaccaagtagttgattgcaagtatccgagtgcgcagcgcacgaccagtccgcaagtgcgtcgggacacacactgccattgttggttcatccaacactcgtccaattgaattagcaacaggcaacaaataacagattacaatttacacatggaatcatagttacaatttttcatatggcaatggtgttgttgctgctcactagaccagtaaagtgaatcagtgatcgtcgcagtgatttaggccgtgcttagatttaaacttttttctttaaacttttaactttttcatcacattaaatatttggacacatacatgaaacactaaatatggacgaaaaaaatcaattgcacagtttgtatgtaaattgcgagacgaatcttttgagcctaattacgctatgatttaacaatgtggtgctacagtagacatttgctaatgatagattaattaggcttaatagattcgtctcacaattttcaggtggaatctgtaatttgttttgttattagtttacgtttgatacttcaaatatgtatccgtatacttaaaaaaaattttggcacacaaactaaacacaacctcagcaaattagcaacagcaagacatcaatgaggcatgagaagaagtgtagaacacggcaacggcaagaaacctgcgcggctcggcggctgcgtctctggcgcctcgcatgggcgtcgcgcggcggaagcggaagtgcgcggaaacggccagcggacggcggccttggacgagatggctgaggtgttgcgacggtgctactgccagcggccgcgatcttgcgttcgcgacttcgcgtcaggacgtgagcggcggttcggcgtgatcgcgcgcgtcgatgccgtcgggattctcaggaactcggagcgtctccagcaactcatccaaattcgatcctgcatattcctatatggatggtcatccaaaaagattcatcttccatatctcttctcactccagcagatcatccaaattgcatcctccatatcacattcttctatattttataatatcttccaactaactttacatttgtatttgaagggatatattttgaataacttaatttaacggtgttatttatcgctataatatttcgaaatgagtaaattttaacagatatatttttaatggataatttttaactcatatatttaaaatgagtataaaagcaatgcaagtaacatatactactatatgctagtactactgctcaactatttcttctttttcctactagtactagttctctgcatcgttcttctttgttcctactagtactacttctctacatcaagctggcgagcccaggggcggcggcagtcgggcgagcgaggggcggtggaggacgaccgacgagggtgcatctggacagggaggaggcacgcggtggccgcggaggctgcgcgcagaggagtcccgacgggggcaacacgatgaaggagcagcggtgcgagcggtggggcggcgcggatggcggggcttccactccggcgatctccaaatggcagacctggtatgtccatcctctctgtttccccatggtacagtccggatggtggcgcgagtcatcggagctaggcagttggggggatgacgtgaggagagagaaacgccaaatttggcatggagagggctcggtttggaggatgtctaaaaatggcgtgtgtgatggagtgtttgctggagcatgatttttcccctccatatgctaaacaaaggatggatgaccggatagaagagctgctgggcatgctcttacctcccgcatgcatcagtttctgttgggccagaggggggtgaagcgggtggagagggacacctacgagtcgggggccagagcggccgcaccgcttgcccccctccagggccgggcctgtgcatgtttataaaacagtattgtaaaagctcatataaagtaattataaaaatctactgcatataaggtaccacaggtattagaacttccgatatatttctttcctgccacgtttacagtttctacccgaaacagggagtgacatatcacaattcatacactctgcagaggtgtgttgctgtacccataaacgccataaatcttttaatgcccacgcccgtcagtgcttgaagcatacttcatggtgtatgccggcaaggttaaggtcacaagcttttcatcaatcacatctgccaattatctctgctgcggtgattctcgcaacaattggcaaatcatcggatcctgcaacaacggcgatccacgtcatttaatcagatttcgcaacaacgacaaccctcatcgttagcccatgctcacaggattcgcgaaagtccttaagcccgcaggataaagccattaaaaaagaactaataagccagcctgtcccatttcaggtcatgtggtcgacacgatcgctaggacgcttgaatgctatataatagttattgtaaaaagtcacaccgtttattaagttaaaaacgtgcacgtcaaaaataaaataggtgaagttggaaaagtagccttttgttcagaggagggggttggaaatgttagattaatgggctaggcccaattaaatcctaataaattccattagcccacattaagtgctatgggtaataataccaccttggaaatcgggtgaagaggtctcaacttaaatacggagttagtggagagtctctgttgaccagttgagatggtgcgcggacagccaggcggggcgagacgaggcgagacagacagctgctgctgctgcgctctctcgttttgtaatggacagtaataaacacagagaattgatttcgtatcaatgaacgcgtcgttacggaattaaacaccatgaattgattccgtcggttacggaattaaatgccatgaattgattccgtattaacgagcgcgtcggtttcgaaattaaacaccgcggttgatgactccgagcgttactctcgcgctcgcatattatatactccgcagcgaccagaaggactggagaagttcttcccgatctctcttgcacttcgagttcctcctcctctgttcctgagctgcaaaatccttccccggttctgttcacctgcgcgcacaggtgtacgggatgagcaggtgcctctgaaactccgtccgcttgagaacctgcacgggtagacggacgatcaagattttgggtagcgcttcaagcgcgactgctcttgctcttcacggctactgcagctgcatcgtcaccttcaccaagatgtcgacggagattggagacaagatgatgaacgacatcaacggaggcagtgctgcctcaaaatccagcggtgggacgttctcggggtatactttcattctcccgattctattagatgtttctttgttaatactcttcgcaatggcatcattgtgttaatatgtaaatgttgatgcttattttatattaagcatactcaagttgtatacatctagcactgtcactagatctactcatattgcaaatgtcatgtttattgtcttactattttggattaaaatatgctgaattatgaccaaatttccaacaatccaaaaacttaataggtctttttcggtagttggctttgctgcatcactaaaaccacatgctttcgatggttcaaattataaaagatggaaagcacatgcacttttgtggttgacggcgatgcaatgtttctttgtttcacggggcaaaccgagtgaaccgtctatctcccctgaggaggaggctaagtttgaggctacggattgcttgttccgtggagcattgatcagtgtgctcgccgatagtattgtggacgtgtatatgcacatgccttcagggaaggacatgtgggatgctcttgaggccaagttcagggtttctgacgccggcagcgagctgtatgtcatggagcagttctatgactacaagatggtcgatgaccgttctatagtggaacagactcatgagattcagatgttggcaaaggaacttgagaacaacaactgtgagttgccggacaagtttgtggcaggtggcattattgccaaattgccaccttcttggacggactttgctacttctctaaaacacaagaggcaagagttcagtgttactgatcttattggctctttgggtgttgaggagaagtcaagggcaaagggcaaccggggcaaaaagatcgagggaggttctagtgccaatttggtgcagaagaagaaccctcacgcatcccacaacaacaacaagaaagtcaaacctgacgtcaaacccaaggctacaaccaattttaagaagaaaggcaagggaaaggtaaaaggagattgctttgtgtgtggcaagcctgggcattggtccaaggattgtcctaagcgcaagaacaagaagtctacaaacatggttattagtgagggcggaggaacatcgaggtatggtaaatttttacctatagttctctctgtctgtcactcacctgattggtgggttgatactggtgctaatattcatgtgtgtgctggcatttctctgtttcttcttatcaggtcgggagaggttcctccttgttgatgggaaatggatcgcttgcggctattcatggtgttggtatggtcgatctgaagtttacttcgggaaagatcgtgcagctgaagaacatgcagcatgtcccttcaataaagaagaatctagttagcggctctgtactgtgtagagatggttttagacttgtgtttgaatccaataaatgtgtcgtatctaaatatggaatgtttattggaaaaggttatgacagcggaggcttgttccgcttttccttggatgatatatgtaataaagttgtgaaccatgtaggcgatgatgatgatgagtccaatgtgtggcattcgcgactttgtcatgtgaattttgtgaattttggttgtatgacacgcttagccaacatgagtttaattccaaaattcagtttagtcaaacgctctaagtgccatacttgtgttcaattgaaacaacctcgcaagcctcataaggcatcgaggcgaggaatttggcaccactagaacttgttcattccgatctatgcgaaattaataacgtgttaagtaaagggggaaagaaatatttcatgacactgatagatgattgcactagattctgctatgtgtacctattgaaaacaaaggatgaagcattacattactttaagatctataacgctgaggtagaaaaccaactggaaaggaaaatcaaaaggttgaggtctgataggggtggagagtatttttccaatgagtttatttctttctgcaaagagtatggaattattcatgagaggatgcccccctattcaccccagtcaaacggggtagccgaaagaaagaaccgtactctaactgagatggtgaatgccatgttagacactgcaggactgtccaaggaatggtgggtgaggcaatattgattgtgtgtcatgtcctgaatagaattcctactaagcttaaggaagtaacaccattcgaggaagggaaaggaagaaattaaatctctcacaccagcgcacatggggctgtttggccaaggtaaatgtacctatagccaaaaagcgtaaacttggaccaaagaccgtagattgtgtgttctttggttatgctatccacggtgtgggatataggttcttaatagtaaattctggagtacctgacatgcgtgttggtacaattactgagtccagagatgctacattttttgagaatgaatttcctatgaaaaatgcaccaagcacttctagtcaagaacctattttatcccctgagcagtttgcaccgatagaacacattgatcaaatgcttgaggaaatcctgaggaggataacattgtagcaactcgaaagagtaagagacaaaggactgcaaagttttttggagatgactacattgtatatcttgtggatgatactccaagaaccattgaagaggtatattcatctcctgacgctgactattggaaggaagcggtatgcaatgagatggactcaattatgtctaatggtacttgggaagtcattgagcgtccatatgggtgcaagcctgtaagatgcaaatgggctttcaagaaaaagcttagggctgatggtacaatcgaaaagtataaagcaaggcttgtggccaagggttatacccaaaaagaaggcgaggacttttttgacacttattcaccggttgttcgcttgactacgattcgagtactactcactctggcagcctctcatggtctactcgtccatcagatggatgttaagacagctttcctcaatggagggttggaggaggagatctatatggatcaaccagatgggtatgtactagaaggtcaagagggaatggtgtgcaagctgttgaagtccttgtatggtctcaaacaagcgcctaagcaatggcatgagaagtttgacaatacacttacatctgctggctttgttgtgaatgaagctgacaaatgtgtgtactatcgctatggtgggggagagggagtgatcttgtgtttatatgtcgatgacatattgatctttgggaccagactcaatgtgattgaggaggtcaaggactttctgtccaaaagctttgaaatgaaggatttgggagtagctgatgtaattcttaacattaaactaccgagaggagatgagggtgggattatacttgtgcaatctcactatgtggacaaggtcctgagtcgctttggttatagtgactgcaaggcagctcctactccttatgatcctagtgtgctattaaggaaaaaccgaagaatagcaagggatcaatggagatactcctagattattggttcattgatgtacttagctagtgcaacaaggcctgacatctcatttgctgtgagcaagttgagccggtttgtttcaaatccgggagatgatcattggcatgctcttgaaagagtaatgcgctatctaaaagggacaatgagctatgaaatttactactctgggtacccaaaagtactagagggctatagtgattcaaactggatatctgatgctgatgagataaaggccacaagtgggtatgtgttcacacttggaggggacgctgtttcctgtaagtcttgcaagcagaccatcttaacaaggtctacaatggaagcataactcacagttttagatactgccacagttgaggccgaatggcttcgtgagctcctgatggacttgccgatggttgaaaaaccagtaccagcaatcctgatgaactgtgataatcaaacaatgattattaaagtgaacagttcgaaggacaacatgaagtcatccaggcatgttaaaagaagactgaagtctgtcagaaagcagaaaaactccggagtgatagcattggactatgtccagacggctaaaaatctggcagatcagtttaccaaggggctaccacgtaatgtgatagactgtgcatcgagggagatgggcttgagacccacttagagttgcacaataatggaaacctgtctattgtgatcagagatcccgtgaatttggatggcgaaacaaactattgtgtaactgagagaagagaccctaaaatgggcttatcttcatgatgcacttctcttctaatctgtatggtaggatggtatacaccttaatgtaatccgagtagcttttcataaagcagatatgttggcctacagaacatcttagaaggaacacacctatatgagtccgactgctagtcacagtctatgagatctggttgatctctagatactcatgaaaaggccgggagtatgacttatacgctccaaacagaggggatgcaaacggcagcctagtaccagttaagggtttgagtgaaacctgaatcgcacaagactgacaattcaaggtatagtccatttttcagttgtaatctggtgtagcttttttcctaggaggaagttcaacttaacagtctccaccgaaacactggtataacaaacaagatcagaatcgagagcatttcctgtgagccatgaaatttggtggggattgttagattaatgggctaagcccaattaaatcctaataaattccattggcccacattaagtgctatgggtaataataccaccttggaaatcgggtgaagaggtctcaacttaaatacggagttagtctctgttgaccggttgagatggtgcgcggacagccaggcgggcgaggcgaggcgaggcgaggcgaggcagacatttgctacactctctcgttttgtaacggacggtaataaatacggagaattgatttcgtatcaatgaacgcgtcggttacggaagtaaacgtcgtgaattgattccgtcggttacagaattaaacaccgtgaattgattccgtcggttatggaattaaatgccgtgaattgattccgtattaacgagcgcatcggttacgaaattaaacaccgtggttgatgactccgaacgttactctcgcactcgcatattatatactccgcagtgactagaaggacgggagaagttcttcccggcctctcttgcacttcgagttcctcctcctctgttcctgagctgcaaaatccttccccgattctgttcacctgcgtgcacaggtgtacgggacgagcaggtgcctccgaaactccatccgcttgagaacctgcacgggtaggcggacgaactgctcttgttcttcacggctactgctgctgcatcgacgccttcaccaagatgtcgacggagattggagacaagataatgaacgacatcaacggaggtagtactgcctcaaaatccagcggtgggacgttctcggggtatactttcattctcccgattctattagatgtttctttgttaatactcttcgcaatggcagtattgcgttactatgtaaatgttgatacttatttcatatcaagcatactcaagttgtatacatcttgcactgtcactagatctactcatattgcaaatgtcatgtttattgtcttaatattttggattaaaatatgccgaattatgactaaatttacaacaagaaacccctcttccccggcacgtaaaacgaagttcattttattgcatgattaattaagtattaactattttttttaaaaaaatagattaacatgatttttttaaacaacttttatatagaaagtttttatataaatcacaccgtttagtagtttgaaaagcgtacgcgcggaaaacgggggaagaacacagcaagaacacagccactcccgtgaagcctagagaaatcctggccatccaaacatacaaaaagagcgtccaagatttgacaaacggcccagccaaggcagaggacactcgccttgctcctgctccgctccgctccggcgccctgcctgcgctgcgctcgcgagacaccacacgagggcggcgccgcgattccacggcgtcctgccgcccgccgccctagcctgtttcctccccagcatccgccgccgcaggggagcatgaaaccctcacccgcttccaccaaagccccgctcccgtggatctccccgctccactaccgaagccccacacgcgccgcgccgccctccccgccgccgccgccgcctccgctgcccgaagcgcccctcacgcagctgcggtacgtccaccaccccgacctagcccgcctcatcgcctcctccccctccgcgcagcgcgcgctcgacctcttcaacgccgccgccgcgcagcgcggcttctcgcacaccccggccaccttcgccgcgctcctcgtccgcctcgcccgctctcgcctcccctccgccgccgccgccgtcctccgccgcgccgcctccgcgccctgccgcttcctcgagccgcagttcctcccgctcctccgcctcctcccgcccgaccactccctcgcgctcctccgcctcctccccgcgctcctccgccggggccgcgtctcccgcaaggccctcgccgtctgcctcgaccgcctcgtctcctcccgccgctgccccgatgttctcaccgagctcctggccgacctgcgcgacccccggagcaagtaccttccgcagcccaacacgtgcatctacaacatcctcatcaagcattacgtcaagaaaggcgatttggggacagccttccaggtgtttgatgaaatgcgtaagatgaactgcgctgatgttagaccaagcttagtcacctattcaacattgataggtgggctctgtcgtggggctcagatgaaggaagcgtttgaactatttgaggacatgatcgagaaggaccgcattgtgccagaccagctaacatacaatttgctcatcggtggattctgcaggctaggacaggtggagaaagcacaatcgatctttggatttatgaggaagaatgagtgcgagccaaatgccttcaactatgccactttgatcaatgggcactgtaagaaaggggaagtggaggcagcgaggggggtatttgaggagatgattagatctggggttcagccggatgctgtcagctatacctcacttgttggatgcctttgtcggcatgggaatgtggatgaggggatcaatcttgtgcaggagatgtggcagaaagggtgtaaggctgatgttgtcacatacaatctgctgcttgaggggttgtgcaaagatagacggatagcggaagcagtgaccttgcttgagaagttaccgtccgaaggagtacagctgaatgtcgcaagctaccggattgtgatgaattgcctgtgctcatgtggagagatggagaaagcggctggcttgctgggcatgatgctcggacgaggatttgtacctcactatgcagcatcaaacatgctgttgattggtctgtgtgatgttgggagggtatcagatgcaacagtcacattgtatggactggtggacactgggttcatgccagaggctagatgctgggcaaggctgattgagtctgtgttccgggagagaaagcttaggagatctattgagctgttggatgtgctgattgctgaagggtgaccaagtcaacttgctccagcatggattgttttgagtttttgactgatttcatcacctgaagggaggtgaaaaaccaggtattgagatgttccaataaggagtgatgacctactgaagccacataggtttgatagacatgggctgatgactgtgcaggagatgactgaagggatgagtgatttgcagcaggactgtgtgtgcaatcaatcttcactaaggttagcaagcaccaagcaatgaccagcctgacccaattcatgatggaatctgcgatcattccgaggttggggaatcttcggaaggtgccatgacacatggttactttgatgtttcatgattatgccaaaaatagtactctgtacatgattaataactgacaaaggaagctgaagtctgaacgaccattttgtggacaggtgttcattttccttatttgctggtgtgttcttatgaagggttactgactgcttgacaatggacatatctgtgtaatacactgtcattgtggaatccatagagatgtttcatggtatttgactgtatgcaagaaggaaatgtgcagagagtcaccattgtcatcttgattgtttgattatagagatccaaaaccaaagttttacacaaggccaaactgcaaagttgagaaacatggtatgagttcatgttgaaggcagagattcattcaaccttcttgattggagactttgcaatggaattatttctatgcaaatgtagagaatgtccaggagttcaggacctgctggcaacataaagaactcagtggcagctggcaatgtaatattacggttgctactcaggctaaaacaactcaataccaaattaatgcattgtccttgcatgagttcctgtttggaacagattatttaccggattattgctgtggattatctacttgaatatagtgctaccatgcatgtatgccataattatggattgttgctattttcaaatctgactaagtttttttgatgagttacagtgtagaacaatattgcactgcaaagtttcctattaacaatgctccttagctctgataatctgaaacctgaatttacttttttttctttatttacaaagttggagactggatatgaagagatatgatactttgatgctataatactttcagccttttacttaaattcttgatcaaaataatctatgcacttataacaccttactccttttctatttcataggtattcagcaaagatcatagttgttttctgaccttcaatggcaggaagcagtcctaaagcagtgcattgaggctgagcaacttgaaagtgtcaacatggctggaataaacctaatcaataaactaagagaagccctcaatgaacaggctttgagcaccttttatatgtttcttaaaaaatattctaccatggtgtggcatataatgatataagcatattattacattcataaatatttatgtttttttccttttatataacaggaaacaaagtcagagcttcttcgcaatcagttgcatgtaaggattattcttttatacattctcacttgttattgtccttgttataacttcatctttcactgcagaagcacaccttagattattctatttcttatattccatgtctattatcgcttaattactataatggaacatttaagggtcaaaattatgatgagcattttcatggatgcataagctttcgtattacagtgtctgcttgctttgagctttactccattcttgatgcctcagcctaagatgacccatgagtccatgatatgtgagcacaacctcagttttgctttgtcaagcacttccataaagtcataaacttaacttatctataagcgtatcctaataaaaaatttatggtcaaaaatcaaatatcatatattttaacgagaggaatagctcgtatcttcaccaatctgttctatagacaattccatgtgtagtactagtactgaaagacctcatgatgtcacaactggtagaaagacaatgagtgacaaagtatgcggcaaaataacggtggtacacaaggaatttgttgaagatttgtacttgtaaatttattttgtattgttgtggaaatttgttgtgcttaggctaaaacttggatactcggagaaattttctttagaactacttgactgttttataactagaattctacattgtattttacgcacatgtttggatgggtcatgggtgtgatctatataatggattgtttataaatagagatattatatttctaccactatgttacactaagttatccaaataaaaagaaaatttatccaaataaaaagaaaatatttaacgactagcatggcctcctcgtccagaagaacaaaaggtatatgatgatgcgaagacgtgtgctgatcctgtgtgccagatcaaatatcttctgcacacttaatcatatgtgacgcagtgagcaatagttgcggttgcgagaaggtggccaacgatcagttgtgaccagcggccattgtttaccagaaattttacggttcttgtacatttacataacttcttcctctataaagattactgtcattgcaatacatttacataacttcttcctctatgaagattactgccaatgcaacacaaacaagggctccagcagtctacccaccacggtctcgctccaaaatctgtggtagacgaggctactaaaacttagtcccatggtatgactgttgataggtttccacgtgcctcctatttccaacatgagtcagcttaataaatagtattagttagatatctcccgctccctttttaggtatttccattagcaaatggattgtaggatcaagcaagaaactgactctgactgctatgtggatatatagtttagtttgcatagacaggatgtataagggatgcaggtcatctgcagtactgtagcatctctgcattttctctttcaatgcagaggatcccaatccaataagaactcggtaggcatcttgtagtgagagatggatagagattaaaatgagactcggtaggcatcttgtaatgagagatggatagagattaaaatgaggcaccaacaaagctgtacacttcattaaaattagccacctttgccatccatccatgtactcggttgtctctctaactagttgatatcccgagcttctctaactaattgatatcccgagctttgctgcaagatatatggatgaatgcacgttatacattatagaaattgtagatgtatgtgtttaaataattgaaaaatattatgaagataatgatttgacatttcttgcatattatcatatttttcaataattgtacatattatcacgtaactttgcatctattttacgtcaaaaggaaaatgttgcatctgctgttatcggtgccaatgcaaagaaagaaattaatgttccttcagctttctcggcaaaaaggcaatacaactttgcaaaggagaaacttgtttaggtgcaaatattatgttatcatgtacatgtcaattctctagtccatctagaacaaaattgctagaatcttcaacaaaaacaagccaacattgagctgtccatcgagcagcaatcctgcaattccgacacgacaacaacattcctagatcttccattcccatgtttgtatgcacgctcgtggcttcgtgcatagtagtgcgagcattcatcgtgtgtacatacacgcctaccttgttgacagaaaagcttacctcctctttttgaaagagccttgtatatgaaacatataaatgcatccatgaactctttcagatatactcctatatgagtagtaagtaggagttgatattagagtaacatcgaacacctagaataatgtccttgctgcagattggtataactaaggctgtgtttagttccacactaaaattagaagttttaagaaaaaagttgaaagtttatgtgtgtaggaaaattttaatatgatgaaaaagttgaaagtttaaataaaaagttgagaactaaactcggcataagccacatgcagtagtactacttttgtaccaccatttgttttggagctagctcttgcttttgtactacattgtatcttcgccaatcttgttctacaggcaattcattgtatgccagtgaaacataagttttttacaaggtatttatgcaagggtaacaccatagaagcctattaagttattacgcctaaactatgaagcaggtatatatttacagatgtatatggatgttgtagaggcaattcattgtaagccctctcaaaaaaaaaattcattgtaagccgctcaaaagtttatcttttcggttagagtaaatttaacaaaactataaatatattgaccaaattatcacaaaactacatatttaaaatggtgtatcacaaaactagctataggtttagtgtcaatttaattacaaaacttgaacatttataactcaaccataatattagtgctaaggatttaaaccccaaaatatatagttttgtgataatttaattattaaatatataattttgtgatacttagagttaaacctgtagttttaggataaatttattgttaaatctatagttttataataatttgatcaaaatatctataattttgtgaaatttactcttttttttgcgaggagaaatttactctttctgttataggctactaaggtcactttttttagacaatataactacatggagtatatggtaacatatataagttcatttttccccatcttgaaaatcaggatctgaggtatagaacctacataactcaccagaaaatagctttttcttttagttggtaagttttcacgggagtgtacgtagttttatatttacaaaacaacaacacctcctcccccactcccaactaggggtgggcaaaaaatacccgaagaccgcaagccgaacaaaatcgagccgaaccgaatcgaagtgtcggtttttttaggcatcggtttacccttcggcatctgttttgcgtttgatcggtctacggtcttttaatttctatggtttttaattgtcacgaaccgaacaacccgagaaaaccggagaaaccgaaccacacgtacacagtatcacaacaaattaggcaacgtgcaagctttaaggcccaacatctctttaatggggcccaacatctcctaagctacccatgtctcaagccctgtttattatcatcacgttatcgtgcgaagccacggctgtggcctcatggcaacgtgttccaacggtttgttcagtgaaccgaagttactccgtttaatcggctcggttttcttttttatatagattcttcggttgcaatagaaaaccaaaatttattaaaccgttgaaaccgagctgaattaaccgagtaaaccgaacgctcacccctacccccaacccacacatacaaacgcacacacacacatcaatgttctctgaaactgatgtgaactttctaaacaatacggttcatctcctacctccagaaagtatttggcatgtcgatcagggattgcaatttcagttcaaaatttcaggcccccttgctggcaagcgattattttagtcgaaattttcggttttctcaaatttttgcaaatttggccaaaatttagttaaattcagttaaattatgctaaaattttgagaaaaaaaaaaggtccaaaaagtaccaaaatttcggatgaaatcaaaattgaaaaccctagtgtcgatccattagctcaattaccagcagctgtcactttagaagaatgcagttcacattcaactagcagcaacgcctcgagtgaaattcaaccccatatatactgagataccggccaagacacatgttagcacattagtatatagtacaactgctactgcagctatccatggttcaagtactaataggaattccagttttttcctgtttgatcgattcctgctgcgagtacgaggtggaaaagagttacaatcccacggtgtcggctcccagagcttcagtagctgatgctatactaaaacttcgtcgattggtgccacagctgatgggattccacatgcctcccatttctagtgttgctcaagttggtaaatagcgtgtgtttcggttactattagcgaccaaattaaaggctggagcaaggaactgatgaccgatatgtacatatgtgaagaggatatatatatacatacatagaaataattaagcatgcatcttcaactatagtaatggatgaggagtttcggcatgatgtactatgtaaacagaaaaactactcaaccatatcccgtggaaatggaataagtaggtaacgctttgttcttatctatttgccttctctctccgagtcttcgtcttcctcctccgcctctcctattttgccctccttttccccttcccctcctctctgttgcagagagctcctctatgaaggcatggcaatggcgaagcaggccccccgaaaacggatcccctccccctcctcctcattgctggttctaccctgagtgcatgttggttacaaggtcatattgcctcctcctccgtctcaatcttttgaggcatggacacccactggatctagctcccatggcggaagggggaaggagggaaggagggaggctgtcgagaaggatgctgaccaacgtgggtttcttggcctcatccttcaaggcgctttgctgatggtgatggagctttcattcgcggcgacgtgatggcgagccaccatgctcattgccggagtgtgtgcaagtatgttgtgcgatgtatcatccacagtcggtaccccataggtaccaagtttgatacatgtggtattaccgctgatacccaggtatcagacccagtacctgtaggtaccatgcttaatatctatggtatcatggctgatacccacaggtattaaacctgatacctggtacctgtgaggtatcaagtatcatggctggctgcgaggtatggctagctacgaggaatcaagcaccacatgccttctctccttttatcccttcccctcggctccatccttgtttcctactactgctgcaaccgatgtcactccttgcatcgccaagcgttggttcaagacgtggagggagcaataccaaggaggagcttggaggaagagggcactgtctgctgcttcggctagctgcgagtgtgctccaccgacaaggtatcgcgtgtggaggcgcgtgagaccgaggaggatccgtgtaacgccccgattttcgttcaggattaaaaatcattaaataatgcattttctagaaattaaataaaagttaaagcaatttaataaagtgaaataatgggagaattaaaatttcctttaaaaatcattggccgagaatattttgtaatattctttgtgccctaaaatactctctgaaatttcacgaattttcggagctcgagaaataatttgaatagcacaaagttcatttaaccaatctctactacttaaaaaataagaggtgcttccatcgtccgtcaaaaaaaccgggcgaaaaaaaccaagtttgtccgatccaaaaaaaaccaggcgaaaaaaagtgcgaaaaaaaaaccaaatatgtccgatccagaaaaaaggcaaaaaaaaatgggcgaaaaaaaaaccaaaatttgtccgataaaaaaaaccggcgaacaaaaacgtgcgaaaaaaagaaaagaaaaaacaaaatagcgacaaaaaaagtccgagtcggtccctaaaaaaatagcgataaaaataaaaaaaagtttgactcctcttgttgcgattcaaaaagtccgactctagatccgaatcccacttctctcagattaagtccgagatactaggcaccacttctctcggtttcaatctataccattattccatacatcttggtgaaaaaaaattgatgtgctggattgaagatctgtttgcaaaaacggaacctacatatcgagagcattccatttttatatgattttaatttttgggtttgtacatttgtatttgagtccctgtaatttttatatttgcatttgagtccctataatcttgcaataaggtgcttttggtcttttttaaaaaaaacaataaataaaagggatataacaaaggtagaaaggtgcataaaaagaaaaagaaaagccacacaaaaaagaaaataaacaaaaaaaacaacaacagaagtctatttcccctaagtggcgaaaaaaaactgtagatgcaaacgggaaaaaaaatccaattcctataaaaggcaaaaaaaaaaaactggtgaaaaaaaacgctagatccgattcctttaaaaatggaaaaaagtctgattcctgtaaaggcgaaaaaaatccgaaaaaacatctaaaaaagtttgtccgattctctaataaagtggcaaaaaaatggttcgtaaaaaaaaaaagctggttcgtataaaataaaaaatgcacgcaagaaaatatggaaagggcgaaacaaagtccaatttctaatcagtataaatctcttctctatctctaatctaatctaactatttaaaaataaaaaatgcatgagaaaataaaaacgatcaaaaagacgtgtgagaaaaaagtcagaaaaaagcgcaaaaaacacgctgaaaaggttttttttccatcttcttacaaaataaaaaaacacgtgtgaaaaattatttccattgccagcaaaaactttttaaaaaaacatacgaggaaaagactgtcagaaaaaatgcgtcatttctaaaaaaaaatggtttaaaaaaaccacgcaagaaaaaacactatctattaaaaaaaccgctctgaaaaatctgtcagaaaaaagctaaattgatggacgcttgagtcgggtaggatccatcaattttttaccatctactacacggcttttatttcgtcatatattctcatgtattggaaaaaagcaaaaaataacatttaaaaaaacaggcaaaaaaaaccacgcgagaaagtaattgtcagaaaaaattgacaaaaaaacacgcgagaaaagcaaaacaaaaaagaggagaaaaatatggtttttgtcatcactaaaaaatggaaaaaaaaacatgctaggaaaaaactattagaaagaaatgcgctatttctgaaaaatggtttgagaaaatcgtggaagaaaaaaaaaacaccgtttataaaaaaagcaagctgctcattaaaatacaaacattgtcttcacatgattatgcatgaaaaacgtatattatcattaaaattttttcacccattgcaacacacgggcatttttgctagtttaataaaaagaaaaacaatcaaatctcccctccttcaatttgggccacttccggcccaaagccctccttccctccctgcggcccgtcccctcccctcttccttccttcctccttgggccatcgacctatcttccttcccctcgcgcaaagtctaaataaccccctgggttctcctccctctctccctccccgacaggtgggcccggcgaccccacctgtcaggccctcctcctaccttcggcttcccaggccgaagccgccatggtcggcggttgccgcccacgtcccgccaaatccggcgccctcccgctcgcgccctcgcacccaaaccaagtgaaaccggttcccctccaactcctccacattttcccccacttttccccaatttttggcgccaaattgagctccacttcgcccacgtcggcatcccacgtcgccgcctcttccgcgcgtgcgtggacgcggtcgtcgcccacgtccgcgccgttttcccccactctccccgcaaaatccggccacgtcgccgcctcccacatctctctctctctcccccacgtcgccggctggtttccacccctctcgggcccgatcccgcctccccgagccctatataaagcaccctcgtgctcccctcttccgtttcccccctccaccccgagctccctgcgcttttccccgctctccccacgctgctccccatcgccacccacctcaggcgagctccggccgccgtttcctgtcgctagggccgccgccaccttcggcatcaccgagccaagccctacctcggcatccactctgtttccccattccattgtcggaattccatctccaccatgaaaccgagccgccgccccttccaccgcctccagctgcccgccaccgccactctagccgctgccgcaccgcgccgatgccgccttcgggttcgccgcatcgtgccacgccccggccgccactccacccgtccattccatcgcccgaggactgcttccaccatcgacccgagctccaccaccgcctgtgtcgcctcaagccaccactcctcaccgcctcagccatcgccacgcaaatccgccgccaccctcggcttcgccgcgctgccccgcacaccggccgccactccaaatccccaaacgatcaccggagccccggttcagccgccaacccgagccaccaccacctctaccgcctccggcggcctctcctcgctgtctccggtcgccgcgcgcggcctaatccctctctctctccttcctcgggccaagacgctccccgaccgccccctcgcttgccgggccggcgccgccatcaccgtggtcgtcgtcgtccttccccgcgccggtcatcgtcatctcggtgagcatctccctcctcctccccttcctttcttttcctctctttgccgcactggccgccgcttgcacgtcgccgccatgcctaggcaccgctcgccgccgcagcccgcgtgtgccacagcttcccgcgccggtggccgcgccgccgctcgccgtcgctcggccggctggcctgagccgcgcccgtgccccagcgcgccaccccgtggccgcccgatcggcttgggtcgatccgggccgtcggttcccgtggaccggcggtggaccgcctcggtggtcccagaccacggtggaccggcgcccttgtgtcgctgaccggtggggcccgcttgcttgcgccgcccctcccccttgatgacgtcagcgcgtcccttttcctttgagaaaataattaataattgcacaataattcgttaataattctagaaattcatttaaatggctcaaaacttctaaaattcatatctaattcattcgaactccaaattgggccattcaacttgctaaattcatctaaaattgagatctacatgtttgtttactttttatgtactgtttccctggtttttattagagtttttcctcgttgtgcatgctagcgtgtagaatccgttgttcggaagttcgcggtcgcaaggatcagagttcagaaggttgaagtgaagaagcaaggcaagtcacacattccccttgagcatattgagcctactttacaattgttttactatttgcaaataaacatgcatattttgctaattacatgggatctgggtattacctatctgcttgcttgtgctatgtttacttgatatctgtcctttgtcaaccttgggtaataaatcaactagctcatgttacttatgtgacctagctggaactatatgcttagccatgcttaattaccactagctcagttgatgggataattacagtattagaccatttcagtaacagaatgagctgcgtgctcgagacatctggccatgcttcatggtcgtaattatccaactaaaatgcgactaaatggtgggctgtaggtgcatggttttgctagtcgcacccatggcaattaaggaccggttcgcgggaaaccttggaagaatttatcgtgcttaccacaagccaacgtgggcaacggctgggcttgtagtgtagctttcctctagccgacgtacccaggcgagggtgggcgtgatagagttgggtcggccggggtgtccggttgatcggcttccggattcaccgcggcacgagagggggctgcccgttgcctgctgggaacgggggcgaaccctgaggtgtggtgcgatcggttagagggggttatgagaagggtcctgtcacggcctctttccggtatgtcgtggtggcatgtcggcgcacggaaacatatcgtggggatttgtcttgtgggtacagttgtacacctctggccagagtaaaactattcgaatagccgtgcccgcgtgcccgcagttatgggcagtcgaccagattcaccgtgattagtctcaccttaataaatcgactcaatgcactgtagttcaggtgggttggttgggcctgttcaacgtggtgcagcgttgatcagtggaaatttaatgttattttaattactcaacagttttactattttactcaataaaatattttacaaccgcctttatacaaatagccacaaaccgtccttgtgttccccttacatgtctgcatcattggtgtggcttgctgagtacggtggttgtactcagccttgctattattcccctttttcagaagtgtagtgcttctgagctagaggcaaagttagaagaccaaggctcagaccccagttgagttttgcctgtggagtggagctgaagccctgctaggatcgcctttttcgctgatgctgcttttgtttcggtgtgagaaataagtgcctcttctgtaagtattttatgctttatttacgtttggaactgtttattacttgtcgttttgtgtaccctggctagtcctggacagggatttaatacacaaaatagtctggaaatttgggctaaatttctgggcgtgacaatccggctggggaaagcaacgaggaatcgcgtggacaccaggtgacgcggttggaaatatctattaatttatcaagttgtttaattatctcgtgactttagtcttgaacggcatcccgtgcgctagctgccctcttttagaaatatgtattacgtaaataataggtttgaaatagtcttggtttgcctcttaatgctgaaggaatctggtgtactatattggcttgtgtacaaatctggtacatgacaacactaatgtggaaaagatgataagtttggagcaagagtagcactttggttgaaggtgcgctgtgaggccggtacgtttggaaacttggaattattttaaaggtcaatataaagtaaagtgacaacactaagggaatgcacggcatcacgccgcgcgcagccatgcacacaaacatcacttaagcaaaaattttattaaacacaaattagctatcattgataagcgttctccatttaacataatatcaaaacgtagtactccctccgtcaaaaaaaaaaaaagctaacctagaaggggatgtgacccctctacagtaaatctggacatagcaaagtatacacaatatatatcaacctcccatgttatctaaccacacacattttgctagctgtaaaggaggatgaacacctgcaaaaaggaaataaatttcctagaaacttgaggaaaagagaataccaaacccccatcagacaactgataatagaagcaatggtacgtagcaagataaaaagcaaggttttaacatcattgcctaaatgtacccaaacatatttatttgaacttgtgtttaagcctttatgctgtaattgttttggacgccctaaaatatccagtgaacaccaggtacctcggcaactcaagcaatagtgaatcagctctgtgcacactccaaatgatgtaaaagctccttcaccaatctcatgcatccgaaatcatttcaaaaattcgaaaagtctgcacgtagaatataatcatttgtgaataataagggaaagataacaataacactaaattgttgggagcatcggagctaatatcatgcatgctagactaaaatcatggtaaagaaataagaacagcggaacaaagcagcagaatggtctctcttaatttggattaccctttcctaataaagtaaagagaaacattttcaagattcactaggcttgaataaactaaatcaactaacatacctgagtaaaccagaaacaatttattaactccatatgaccaatctatatgttgtagcagggggctaacacctcttcctcccattcggtcaaaacactggagtaaaagaggtgttgagaattctaagtgtccgaaagggaaattaccctttcgaatggtaaaacaccttttcaagtggaagaataccttttcaagtaggaaaacacctactcgagtggtgaattaccttttcaatggtaaaatacttttcaaatggttttatgttgctcagttaacttgagcgaactataatctatgtcaggtaagttccaagagcaaagcaagtggtaagaagtgtttgaactttcaagatagaaaaggcactcaacacaagggctcgaggaagaacactacttgagtaagggaagatgctaaaagaagattctgtgaggaccattctcaaccactcttgccagctggcgccaaaagactataatgacctacaagatgtaccaaaatgcacctagggttgacccgcgggggcaaagatgtaatcttgcatgtacgaccatgggctatttaagccggtcaaaatcctgtagcgggacaagagacattttataacacaaaagtaatcaccaaaaggttgtgtgtactgtttgagctctctaagaataggcaggagagttcctttttccgcctatccccaaacttggtcacgacatgatacaaaatcacaaagttcaacaaatggtatgtaaagcaagaacctcatattttaactttatttttggatgattcaatacttacagctgcagagtcggcagagatgcccatgtcttaatttggattaccctttcctaataaagtaaagtgaaacattttcaagattaactaagtttggataactaaatcaactaacatatctgagtaaactagaagcaatttattaactccatatgaccaatcgatacaaaatcacgaagttcacaaatggtatattacgcaagaacctcagattttaactttaatttttggattattcaatacagacagctgcagagtcggcagagatgcctatgtgcagggcttctatacgttgcatatcgagtttaacaaccatgttaggttgacttgatttgaacacaatctttatggcttcagccacctgctcaacacataggctatccatccatccatccaaaagttaagatcaccataggtcaatagcagcagggcgataacagctcaaatgtcaacgatgaaattgaaaagcattactaactgtaggatgaggcaagtacgcaaatactaccccataattcagacaacaaatccactcaattctgtatatatctaatttgcattgcacatacttagtagacctagataaattcctatgagatctccacaaatctgaatttcaactacgatttccaccatacattgcgatctccttccctcccattctctgatttggtcgtaacttgctttacgtcgagtttgataataaaggttcataacttattccatccgcatggaaaacgatgttgctcattagcatatgactaactaaatattagcttaaaacttaaaaatagattattatgattttcaagcaaatttattttttttgcaaaaaaaaacagatatcatttaacagtttgaaaagagtacacatggcaaacgatggagtataagttgggaaaggtgagtgcccaactcagctttatgctgtgttctttttcacacgcatggttcccaaacttctaaacagtgtgcttttatatatatatatatatatatatatatatatatatatatatatatatataagttgcttgaaaaaaatcatattaatacattttctaagaatgtttagctaatacttaattaatctgtatgatcgaatcacaataactaagctaaccagaggggggtgaatggttggtatacccaaaaaccgaaaacttttagcggaaataaaagttaccctcaaattcaacggatcgcagtctgaccgaaattgtcatgttggtctgaccgcctggttgccatcggtctgaccgaggttgaatctccggtctgaccgccgagatcagctcctgtcacctgtcgccgaagccggtctgaccgccgtgtccccgccggtctgaccgccgcgatgcctccggtctgaccgccggtgcgccaccggttagaccaccgaaacctggtgaaacacaaatcgaagaactcttaaagtagatgacaactttattggttctctccgtatttacaaagtgcaccaacaacactccttacaaaaatttcgacaaaactcaaaactctaactcaaaactcaactcaattgctctcaaaagcgataccaggaagcctcacgctccccctctatttatacccgaggtaggcagcctaaagccacgaaccaaactcatactagaagtcctaaacaccttaggaaaccctcaagtacaagaaacaaactttacataaccaatcatatcaaatttggactccttccaaattcgactccgcatcccatacgcacacaatacctccatcgtatgccatatggaatcttcaccaaccacatgcatcaactctagcctaagtatcccgcatgatctctgcccaccacggacgtcgtcttatccccaagccgactcccggtccatcaccgcaaatactctcccgaggcatcgagtcacctacacatgaaataaacaaagaaaccatattccgagaccaaagctatctccaacttgactcatcgttagcaaacaacagtattacatacgcatagtatccatctagaaaccatagtcatgaaataatcacagatatccaaacaaacaacccgaaaccgaaaccaacacagagtcggccggccagaccgcgggctggccggtctgaccgcgcgcataccgccagtctgaccggcaacccttgcctggtctgaccggtcacataaaataataacacctgtgattcacctgtaaatccaatcatctccaaaaccacttcgtaaataaattccaaataacaaaaccaataatctctaatgccaattgttcatcacagaataataatcaaaaacacctttgattttacataatcatgcgctaatccgcgtatccgttttacgtgtcggaggggaaggttcccaattccaaccctccttgccgaactcagccttagtttgcttcttcacaagtaggaatatctccacgaggtggcattcctgttgacatgatctgttcagaaaaatcaaaatatcacacacacactgaccatagcaatcgacataatcagtaagaaacaccaactaaaatcagtatgcaatggcgatcagtaaacaacaccaactgaaattagcacgcaaccacatgatcagtaagaaacaccaactgaaatcagtatgcaaaggcataatcagtaagaaaaccaactgaaaccagtatgcaatgacatgattagaaagcaacagcaaataaaaacccactttgtccacttgtcagtataatgcatagtcatgctgattgcaaacacggtgtccctctcatcctgaaaaggataaggtcatgctacagattgaaggagaaacagaacaggaaagattatatatcccagatttctgttatgtacgattattatctctaatcatcttagttcagtaaaaactctacaggtcacatgcactgaccaaaagtcctgtacaggaaactaaaaaccaagacagtgcacagttcagagttcagaattctactttattggtcaactttgtttagagttagagttgttcatagcaacttgatagtgaattcatagccaagcagataattcacgtccactaaaaaatagatatcttcacaaacaactgaagtggttagagatctgcagagacaagacctcatcatcatgaaagcacaataaaaaatggcatggacagccataaaaaacctctgctagtttggctctttttgaagctcaagaaagttatcgaggatatacatctacttggttcaatgcagatcaagaaaatgaccacggatatacatcaccaagtagactatgtgtataatggacgggagcagaccaaatggatataagtataatccaagctgagagcagtgttaagtgaacagccatataatggaaaacaactttcatgtttgattcagagagcacttttttcgttgggaataagttcttccctttccttttgtgtgaacagctttgtttcctgaatagtcaatgccactgttgtttcctgccagcaaatcttttgaaaaaatcttctgaataaacaacaagcacatgtttagaaaaataaaattaccaacaaaactttaaataagatgtccacgtatatgtgcggggctctcgtcctacttatattaaagtgcctagaaaagtcattttaaatggtattgtcgaccttttgcaaattatctgagcacaattttcttcgtaagttgctgcttgaaaaatgaacttgtcagcctttacctaagaataaaatctgtagattaagtccaataaaaatgtgggtcactctgtatgttacccctcagtgatttaactacacgctaaacaaccgatcatcaacgagggtttttcttcagcgatttaacagcacgctaacaactgtgacgggccgctggcctccgtcacatagaaaagccgttcacgacgagtcgatggctgtgccaagatcgttcccaacgcctcccattcccatgcctgccttcctagttgggactcgggagcaaatggaaagcttaaccagatgagcagctatggacgtctgattattgagcagcacagcacgcatatagttgctggggacatctcttattgttagctgatctgtgctaatgctagtgtagttgtgtacattgcagcggcgtgcctttgttcctctggtactcttttggacgtcaaaggtgaaggtaatgcccttttcctttattttgtagagaaagtagatatatactccctccgtttcacaatataagtcattttagcattttccacattaatagtgatgttaatgaatctagacatatacatctatgtaaattcattaacatcaatatgaatgtggaaaatgctacaataacttacgatgtgaaacggaggaagtagaacttatgtaagctcgtgtcctccttacgaaaggtcttgtttatagaggaataaatgcatccatcaacccgagcagatgaatatataagtagagtttaatatcgttgtaacatggaacacctgtggcaatatccttccagcagatcaatacaattcagccgcatccagtacatctgtactactccctccatcttgaccgtattactttctcatcaagaccaagaagagcactaacttctttctgattcatttaatttgatcacttttgttcctaatccttatttttcgtgagaccttctaagttgctctttattggtaatattttaccactgcttcctccgttcaacaatgtaagactttctagcattatccaaatttatataaacgttaatgaatctagacgtatatataaaatatatacattgatcaatgaatgaatctaggtaagataaaaatgttttacaatatgaaacggatggagtagcaacggttcgagctatcggtttataaggatgcattggtacttttcatgcttaaagaacctttaataataaaacaacaaaataaataaatacttaattcctcatttcacaatgtaagttgtcggtgacatgggaccgggagtatcatgactagaggcttgggcagccgcgatcacccacgtggcccgacccccccgagggggtcgggtccgagggtgatgtggccgcccctccctttgtctccccgaggggtcggactgctcccgtttcgaccccgagggccggggcgccccgaccccctgtgggtttggcgccacgtatatgggttaggtgagcacagcggggctcacctaaccgcatttattgcgggttggacgagcgcgtcacgccgcatgtaatgcagcgcagcgcgctcgtttatccggtccgtgaccgggcgcagcgtgtgaccggtcacagaccggtcagatcgcgggttaggtggtggcaggtggcctgttacacgcctcgccccgtcccgttggattgatgagagcctccaggcacttgtccctagccggagacggcgtgccagctcctgaagatggcacgtcggtcccggtcagatatatgccaggcttcatcccaaccattgcaaggaagtcattgtatgaagaagggcagacatgcagcttgctaaactgacgcgtggtggacgagagtgaccggtctgtgactggtctgacgcctgtcatgtcatcggcaaacaaccgtgcttccacgttgcacctgcttccgacggagtggaggttggtatgacccatcccatcggagggtcattcaaacagcagccattgcaaatctccgcccattaatgagggaggacagggctatcccggtgtcaggtaaaagtgcgagccaaatcttgctcaaagtaggatgggtccccacccaaaagaagggtaggtagaaatggtatatgtggtatccccttgagatataaaaggaggaccatgcctaccaagaaaagggaagaaaaaaaaaagaaggaagaaggagagaggggagctcatagaaaggacggggaaaaagagtagggagagggtctctagagttgaaaggctcttgctcttcagctctttgtaactccttcagagacagatccgccagaacacaggagtagggtattacgcttctcagcggcccgaacctatctacatcgcccgtgtcttgcgcgtttgctctctcgcgaaccattccacagatcaagggcttagaacctcacttagcgcccccggccgaaccggcaaaggggggcccgcgcggtctcccggtgaggagccccacgctccgtcatctggcgcgccaggtagggggcgcgtgtgtttttctaagctctcatcctctttcgtgtgcgccaagcttttcccgttcagcccaatggccgaacgagcaaaagcgcacaacctctctccgagcgctagcggtgacgacagcgagcagaacccgcgtcgtcgagctcgtactccgccgcccccctctcgccgaagtcttaggcgggaggaggcgctcgagggggtcgaaagatccgcgacttcaccgcccacgagcgatggagaaggacggcgagacggggagcgtcgtctcctcgtctacggtgatggcagcacgccccagggcgtgctccaggctgcgggcgcgctcctgcgtcacccgcccgtcgtccctgatccagagactccaactcgacgttggctagatgacgtggccaacttggtcatgacggcgcagcagcgtttaggcgccggcgggcggtcctccgccaccaaggccactggtgctgctactgccggctccgtgtcgtcgaggcggagggcgcggcgagcggcggccgttgcccgccgttcgtccgccattccctcgtcaatgcctccgacccaagaagatgtgcgtgaggggccggatgcccgcctcaatatcgagcgccggcgcaatgatcgtcgtgctgcccacgcatcggagggcgcttcctcgtccggagcgccacttcggtccggacacggaggccagccccccgtgtccccggttggcggtgccggctgtcgagcctttgtggcgagccttcgaaacgtccgttggcccccaaggttccggcccaccatcaccgaaaaatacgacggaagcgtcaaccccgccgagtttctccagatctacacgactgggatcaaggccgccgggggtgacgacagggtcatggcgaatttcttccccatggccctgagaggacaggcgcggggttggctaatgaacttgccacccgcgtcggtccactcttgggaggatttgtgccagcagttcaccatgaacttccagggcacatatccgcgcccaggtgaagaagcggacttgcacgcggtacagcgaagggacgatgagtctcttcgctcgtacattcagcggttttgtcaagtccgcaacaccataccatgtatccctgcacacgcggtgatctacgcgttcaggggggacgtgcggcacaaccgcatgctcgagaagatcgcctccaaggagccccagaccactgcggagctttttcagctcgcggaccgtgtggctcgcaaggaggaggcatggacctggaactccaccggttccggtgtggcagcttcagccgcccccggatccgccgctcggtcagggcggcgggacaggaggaggaagaagaggtcggcccattccgacgacgagggtcacgtcctcgccgtcgagggcgcttcgcgggccacccgaaaggggaggcctgcgagtgacaaagagaaggaggccggcgctcccagcagggagcgcccgaccggcaagtggtgcaccgtgcacaacacctccctccacgacctcgcggactgccgcgcggtcaaaagtttggctgagcggacgaggaagtgggaggaggagaggaggcaggagcgccgtgagggcaagtccccagcggctccctctggcaaccggcgaagtgaggccaagcagaaggcccccgccgaggacattgacgatggcgacgatgacctagggttccaggagcctggggccaccatcgccaccgtcgatgggggagcatgcgctcacgtttctcgccggagcctcaaggccatgaagcgagagcttctggccgcggcccctacccatgaggcgatgcggcgggcgcggtggtcggaggttgccctcaccttcgaccagaccgaccacccgccgtgcgttgcccggggaggacagatcgcgatggtggtttcccccaccgtttgcaacgtgaagttggggcgtgtcctcatagacgggggagcagccctcaacatcctttcccccacagcctttgacgccatcaaggccccggggatggtgctccggccgtcccagccgattatcggtgtgacgccggggcacacttggccgctaggtcatatcgacctcccggtcaccttcggtggatccgccaacttccgcacggagcgggtgaacttcgatgtggcggacctcagtctgccctacaacgcggtcctggggaggcccgcgttggtgaagttcatggcggcggtccactacgcttacctccagatgaagatgccgggccccggtggccccatctctgtccatggcgacctcaaagtcgcgcttgcttgtatggagcagcgcgcggaccacctcgccgccgcgtccaagcccgagggtggcgacgagaggctcggcacctccgtccccgccgccccgaggcagcggatgatcacgtgcgacgaggtcccggtcaaggaggttgccctgggcgacggcccgtccaagaccacacgaatcggtggtctgctggacggcaaataggaagacgcgctcgtctccttcctgcgagcaaacgctgacgtcttcgcatggagaccggcggacatgcccggggtccccagggaggtgattgagcaccgtctcgccgtacggccgggcgcaaggccggtccgtcagaaagtgcggcggcaggccccggaacgtcaagccttcatccgtgaggaggtggcgcgacttctggaggccggattcatccgagaggttatccatccggagtggttggcgaacccggtcgtcgttcccaaggcgaacggcaagcttcggatgtgcatcgactacaccgaccttaacaaggcatgtcctaaggatccttaccccctaccacgcatagatcagattgtcgactccaccgcagggtgcgaccttttgtgttttctagatgcatactctggttatcatcagattcgcatggctagggaggatgaggaaaaaactgcattcattacccccataggaacttattgttatatgacaatgcctttcgggttaaagaatgcaggtcctacttttcaacgtactactcgaatttctttgggtagccaaataggacgtaacgttgaggcctatgttgatgacttggttgtgaaaacacgcaaccaagagaccttactctcggatctagcggaaactttcgaaagtctccgcaccgcccgcataaagctgaaccccgacaagtgcgtgttcggcgtgcctgcgggcaagcttctcgggttcttggtctctgctcgaggcattgaggccaaccccgagaaggtacgagctatagagcggatgcgccccccagcaagcttagggatgtgcaatgtgtcactggctgtatggccgccctaagtcgattcatatcgaggctgggagagaaggcgctacccctatttaagctcctcaaacgctccgggccgtttatctggacggacgaggctgaacgggccctcactcagttgaaggcgtacctcagttctcccccagtcctggtcgccccggagccagatgagccgttgctactttacctggcggcaaccccgcaggtggtcagtgcggcgttggtcgtggagcgcgacgaggacgaccctcgctccgcgcatccccaccctgtgtcgactcgacccgggagagagcagggaggagaggcccccgagccgaacggtggcccaaggcccccgacgaccggagctggccctccgcccgcttgtccgacggtgccaggcgcccccgacccccaggatggccacggggccactgcgggaaggccgcgcctgtcgccctccgaccccgaggtcgtcggcacagaagccgagtgcgccccgcgaggcctctcggacgaagagcgccctggagatgtggcccctagtgaagaagatcggccccgccgaaaggtgcagcggcccgtctacttcgttagcgaggccctccgggacgctaagacccgataccctcaggcccagaagatgctttacgctattctgatggcttcgaggaagttacgccattattttcaggcgcatcgggtcacggtagttacgtcttaccccctcggccaaatcttgcataaccgagagggtactggacgggtggtgaaatgggcaatcgaactctctgagttcgatttgcgctttgaaccacgccacgcagtcaagagccaggccctcgccgactttgtggcagagtggaccccggcccctgagcccatctccgtccccgaggccagctcgggcccctcgcagctgcctcacaccgcctattgggtgatgcagttcgacggctccctgtctcttcagggagccggtgcgggggtcacgttgacctcgccgagcggagatgtcctcaaatacctggtccgcctcgactttcgggcaaccaacaatatggcagagtacgagggactccttgcgggactcagagtggcggctggactggggatccgccgcctcctggtgttaggcgattctcagttggtcgttaaccaggtctccaaggagtaccagtgctttgacccgcagatggatgcttacgtgcgccatgtgcggcgtatggagcgccattttgacgggatagagcttcggcacgtgcccagacgggataacacggtcgccgacgaactctcaaggctcgcctcctcgcgagcccagaccccaccgggcgcctttgaagaaaggcttgcccagccgtcggcgcgacccgaccccctaggggagacggacgcgcctgaacggcccccgaggcccgtcggagtccaggcctcgggacccgaggggagcgctcccagctcccttagattgattgcttggatcgctgagatccaggcgtacctcgcagataagactctacccgaggaccgcgaagggagtgaacgcgtccagcgcatctccaagcgctacgtactggtgggagggaccctctatcggcgcgcggctaacggagtcctcctgaagtgcattcctcgggaacaaggcgtcgagcttcttgccgatatccatgaaggcgagtgcggagcccactctgcctcacgcaccttggttggcaaggcctttcgccagggtttctattggtcgacggctctcaacgatgcggtcgacctggtccggcggtgcagggcgtgccagttccacgccaagcaaacccatcagccggcccaggccctgcagacaatacctctttcatggccgtttgctgtctgggggctcgatatcctgggtccgtttagacgggccccgggcaggtttgagtatctgtatgtcgctatcgacaagttcactaagtggcccgaggcttatccggtcatcaaaatcgataagcactccacacttaaattcatcaagggcatcacagcccggtttggggtgcctaaccgtattattacggataacggcacccaattcactagtgaactcttcggtgactactgcgaagacatgggcatcaagctctgcttcgcctcccccgcccaccccagaagcaatggccaagtggagcgcgccaacacggaaatcctcaagggcctcaaaaccaagaccttcaacatcctcaagaagcacggcgactcgtggatcgaggagttgccagcggtgctctgggcgaaccgaaccacgccaagccgagcaaccagggaaacgcctttcttcctcgtctacggcgcggaggcggttctcccatccgagctcaccctgaggtcccctcgggccaccatgtactgcgaggctgatcaagatcagcttcgtagagatgacctcgactacttggaagagcgaaggcggcgcgcggccctccgagccgcgcgctaccagcagagcctgcggcgctaccatcagcgccacgtccgggcccgatcactctgcgtcgacgacctcgtcctacgccgcgtccaaacgcgtgctggactgagcaagctctcaccaatgtgggagggtccgtatcgagtgatcggcgtcccccggccgggctccgttcggctggccacgggcgacggcacagagctgcctaacccgtggaacatcaaacaccttcgtcgtttctacccctagtaggggtcgggtgtcaggtctcgggctcgggccaaccccgcaccccccctgggcgtgcagggttggccgggggctaccacatgcatatacttatcttttttctcttccgtatttcaataaaagcattttcgatttcctaaggactgtgtctgtgccattgtttcctttcaaagagtcttggcttgaattagcatgctcgtgctcgaccctgccctcggtggcccgggccggcggaaatcgccaaacggggcccagaaccgagccgtgccccggggcgtggtgaactccggaggggaatcggcaaaggcccacaatcgggtcatccataaccctcggtcaccacgttcccggcctggccagtctcgacacgtggatctccccaggcactagccccgacccgcgccatttgaggctaggacctgggcacgagccctcgttcaaaccaagacacagaaggaccacggcacaggccatcctcgtctcatacacacgacaaacagagctgacacaaaaatttcctctttatttgattgcagattaaattagtttgtacaagaagggggcccgaaggcctcagaagaagaaaggaaaaactatttaagattggcgggggcctgggggctcacttcgaggctcccgggtcgccggcctcgtcgtcgctgtcgtccacaccaccgtcgccgccctccacgtcggagtcgagggcgaacgcgagccgaggggccgtaccctcgaagctgtggacgatgtggtcggcggcgtcccggacctgcgcgcgcgcgtcgtcctcggttccaggagggaactcgtccagcgccgcccacggggagaagtccgggtccctggcctggtagcttgccagtacaagctctactgccccccgggcgaggtctctcgaggatgacttgatcgtctcctcgagctcctcggggagccgctggagagtcccggccatctctgagaggcgctgggcgaggcccccctggttggcggcatatttcgcgatccgcccgccccagaggcccgcctgccgcccgacgcggtctagacgggagacggcgtcccgaagcatgccgggccctacctcgcctgccaagcggagggcctcgacctccccggcggacgagtccagcgcgccctgcagctcggcgatagtgtgttcggcagctgcgaggcgggcggctagatcgccgtcgcccgtggccgccccgccgctacgcgccctcgcatccagctcccttgcccgtgcctcgagctcagcggcccgctgatccagtgcggccctctcggcgcgggcaccttccagattgcgacgcgtttgtttctcctgcgctgcctcacgaagggacaggctgtccgccagcctttgcgccgcggcctcggcctcctcgagagctcgctcccgctcggtgagcgcatcctcgcggaggcggagtgcggactcctcttcagcacaggcggcttcgtgcgccgccagtgtagcctcccggatggcaacggcggcctcgcggtctgccaggtccctctccttcacgcaggcgcgctcttccagcgccgtggcacgggcctcaagggcttcttcgcgacgtcgggacgccgcctcggtctccgccgcccgccgttcccgggcagcagcggcatcaaggaccccccgggcggcgtcgagcttttttcctagctccgccgcccagctcccgtattgaaggcggaggtcgtcctgcgcctcgttcatcactgcggtggcgatgagggcagcctcccgctcctcctccacctccctggcgatctccgccagctccttccgacggacctcgagctccgaggtgtgccggcggtgtgccttgcggcccgcctccaccatggcctccaccgagcgtcgcccctcttcgacacgcgcccatgcagcgtcgagctccgcccgctctgcctgcaggacctccatctgggcacttaacccgtccaacaccgtggtgttcgcggcggccaaggcctgcagaaggggctctacgctcagtggggcagcggaaggcatgggggagagccgcctcggtggggatgccgcacggctcggcccgccgatcgacgtaccggactcagggacgtcccccggacctggcttgtcctgagcgtcgcccgaggggtcgggcccgagcggtgcgcccgcggcctcgtcgtgggtggcctcggaagtcgtcgtcgcctcgggcggagtcgggtcgggggcttggcaggccgcctggcgtgcgtgcgccgcctccgcctcccgggcggactcctcggcccggcggagtctggcctcctcccgagcggcttcctcagcccggcgagcccggacggcctcctgggcagcctcctcggcttcccgaaggcgatccgcggcttctcgccggtcagtttcccgcctccgggcctccgcggtcgccgtatcctcggcctcagaccggccggacttggaatggcgggaggggcgcgacgggatctcgctgaagcagaagaaaaaccagaagacaaacaaaacgagtgagtgcggcgagggtagggcacaggaaacaaggagttagggcgcaagcggcgaaggcaaggggaataatgacgagaggaaggaagcgaatctcttcctcggcgtctttatacccttgccaacgctatgcccggctcctcgcttcccgcgcccactatctcgccccctcgttgctcgcgcccacgtctccactaattccgctcgcccgtttgcggcgcacgaggcggatgtgcggctgtggcagttgagatgggacatatcgtgcgcgcgttaactatgctcgccaacctaagcgccatcatcatatctccaggcaaaacgaaccggctcgtcccgattcgcgtgctactcgagtaatgtagcggtcttaaagagaccgctcattatagacagtcggttttccgttgccgatgtgcgcgatttgcgaccgctgggtttctgcccgcctgtagagaccggccccacctgtcaccaggcctaaggagtggcgtcacgcccgagcgcttccttcggggggggcgatcgccctggcataacgccgggggctactgtcggtgacatgggaccgggagtatcatgactagaggcttgggcagccgcgatcacccacgtggcccgaccccctcaggggggtcgggcccaagggtgatgtggccgcccctccctttgtctccccgaggggtcggactgctcccgtttcgaccccgagggccggggcgccccgaccccctgtgggtttggcgccacgtatatgggttaggtgagcatagcggggctcacctaaccgcatttattgcgggttgaacgagcgcgtcacgccgcatgtaatgcagcgcagcgcgctcgtttatccggtccgtgaccgggtgcagcgtgtgaccggtcacagaccggtcagatcgcgggttaggtggtggcaggtggcctgttacacgcctcgccccgtcccgtcggattgatgagagcctccaggcacttgtccctagccggagacggcgtgccagctcctgaagatggcacgtcggtcccggtcagatatatgccaggcttcatcccaaccattgcaaggaagtcattgtatgaagaagggcagacatgcagcttgctaaactgacgcgtggtggacgagagtgaccggtctgtgactggtctgacgcctgtcatgtcatcggcaaacaaccgtgcttccacgttgcacctgcttccgacggagtggaggttggtatgacccatcccatcggagggtcattcaaacagcagccattgcaaatctccgcccattaatgagggaggacagggctatcccagtgtcaggtaaaagtgcgagccaaatcttgctcaaagtaggatgggtccccacccaaaagaagggtaggtagaaatggtatatgtggtatccccttgagatataaaaggaggaccatgcctaccaagaaaagggaagaaaaaaaaaagaaggaagaaggagagaggggagctcatagaaaggacggggaaaaagagtagggagagggtctctagagttgaaaggctcttgctcttcagctctttgtaactccttcagagacagatccgccagaacacaggagtagggtattacgcttctcagcggcccgaacctgtctacatcgcctgtgtcttgcgcgtttgctctctcgcgaaccattccacagatcaagggcttagaacctcacttagcgcccccggctgaaccggcaaaggggagcccgcgcggtctcccggtgaggagccccacgctccgtcataagtcattctaccatttcctacatttatagtgatgttaatggatttagatatatataaatacgacaaatggtcatgttaaaaagggataaacagaagcgtacatttaaaatggatgtggtagtttcttagttggtagtgtttttataggaatgtatataatttcaaagttatacaaaacaaaaaaagatgaggaaaaaatatgtttcacaatgtgcatagcttcctcatctctctacttctataaagaggaagttgtcctcctccacctccgcgtaaaaacctttcttaaaagaaaaggtccatcctaaaaaatactttctaaaaaaacaaccattgaaaaaaaaaaggaacaacccactggactaatatcctcccactaaactgaataaaaaatcgttctgaagcacaagctaacatgcatgtgttcagatcacgtgagcacagctcgtgcgtagggagggatgcaagtgggtagtctcgttacccgcttgctagtttatttctggtatggtagtacaaaatttagaagaaaaaataagctagaagttggataagcggaataaaaaagcccgcttgtccgcccccgcttgcatccctactcgtgcgctgcatcaagccaagcccctacgagtagagatcactcaagaagaacggctgaacgaggccatcgccggagggctgtgagcatgtgaccggcatgctttgaatccgtgccttctttctctgcactgcttgatgccattgcaactttgcaaggcaaccaagtgctccagcccccctggtctcattcccagactttggtagctgaggctactggaactatgttcggtgctgcaaccgttgttggcattccgtgtgcctcccgttccagtgatatcggtcaccttgaaattcagtatatgtgtgtgttcccttctgcttcctatatattttttatcccaatccatggagttgaaagaaaatagtgtaaagaatagatcagtatgtatttaatacaaatgaaggtaaggcagatcgtgttaaggctaaatgtaaggttatatctatatgtgagcatccctacaaaaactaacccaatggaagagatgtcccaaaggcatttgcgctaaaggtcaagaaaaggcgccccaaggtcggctcttacctatatgaggacccgaagaccggttcttaactcgcgcttttggggaacacacagcaagggaccttttttttttttgtgagagccagggttgagccctggcctgtagcctcacaaatgaggacttcaccgccatgctatgagcacgttctcagcatatctgaaataagaaacaacataagatacaaatccagaacaatccttaaggatacatgtagggtgctatttatattctgcaaagaaacctagccagtaactttttatcttttgttgaacaatttacagagtcatcaaatagtaactgccatatatactgtcaagataatcagaaccatcctaaaaagataataaagcaaattatcccatattaaatcatatctcagtacctcacaaacaagtaccccatcacatgttaaatggaaaattagacacaactttgtattacaactcatgaataacaccttttttttattaaaaagaagtgcatagctaagaaaagcaccctgatggaaagataatgacaacgacagaattccaaaataatttgtcctgacagctaaaatggtgcttgcaataacatactaaaaactgatttggcatcagtatttggtaatttgggacaggattttctaaatatagcaggaaaatacaaaagtttattttctcagaataatgatcaacgaatctacatgtaatatgccagttgttgaaagagaagcaaaaaaaagagagagagagaaagaaatgcaatgtgcaaatagcaaagatgcatgtttggtgtttccgctacaaaagtcatggaccaagcgaaaacattgctctaaattcctataaagattaaagaagagggggagagagagaataagatggcaagacaaggtaatactaattgggctcaattatcttcccttaaagtaataatatagtactatgtttcattcagcaaaagtatcataaacactaaatatatatattccatatggtaattcaattggctaatggaacactattaggacaatttcaacaaacatgttatggatgaaaagatgacaccaacctgaggtggtcagtgaattatcaattatgcagtgtcatctttatatttgcctgcttgtctccccctcgtcctagggatccttcttaagcttcttgcttgggatcacacgagggatgctttttctcctccttatcaccaacttttagcaatcacacccagctagagagaagcatgctgtggaacggcagtagccagtaggcaagtgaccatgccagcttgaacaggttagtggatggaggagagtacaggaccataattccaactctgagtagattcagtggtgccatcttaaaatgttttctctcttttcgttccattgaagggttctatttattagatcaccagacacggaccattatgaaccttaagtacctgacgtgcttgaataccaataaaaagccactttcctgaatggtacccttctccattaaccagaggatggtcctcaccaaatcaatgtatctggaacggatgtcacattttattgtgccaaaccatatcctcaaaccatattggctgcaagtgtgtaattctagtaatgcacgttgaacttgagactgcaagatgaattaattcttcaaccttaaggcttcacttgagaatgatatctgttcaataaactcatgagacatgacccctcttttttcccccagagacgtgactactcttaggattggaaaattatgtgaatcaagtgctctaaacatcaagaataattagccactcagctcaatacaactccatccaggttccttcattaatccttgcttgcttagttgcctcctataacttgtggccttcttccatttccctaaacaactgagcatattagacatcagaacacagtgatcagaatcttgagtctccaaattcagaagttcctctggtatgaaatctatggatgaatcagcacaacgagcactgtatgaactaattataggagctaaaaccttattttgcacctcacttggcatctgcttgaagaactttagggcgctcccaaaatgaccagctttacaaagcaaatcaaccatgcacatatgatgttcaatagatggctcgataccatattccattgtcatgctgtgaaagcactcaagaccttcatctactaaaccagaatagttgcatgcggtaagaacatgagtaaacgcaatcccatctggttgaaaacctttgtttttcatctccttgaaaaggacaagagcctcacttccttctccattgcaagcatacccattaatcatggcactccaaacagctatatctctattggtaacaccctcaaatattttcctagccagattgatgctaccaaacttgctatacatgtcgattaatccagtagctactcgcggctctgaatgcagtccagtggcaattgcctgctcctcaacctttttccccagattagcagaccccaatttggcacaagctgaaagaactgatgacagagttgcttcattcggctcaatgtttgcgcacaccatgctatcgaacatcaccaacgcttcattcagatgaccaccttcaacatacccacttatcattgaagtccacacaaccacattcgccatgtgaactgcatcaaagacttctcgagcggattcaagatctccacactttgcatacaagtttatcaatgatgccgcaaggtcttcctcacattcaaagccaagcttaataatgagagcatgcacacccttggccaccgacaagttcccaaacagaacagcagctgatatgagattcacgagcactaccgagtcaacatttttcccaactccccgcatgcggttgaacagatcaaacacctccagataatcccctctaagtaaataaccagatgccaatgcagtccaagtaactacagacttgttgcatattccatcaaacaacaaccgcgcagcatccagatggctaccacggacaagcatggtgagaaccgagttcaacacaggcaaaccggcatcaagcccagatttcacgctaaacccgtagacgcacatgccaggattgcttgcggaaacggagtccacacacccggagagcacgccgacgagtgtgccctcgctgggtctgacccccgcacgccgcatcgcgttgaacaccgcaacagactcctccacctgggagctcctgccgtacgcagcgaccatgcagttccaggagaccagggtcgggcgcggcatttcgtcgaacaggcggcgcgcgtcggggaggcgcccgcacttggcgtacatgtcgagcagggaggtccggacgaacacggcggaggcggcgccggcgaggagggcgtgggcgtggacggcggcgccgaggcgggggaggcggagcgcggcgcatgacttggcgagggacgggaaggtggatgcgccgccgccgccgaggcccgcggcgaggagggaggcgtagtggcggaggcagcgggagtaggagcccgacgcggcggcgtgctggatcaggcggttccactcgcgcagggcggtggtggtggccgtcgtcgtcggcggcgtgggttggctcatgcgtttcgaggttttcgggggcctttcggttgttactatgtaaatttcgacaaaattgcatacctacgatcgcaaagtttggacacactagaatgccagcacttaaacgggcttcgctagaataccacgttgaaatgccattatgtaccaatctacccttgggcttcatcttcctcactccaactcctcatcttcctcgtcaccggtggctacggtggcagcaaggagagccggcggccagcggtggtcgtttgcatacggtcgatgggagtagtgggggcagaggcatccttggggcaaggaggtgcagctagcggtcgacggcagccgcgcggagggctaggggtagagtagggcggagcgcggtagggttggcgaggacagtggcggcagacgtgctctcgtcggccgcacacgatgaccaccgccgggagccgtcccggggcgacgacctccgcccacgcgctcccgccgccgcacctgcactcctgccaccgcccacatgttcccgccaccgcgtgcaacgaccgctgccgcccacacgctcccaccaccagtcaccgagctcgctccctcggttcccctcgccgtagccggccaccaaactcgctcccttggttctcctttggtgattaatatgcagattctatgtttttcgttaacatattttttaaactactatgcagcatagtagaaaaaatcagaccggacaccgaaccgcttgaactcatggtccacccgggtcatcgattggacccactgggtcgatcggtatttatacaaaccaagctatatgatgagtgaaagccatgacacctcagaccgcttggcactaagatgttatagctcagcgccatcaaagatgttatagctcagcgccatcaaggttggcgctgagaaaacgaccttttttaaaattagtttttggcacggttcaatctcagaataagttttttaaaagtgtcaagttgtcaaaaatatggctaatttattttagttccgtcactagttttcctgttgcaatgttcggcgtaggtcatctttttatactagatgatgccccgcattttgctgcagtatatatgttagataatagagaaatgataaaattatttggactgaaatattatgaaaattatttaagagtaataatttagcatgtgtatgtttagttttagaatgaaataaattgtagatattattactatatgcttgcataataagctttgtgtgctcaatgggttgatgtggcatacttgcatgtaggttttaaaagtgctaataaatattatgcttgcatgttgagctttattaggtgtttagttgacattatgtttatagaaaaaagagattaaaaaaataacaaaacaagcctcactaaacaatcaatctactccctcggtcccaaaatataagggattttggtggatgtgactcttactgagacaatgaatttggacagactaggaaatgtcacatccacggtgtgtttggttcacggtcatgcatggatgggatatggccatccatattttgttggatatggcgatccaatttcttgttttggttgaagggatatagcatggatgggaaatgccaaaagttagtgggacccatttgtcatatatatttttttatcaaaatataatcattcgagatcttgttttaaagattcaattgtaacaaatataatgtaatggtgtaatcaaattataaattagataaatggtttaggtgaaaaaaatcatttggagcttgcttaacataaaatcaaaccaatcgcagccaatcagaataggcaaaatttgctacaaaacactcaaagattgtggtctttgctgtgagacatccgaagattgtgtatttgctcgtggacactataaaaaaatggtaattagctgctggacactcctcctattattttattattagaaactttggttaaagacaagtttgcccatgggcctacttgtcaatctctctttctctgttcttcttcctctctttctctgttcttcttctttaatagcaacgcgacacttttcatcgccctcggtgcgcccaacagcagcaacacggcggccggcttctcgttcacaccgatgcgccgcatcccctcggtgccgacgttctacgtcgtgacgctcaccagcatcagctgctgcagcacgcatcgccggtctccgacacgtcgagttgtttcatggcgacggcgcgcccgccgctgaggtcggcacggtacacggtcccgaagctccccctgccgatgcagtacgcgtcgttaaagtgctccgtcgccgccaagatgtcgccgaaggagaacgtcgtgtccttgctccataacgaggcctgcaccgccgttgtcgtcgccgccgccgagctcccgccgctcgccgccgtctccgcgttctctatgacgacgtcggcggctcgcctcgccttgcgtgacaccgtgcaaaccaccacgaccatggacaccagcagcgcggtggcgagggagagcgtgacggcgagcaccagcctcgtcttaccggagtggccgtcgccggtggtggtgttcgagctgcaatgttgttgccgcacaggccagggttgccactaagatccagcgtcgtcagcgacctcatcttgccgagcaggggcgtcaccttgcgggagaggttgttgctgctcaggttgagataccacatctcggccagcttcgtcatcttcccgccgccgccccgccgtggccgagccgtctcgggttgggccagccgccgtcgcgcctctgctctgctgcaaggaagaagaaggggaaaaaaagatagagagaggaagaacagtgttaggggcattttggtacttacacaactctttctctccatctcgatcagaaataataaaataatgggaggagtgtccagcagctaattaccacttttttacagtattcacgaacaaatacacgatcttcgggtgtctcacagcaaagaccacaatctttgagtgtcctgtagcaaattttgccatcagaatatgacacatcaccgagactaaaactggatggctttatccagccaaatcagtcggatgcactcatctaacatattgagggaatattctctattatgggccgccccatccgccctgccctccaaccaaacaccacaaaaaatcgggcggccatctcccatctaggctccgagggagtactttttttttttttacctgcttcctcctctaacctctatgggcccattggcccaagggcccaattccccgctcccctcctcctttcctctctctctctcccagcccgcactccctttctctccccctcccctaacccctagctgagcggcggcggcggccggcggccggcgagcggtgagggcgcgaggcggcgcggcgtgcggcgcaggatcgagggagggctcggactgccggcggggggcaggcggacagcggcgcgacgtcgtcacggcgagtcggcgacggcgcggggcggggcagcggccagcggcggcgccggcacagggactctgggagggagccgggcaggcgggcagccggcagccgaccagccggggagaggagggattgaagattcgaatttcgaagtattgaaccattgactcattgaggttagggaactaaagttcactgatttcatgatttgttctacacttctacttaagtacttatctagtgaagtatctactagactactacttgcttagtttttacaactgtacttgtgagtagttcatacttgatacttcatagttcctactccctccgtttcacaatgtaagtcattttagcattttccacattcatattaatgctaatgaatttagatatatatatatatatatatatatatatatatatatatatatatgtctagattcattagcatcaatatgaatataggaaatgctagaatgacttacattgtgaaacggaggaagtagttactatcttgcaaacttgattagctagtaaggcagttagcgaggactaggagccttcaaccttggctactaggatttgttcataggaattcagagatcttagtaattagtatttctatcctttatgtatttcatatgctggcactttcatatgtttaccaattagtatttctgtatgttaaacaatttcaagtgattgtcaattctatcaatgtgtgaacttatgctcaattttatgttatacatgctatatattatataattattagtgtgtgatactatacaagctaatattaggcttttaggtgtatgaacaaaaaaaaaattaccccttcccatttcgaatacggtttgaaatcctgggcttgcccctggcttgttcgtagatttgcaatttgcaaaaaaatagagacgaaaacatcgcacgtggtatttcactgataacgctaatgctatcactctacagattggtatttgcatatttatagtcattttcactttccatcagtaaagtacaagtagtacagctattatatttcgtaatttttctcccttttttatgtttttatgtgtgaatttggacaccattataccgataaatgcattgtttgtataaactgatgagtactccctgtatttatctcttgtctttgccagtagcagctgcacagttaaaaggcttgtttctaggaatgtaccattgtttgcttctatagttttcagtatgacctgttgtggttgaagccgtagttgtctggtgtgctcattaacataaatattatgtgttatttgttgcattgaaggagcaccatggatggaactctttgaatgcttttcattcatttggaatatctagatatggttatggtgcatcaattaatttattcacataggtggtcaagggcatacttagagggtctcctctaagggttcatatgttaaatcaatgcctgtccaattcattggcctcccagtttagtttccatactccttggctgtattagtttcctgatctcgcacttcaccgtggtgcttactgaaaataagcaaactgtttgtcttgcagttgtctgttctgattgactgaaatttttcgtttttcagggctgaacctttttcttaagtaatagcaaactttatttgatctgaaatacatgtacatgctttttagccctagagatcctagaaaactttttattgttagcatggatccctgattttatttactgagagcattctaattactaaaacactgagaatcacctcactactctaaatactttatgcttagatgatatgttggtgttcttctcacacagccttgtagtgttacaatatacagtttctaaatcctggctccaccatttttttattattattaacttcgattgggaatgcttcactaaatgttgggctggaaacactgtttttgtgtgtgtgacatttgccagcaggattattccctctccctcatcctaattacatttgtgccgtccctgctgttgggttgttgggtcccccttggacctccaacagcagtatgaacacaggtacacaacatgtcaagcttaatttgcaggcaaagtggacatgagcgagggctttctgtcaatgtgttcacaaatgtgcctactccctccggttcccgtttagttgatgtttgaggcttggactattttggatggaaaatcttgacgttttagccatgtgatcaatttagactgatttgcccctgcttggctgcatgcatgcaaatcacatttaacttggtgcatctgagtccttcacagcaccataaaaatcatgaggataaaatcaatttgccgaatcatctcctacagcatagtaaaaatcgtgtggaaaagtagggtgccaagattcaaacttagcacatgaagctttgggactagcagtcataaccaccaggttaagaggatttgcttgttggatgtgctattctaatgtgaacttattaatcattccttggtatgtgagctcctgtccaaaacgtcaataactttgaaaccggagcgagtactgcctaggggcacaaagccaattattataaccacctccatcaattagggtttttatccagggcaagacttccatccctatgttggatgccctttgctgaaaagctatttgttgtattactacttagctcattactttcctcttttgtatctgtactagatagtaaatgtgatagcatctcttgttttctcttgagggaaaatgatagcatctcttgtagcttatagttcttaaagatagtctttatattcgtaactgattacctggatgttacctctatttgggtgatacagtttttcccatccattcatatctacaggtattaaaggcagcatctttaccaaggtgctaatcagtcacatgcataaccatgacttctgaagacggagacatttcagctctgctctctgaaccaagtattcctgaagagcagcctgaggcatctgaattcgatgacgtcgtccctgcaattttggaatcaattaaatcaagtgagaaggcattcaaaccttcaccggaggaggctgcttgggctgattcttgttttgtgcagacatctgagctttcggatagtgactggggagcaatgaagcatgccctgcttaatgctcttgaaaagccaacagaaatacccaacaatacttctgaaattgtgcacgaagaaggttcccatgcaattttagaggtcaaacctcactctctccctgctgaaattgtttctcagcatgatgacatgcaaatggagcaaaaagaaaataatgattatgacactggtactactgaagcttcggaagttgctaatgtaattaggggcacaaatgaacatggtaagcaaatggatggatacacagccagacctgaagatggcgatgagttgtcttcgtctgaagttcttgagcagacagagtcaagagagactatctttaaggtgtgggatctggacgttccgttttctgatgaggatgagcttgaactcatcaaggatctgaagaaactcctcaaggacaatcctcaggagtctgaatttcgacctcccagtggaacagccaagacattgagccagatagccgtcgatgatctagtggcagacttgagcgacttgtcattgcagcaaacagacgagtagcaacattcccccaagatatttctgtggcaaaattttttaccatccccgatgaactattcttcgttctctagctaacagtgcagatggcttaagtggaggctgtgcgtttgtaagaattagattgactgtttcgctgttcttttgaatctctacctttcttaataggtagttgtagtaaaaaagttgttcttttttatctgcgtgtattaaactataggtcctcaaacttgcacgcttggtttgtgcacgtccctgtactgattacgcatccacataatttgggtccttctggctatagacatgccacttgtaagttgacttgtgctgcgaacggcgtttaatcgtcctccgtgttttgcgctctcgtcctcaatctgccgctcccgggcgggctgtcagtttagaggagcttatggcagttgccaaaacatcttcaaacagtctacatttctacttaaatattaaaaagatgtagttgtataatccaaaaaaataaactagaagccagaagttgtatttccctgcttctctatattcttaccaactaggttctcagaattaaacttctcaaatagggcctaagattctaaagcagatggtagcttttgagaatatgaaaaagttaggtttttcaacttctaaattttagtttattttctgaattttacaactacaacttctcataatctaaacgaaaaactgagttgtttaggtgagattctaattctggaagaagttatagcggccagaaacttccctaaataggtcctaggtgagtttctcttagacaagttttggcactgtcagagactatattgattttggtaaaaattggctatcatttgtactaagatttggcattaaaccaaatcagcctatcaattctatatttaggtcttacctacaagatcacatatttagacataatcaagatcttcgataagaatcctataaggccgactctctcacacattgagatgcttgatatgatcattgagttgaattataccgggcaactctcgcatatattaagacaccatctctaaataaaatcttacaagaccaactatctcacacattaaggtatgatcttacaattctacaaaactgactccatgcaaagctagctagacacatcgacagctgtcgactaaaggttttagtgacgcaagaaaagaacgacaaatgcacttgcgtgctattgatgacatgtcaccaatgttttaaatagctgactaaggcatttagcggttagcttctcaaacagctatagcgggctaaatggagctatagcggctaaattgtacatgaaagcaaatagctagaacccttctcaaacagctatagcgggagatagcggcagctatagcgggagatttaaaaccctgcatgtcactccccatgggtatgtaaattatcatttatttatatactaagctaaactttgatcatgcttgaaaatatctaatgatcatatagtttgaacctaaatttgatataacataagtaaatatcataaaaccccatgtattatggtccaacttcataaactacgtggcttttggcacgtgatacattacccccaagtattatggtccaaaaattttacaaaatcatatggttaataatttgggttaattggatcatgccattataaaattgctagttttgataaatactattactatttatcttttttaagcataccactacatctgtctcaaaattggatacatgccatcatctacacttaatatacgttttgaatcattttacatgtgttgtattttagtatggaccaaaatacctccgcttactacatcgcaagcattgtggttccccatcctggatcagctcacgctagacctgctagcacaactccggtctgacttaacttcggctacacaagcacatgcccttgctttcaaaggcgagctaggacggggtcttgctatcaagccgattgccagagaggtggagcgactggagatggcccagccggccgaggaactccaagttctagtcgaagcaggagttgccagagagcttgagctagttgaggaattagcagttggctaatagcacagcgtggcgggattgggtccttgagcgcgttgccatcacctcacttgatgccactgacacctgcctgtttcaccgtcgctcatcatttccgtcagcttgccgttgagcttgtcatcgccgctggggccacgtgtggacccgccgtagaccaccgcgacacaaccctgccaccgtcgccgctttctttgccgttagcgccgccgctggaccatgtgtcaccgtcagacccgccgtccctgacgttgcaccttgtcatcggcgctctgccatactcgtcgtggggtagctgtgattgggggattgtgggtttttgaagctaggttgccggaattcggggttaaggttgaaagatgattggcatgtgtatttttgtccatacataaatacagagcacaaaatatgattcaaaaacacgtgttaagtgtaaaggatggtatgtatccaattttgaaagaattatagtggcatacttataaatagatgaatattaatggtatttttcaaatctagcaaattggagttgcattctagctaaaataaaaaatgcttaagttaaatggcgaaagctttttatacaatggatcaaacaatatgaaatttcacttttaattagagggagctcatagagaaagtatcgtcgtaaacaagcgtcttggtctatacgaagtttttttcgtgctctaaattgggatagaccgagtaataataagaaatttgggccaacaaaatagcaagttggcaactcgaaaagaataaacaccattgtttctgattttgccgtagccaaaaattgctggtatgatcgccaccacacatatcggaccgtccactttccatcggaaggcccagacttgcccacgcatgatcccaaggaacctaccctagtccaagcggcgacgatgaacttcaccacgggacaatcagtcgctactcgctggagcgaaccaagagcgccgacctgcaaatctccaaaaccccggtgtacggtcgcctcaaaccccgatctccccctccggccgccgtccgccgccgcggcactccggccggcgggatgagcccctccgggcggctccccgcccccttcgtcttccccctcgtcctgctgctgctcgctctggtaagctgatccccctccgaacctcgatctccggttagatctggtcatttcggcttctcgacggttttcgcccttcgattgactcccccttcgctgcaggtgccgtcaccggaggcggccgagtccacgccggggacgcggacgcgcaagatcggcggcgccgcctcggtgttctcgctcttcaacctcaagccccagaacaagttctggtcggagtccgtcatccgcacgggttcggttccgcgcttcgcagtggtttcgttgtttgcatgttgcatccctttttttggttggtggtatgctgacgggttatgtaatttttggtagaattcgatgacttggagggctcaacatcgcgggactccagcaagaaggcgctgctcaacttcactagagctggtagatttttgcgttgctcgtaaatttattgggcttttgaccatattgcaaacaaaccagattagcttacaattctcccctaaagttgtggtgttgcgtggccctttactagctgctgcagtgataaattttcttttggacgtgttcaagttgcaggacaatgtaaaactgctgattgaggctgatatgattttgtttataggcttctcattattgattcctgaagagtctggcataattaaattatgttagactactatatcattgctttgttgtactttctgacctgaccttgtatgtcatataatacttgagattactgtaactcttttgttttagccatgagggtgctgatgctatatttcaagaacctcgagttctttagtaagtataaatggaattattgatggaaggttaagagtggagagagaagtggttgttcctaaatagtcataatgcaacagaactaagaactaccttagaaaatgattttttttattgtgatatatccgataatcattgagcaggaatgtataaccaatgcaacttcaatatctgcaaacaaatcataccgatatcgttcagaaatggctatgttagagaggcaatatgcccgttattgaagcattactttgtggtaaggactgtatttttgcatgattagtttagtcaagaaacgactacttatttatgtactccctccgtcccaaaataactgaacctaggagtacatttgagacaattagttgcatgcgaaatgtgcatagtgttgaaaattttatggtgtactcatgaattacataagacgactgttcactactaaatctgtcatttttttttgccatctgttgttcttaggtaatattgccaactatatgagccttgcagaggttgattctatatatctttcagtacctgtaaacttcatctttataggatttgatggaaaaggaggtcacggtaagccgacaaactatccttatgcaatacttatgtcattctctatttcttatttgttcatacgaagtactaacaatatctttactttatttagagtttaaactgggacctgaagaactggaacgctggtttacaaaaatagatcacatatttgagcaaacaagaatacccccagttggcgaagttcttactccgttctacaagaccagtgttaagaaactaaagcaatatgaccttcctttaatcagccacataaatcacaagtacgttcctttacttctctgacaattgttcttacttggcccaatgttttcatctattttgtataaatatgccacacataattaaattttgcctttaatttacctcactttctgtgtggtgcagtttttccgtacatgcagtacacatgggtgaagatgtcatgtctgtttttcaacatgctataaaagttctatcccgtagagaagatatcacagattcaaggtcagatgctcttgagacacacatattgcttcaaacttaacaattattctcatccagcagtttgataaaatttggcaagtgcttcatcacataaaaaaactaagtgcaagtgtagcacaaaacagatatggtctttgcattcttttcctattacttggcaatgatgtttacaaaaaaatagatggttctgtttttagttttcacagatttctgcttgtttattactatctgttggaatccatacaagaggaacttgttaccatgcttgtaattgtttgtaaatttgtttgctttattgtaaaccagctaattaactatgaacagctactaggaggaccctttgtggtggcacttgttacttctataatgttaacttatgtttctcatcaatgtctgctgttggtaacagattcattttttgattatgttgtacagagaaggggcagaagcactttggcaggtggacagtgaccaaatggaacatttattttcaacacttgttgatcaccttcaaatacaagaggcatacaacatcttcatacttaatcccaaaaccattggcaagagtacccagtatggttatcggtgagtttgtcggcactgttaatacaatgcatataattaatgcaacaggagttagaaaaatgcacatttattatatttagcatggcaggatcatggactcgtaatataacaaaaacactacaggtcatttatggtagcttttgatagtaccaacatggctatgtttcattgcagtgctaccctgcatctgaatttcttcaagatattaatctagaacctattttgcactgctttttctaaaaaaagcccatctcattttgaatttagaatttgattttagaacaatttatgtgttttttttttttgcttttaaaaaaagcagtgccaagcggggcaataaattgaatggcaccaatgtagctagtcttaaatttatccattatcaatgttaaatcctttgctcaatataaatattgactaaggctccactaggtgctgaggtggattatgataatcctataacccaaatgaagatactgttgcattccacagaaatattgtgagaaacaacagctaaataacatattttgtctaatctaatctgatttctcaaaaataccacaacgattttctgatcagctcaagaaacaaacacatcatagtgcagtgcaccaattccaaacggtgtcatttacattcatggtctgttctctgttgattgttttatcacatggagatataatatgttctcaaattagacatgcgttttgatgggaacacctctgaggcacgtcacacaaacaaataaaaggagactcgtttttcttggctgaactgcctagaaatttagtttaatattagaacaaaaatggtgtcagttcttataaatatattttgtcgtgttgttgtatcatgcaaacgttacctctttctattcgatcctattttctgagtgtgagcttggagcaatttccataagtttaaatagcccgcaaatggagttctacaactagtcttatgaataattgtacagttttatttcttctgagaggaaataattcaaataattgtactgtaacactgttacttgataagtgatgttatggaattcatcaggtcaaatatccttggcctctattacatgtgaaattgtcaacaatggctgcatgaatatcagaaggacctctgtggtgttatatttgtatattccatatatattttacaatgtctacattactataaaacgagaacagtcaaatttgacctttgatattgttaaaattaccgaacattgcttattggaggatgaagttcctaagcacctatggtagctttcagctgaaaatgggtacatgtgcatcaaaataaagttatgtggtaacatgctaggcacatgcagaattatcctgtatacatagtaactcaaacattgcttaaaatggtggcatattgttactcttaggtgattttaataaccatctgtgtttacgtagtaagcaatcactttgttgttcatcagctaactgaattaattatttttcttccattttttttgatttgttcaatacagagtctgttggtaagatgagaaaaatctttgctgtagaaataaccactagtttgtacactgggttctggattgtttcatgcattttctcctgtgatgtttgattatttaagtgtaatttcaaagaaatcacctaactgtttttgtgttaattttttcatcttattttgtctatgttttcataggaaaggcttctctgagtctgagatcaacttactcagggaggtaagatgtggcatgctttatccattctgctatatatttaagaataccactgcttatatcttcttggtagcatagatgatagatctatttattgttgttgcaatttctggtaatatatctttggttggaagctggtggacctgctgataacaagagggcgccctcatatttttctttatacttatgcattttaaggagttattttcagttataactgtaattcactttatatttactgtcttcctttctgctctttccatttcgaagttgacatgaatacatgatgcttgactccagtttatcaggccttaaatatatgctgtgcagattatgttcttctgaatggatatgctgtgcagatttatgtttacctttctgtatatttccttagtaacattggatttgtttgttgagaaacactgtacttttgtggacaatgacatgttagtttttttttttcagaataagaccctgcaagctcggattcttcaatctaaaagtgacaagagactctatctgggtaattataatctttcctatgtatattattttggtttctaatttctattgcagtgaagatgaaaatacacatggagatagtctacttagttcatccagatattgccgtctgaagtttgtttatgtgtttgttaaaatgaaaagttattacttaagaatcaagaggtgcccctccataatattgtatacattatgaatattttggaaattttgacactgggtaaagtaggcccacataattaacagaactaatgatgtttacttaaaggttgttatggtattggttaagacgttcctttgcaatttccctagtttattgcttatttcggaaagtttaaactcgttactaatatatgtcactactatatttatctcccgcttagttccaggacttggcctaaatttccagaattgcaattagaagtgagcaattcacctgtttggatgtaataccagggactgcatgatgaagataaattttctgttgaaataaaataaccatgtgatataactatggtgatatttacaagaggaatttttagatttacatagtttaatattatggcaattggctgcagtttcaatagcagggggcagcggatgatgtatttttgtgggtgtatgccagagccgctaaagcaattagatcaaccgagtaactgacattggttattagtgatacattcctgccccctttaattattatatgctttatgcaaaggaagtgagagcacccatgggagcggataggttttggtgaaacatgggatctcttgaagctttctaagtttccattatcaattctcagtgaagcacacctgaacagccactgggattggcatagagttggatacgggaagaggtgttgcttgtgatccaaacatctgaattgtgttagatctatatgttgccgtatgtgtccacttcgagtagggtgttttctgcatattttcatgtagtgtgtgcagtgtgtgtatgctttgtgtattcacccattaggattcaagatctaattcctcaacgtgttgtcatgagcacatggtgggggttagtgtttccatcactttctccagccatcagtggcctctaccattggaaacctcaccgactggccagtctctgcaccttacatcagattgtagcgaggcgcagagccgtggcctggataacaaccggaattggtgaagaggtggcagctgatgaggggaaacactaaccccaatccatggctcatgatattgtgttgatgaattgaaccttgtattccaacgggtcatgggccaaagtataatacaacagggttgcaagcacatatgcacaaaacatgctgtactagaatataaatgcacagctatagatatagatatagatatagatatagcaaaaggggaaaaagattgcagccatctgtcatttgtccaatcatttacagtgcgcattagtgcatgtttagtgaatatatgtcgttattccacattacaaaacattctttggaagccctaggatgaactatttagggggcttaatcgatgtgcagtctgatttttgtgaactgtgcttccagttgagaaataatatgctgttattgaaatgtgtgtcgcgtgaacacaaggtagatccttttgcagtcacaacctccaacaaggacactgtttcaattcagttttttctctcactgtagctgtatgcacagttttgatatatttaactgcaagctcctttagttattttcctttcggtacttatctccatctctatgaatcagatattgaaaagggagtcaacagaagacccttgtatgagagtcatcctttatcatcattttcgtggacaacatctgacaatatggatatggtatttttaatgttacatttctgtattctttacaaaatcatttgggcctgcatcaacgtgttagtttttggtcattgtgttggccaatccaaacatttcatctgtgttcaaccttggccataactgacttagtggatgaagcttgaggctgcataacagtcaaccacaaagctaatcaaatattgacttgcttgctacttactccctccgtcccaaaataaatcaacttctagctacgaacctggatataggttatgtccagatttgtagccagaagttgatttattgtgaggcggagggagtagctaattagttcattagacggttacattgtttttccgtacatgcatgtattcagagttcttagacttttgatctagtgaattcaagaaagtgatatatactgcaactggtttatacaacttgccatgtattataaattgcacttgaattttagagttcaattttttggtttgaaggtctaaaaacaaatactttgttgccagtatagtatggaatagcaccaattttgacattgaactgcttggaattaggaactgcagtactgcacacatctttcttgacttcaaatactgacttttgttgacacttggaattaatgaatcaaaaaggatactgtattcccattggaattggttagaatgcatgatacgaagttatgaaggcaaacattcgtaaaaaaaattctaatgtataaaccaaacagaatgcatatattcaaattctttaacagggggattggtcaaagaagtgcaaggaagccttaagcaattttgagctgttgaaggaaggaaagagcaaagatgatattatttatgacaaagctgtccaggtgtcacattttccttggtacactaaatacactaaatgaaatatctctatatttgcatgtctaacatcatagtatcacacgctcttgtaggtattacatggcaaaaaggatgagttgcatgatatatttgagagtgcactcaagtccagtgatttgaagggtctgcatgctgaatgccttacagatatgtggattggcagagacaggtttgctgttgtttcatttcattaatagttaaaatcttagagttaggctagttcctgttcttctaaccaaactttattttcaggtttgctttcattgatctgagtgcagggccatttgcctggggccctgctgttggtggggacggtgttcgtactgaacttagtctacccaatgttgcaaagactgttggggctgttgcaggtcacttcatttttcttatcaggccttctctacctattcaaattcagttactgcctaatgttatacaatttggatggtgatgaactagggtgtatagtttgctgtgtcagtatatcttttgtttaaaaagtctcattagttttccttagtggcttgaacgaaactaattcatctctagaatcataagaagttttttagtagcccaggtcaaaagtgaagtttttgtaaatccttttttgactaaaatggttgtttcttgtgatggtttatgtcttctccctcattattcatgatgggacgctaccttagacaactcagtgtatgcatattggttttggaattagttttttgtagtagcaccaggcacttcaatctttcacctgtataattttatttattggcctaatttgcattttttttacttcttcaaatttaatactcattccatatgcacttggaatgcaaattcctagaacaaaaaagagaggacaatttagcattgatacaaagctagcatttttaatgggtcctgtgttgtgtcaatagattattcatggtaaccaaacatgggtagtcatgttattatattgactcattatactcaagcccgtttacattaatctaaattctatgctgatcgcacacaaaaagaaattgtatactcattatgtcattcaattatattatattaaggcattcttgctctacttgtttcaaacgtcataatttgttgattcaacaaacttgcagttatttttcttaaaatgttatgctcagttgcttcatagttcttaattgttaacgttgccatgaattaatgggatatggcaatcacattaaatgagcccatgccaatcttcttatgtttattgtaaacgaaaacctcataagttgtattcattacatcatgtttcaaattctgatagtcttatagaagtattgtcatcctgattattaatataagtgaaggacaatacctcaagaagacaacctatcaattgtgtggcagaatcatagttgttaaacctggactggtgatctaactgttgagtccatcagttcacctggtcagaccactggttcaccggttcggccactggttcaaaaggagataataaatatattttccttagagatttgctcaaaagggttaagtttaatctattttaccttccataccaaccaactgccttgcctggctgttttggtcctcgtgtatgcaacgagaggtccctagtttgatcccctccgcgcacctgtgggcaaattgtttagaaaatttgttctacccggtccaaagggcaaaaccgcctggtttaacccctttttccaggtcacatgctggtctttcaatcagaccagactggactaggctctggttccccttttttactgtcgaaccccggtccagtctggtttaataactaggggaagaatacatattcagactctgtaattattcagctaggaccaggccatctggtcatgttgtttgccctgttgttgctctgattataatcacaaggatccggtccttaattgaccggaacaagtcttgtatctttatcattacaaagcttttttattacaatttgaaatacttatacaaagatggtagtaaatgataaaaatcactgtaacttatccatcgcagatcttgttttattcataaaaacatcagtaacctacagatggattccactcacaaattggatttgtataagtcaaaagttacaggatcaaaaaagaaaagaaatattgaatacaccctgttaggttcctcagccatggctgtaaatacgactgttgatttatggtttgaacaatgcacatttacagcatgggatggtgggagggcagagggtttctcgagcatcggtaatgaggccaaattgctgtttaagctaaacaatgccctggactggttataggctcagtttggcattcagtgaattatcatattcttgtttggtgcaactactttagaagttttgttgtttggcaagcttgcttttcttttgatttaagttgcaaaagataatagtagtattactttccgaaaatgtggaacaaatgaagtgaacatgattgttgaataacatatgttctagccttatctagatcgccagaacaaactataatgattctaattttttattttccattgtatctggaggaataatcgcaacggagcacagcacaacaaccacaaactgggccttctgtatttctatgtgtactaacatatcaacgaatacttgattcatgtttttactacaatattttgggacttgctattttccttactgattcccaggcttccagcaaaccagtagggctagaaaccaaatgacctaattatctggaccagtatctggatgctgggctggcaaatcattgttttttcctttcaataattttctacatgcatacctgatacatatataacaccgaaacagtgctggttaaatgttaatatgtcaaagtaaacggtgacaagtagtattcatgaatgtatagagtagcatctgatactttagggtccaaacataacgttgtgtgggctgtgttgaccccttttggagaagcatggacaaaagctctggggatgcttcatgtgcatgagcatatcctacatgaggattagacacaagtgaatttgggtggtactagactgtctgtgtggggacatgtggatgtgggcctatgtggagcatgtagtgtggatttttgccatcacttatcttggtatgcagctttgacttttggggtggaacagggtgagtgtgactccatagtcaaattgctgggcggccagtggtggcttatatgacaccaagttagttccataatccatttatagtctggaatatggaacagttcataatgctggacagtccaaatgttgcaactgcatgttagcccttttggcagaggtggctgtccaagcatgttgctagctttttatgggctatgtgtgtaggctcatttctggaatatggaataattcataatggttgacagtccaaatattgcaactgcacgttagcccttttggcgaaagtggttgtccaagcatgttgctagtagctttttatgggatatgtgtgtaggctcattgctggtggggctaggctatatcagggctggcaagtgttgcaatttgacaatttatttctgtaacacttaacatgtatacaatgtgtttgctctgtactgagattctctttgcggcactaatttatgatagtcattcttatgcagaagttatagaagaagaggctgaagctaaattacaagatacaatcagagagagattctcatcttttggcgaggtatgctggatttctcttagaatgcactggatattattattttattcatttataaattattttttactactcaatctcataggctaaatgatggtacttattcttgtaatctccatgttaggcaccatagattttcaaggtgcacatgttgcttatgcaaattccttttctttctcttgcccctagctcttatttttgagggttgttgtaaagttcaattgagatcagtagagtgagagctttgagatcagaactgtagagaagagagggtgtagaaatattttggcagcttggaaatattttgctctgcattgtactcaatacatttttttgctagacctgttgacgattcaatatacaagtggtccataagtcattataactagcacgtcactggcaacgatattccacaacatagtggcatcccaagaccccactgatgttaatcactatagacaacaagtttcctcttgcaatcttgtttgctgtgtaactttcccttttgtttctgtatattgttatgacatcttgaactagctcttgacttgtttatctgatgccatttttggggttcagaattaccatgcagtagatatcctattggcagagattgatgtatacgaactttttgccttcaagcattgtgttggaagaagggtacagcttgccctttgcaaaggtacttttgatggccataaatttgggtgttccttttaattattcacattactacatagtggtagactttacttgtagttgatatttctaagttatatgcacttgagctactgtttgtaccatacatgaaagacattccttatgtttctctccaatcattacagcattcttcgctctttttttattgttttgtcctttgcccatgttttctcacaagttgtggatgccaataagctaataagtgttcttttctttgctgagatcttcagtttatggtagctgctggacagccttgtactgttcacgaatttgctttgctttatcagaaagaccttccctttaactagaaccttattttttcttcaaatgtagaacttgatgagagaatgcatgatctgaaaagtgaactggagggttacaatactggagattcggatgatattaataagaagaaagctcttgatgcattgaataggatggaaaagtggaacttatttaaagatgttccagaggttagctttgtccagcagcttctactacacaacataaaaggaacattgtaaaatcagtttctatagcaaaacattttccctaataagcaggataactaaaaacacatattcactgcgcatgcaattgctgaagtctaatatttatttgttaagttaacagaattttaatcatacttctaatgacgaagtccaatcacttgtgccaggaacatcatagttacactgtggctcgcgattcattcctcgcacaccttggttccgtgttatggggttctatgagtcatgtaattgctccttctgtttctcatagggctcaccattactatgataagttgtcgtttcaactgtactttgtgacacaagaggtaagttcaaggggcaacttttctgttgcttatattcgaatgcaatacagttatctcaacatgttttttaacgtaatgcagaaagtcaggaacatgaagcagtttcctgttaatgtaaaatcagtaacagagggccttagttctgtgttactacaattccagaagccaatgttcagtcaacgcatgtatgtaaccttcatcctgtaaattttggtttgtagtcctgcttaacttaccaggggtttaatattcatattggaagttatatgtgaaagtcatctgcacctggctagttttttattgtagcagtctgacttcctaattcctatcgtatgtctgcatgtccaatataatactggatcaaacttgtttagagcacaatattgatcataaaagtattagaaagattggaccacgccaatgatttgtatccatttagtgtttgattttttgatacttatgctgtgcactgagccactgaccctgtgggtaaatgacctaaagtctgtatggtggtggtcaatatggctatgattcacgaaggcagaaggaacagataatcacagtgcaggggatgggtgcatctgaaatcaggagagattagaactgagggagttcagatatcacttgaaagctgtaccctttataggccctaataaacaatatctaatacatggaaatcaactggcaagtcttatgtctaagtggctcaagtccaaagcaaggagctaacacgaaactcgaaactcactgttgctgagctgttgccttcgacaccctggccacatgagcgaccgcagacaactcagttctctacccaaacaagccaatgggcggtggattgggattgtaattctttggtttcgtttggaagatgaaaacagttacttagtatgctttctattagtgactggtctaatcatgtaaagtgctctatcttccatgattataattcttgtagaattttaggagtgacctaagcaaaattacttgcatattcaataaacatgtgtgcgtgagtagtttgtattcaataagccctagtctatcttgaataatttcataaaggcttatagatgtaagctaaggacaattctatctattggatgaatgatactttatttctgttcgacatatacaagttactcatatacacactacaagttattttgtataagttgtctgatggatttgttctatcagtcttttaccaacattactagtaattcttacattgcaaagttgcaagttgttatggatacccttacaggttgctaactaatttattaatcatatgtacttagttcagttagttacaaatcaatcatctgcagtggcggagccaggatttagacttgggattgggatgggcctatgagtcttggacggggcctaatacactattacttaagttaattacctaattagttaggtgattatgtgtgaaaagaaatcgttgtagggggccaggccactggccgtcccccctgtctctgacatggatcttctgtgcatagaatttagttgcgtcatttaatttagtagaaccttgtaagcttattatagagtgcaatacctagaagggagttaaatgtacttacaagatatattatatcctctataaactaaatatgtaattattttttccagtctaatttgttatggttgttgatatataggttgtcattatcagaggatcctgccttgatgatggcattttcaatggcacgtcgtgcagctgcagtcccacttctgttggttaatggtacctataagtcaactgtccatacatatcttgattctgccattctccaacatcagctacagaggttaagcgagcacaactcgctcaaaggtatgcacattttagtcgcctgggagaggctcaattagcgagtcatcttagttgcctgggagatttggaaacatagaaatgattgtgttttccatggagctacccctagtgtgtctgtggtaaatccaagctgtagttaacgagggtgcactttggtgctgggcaggagattcaaagctccaagagctgtttgctaaagcaatagctcctgtaccttaagcatgtgtttggtttggggaccaagtgggatgggttagacctatcctagtttttttgggatgggatggttccagttgtttgttttgtttatggtatgggatggttctagtattttgtttggtagaagggattgaggtgggatgggatggacaactttgcattgaccgttagtgccgtctggctcccagcggctggggtgcagtgagcggcgagcgtgggggcggaggagctcatcgccgcgagtggcacacaggcaaaagagtggtggctagaggcaagggagtcgacggcgttcgtggaggtggcggcctgtcacagcggaggagaggccgcggtgtcttggagaagcgctggcgctcacggagttggcgactggcgcagacgagcgccagcggatgaagaggcgagctgatgtcgtgtgcttcgtccaggttggacgagctcgtccggccgattttgcttgatggcttggtcccggatctgagaggaatattcctctccagggagtccctaaaccaacccaactcactcatccctaaaccaaacactcctaaaaatggcaccatcccatcccatccttgcaaccaaacacatcctaggaagtcgaagttcgtgtttggtgttgtgtgtgcgtgcgtacatgtgtgtgtgtgtgtgtgtgtgtgttttttgtgttttgtaagaccttggtgggtgggtgctggggttggctaattccttcacctctcgcctcttttttttcctgcttaattaaacgatacgcaaatctcattcgtattcgtaaaaaaaggtgtacacattttctttgcttttcatgatataggaacagaagacatcaagttctgcatagtagaagatgctaaatcatatgacattacaatttatggaccaatgaacataaaatgctaaatattttgtattgaacataattttaatgctataaaaattccaataagaatcatgatttttgtacactcaacattatacagactggcaaaaatctgatatcagatttatcctatttgtcaggatctatacaacacaaattgtgcatctattccatgatgaatagttttgattgtttttttttattgagaatggaaatttgatggtttgtacctttatatgtactatgatcatgatttgtttttgaacgttcgaatcacttaaaacgtggtgaatttgactgaagacacaggtaccctaggacagaaaaactgcattctttatgagcaactagtgacatgcccgtgccttcaacgggatgttaaggaacaaggacgaatgcctgtgcttagcaacgggatgatggttttacggggttaagtttttcctatccagttcttttagttggtcgtaaaaacacaggattttggtggggtggttttttgaggtagggtggttttcttacgtggaggaagaggtggtttttgggtggagtgtttttttgaggcagggtggtctttttacatggggggagccagagaggacaactctttttttacagtagagagattatgaacaaaaaatatgtgcaaggaggccaagattttacagtagagggttgaatgatattgatcgaggctaaaatggcagtggggaagttcatgggtcatggctgagctgtttaatctattattgctaaatattacctatattgtgtatttgttatttgttgatatcagtaggcctgcaaacacaaacctttgacagctactttctagtgcaaaagtgttaacaatataatcagttgaaatttgatggcatgttactaatgccatttctgtgtgacagtataacattacatttacttaggtacgttagtggttaatatcgtgagcaagtttgtaagctagatttctcttctatatgcaggaggacactcaaatcacaggtcaacattggagattccaatattctggttcatacatagtgaacccctattattggataaacattatcaagccaaatctctttcaaacatggttgtagtagttcaatcagaagttgattcttgggaaagccacttgcagtgcaatgggaggtcaatcttatgggatttgaggtaggattgccatatcatacacatgatttatttggtttccagttggttaccttcgcaatctattatacagtcttgtctttcatgtaccaaattgtaaccattcttgattttagaaaaaaagaaacactgggctcgatcacaggccaactttaaattgaaatttaatgttttgaaaatttatgttcatccgtttgaaaatggaccagaatctgacatgttcaactgaagcggtgaccatatttagggttcattcagtttatgcacacatgtggacccctcatagttagttgcgataacctgactttggcccagtccttttcaaatttactggattgttgaaacagattattggctctactcttcgaaaaatacattttctcagaaaacttttttctactatattgcttagaccacttattttaagttcctttttaagtttatttatcaaaatattttatttatctctataatcaagtagataatctgcagcaacaatctgctcaataatctgattcaaactgagccttgagcattgtcgagcagtgagaataaggctacataatttaatgaacacaagttaagaaaaaaatggtggctagaccagtttaacttgggcattccaaacctgaagaagagaacgcttagaccacttgtttggtactttgtttcattagcatcggtcaaccttttgacatcaacaccacaccagtttaatcacaagattgtacagagccaacttgctgcagaatgtggccatgccaatatttgggctttggcaggtcttaatatccatcctcaaaaactaccttttttcctcctgattttgagtttgattgaactgcattaatgctattaataaactgacttgcaggagaccagtaaaagctgccattgctgcaactgccgagtatgtatctggtttacttccttcacatctggcttatagcccagctcatgaaactgcaacagaggtttgtcatacgactatacctattagtcttcctatttgttaactgatgggcaggatatgtttcttttctggaaccagataaaattatcaatatttttacattttttcatttgcccttcgcaaaagaaagcatgcagtcaaatttctatattttttttaccagtatatatgaaagactttaacacttatcatgtggtatacttagatatgctgtactgtagattttcttcaacatgttcatataaaacttagtgatcaaagttatattttggagattctgccgatgtacagaaaactgcagtcttaaacagattgagtgatagtttagtctgctactcattacattttctgttttctaataattctaggactggacttggtctgtgggctgtaatcccttatctattacttcaaaaggctggcaactttcggagtttcaacgtgatgttattgctcgtaactacatcattactgcagtggaggaatctatacaaatcatcaattcagcaattcaacaattgattacagaaaggacaagtatcctaataattttgctttttttaatctaatacgctcgagagctgcatatcatttcattaaagaagagaaccgtatgagtctggaaaccttacaaaaaaatagcaacaaacaattgcgccacggactattttgctggacaaaactaagaacaaaattttgctgtttcattattcaaattccggacaatttaatgtttgttgggaatcatgttgttttttttgaaaaagataacagagatggatcaactttatgtatgtgtcatgtttccatgtgaactagctgaatctttgaagagcatgacttttacactagttgatttttacattccaaaatttttactatgtaaagacatcagctagtagataattaaaatgacccctatgtcgatagtcctccgactggtatttatagtgtaggttgtgggttgaacctcaaccaagaacaggttaatgtcttctgtaaaaagttgggttttaccattaagtagatgaaagccacaagcctattagttcatttgtattgcttgctctcaaaacttttcttgaagggccttaacaatatttaggtgaacgaggctttaaacttttcaaggctcaggagagagtgctggttgaaaagtataattctgttgttagcttgtggagaagggtaagtcgcttcttgatgtgcctttttttttcctttgttttacataaaaatattatggcacttatgtttggtttgtatttaggtttctgctatgtccaaaggattacgatatggtgatgctgtaaagcttacttcaatgctcgaggaggcttctcatgggtcagtggttcttatgctgcgtacaggaaccttttttttttcttgcaatccattttatttcttgaccttgagattttttttaaagcgccgaataaaaatatgaagggattatagcttaatgttctacttctgtttatttattattcatttgatgaatgggccaatatcctcaactacaataccagcctcattagttgtctggtattctggattctcatgttgctttctctttccagatttgctaatgctgttaactcaaccatttcaagtctacaccctgtgcaatgtactcgtgaaagaaaagtcgacgtgcagctagacttgacaacgattcctgctttcttggctgtttttctgctgctctggtttcttctacgaccaaggcggccaaagcccaagatcaactaaaccagctaattttcagtgtggctgttgtatgctaataccgaggacgtgaatattgtgaatatgcacacatgtcatgggggacagctgctgctggagcgcagtaagtcctagattcaaaggggaaatgacaaggccgtaaacgacttgtgccaaacggtgtcactgtttagagaaaatagaactgaaattttgtttccgaaactggtgcaaggtttgaagttgccacatcctgagcagacttgtgtagtgcattgttggacttgttctggatggacgttgatatgaatctagttgagtaagcactgtagagttgtagactgagccgcttactgtgtagagaactcaatactgtttttgttttccagagaacagcgggagaacatccctaccaatcttgtcaattgactcaattctattttggtttggttcttgagacggaacatttcggatgtgggtccaatcgctgacacattaacctggactcgcatatcagcgtcagccactaaggctgagttcggatgggggagatgggaacccaacttctgtgtacgaaaaacggagcagtccattaacgcgtgattaattaaatattagctattttttttaaaaaaagggattaatttgatttttttaagtaacttttgtatagaaacttttttaaaaaaatgcaccgtttaacagtttgaaaagcgtgcacgtggaaaacgaggggaaggggatgggaaaaggtgcatgcgaacacagcctaaaccagcagtactgcatacctgtcgagcattaacaaacaatccgtgggttaatagaataatatgaatctattagagcaaggtcaatagtaggtcaatagtatagctgtatagccagttaatggctccaaaaaatttcatgtcacctagagccatagctagacacatgatacaataaaaagctgcagtgatttctgaatattactttccattttatttattgcattgcatgttcttcatttgcatatagcaaggccaactgctcatctatttgctagctagggctgtttggatcagggactaaaattttagtccctgtcacatcggatatttgacactaattagaagtattaaatatagactaatgacaaaaccaatttcacaaacctggactaattcgcgagatgaatctattaagtctaattaatccataattagtttatgtgatactacagtaaacatgtgctaattatgtattaattaggcttaaaaaatttgtctcgtggttagctctcatttatgcaattagttttattattagtttacgtttaatacttctaattagtgtccaaacatctgatgtgacagggatttagtccctatatccaaacaccacctagtcgctagctgaatctctctctctctcttcaacttttgctttcaacttagttttttaagccacggaggacagctatcgccggcttgaagcatctattgcacctgctcttgttatatagaattccctccagttattaatatatacatttttacactaaaattagtgttaaaaggtaatatattaatgaccaaatggagtaccttattgaatttcatttgtaatcatgtttaaaaaatataagaattcataacagatatagtttaaggcttttaaaagtccacatatagcttaatatacaaaagggataaatctacttgacccctaactactgtgtttagaaacaaccctcaactctaaaattgggtattgaacatgtctcaactcttaaaattgattaatttgcccccttgttgttggagcccaccctctcagcgaatgttatcttcccccttgttgattaattgagcagtactgccactctacactcttttctcttctcctcctaataccactaggcatcgggctagatgtggtggcaatggttgtcatcattgcgccatcagatgtcagctcgatgaggcgccacaacccttggcgctaagacgttagacctcaacgccaagattcgtggctgaagttaaggtccatttctctttagtgtttttatggtctatttgtgaaacaagttttataaaagggctaaagtgttaaatttcacaagtgaagtaatgagcacaacttcggccttgtttaaagctaagacaaatcaagattaagtgcgggtacgcaaaataagacaagtcgttagtgcatgattaattgagttttaattattttaaacttgaaaaatggatttatcctattttttaaagcaatttatgtaaagaaagtttccgcatgaaacacctttcatcaataaaccaaagatagaatctgcatagtaataaaaaaaaacaatttggttcttgggggcaagttcaggtgacccacaggtctcttttccatcccatcccgaagccctagaaattgtcaagccccaagggacataagagcaagtttaatagtatagtcaactactggctccaaatcatacaatagctacctataaatatatactacacaattaatacctggtcccacctagcatacacacatgcatcttggagtccgtgctccagcttctctctcctcttttatcatctcaaaatgtgtttatagttggcttatagcctgctattgtacctgttctaagagcttacatagtgtggggatgtggggaatggtattgcctcaccatgttggatccacgtctccacattagtcaaggttgtgcacctgcagagccacgcgtgtcttctgtgggggcacgagcaccttatcaggcagaggctgctagcgcatggaggcacgaaacaagccatgttgagtgaggccgcgcctcacggcacggtgcttcatccttcccccaccaccccacccctagcacagagcacccaacaaatagctgatgtagttggaaaaggaggggaaaatgagcacaacgtgggggtagaagcgaacttaccgcaacagtgcgtgaagctgatcaacacgaacccgttaacgacgaccaaattcgcgtcaacagaaccgtccccgacccaccactctgccgccggggttgccgctatcaggtcctcgcaccaagcagatccgtcatgtcgccatcaccacaagcggatccaccactgggcattggcatcaaataggaagggcttcacccatttcttaaggggtgatagcctcaaagctcgttgactgtgctgccttgatatgtgccaccttgtaggttaggtgcatgatatgaaataaaatagggtaattagacatgtaccgtgtattctaggaataaaaaaaagtaaattacatattaattgagtaataataagaattgtgacttgaacactcctctaaacccgaggaagatagtggcgttgtggcaatgcccaaagttttcatgtcccgtgatgaccaaacaattgtccaattgattggcacgctctgaccctgatcaattgatcgatgccataacctatgttgtgaatatattctctctgggcaaatgcagttcggtgaacaacgaatactgtagcccacccatgggcgcgggtctcctaggaaagtgggctgtctcgctgctgtagcaggcaggcaaacctggccgtggagagcaacatgatccccatgacccttttacagcttgcaggttggtgaggttacaacttgcggagctgctcgttggatggtgcattgatcgaatgcctgccattcttgttgtggcctcaattagaatttggcatgtgtgactcatgagagctatgtgcacatgtttagtaccgccttgctggtttagcaagggtggaaccaacttaaaaggcctcacatccctccaatcaaaccactcctgggttaacccttttacacgaaacgagaacataagtgtaagtgggatggtatgtgtaaatgggcccgctagttggatggcctagttacgcggttttggagggagggttgttacagggcacctcccctgcgtgatcccgaaccccatggccacctccgtgatgcttggcaccaggttaggtgatcaaatcaaaatggagccatgcattgataaatagcccagtgtcatagcattgccatctcggcgaccaaatgtggataaatcagcgaaacgaacgggtggcgccacgcgcggctgagtctcttgaggaggttagaacgttcgtcccttcatatttgtcggagggcggactcctcgagcgggggaccgtgggaccccctttccggttcggaccggggacacgggtgaaggatcgagatccaatgagggaatgagagggggtcaggcccctcgggagcgatgggagatgcagagggtttagacaggtttgggccgctatgggagcgtaacaccctacttctgtgtatagttgatttcgttgggagaatacaagtgctttatgcttattttgggatttgtcctctctccactggggcatggacctctttttatatcttaaggggttactacaaaggtccaagccctagcttcaacggcaaggaaaacattctttacaggcaattaatacttatcctgtcttccgacgtgcggagccacgcgcgccttaccatagcatggacccttcccatcacgccgagtgacacgggcgcacacccgtgtcattccttcttaattaacgacgacttccgcccgtcagttcccaccggtcggcggtgatctcttcgaagggatcagtataaggggatttggtctgggttcaaatgagaggcaaaaagcccctcattaatggcgattagacggagcgtggcgcagaccacgctacctaacagcagcaggcgcacgcgcagggcgccttacccgccgtcacatcaatcattccggcttcaattggtagtgcgcctgcacgtcacatttaatgcaacgtgccgcgcttactattgacggtcgttatcgatcagttttgaccgtcaatattaccaaaatagaggagaactagtgatgcttgcaatgcataaatatgttagaataataatattccactagtagtaggtatactaatattttgcagagaatgacactaaagtggaggagaatcgacatcaacatagaagataaatcaatcggacgatgtcgagaatcagagttatgaatgaatgggccaagaacgcagaattgacacgatgaattatgccaaaattcacaagtctacgaagtgaagcagcggaggaggccaccagccaaaatgtgggctggttgggccgactcttg

SEQ ID NO: 29726 - DNA, 15571 bp, Oryza sativa
ccgaacctatgccagcgccgatggatgcagggttttgagggaatggtggagattcactccctatggcgattggagggtattaccgacctttccaaccgccataaccgtcattacctgcctatttaaggagttcactctcttcacttcaacacacacctcaagcaatagctctctcatttctctcaagtttagtttagtagtatctagctggtggaataggaatagagtagaaatcaggagtccggaagtcttcggaagagttcgggtatggctctagtagctttcctttcctcttttgtaagctttgtacttttatgttcttctaaatacatttatggtattgaaatactttctgagtatatgagtatctactttacattatgttcatgttatactaaatatacggctagcttatctgggagatactttggtgtgggtataatgtttgcttatgcaattactctatgtcatgatgatgatattagagtagtatctggtagtttaggcgcggtgtctagattacgggatatcattatttgttatatattgcagatgagaggtgggccgctgatggtgacagctcagtacgggtattcctccgcgccggtatataatcctaagttaatttcctggggagggtattcctccgtatttagccctggttgtatggttatgacgggctgtcgtaaggaactcggcagtcaggggtggcttctcgaagtaccaggagggcatcggatagagggtattagctagtatagcagttaactagaatgtatgtatactatgcatattagaagtataggaatagattttctttctcttttctttccacctagctaagataatatattatgagaatgagtagtaatgcttgtgtgtcattctaccattggattatcttaacccctacttagaatatgattatcacaagtaatatataaattattagtcaagctctctctacatgattttcccacgggataaaataaatacgatatccttggaatactctcgggtgaaatgctacaatggtataaccgtgtgcttgcggatgaactctgtaaccataatataccaggagtatttctgcgccattgctgggaattatatttctagtaatgtcgttaaaaaataccaacacttactgttctcaataaacgtagtgggtgggcgctgggagtgtccgcccaaaccacacacgtgtggcggtgcgtggagggggttgaggcggcctgacccctttcgtgagggatagccagcataccagccccggtgcgacccccccccccaaaacccccgggtcgaaaagcgccatgtgggcttgaggcagacttttccctttgtatgtagtacctcaggcccatatcaccgataatattgatctgccgatttgtctcgtgcatatcaaagtaatatatgttggttgctaaaaggcctcgcacatgagaatgagaatgtaagttaaaaatcctcgcgcatgagaatataagtttaaggaataaagatcaagtgcagaaatagactgtgtcgcatcgcatggcggaagcaagatgaactggaaccgaacacgaagaggggagcgtgcacacggacagaccaacgacgtggggttggaagcagatgagcactgagtcgcacgcgtcgctttcggacgatggatgatcacgatgtgatggacggaaaattatcaattttttaagtagtttagattagattaaaaaaggaaaagaaattagagaaaaactctaatcaataatgcttaattcttcttaagttcttaaaaaaagagagaaactctttccagttttgaaaatagaaaaaaaatagggcaactgcaaattaaccactgttttaaatcattattgcaagactaccactagaaaattacaaaataacactagaactgtcattaagtggcatccttgcaaaattaaaaaaaccggtagtaaatttgcaaatgccaaaaaaaaaatacgatcaacgtatcacttgctgccttcttggaattgccttctgcgaaacaaaagcgaaaaaaaaaatcaataggtacatgttaaagttatatgtgggattgtgggtgccagtggtgcggccagggctgttgtattcgcgagcgaacatatgtttgacctgaacgtagagtcggctccacggcggcgcatgaagcaccaacaacggtccaacggatggatgaaaaactaaatgtgacgatttaaaaaatctttttttaaagtaggttagatagatgtactaagagcagttttatattggatgtgaagacacctctaattttatccacatcatcaactaattaattaagagatagtatatacaataaattacctctaacatacttactccaatacaccatattaattttactatatttatttcctatcaatttattgacctcttgctcttatctctcctgaagtttatatagaggctgccaattgtatgagatgtggttccttctctctttatttctctcatccacctcatcatatgaatttatatgatactcctagagtagtaactaggacttaattaatgagtttttatttcgtgtgcactggaaatttctttgtaagatgactgaatggatgcggccttattaacgattaaaatgcaatttatgaataaaagttttatatacatattcttaatgatttggaagtaaatgttaaaaaagcaaactatgatgagaaagtcctaaaatttacttaaatttaagtctaaaactaaaattttggttatgcttgaaggctgtacaacggggatagctaatcctctatcctcttcggaaaaaaaaaagaaagtatatgtgactttttatagtacaataaatttggacatacagtgtggccccaccaccaccttcctatccactcttccatcgtggggtagcgtagtactactactccctgcgtccccaaaatattactctctctatctatcattttgatagctatatttttaaattaagaaaattatttaataggcatatttcaatctaaccgtctatcatcttaataactttctcggatttaatgagaaagtaatctcatagcttctaatttctcatatactttatagcaacaaaattataaccatttgaaagtaaatttaattctcaatctaatgatatattttttaacaaataaaattcatttcatattataagtattggccagatgttttaaagattgaatcttaaaatacaagcacgtcttatattatgggatcgagggagtagtaacctagtagagctagatggaaatcacctaatcctaacctagtagagctagattaaacatcacctaatcctatgtgcatactctctcagtaaaagaaaaactctatctgtaaaaaaaagatgggacaatgaatttggactatcctttcattgttctgggagatctcctcctaggttgagttttttttatagagagagagtataaatctagatattggattatcttcatcctaaaatataataaattttagctataaatataaataaagagagtaatacccatctacttttagattattgtattcttgtcatagactgaggaagtactccctccgtcccagtgtataagccagatccatctaaaatctcttactccctccgccatataatataaaagattttggatggatgtgacatattctaggataataaatatgtcgtactagatgtttatattatctaaacttatactccctccatcccataatagaagggattttgagtttttgcttgcactgtttgaccacttgtcttatttaaaaaatttatgcaaatataaaaaccggtaagttgtgtttaaggtactttggataatagagtaagtaaaaaaaaataaataataattctaatttttttttaataagatgagtggtcaaacactacaaacaaaaacttaaaatcctttatattacaagacgaagggagtagtatattttaggacggacagagtagcagtaagagcaaggtaaatagtgtagcccactactagctctaaatcgtctatagccaatataatagccaattcatacaatagttgtttactatactattaatacctgatcccacctgtcatacatacactacgtcttgaagtccgtgctagagctggctacaaatctatagcctgctgctcttctctctcctcatttatctttttaaaatatgtttacagctggtttataacctgctatttcacttgctctaacaatagaggagtagcacacgccagtgcatcgccaccgatgtgacccatcaatgcttacgcctgcccgattcccacgccacgtctcgtccatctgaccaaccctgtagtactccacgtctctatggcgtgtctctagttctataccctcctctgcggctgccacgtgggccccacaccacgagcggcgcgcctaggccgcctagctatactactactcctagtcctactacaaagcagagcactgagcacgccgtcgcggctcaagcttagctagtactactccagtagtaactgccgcttccctttccccgttcgccgcatggcaccggccgccggtgagcccagtgcagccgcgggcggcggggagggagacaccgaggcgcatgcggtgatcgacgtcagcagcagcgaaaccgactccgaccccgaccccggcttcggcggcgccgggaagaggccgcggcgtgtggtggcaacggctggcagtggccgggaggcggagaagagggctaggattctggccgccgccgttccaccgggattcctcgatccgctaccgcggccttctgcccctcctcctcctcctcctcctccgcgcgggaggaggagggtgacgaggcagttctggaatgccggggactacgacggcaagccggacctgctcggcggcgacccttcgctgcgatccggtaccgaacagattctcgaagcttctactattaccctaatactaccttcgccgatgttgctatgcttccaatggatagaaacggagagtattgttgcagcttgcataaatcgactacttgcttcttcaatgttcatgcaaaagtactgcatcaagttacatttaacccattgtcaatcccagccccaatatagcgctgtgctactgctagagagtagagaattagattatggtggtggtaaaagctggaaaaaaacatgcatggatggactagcttttcagggatatattctgctttctgcacaaagttctaatcttggtctatactctctagttcttttcacaacgtaccttgatgctctgtttctgttgcatgttcttctgtgtgggagtcaactttgtttcaagacagtatgctgttacaaccagtgttgtggatgacggaatacggatgtcggacggagagggtaccgtcaacgattaatcggaatacggacgattaatcggaatttggcggaaatttaacgttttgtgcaaatatgtgtacatagctgataaatagcttgttttttgacagataattgcgtataagtacatatattgactatatacatactattttcaaataaaacaagcatagcataaagtgtaggtctgaacattcatagtggtacaccaaatactgataggtttggtttgcaatgcataaaggaaatattaaaagcatgccatacggtatcaacaacactaaattaatcccaagtaacatatcgattactcggaagaatcgtaattacgcctggttagttggctgattagtcggaaacggtcgtttttttagtcgctaatgacggcaattatgcatactggaacgatcaacaaccaccgtttcatcaaaatgtgacggagatgttagcgtcaccgtactaacgtccgtatatacggccgtatcaaccgttatccataacactggttacaacaccggatacattgctttttctgcttatagctgagatacatttgttgttgctcactgagattttccggttgtcagattcgggaatggaccacattcgcgtccatccaagatttctacactcaaatgcaacgagccacaagtgggcactggggggtacggtctatttttcccatttcaattatctactaccgaatatatgcccatgcatgcagccgaccataagttcgctaacgttggcagcaacaactttgttaatgtatgctctttactaacatgtgcagctttcgcggagcttcttgacaactctctggacgaagtacgacttgactgaaaatagaacattgtttttgtttactgtgtcggttcctcttgcttactcaggcagagcatttctttaaaaggttgcgaatggagctacttatgtgaacattgacatgttggagaataagaaagatggaactcgaatggtgtctgtggaaggtgagaaactatcttgctttgcatgcatgggtgtttagatttatttgacacaaggcatcagttttcgccaaacctctgttgtgaatcaaatccatcttctacattgcttaaaactgtatctatttcatacccccaaggttgaaattgatactccctctcatcccaaatgtaggtcttttttgaacctggacacaataattaagaaaacaatcaaatgactttgttgctcttcatttatattgcattgggaaagttgaatcgctttatttgcgagagatatcatctaggagtatttaccaagggcaaacaaggaggcatagttgaaaagttgagtagtatttagtaaagagttgagaaggctagaacgactagggttgttcatgttccattttccaaacccctggtttaacatgccacatgtgacaatattgagaattgaatgccaaatttcagttcatactaaaccctattgcatgttacattctagaattggttttgctgtccacagttctaatgaaatcgtgttattttagatgcttgtaaatgtgtatatcatacctgaggtttcattctaaattgattcatagatgatggtggtgggatggacccagataaaatgtggcattgtatgtctttgggttattcagcaaagagcaaggtgaaagataccattggacaatgtaagttttggtaggataattatttagccatttagccatttagccatataaataattgatctgaatccacatgcttttgtatctctatcaaatgttgtattttaatttgctcaactcactcatcagatggaaatggtttcaagacaagtacaatgcgactcggtgctgatgtattagtcttatcacgtagttgtggtaatggcggaagaaggttatcttctgttaccttgaatacttcaagatatgtgttattctgattttttttctaccattttccatattatcactcctccattcaaaaccaaagcatgtttctgaatatgtcaactcaagctttcctagcttgacaactaatagaagcaaaagtactttgacaacataaagttttttatggttttaggcagcataataatatactttttttcttgtggcaaatattaatatggatggtatagttctaagctcaggatctaccagagagtgcaaaactttgtttggcaaaatcctgaatgtaaagtcagcaacatttctaactgtcgcgtcttcccattgcatccatctgcgtcttcccattgcatccatcttcaggatgatggtcgcaggttttcacttttcaatgtcaccaaaccaatttttctttaaagtaatgtgtctcaatatttcatcatcatcttggccaagtgatatataattatctgactgtcgaggttagaacatggcaagttctttctattcactgagtacaattccagtaaatatttcctgataatgtgtaaacagtaggttcctgtcccattgtgtgaacacattttaatcttgaccaaattatgtctcgtatattttgttccacatggacaagatgctgatccttttccctcatgacctggttggcataaaaggcgcacacaaagtattggcatgctatcttacacattcctgagagagaccaggaaagatgatattattgttccaatggtaagctcaatttcatcttgtgttgttgtatcaattttaccattttacagactggttcctttgacatcagttaagttagctgattgaatcaaaactctgcaattttagttaatgtcttcctttattcgttttaaccacagcatgcatgatgtttgtataccttgcagattgattatgaaaagggacaacaatattggaaaaggatgatgaggacaacatcgattgactggcagacaagcttagcaacgataatagaatggtccccttattccagtgaagcagaacttcttcaagaggtttatgttatgttatgttgtatttatattatattattttattggttctaaatgcggatatagctgtgttttgaatgtgttcggaatagcttgttcattgtttgcagaataaaggaaagggcacagctttgcaaacaaaaacatacattaccaatgtagtaaaaccaagttactgttagattacgcgacacattgttgaacctggcatatcataaaaataaagtactgatcgttgttgctgatgtctcttcttttcttggcttagttccttaaatgattttttttctctgtactttgttaccgttgtcctcatcttcttttctgtgtgtctaatggctttataatagtacagtttagctcaatcaaggaacaagggactcggattattatatacaatctatgggagaatgaacagggagagttggagcttgattttgatactgatgtaaatgtgagtgccaactaataattaatgaagtcatatagccagcaacagaaaatgtggttaaatatgaaatttagtgatgtttgagatggcaggatattcaaattagaggtggtaaccgagatcagaaaaatatccagctggcaaagcagtttccaaactccagacatttttttacatatagacattcactgcaggtaggttccagatttactttgtctgtttgtgccaaagcaatgctctgaatgcttttttttttcttttttcctgaggaggcctctgcagttaatgtatcaaaagaaaaaggaaattttagtttcaaagagaaaaacaaaaaaatcatggtaaaaagagagagaagaaattacagggaagacaacaaaaaaagagccctctactctgaatcataattgatattaggaataccatttaatgttggatggctacttattttcttagagaacatgcaaaggcactgcatatcattttattaaggcagacttagaaatgataacaaggcttggttgattgtagtgctatttgctaatccactaattctatggtgaattttctgcagtagaaaagacagtagtaagcatatgagccataaatagttcattggaaaatttagcacacttacataaattgtgcagaggatatatgtcaacctgatgttacttcctttctgcagagctatgcatcgattttgtatcttcgagttccatctgtattccaaatgattttacgaggcaaagagattgaacatcataatattattggtgacatgatgatgaagaatcatgttatttacaaaccagtgatgactgatggatttccgagggatatcgatgtaaagattacaagttctgtacccatcgtttcttgtatagtgatgatcccttaacatattttgtgcatggttcctcatctttgcatgctagatgatgactgatgttacaattggttttgttaaagatgcaaaacatcatattcccattcaaggatttaatgtttaccacaagaaccgcttgataaaggtattcatttagttatgccacatatatattcttatgatgatgaaaataaatacatttttatttctagcttctaaaatgactgcacatccatataccaattttacaattaatggaaagtaaatagatttgggatttgcacatttatgttctatgttaaatttctctgtaactcttatgttttaagctgatctatttttggagtaaaatgcaccataggtccatatggtcctgttgtcaattgggcatcgcacttgggttcttcaagttgcgggcatgtcgctttggttcctacttgcaagctgcacatataggtctgtaattttgtaaagcagtgtcaaaaaaggtcaaaaaccttcggtagttaaagatgatatgataacttagctcaatctaaaccacaatgtgaccatgctatcacctttttttagataatggaagatgagggatacatctctggtggtctggcctatgcagaatgcacccagccaatgtttcaccatttgaagtcattgggaaactaatatttttttgtttgaataataaagtttgtttctgcgtgccgttgattttcgatgcttctaattgatggtagttggcaatagcattgtcatattttagcttaaataggattgaggtgccacatttccaattaagctcagtgtcagcttctattggtacacctacacatctaaggatctagatgtgcaatcatcacgttgaggataaatgataacgtgcccacacaagtttatggacttatcgcacaccttatttctcttattacgcttggtaatcaactgaatatttcttgttctaagcatggccatcagcctgtcttaggtgattataacagtcaggatacgagtctcatcagaagtatatatgtttttttagcctttctggagagtgtgggctctacctggaattcaagggcgtggtgttataggtaagaaatccttctataagcccctttggcacaacttcttcatgtgtggaaagctgatactggaagaagctggtgacagacagcttctccttcatagccgtaagttgctgcagaatcagattctgtcaaacagcgacacttcaacttcttagtggagaagctgatgtagaaattgtgcctaaggggtctgtaggtcccttcttcagaccatgtgtaatcattataacttgcaggtgtacttgaagtcaactttgtagaaccagctcatgataagcaggactttgaacgcacaaatagccttgcaagactcgaagcacgattaaatttaatgcagaagaaatactggtttgtcatgtcgttttgcattgtccatttgttgtctgtaggcataccagttctttgaagaattctaattagagtctaattaccatggaaaacacttacttctgtttcaggtctgataattgccatcgaataggttatggtggcaattctgctaacagaaaatctgggagagaatataaaggtaggtagtgacgcagggctccctgcttgctttatttggattacttggtttggttaatagcttaatatttgtatttttttttcaactacatagtacaaaacaagataaaccaaattggtttggaactttagatagccctgaacgcatgcatgcatacctttgaacctagcaaccttagttctttcttttctttgcgttttctttttggcagaggttttcttttacacagtttttctgcataacctgtgctaacaactgagaattttttttttgtttcattctaaggacatactattatatgttgattcaaacaaatacactggcatgcatgtcagttggcaacttcccttgtgtgttcatgtttgtacatccattgccaaacatatgtcaagacataggctaaatatgctaattatatagttgatgcatgagacaattgctttattaagtaccctattattttgttggaatagagacacctgaaaatactccacacacaggaccaacatcagatcaatctcctgaaggctgtagaagttcgaattatttgcaaagaaaaagaagttttggaagtccatattctggatcaagtaataacaatagcaaaactggaataacatccttgaacacaagtaaaataagtcttcctgagagcagattctctttaagaacaacagctcagcagacagttgagaagaccaaaaggaccttaagatatacgagaccactactgcacggtctatcacatacaagtaatgatagtgatgctcagacttcaggcaccccatcaagatcaacttctcatattctaaagacacctgaaaaatcatgccacaatgagaatactttgcctttaattccatctagtgaagcaataagaagtgaagggacaacaagatatcagtcagaggtatttgtgttcctctacatgtaataaactttgtttctgtttccaatatttgtgggtatagtggtagttaaataagctttatcatgatcttacacagtaagttgcattcataatggctgcaacatagcagatagcacaaagcttggattggtttttggtagatcctttactgttgaagtgttcgatttccttttggcctcaggaacaataagatgaatgtactctgcacaacttatctcactatgggaccaaaaaaaagaaaaagaagcaaatgataataccctaccttgttcttttcctccatcttaattacattggatgacctccttcggtcatcccgacaaaaaaaaaaaaacataccttgttctattccagtaattatgtgatggaaaatagttgacatgggatgatctctcatagttttactttcttctagatgactgtttcagtagagatgacctctcaccttaggaagacagtaacattcctcccattaaaagttaacaaagtatgtagtaccagaaaaaggaatgcagatgagtgaagtttaagtacagtgtaaattatagtaagaaaaaactgaagagcaatgagagatggtcattaaagatgtactgaatgtcctaatctatccttctttacattttgcaaattttccttggtttgttctttacatatcaagagcatttttttttccttttgagacaactgatatatatgctttacaggaaagaaatgtaacaaataatggagatggacaaactgttgataaccctgagacagttatcaaattgttgaccgatgaaaattcgtcattaaaagaaaggtagctattaccagtgcttcattcatttcttttttacgttttactggcagttgtatggacaataataggcggtaatcagttgaaatctgaaatcttaagtaatgttgagaggttaaatgttactgtagttgaatttagccaacatatgggtgtttattccaggaactttaacatttgccacatgttcctttttattcctttgttaacatcagtacccttttttgaattattaaaattgtttcctgatgtatgatcagcagaaacttgtttgtttaattcaaaattcatgtaaaatttttattttaaaatcactttatttccaaacagaagtatatgacaccatttaatatcaaacccaagatcatgaaagcttggcttagatatttggtttttcagtgttcaatatatcaaaggtcctaatccaatggattgcttgttaaaggttttccccaaatgacacttagttgttcgcatgaaataagatttggaacttagagtgacttttcctcttcattcttgtttttttccctgtgtgatagtatcatgaagatggaggaatctttgtcaagagaattacatatcgaacgggacaagaataagtctctcattgaaagggtaagcaatactaacttttacctgtggggctgttggtagtatactgtgtgcttgtcctgaaatttttactatttagcccttattcaaaacttgctgcaaaaatgaaccccgccaaaaaagttcaacaaaaaatggcccctgatctctgcaccatcggactgacactgagatcgcgatgttggcattgacccttgccacggtggtgggtggggagactggcgtggcaaagggggtcagcaccagaggtattggcgctaacctcctattggtaaaagggtaataggctattctatacaacgatgcaaaatgtggtgcagtggtgtgatgtctcatgctaccaacacatttattttcttctttatccaaatcatgcctatatatgcctaattctgaccagctaatcgaaagtatgttttatgtttagctaatgtgaactgtatatttttgcaaaagtaattagtacctttttttaaaaaaaaaaacaaagaatttgaacatgtgtgtgtatgcttaataatggtcattcaaagaagagggactcatcctaagaaggccttctttggtaaagcaacaaactactataaggccttctttgtgttgaaggtgtgcctactacatttttaagttataggaggttagtgccaaaggcctcggggctgacccctttgccacatcagtcagcgagctcccctgccaccaccgtggcagggtcggtgccagcatcgatagtgctgagtacctcagcgcgaggtcggagtcaatttgtggttaaagtttttggtggggttcatttttgcaataagttttcaaaaggagcaaaatagtcaaaacttcagcttgccatgcgttaccccaattacaggttaccagaattttattcaactttgcacctactgaggacaatttattctttttcactacagtttggtgtagtgatttatagaaacattttaggcgtcacaaaatatactgacatgacacatgcgatgcgatttactggagccaataatggcttgaagggtttgaaaggtcagactgcattatttcagtctttgtaaccaagtccttccatattttgttttccagttggagaatgttcagaagcaacttggaactgcaaacaaggagcaagaagcattggtagatatctttacagaagaaagagcgcgtcgagaccaagaggtggagaaccagcggacgaaactaaaggttagttagatcttaaaactgtagtggatttattgcgcgaatgcaccgatccaatccgccttgtcgttgaggatggcatcacggcataactaagctcctcagtcggcatagccatttttgatgtcgtctctgctgttccaggaggcgtcgtccaccatacagaacctgctggatcagctgaatgctgccaggagctgccgcaagaactagaaatggaatgaagaagatcaattacctcgttggtccattgtggctatcgccgtaaaataagtttcccttgtacatgttagaataagctatatatgtcccagatggttaattggtgctagaacagctagctgttggtatgttttatgtgcaaggtatgcagtgctgcattttccagtgctaacaaagaagggtgagtcgaccaccactctaaactcgaaaatgtgggagatcgaccatatcggtttcagaccttcagtatcattcgatgcaatactttgtctaaacttgagcagtatgtaaaactgtagttctaaaactcctatcataatgttagtctggttaatcttatatttttacgagttcaccttggtgtgtattatgtttctcggtattataattgtcttccgtgttgatacgcacatatgcttttcctatgaagtccattttttggtagtaaatttattttacaaaacattaatcatgaacttggtatatacatgatcac

SEQ ID NO: 29727 - DNA, 4032 bp, Oryza sativa
aattgacaatgttgatatccatgtgattgtatagtgcaaatttagttaccaatatgcactatggtaccaacagtgagatcccatctcaaaaaataaagtgagatctgagagaaccatggttgtgttaatgcaagccatttgctgattttgcttctaccttaatttaatttattgccctaaagtgaggtatagtattattctgagacactagggtgcatctctatacagtgtacttgtgttcaacatccatgaaattggcaaattgctcctacacatgtcctcgtagtgcttgactttgttgaccctgtttaatatgaaagttcaaagtgtagaattggtgcattttcccccctttagacctaatgctcctggattatttcatgacattgtctaattgctgcatataagacttgaatccttagtactattttattaaactttgacgtcttgattttttttcaaaatgttgacagtctttgctgtcatgagcaaatgagtacgtacaaaagacaaataagaaaatattagctaactagtgataggaaatttaacttgaaattatatatattgataatcatcaggtattatatcttctggtaattgcaggcaattgatgatgattgcaaccaaacaggacaaatgctagctgggttgcttaattggccacaaggaacctttgcctcaaaggtgtgttttttgttactccttccattgctttttactgctgtcatgattgccctcgcatgcaagtggggcgccaagagcatggcacagcaggctgggctgggcttgtcattttaagttcattacttgaagatttgttctccccttctcatcacttccccccgtgcctgttaatcctctcctcaaacacagctcctggctggggagatccagggccaaaacccccagttacccaagggttgtcccattgatatttaaacctagacaaccattacctttaatttgattaccaaatgagttcttaacaatgtatttgctccttcaatttttttctgcatttaaatgatctgctcctagaccctaaaccgtatgaagctcgtgttgaactttggtatagtttctcccacaattgtggaattggccacataggaccttacagtttttttggtttgctcatttttgtccttctgccatgtggcgtcccgtgtggacttgtccagtcagcgccttctttccaatttagactatgcaagtgactgaaatgcgtgctttgcatcacctgaaaaaacaaataatgaactacatagggtcatcctacatcgatggtaagaaaaattagggcaattcagttactttatatagtttgtagcatttgaaggccctgaatattgcctgcccgaaccctggatattgcctgcctgagaccatctgtgatgtcataagaggcattaccattaaaacaagccaactaacgaagctcagggcgctaacataccaattcacagttgaatgaccaatttgagcaagaagcaagggaccaaatgaactattaatctttcagattgtggaaggaatttctgagcactgatggaagtttgctgttccgtttttttaatcccattttaggaacattaattttttcttctttcaagatatctgatttccttttgttggccgaacatagtagagcaaccaaaaaaaatcactgtaatggcgttttctatgggttcacattgaccaagtgtttattggttttctcttatcatggtgtttccaattcaagtttgtgttacacaggcagttgtattcaaagatgctgtttgattctggcaggttatattgaacaaggaaaaggctactgtggagagagaggtcgatggcggaatcgagaccattagcttggatttgcctgcagttatcacgtatgttccatgaaacatttattttctttcttttagttttatttaacaaggctagtacttcgattcttcataagcattgcgatcatttagtgatctctgtcacatagctggatctttgtattgcattgtggttttgagccaatttcagaaattgcctaaactattgtttgatttttgtgacagcacggatttgagactgaaccaaccaaggtatgcaacattgccaaacataatgaaggcaaaatcaaaagtcatcaagaaagtcacccccgaagatctggatgtagatatcagatcagacatggaagtagttgaggtcactgaaccacctaagagaaaagccggtgtcattctttcatccgtcgatgagctcgttgacaggttgaaaaatgaagcccgtgttttataacattctttgtactaatgctcatgagctaaggaatgtggcatagggaaataaagtgtagttataaatggtcatcgtatgcaaataaaaatgtggcgttcccgtatagcaccagtatacctgctaatggtcatcgaaatgctagtgtgtgtgtgtgattttaagaagccatgtaagcagaagtgttcactaaaatcaatcaatctttactcattcagaaaaaaagataattctatttatagaaataaagatctaggcatctagcacacgtatgatgtggtaaaattagtttcgtctccactagatatgccttgagctctacaactatttacgtttcaacctcgttgctgttgtttcgtgggatgtagtgctggcttggtaaaggtaatttggttcaaagctgaaatattttcaagttaataaatcgagaggacaaaaacattgagctaggaaagtgttcataaatgggaagtgtctgatttttcttttaactgaaggagctcatgggttgtacttggaagcagcttctcactaaagtcagagatataggtccaaacaggagggactcgtcctcatggacccatacatcaaaaacacacatcccaacttatataggccgtgtttatgtcccccttcaaacttccgaaaatttcgtcacatcaaatatttgaacgtatgcatggagtattaaatgtggataaaaaaaacaattgcacagtttacatgtaaattgcgagacgaatctttagagcctaattactccatgatttgacaatgtgatgctatagtaaacatttgctaatgatgaattaattaggcttaataaattcgtcttgtagtttacaggcgaaaaatgtataatttgttttattattagtctacgttaaacactttaaatgtgtatccgtatacttaaaaaaatttttgccaagtaactaaacacaaccatagtatattacattacatgagtcttatcaggttgtattatcagatcgtactaagtacatgaataaatgggagtgacatacagtttgagccgatctatacatactctcttcgtcccaaaaaaagataaatcctgggtttccgtgtccaacgtttgactgtccgtcttatataaaattttttttataattagtatttttattgttgttagatgataaaacatgattaatactttatgcgtgacttatctttttttttcatatttttttcaaataagacggtcaaacgttggacacggaaactcagggtttgtcttttttttttgggacagagggagtacaaaatatcactgaccccctggtggaagcagatcgtctgacgttaggcgcacaacgtcagagggacgtccagcgtcgatccatcgtccgatcgacatctcacggtgctgctgcttccttcgttccgcatcgcacgagcacggcgaggacggcccattcagcccatttacgagcaaccgcggagggacaaaaacgaacgagactgctcgtcattcgtcaatctgccatcgcgcaaaaaaaaagaaaagaaaaggcaacccccggcatggctgcccaccgctccgctgtggctcgcgcctttctcgacgcgggcgtgagaggagcggactgccgagaaagactgcttggacctcgccctcttctccatccctcggccccatgtcttcccccacgcgagagcttccaggcattgccgtcctcgacaacgacggcttccacagcggcggcggcggtcgcg

SEQ ID NO: 29728 - DNA, 9547 bp, Oryza sativa
  unsure (1)..(9547): unsure at all n locations
atctgccatcgcgcaaaaaaaaagaaaagaaaaggcaaccccgggcatggttgcccaccgctccgctgtggctcgcgcttttctcaacgcgggcgtgagaggaccggacttccaaggaagactgcttggacctcgccctccttttccatccctgggccccatgtcctcccccacgcgagagcttccaggcattgccgtcctcgacaacgacggcttccacaacgccgacgacggtcgcgcgagcgcaacgaataaggcggtcaaacgggctcgcggtcagcccatgccagtgaaaatggcccacaaacatcctcaatgtcgtgcgccgccgttcgttgctctgtttctggaggggaaaaagggcgccattatactcggatggagggaaaaaaaagaccattcggctgctgttcttacggcgatgaagatggtgagcgagcaacaagaagcttttctccacttgatcgtaagtctgcactagttacctatcttcttctatatccttcattaatagcttcttagaattcatcaaactccccttattaggttgccccccttgccatcaaagaaacatcagactaaagatacaaatcaagttctgccatctaactcgtgagatggaaggagataggtttgtaatacatctccatgctcgtgtattcttttcctttttgtcatatgtatgcactagtctcatatttttttatagagaaatgctagtaccatgttctgtacctcacattggaatggaattcaaaagtccagatgaggcttggatattttggcatcactatggaggtcaaaaaggctttgaggtcaggaaaaggtacacaaacaaaagacaatcggatgacaaagttacatcatttagatatgtttgtggaaatgagggtcatcgaggacaagacaagagggatcatctaacaaagtgtccctgagctgaaacccgcactgattgtcaagtccgcatgggtgtagtattggacaaaaagacggaaaagtataaagtgactaacctagttttggaacacaatcactccttgcacttgcctgaaaccttgcactttatggtttcacaaaggaaaatttcagatttacaagcttttgaaattgaaacagctgatgatgcaggaattgggccaaaggcagcacaagagttggctagtagctaagtcggtggatcacatagtcttagctatagccttcgtgatcgcaagaattatttgtggagcaagcggcaaagagagatggcatatggtcaggcaggtagcatgcttatgtatttccaggacaaaattgctgagaacccatcattccaatatgcattgcaaatggacagtgaagaacagatagcaaatattttctgggctgatgctaagatgataagtgactatgtacattttggggatgttgttagttttgatactacttttggaacaaacaatgagagcaggccttttggtgtctttgttggattcaatcattttagagaaacagtagttttttgtgctgctctcatgtatgatgaaacattcgactctttcaagtggctctttgagacttttctaaaagcacataatgggaagcatcccaaaacaatatatacagatcaagatatagcaatgggaaaggccattgaggaagtatttcctgcagcatggcatggattgtgcaccttccatatttcacaaaatgctgcaaaacatctatcgcaagggaataatggagaatcaagtattctttcagatttaagcgcatgcatgtatgagtatgaggatgtgacaaaatttgaatatgaatttaacatcatgagggaaaaggtgagcaagcaaacttggctagatagtatatacaagttgaaagaaaaatgggctaaatcttatatgaggaatgttttcacattgggaatgagaagtacgcaattgagtgagagtttcaacaatgacctgaaaattcatttcaaatctgattttgatatcattcgttttttcaagcattttgaaagagtggtgcaaggaaaaagaaatacggaactagcttccgaatttgattcaaggaaaaaattgcctagaatcaaaatgagggcacctatgctgctgcaagctagcaaggtgtacacccctattatatttgaagcttttcaaggggaatatgagagatcaatggcagcatgcactaaagcattggatggcgataatgaatttctagtatcaattaggagttttgagggagatctaacatttgaggaggagtacagagttgttggtgatccttcagagcagacatctatttgcagctgtgggcaatttaataggattggaatattgtgtgggcatgctctaaaggttcttgatttgatgaacatcgagtcacttccagcacaatatatattaaagcgatggacacgggaagcaaggagtggaatagtaacggacagcaagggaataaatataattgagaacccaatgatggaagcttcccttcgctacaaatttctatcccacaggtttctcactttggcccaacaagctgctagctatcctgagtgcacattgttagtaaataatacacttgacattcttagcaagcaaattgaagagcacctcagtggatgtgctagtacttcagatcaaagtgcaacccacaaggaggttatgcccccaaataacttgttgagtaatgcacgcctaaagaaaaaggaggttcgtgttagaggttcaaagcgaaaaagaatttggcttgacaaaaaacgagacactacacaaaaacgacaaagtaaaaaagggtaaaagtccaaaggtatgttctaagaagatattgcaataccatgttactattcagtcatgtgttcacttcatccttttacattatttggttcgaaggaacaaaagactaggcaaaatgcactccatgttggtgcagcaacacaagtggcagaagatagttttgctatggacaaggaggagcctggagaatacatgcacctaaatagcttcactcagcttttgacggtaatacatgcacctaaatagctatgaaaatatataataaaacaaccaatgattaatctttttctttgtaggggcagataaatgatgatcttttagttgacgatgcattttagtgatgaagtcatgttctggaggataacccaagtttggttgcaatactgtgataatacaagtatgatggagctggggaaaaaacatgagaacttttgtgtctatggttaattttgttttggcagatcctagtgaagcacttctgttctgttttggggttatcctatccaagacatactcttatattggcagcactcaatgatgtatatatgtctagctttcatttgctatcttgaaagcaaaactttagggacaaaatatgttcagtcattagatgtccaatgcagcaacaagtatcacattttaatgttcagtgttcactgtccaagactttctgccattgctatctgaaactctcaatctgattttgtcacaaataaaatgacccaattaacttcttcacattctcaaatgctcacaaaaatcagagtatcaaattgacattattatcacattcaatactgaatcacagtttcaattgacatcgattttcaatctcaattcagatattcccaaattctaaaacagagattttcgccctcttcagaaagctatggtggtgctgccatgcttgtcgcctccttcccatgcctgtccgggcttggcagcaacggtcgccctttctcccgtttttgttcggctcttgcgattccttcgacgtgggtggtggtgaagagcttggcgccgccgccgctgtggaagccgtcgttgtcaaggacggcaacgcctagaagctctcgcgtgggggaggacatggggccgagggatggagaagagggcgaggtcgaagcagtcttcctcggtagtccggtcctctcacgcccgcgtcgaggaatgcggcgagccgcagcggagcggcgggcagccatgccggggattgctttttcttttcttttttttttttgcgcgatggcagattgacgaatgacgagcagtctcgttcatttttgtccctccgtggttgctcgtaaatgggctgatgggccgtcctcgccgcgctcgtgcgatgcggaacgaaggaagcagcagcgccgtgagatgccgatcggatgatggatcgacgctggacgtccctctgacgttgtgcgcctaacgtcagacgatctgcttcccccgctggtagatttcaattatggctgtgtttagttcagcgtaaagtttgaattttggttgaaattagagatgatgtaactgaaaaattacgtgtgtatgacaagttgatgtgatggaaaaggactgtagtttgaatccaaactttggatctaaacacagcctatgactaaccattatttgcctgcgtaatattttactactactatgaggtatttactattttaaaaagtctaaccctccgatttagattataaatcgttttgaatttaatcaatcaaattgcttcaagtttaaccaagcttgtagaaaatggtttgacttcgaccaaagttaaaaccacttataatctaaaacataccaaagttaaaaccacttataatctaagggagtacttaataccagtttaccggaaatcgcaacactcaccattaccgttttcttatcagtcactaatatttcacattcaagaaccagcgaccaggggttatcggccaaaaaattctggcatgattattatacatttttttttacaaatccagacaaatacatcgcaaatatattgcaaatatgttaaacgatgaaaatgcaatcaaaggaatgagaaaggcaaaggaaaaggaaagaacaaagaaagcaaagaaggaaagaacaaagaaaatagctgtcaatggaataaattgaattattgtggtaaaatttttattttttggttctcgcaagattgactcccggctagggttccagcggttaccgctaaggatccaagattaacgttgcataaatgcaaaggtaagttattttggggtaacttatccttatctattgagagctacaaacataaataaatcatcatattctacaaaattctcacgttccataacttccggaaagtttacaagataacccacaaagccgcctccagaaaaacccttttactccaagattcttgccactaattatcatggcattttgtaaagagtccaggtatcgctgacaaaatgaaccgggaaaaacaggaaagggaaaaaaagaaccaagcaacgttttctaagcactactctacaattgaattagcaagggtcactattacttacacaatgtacaacagatctgacctgttccacctgtacactcaaaacaagacttaaacctaagcctaagaactccagaaatctagtttactcaaaataccaaggctattctaaccacgatcaaaatgtatgctaatgcatatctaactttaatatatctgcactagtctggaatactcctagaaattggaggaaaagttgcaggtttagatcactaggctgcctctcaaattcagaatgtggctgaccaaccatgagataaaaggtggcttgtcagcaccaagcatttcagtgcccttctaagcctannnnnnnnnnnnnnnnnnnnaatctatcagggtcagggctaaagagcgaataatcttgtatctccagatttgctaaatgccaattgacgaatccagcttgcaatgatttgacaacaaagaggataataggcagtatccaccattcattgtcttccctactcttaaagctgcacaagattccagagaaagaagagaccagcatatcagtaaagcagatatggcaaggtgcaggtttttccctaacatagctaaaagaacaattaagtcctgtgaattgccattgagaagacagttaaaagaaagtgtagaatatataatctagatatatatttaaacagtttttttaagagttcttttaacagattagacagaagacatactaaatccaaaattaaaaaaaaaaactacggattgagcttccatattcctttatcaaggtgcagaatatatgactaccacatattacatcacagatagagacaaaatcagatgtccccaatttataaaagattttggttaatgaatccaatttgaagaatgctatttattgtacaaaacaaaaggtttcaagttgttcaatttaaataaagacaattcaaataaacatactccctccgtttcaaaatgtttgacaccattgactttttagcacatgtttgaccgttcgttttattcaaaaaattttgtgaaatatgtaaaactatatgtgtacatgaaagtatatttaacaatgaatcaaatgatatgaaaagaataaataattacttaatttttttgaataagacgaatggtcaaacacgtaaaagtcaacggtgtcaaacattttgaaacggagggagtactattttaggctggtcactcattcaggttttcgataaagtgagtatgccaaagatataggaaaatgttgttggctattacccccaggaccaaaaacacacacaatcgtacatacaggaaatgaacattggagactagtcaacatgaactcatattacatcaattatctttctgttattccatgcaataactcttgggtgatttaaattcaatgactacgggtaactcacagcagcctatatatgataatcaggttcatgaaccacgaatccaagtatatggacatggtcacatctcctaatcaccgagagcatgcacccaacatccaaactaatcattcaactaatgcaaaaacaatgtgaaccttattatcatcacatgtatggctcatgcactcatagagaggaactgatatgctttccatggtccatcactactaaatgcatgcaggaagagacttgtgcacaaaagaacatgaacaagttaactcctaacagggactttcttaacctaaattatattaatttagatttggatataaatatatattctgttataaatgtattttgcaaactcttattattgcaaccaacagtggaaaattttggaaaggttggtagatctgtagcatgtagtctttcccaactagacatgccttgaacccacgatatgcagccacatgggcatccctaaatccccagaaatactgcctaatctcttatgttagttttgatgtgcaaagtcataggataatctggttgggaacatatcatgtgcacacaagcttcccgtgcacaccaactagcaaatgtcacagaaaattctacaaaaaattagacacatagtttcaatagtactacacctacatgtgcaatcttatcttcaaattcattatattttagccgtaacaaaaaagacaaaatcctgacagatttttacccttaaaactgtcagatttttcacttttttattacgactaaaatataatgaatttgaatatgagactttgcatatatgtgtaatactattaggagtaaatgtccattttgtagaatttttcgtgacatttcctagttggtgtgcacaggaaagttgtatgcataaggatatgttcccaagctagtttcctgaacattggaagtcaccttttctttatttggagaatgaattctggaattcaaaagaaatattagaactacaaaccttttagtgtttagtgcatgaggaacggaagacactgataaagaagacagcccagagtacaaagctccataaatgattgctacaatctgcatagaataaaaattgcatataaaatctccaccgcctgttatgaataattaagccataaaattgagtatatgaacattacttaagtaacaggatgcaaaccaactcttgttaggctattctgaaatagaactttgtaacaaagcataacagatcatgctactcatgcaataccacaaataaaggggttcttagacaaaccatgagaggaaaggcttacaatgtttatgacagaagtagtattccaaagtgcaaaaatacgggtcacggaagatctctttggtcctcggctgaaaagtgcattgagaccagcaagaaagggagacagcaaagcaaggggaggaataagaagtacagcaaggaatgctccaacagatatccaatagtactgcacaagcataagcagggtgacggaaaaatcacccagtagtataatacatataagcagctgcaaagtttcctgaaatattatagcatggttccagtaaagatgccttcctctcaaatatgtgtgtaaaacaggattatagtgcttaccgcataaccaatgggcctacaattttgcaatagcaatgagaaagggaaaagataatctcttttacattccagtgattttagtgtaccctcattgattatcccaccattcactccacctgtcaaacgctttctagaaacagcatagcttgtgcaaggctgatcttgatttagcttcttggaactgatgttcttcctgtaggattaaaagcgataccactattttacacagcaagagtaatattagtaaaatatgatattgtgattggtaattatttccataccttgagcgatcgatgaattctgagacatgatcatgctgatgaagactcttatagaagtgctcattgacagcaacaacaatacctagctgataataacaagaagcagtggcttggaaccatcctaactccactcgaacaccatgccgctcaagttggggatttccatgactattaatccaagaaacaacaggtcccaaagttgatcggatgttcccttgccgtactgtcctcaactgagcattcaagcccgcaaccaatctgttccagatcgcagttgacacatactagagaaagggaatgaagtcaatggaaatgattggataataattttgcacttctacatagaggcttcagatatctagaatatcatatctagactgttcattatctaaatacagcatctgcatgctttactaggtcccaaaaactatgcaccaaacatatcttggtcagtggcaccaataatgtggaacaaagtgaactgtcctatgtgatgatataattggaagtttggaacaccaggaatgtcattaacatccctattaagttaatcttatttttacctggccaagaaggttagataacaatgtatcactgtgtaggtagtatggagacatatagcttccatcaccaccaaaaattaagcacatgggaaacctcttctggattgtggatgtaacatcaagtcgtttctcatcacccccgagaaagaaatcaatgtacgcgaccatcaagtctggtgtagaaccaacctgtaatgctcaaaaattagccatgtgctctcgttataggctaatggtctgtaacaaaaggtgatgcacctgctgttttgaaacacatccattcctaccactttttttttctctaaaatgcaggacgaatattcctaacacttcactactcatagccagaacatataggatgttgagttactacctccgtcccaaaatgtagctacctagtac

SEQ ID NO: 29729 - DNA, 30507 bp, Oryza sativa
gtattagcaaataacatcattcaaggtattagtatttattggttatttaagctaagttcagatacatctttaatgtatcattaaaatgaaactctgctgaaattggctagtaagttagttcatactaataagttctggcaaaaatgctgctacatccacgtggggtataacttgattgattttaaacagcctacatattgtataaaaccaagaacgattactgttcattatggtgcaaaactggaccagacagttcttgttttgaaagttatcaccactgctggctctagcaccacataacattattgaattacaattactgaccttcaagcctttatagagtgctcgtgatctgcaagagcgaagacatgaatggtcatattcagatttaacgtactcttgaagacgatggattttctttcttctgcgccattgcttccaagaccaggcacaaggatatgcaagtactgaaagtatactatgtatagatccttcccaccactcgtatgcagccaccaaattgatctcatcgataaaacggttaaaagcatcttcatatctggcaaaaaaaaagtaacaagatatcacctatggcaaggaatacaaacaaaatactgatggagacatgaacattcttcggaaatatatatgacatagttgggatggtgcaagtaaaatatatgggactttacggaagatcgttattcttacaaattgcatgagatgggatggtgcagccgtgcaggtacattgtttggttggttatatagcatggtaggagactatctttggtaggtcatttggtagttttttaaatgatatgcattatattgcctgtagcttagttttttaacatgattacatgaatattcatttctgccaataagttcatgaaaatgaccaaaagattatttggatctttaaaggtatgtttttatatcgagtttcatctgtaacatcagtactaagcatgacattttgatctgagtctaatcattataattccaacttccaatcgctcataaagaacaatgcaattcttatgcaggtagtaaggtatgatgctagtagtaggatgcaatgtagaatgagccagctattaagaaatttaaatagtgtatgttttccctgttcaacattagtaaatagtaacacgtaaagtagctttttactatagaaaatgtatttacattgtgaatcattatgagatgaaataactataagtgatactctgctaatgtagattcttagaaaatcttacacgattccgattatagcatcagggggtgagtaaggaaggtgccaaggttcccggaaggtgttaggtcccatgaagtacattctgtgggcatggctttgtgtttcttctgccctgctagccccaggtacctacagaacaaatcagtgccaccatttatcgaaacaaatacaagcagaaagatttctttaacaacctgagatagaaagcataagtggtttctggacatcctttaaaatccaactgcactttgaatcagaaactattggagaaattatgaatttgtaaaaatcatggattgagcatttgactattgtgagttgacgtgcagatgccagatctagtgatttcacaatggggaaatatccagtgaaaaccatcaaataagtgaaaacccatgaaagccatgcccataagttctctaaatttagacatagatataggcattaaatacttttctaccaaatcgcaagtccaaatacagcttcatttgagaaataagacaaatttcaggtgaatagcgtcatgttactgttcacctgaaatttgtcttttttttacgcctaaataaagtttgagattcggtgggaatgtatttcatgcctacacctatctctagtaatcttttcataaatttacagaacttttaggtccagtttcacgggtttttacttatttgatggttttcatcgtatatgtcccctttcacaatagctctacattaatatttaatcgatcctaagattatgttgtatgaattgatacatacctcagccaatgaaagcaaaaaggggaaagaagcacagccatcattgtggattgcatttgttgaccggtatgtgatgtcactctcaccaatcttgactctgagagcacttaagacaagtgccaaaagaataatggtaaaagataggataattgcaaaagaccaaggaccaccaaaagtataaataagttcctcaagtggtgtgtaacagtttggcatcttgtacttagaagatatgcacttatatgggcaggacggctcggtaacaccacctagcatgtaaaaagttaatggttagtttctccaatttaacatcataaattttggagttacaaggcaattaaataattatagttccacataagaccatgtctttccaaggacctacctcttacatatatgaagtcagcgcggttaggaagactatccagagaacaaggcatacacagagatgaatcggacccaacaacatttttgtatgtaccgattgggcattcctggaatataatttaatcattactggttgcgaacaaactaataaaaagcatttgctagttaccaaaacaatagtacataaaaagaaactacctagttgcaaagtattgaccatatcaatataggatgttttattagctcatggatacagatagaaaacccggagtacacaatgaaatcctacatagttcagttaaaattaaaagcgtgtctgaatttgcaagtgacacagatcaacctggccattatgaactgttaaaagcataatataaacagaggtctgtgttcaactaactgttggttaagaactctgagcatcaagcagtagttattttggcaaaatgttgcttaagattatagcagtggcacagttatttgcagttttgcaccctctggggggcaaacagtttacgtagtagctgccatgcatcaccacaaaaaccattatttataaggaacaaataaccaccccatcctggtatttctggataagggcgagaaaccagtgtggcaacccaagttcaaaatagtttatctacgagtggtggtgatatcagaggacataaaatctcctctataacccctataattttcctctattcacatggagagaccaaattttggctcctattgcacacatctagcatgaggttaaccaacaggacagaaggacacaactatattctccctcttacatataagccttatatgaaataaagagattaaatttcttgaatacacacatttaaaataataatattatttcctatggattaggttattatcataacaggaacatgaagcaataaaggcacaatgagagaagtgctcatacggtgcaaaatgttccatatagtccaacaggacacttttttcctgttactgttccagtttctccaaaatgtccatcatcattaccagatcctccactatgcaaaaataaaaacaacaataaattttcagaatatttttttctaaattctagtactcaaatactttttgttctagctttgtcctaagtcaagcatgtatatctttgaccatcaatttttagaaatccgtatagttcaaaatatgagttgtatttattaaagtatttgtcagtgaatctaaaaaaaaatcatatgatgttaaaccatatgagtttttaaaaattgatggtcaaagatatacatgtttaaggacaaagctagaacgacaagtaatttgaaatgaagggagtaatacttttcaggatcaaagcaacacgcaaatttaattccatgacaaataaataatgggccatgcaacagcaatactagtaaaagcaggactatatcctgaaggtccacgaggatggtaataatagttgcattcatgaagtaagcatgcatttcgaaaaaagatgcacaaggttgctcaggatcactgatcatgtagcatactatctgtaggtccctgaacacaaaaactcaactggcaggacactaagcttgtagcgtagtgccacttgcaccattttgagtacagctaaaatgcagagattacactgaaataaagggataaccatgattttgagcattaattcattatgggaagccaaattgccacattgatcatccagcttaatagttgacatttttcttttgcaatagctttatgattgacattagtttggaacagctcatcagtggacatgtcactgtatctagttttgagacatgcatctacattagaaggcagaaactgattttatgatgacaaccaagcaacctcttttactatatgcagttatcaaatagccatagtttgcataccttgatgctactaagccgttgacagaagcaatctgaacatactcatccccagtagcaatatttgaccaatggaaatggattctaccaccaccaccacctcctccaccaattaaacctccattgccaccagaagctgatagtgatgagtttctctctagcagaagcccttgaagaaataacaggattgtccctccagaaccaccaccaatccctcctttatatgtcccattcgaattttttttagtgcctctatggctttcaccatcagagctcaaggagccataaattagcaattttgatagtggccatttcatggatccaacaactggattacgaaattgtcagatattagaacataaaaggaatacaaaaaacattgcaaagtaaatgcaattagtttcagaaaagaaaaggtgaattacatcaaagggtaaaatcagtataatatgcttatttgcaatgcattacatatgtcaagaatagaagaatggaaagcaaattgcattaactgtatatggggactcatatgatcaaattaaaaagcttgaaagaatacaaaaattcgcatggaaacatctaatatgagggtacaaaggatataaaagactgcaatataggattacaaacaaaagatggtacctaccaattaatcccccaccagcagtgttatcagttgactcagaggaaccactgccactccctagctcacacggaagatcagcactgccatattgtggacctccttcacttctcatcccattgtaaatccctatgccaccccggcccccatgcccagcaccaccaccagctccatatttgagaaacttccctttcccaatgccttccttgcaacctatcaaagaatccgaattgatgagtgcacaaagttataacattgataaataatgcattccagttgctttactgattacatcaagagaacacaagaatcacctaactctgaagcacttattgtgccattatttgtaacagtgacagttcttgctcgatgaatgtgaattataatccccctgactatgccactgacagttatgtcttcaacacggcaaatctgcaaaatgtgattttattaccaagaaggcagaagcttaaacacaatcagcacgcctcttactgctgcaacttgtcgagattcacatttacattaatataaacacaaatataacaataagtatagcactaatgtactatcgtttctatcagcacaattgttcacaaggaaatacataaatattagtgaaacaatcaatatacacgaacataagggtgtattttcattcagaagatgtccctccatattaaggctttgttcagcatcctgtgttggaaacacatctcttgcgcacggaaaacggagtggtccattagcgcgtgattaattaagtattagctattttgttttatttttttgaaaaatgccatgtgggcccatgatgttagtgtccactatatgaagacaaaatcccttctatgaccctaaaagtttagctaatcccttctacacccctgaattttgcttacttccttgtatacccctaaaatttgattttgatcccttccatgccccttccatcagttgactgtctaatttctataaaaataaccattttaccctttggatgaacataaaaatttacgaattacattattggaaatgtaaaagtttgtcgcatgagactattatagttatgagtttgatgtgtgacacattatttatgacaaaatatttttagataatgaaataaaaaatacgtatttattttatttttaaaagtcataaaaatgaggagcatacatacaaagataggactgcgaatgctcaccatattttttttatgaatgctcccgataaaaaaaatctattgttctattaaattttaaataaaaatttttatttattacatttgttttattttcaaaatttatgttaaaattttccgcactaattatttagtcccattttctacataaaatgcacatattctgcactcaagcaaaattttcaatcgttttcaagcttatattcaaacctaaatcatcaagggcattaaagacatttgccaccaacttaacggtgaaatgaaggaaaatgtgacggcaagggcatggaagggatcaagttaaatatcaggggtataaaagggattgagtgatttttcaggggtatacaggaaatttactcctataaatcaaatacaatgtgtataatttatatcaattgttcatcactatgagcaattgtgtagctcgacatacatgtacaagattgtaccaaatatgatatgatgattagagtgggaataattttattttgctttttgggctttcatgtgatcctgttgcaacatacgggtatttagctagtttgtacaaatatatgcaactattagtgtttgaactttgaaatctgatatttgccatttaatactcgtgtgttacagataatgttgtatgagaaaaaatgaataagttcaatgaaattcagaaaactggcataggctgcgttcttttctcagttcaacagtgattacggaaaacggagcgatccattagcacatgattaattaagtatctgctattcttttttaaaaaaatggactaatatgatttttttaagtaactttcgtatagaaactttttacagaaaaatgcaccgtttagtagtttgaaaagcgtgctaacggaaaacgaggactagaactgagaaaagaacgcagccatagaatggagaaggttcatgttattgtatgaccatgaaatttgtagtgcatatgtcaattgacgtgatatgcaggtaaaacacttccataatcaagtagaccgtctataagacctatcatgttggacactgggatggaaatgattatgaaatacacaagtgtaatttaaagtccatttgtcacaaccctccactcagagagcgtctctgattaatcctctgttatcacttaaaatataaagctaataaaataaatgagctccagaagaaaagaatatcatagtgttaatgaactatccttacttgtagtgtgaatgatagagagttgttaacatggcaatcatcaggaggtgtgattagctcactggggcaagttttactttcacagcgtgaaagggcatccctgataaacacaaaagttattccacggcattatttaaaaagaaataaagataattagtttcacagtgacatgagatatcttacaagctgctttgaacagcatcatctagtggtgcctgaacaaatgaaccaggaccaacctgctcatagtcatataaagggaggttgttagtttcgaaaacaatcaaatggagaaaattttaatgaacacaagatggttcggtatgggcagctgaaaataaaaatgcaatgaataaactccaaaaaaatataatggcatagaattgagaatacatcaagttgatttacttgctagttcctagtatccaaagtaattgattcatcgctctaatgcagaatacgacagaagaaaattataccagtgtcattggcaccgaggacctatttgtaagaaaaaatatttacattttaacccttttcagaacttctttacaaataagtcctcgcaccagtgtcatcggcaccaacccccttcacatcagtggcttagcttccagggggggtgagggtatcggagccagcatcgttagcgagacgttggacctcggcaccagtaagtttgttttttcaggggtctatttgtaaaataagtttccaaaaaggactaaatgtaaaaaaatccagctacatctactgtctaattccatgttcttaaaccccaatctccttcaaagggcactgcgagttcaaaagaacagcgaaccaagcttacagaacgataaaaggcacctagttctagctaatcacattcttaataataggagatgtctaatcgtaatactaggttaatatattttgggatggagggagtagattatattaagaaacagctttaaaaatgcccctctggtgcagacagtctgaaactctgaatgcaacccagctcaaacatttactttgtaagttatagggtctttaagaaattataagaaactaatatatttgtgatggaatatagtatatcaattgtcccagcataatatgacttagtggatacctagtggaaagtgcatataaaatagaggtattatctagcatatacaaaaggtaatgtatagcataaagatacactgtaccacaaatgttacaaaaggatgcaattaatcttacttcaatgttgtaaaacagagagagaaaaagtcggcgtgcttttattccatcaccagggccagtcaagttaagaagtccttgcccatagactcccaaagcagcattcgaagatatgactgacccatgctgtagtagttacattaaaaaaaaattaaaattccacaactaacaaaaagttgacagtgagttttttttttcaaacaacataccctgagtacaacaaggtttctggcctcaagcatagatgcaagaacaacatccttacccccaccatctatctgaatctcagaatcccacatcaagagcactttcacatacattctgaaagcaccatagacctttaacaagaggtggaagttagaactacagaaaatactaacaatgtttgaatggagttgccatacactaaacttaaaatgctctatatagcagaggtgacagatccaaaagaacccatatggcaataccacataaggttcaactaataatacctacatttgatcaaaaataaaccttagctaatttatttatttttaatttaactccactgtatcaaatagcactttcatgtctgaaattgctgaacgtagggcacttcaccaacacttgtggagcaagtgggtgaaccacgtgaagtatctgatgctccctcacgtgtcaaagccatgttgggtaacacactcgcatggtaggatattgctactccgctttcaggagttgacgattctactgatagtgtgtaacagcaatgccacaagaagtcctaaataaaaaccccccctgtattgctgtgggaatttgcagggaacaattttggacaaaagatgataaactttgtacaatctgacagcatcgtgatgaatcgaattgcagttccgttcacaagtgggctctaatgcagcccaaacaggcctgtgcatttggctggcctggtaggtttagcagcaggaactactaaaaaccaaagtatccaagaacgccaagataaaatctaatagctcgcgtattcttgctgtggctcacctaagagtttctttatagcattaattgcagctagtgggtcacaactcacaaactcaattatatagaaatatagggaaaagattaaataaaattaactataaaattcatgccatagggtgtggagcaaatcagaagagtagcatgaactaacaaggtccagaatggtatttctataaaaaaatatgtgaaatgaaatccacagattactagtccctccacccacaaataaaggcattttaggttgtttatacaaaaattaggttaaggagaaaagactttggtgccccttattaaatgagggatggttggggatgggagggctgattgggggtgcgatgggaagaaattttaatgagatgtgattgatggtacaggtagtactctaggaatgcttatatttgtggacaaaagtcaaacacatggaatgcttgtatttgtggatatagggagtactatacatatatatttactgcaaacagaacgggacaatttgataggtgaaatttgggtacaaaattatgaattattccatgttatggccactgaaaatacagccagacgcaacagcataatccttgctctacaaagatgccacagttgcatccaaggcataggtcatactgtcatagagtatcaccacaaggcagaaatcctacagctcagatcaaatggtgttaaatatgtagttatgcaccacatataatttccatttgtcaattttacatattagcccgtcgagtcacttgacccctcatgtttcacatctctcaacaacttataaacactattttataattttcaacaacaaatatttacatacttcatttgaggtatcattgttgtttcaaaacaatataaagaaatttcatatctctttcaaaatttaaagatgtaacataacatttattagaaaccaagtacgagaatgttttttttgttgacataatttaaagtgtttcaggtaaatagcataattatatgttatttatactatcccgtagccggggtgatagcagtgccctgccccggcactaaagatgatatctcatagcacactataaaatatataccgagttggttaattacgtggggcttatgaatcattttggcaccatcaatgattgaaaagacatacctttataactgagtcactcattaaaagctcttctgcaaccagctcaaattctgatattggattttcagacaacccaaagctgatgctacccttgctaagtagtctaatttggcctgtgacctgataaatagaaaaaaggagagaatgtattagtggacaggcaggtacgcataagtggagatggtaatacaggaaacaataaaaagcagcacctcgcaaaataaaaataaaaagagcaggtaaaagggaacagatatgtgttttaagaactactcatttactggtgcttgctggatttcatagtttcattgtattctgaacttatacagatcactctgttgattcatttcctcatccatggttttcagatagaatagaaaagctggcttttgttaggttattgttcggttgtttgctaccccttgtcacattaaacagactagccccacgttatcaaagatcatacagcatgaaaatcaggcacaactgcgcatcaacttctttcatggttttatatgtatcaataatttctgtaaaaataattgtctgatggcccgtgtaatggaaaagttataattaacgacataaatataataagctaacctgaaagatagaaaggaaaaggcacataaggaatgaaaaaacataacagtagagtgagaagaattgccaaaaacaattattacatgtattgatactcttatgacattgcactatatgacaacagagggccaccacaagccaattcaaatagtgctactcccaggcacccatgtcacaacctagtcagagcatagcagcatttcaaatggtggcgtcaaaccaactcaaacatctggcaccacagtacaaccacattagcttgttactagagtgaaatggattggattagaccaatgggtatcctaacccacatttttttcccaaatttagaaatgggtacaattaagcataataaaattaaggtaggtcggagttcagaaatcggacaatcaggacaggtacatgaccacttcagataggaagcaaacaagtaaagcaagatggatggcatatgcacatatagagcaggatatgttgaactaaccagaacaccatgttttcaagccttcaactattaatcatgcgtatgtaagtaacatgtatcagcagcctgcacaacaaagtgacaaaccacacagcaatatgactcatggctaggtggcttaaccctcagcccggtgatctcattttcgactcctcaaagccgcaatactacttttggtatgagcaaaggaaatggaaatgagctcgaccgagctgattgaaaggtagtgatgggctggaataactaaaaagctcaatataggatatctgcacggattcagattcaggaaattgctatccagaggttttcttttttctcgaaaacgcaggagggctgcatttcatatcattaagaaggaagagtaaagtaaatttcagaaaactccatcttttatggttaaagttgcagaaaccacatgtattatggcttgtggcacataaccacaggtttatggtttaagtgtttcatataaccccacacttattcaaatcatattaaatttatcatatctgaaacattattctatactacttaaaatgttagtagtggtggtgtccgttcagccacaccacctcctaccactgatatttagaccccacaatctatagtattacaccaccctccaatgagttctctcccgcttcattgctggtttatcttaaacttcgaaatcacctacttattcaataaggaaaatcataaaagcattactttgactaaatatgtgcttaattgacttaataagctataaactgaatttgttccagagcaaagcacgggctcttagctagttttttaaagtagtgaagaatcgaaccaataaccttagtcaagaaatcaacaattaaaattttcatatagacatattttcaaattttatgtaaatcttcactcaaatttcaaattttgtgaaactttagaaccataataactgaggttatgtgccacaagccataatacatgtggttttctacaactttgaccataaaaggtggggtttactgaaatttactcaaaaacatatatacagagaagaaaaacagggagaaaaaaagggggaaacaacccctcctctcccaccaccaagacaaaaccaaacaagaaaacagcctccgtatcataagttggactatatgttctcatatccaagtccaattagttgcaataactggatatggtgtcagatcagaaggggactatctaaccactttaacccctccttgttacagacaacatggtttcatattttgttgtgctaatatttagaatcagattggcacaggccttataatttattgccaaatgtctttaaagggatacagggagaaactttaaaaatggatgttaatgtggtttacaagcaatagtaaagaacctcagcggacaagacatcataggacttttttagagggttagaatatcccaagggattgagcataactgcctaagctccttgcatcccaacaacacattaagtatgtatgttgctgtgcagatgcaatacaaaagaacatagagacatgtaaacaaaagcataagtgatcttcaaatcgatattaatgtcatcatgtgcagacctgtactctggaccacagcaatgggaccaagactttagcattacactccacaagcacattggaccaaagtctagtcatcgggaaacccagcaatggagtttctgtatgtgtggtgtagttcccattgctgacctttagagtctgcaaagaactttcatatattgtacctgctgcacctgcattctgagggcacccaaaactttgtccacctgatgaatgtgaaaaggaatattttccattacaggaaataacaggaggaatgcattacaaaaatgttatagaaggacaaagtacatgttaaatatatacaaaattcagcaccatgaatgggcgcaaaaggtgagaaactgagaactgtgtcagcttaaagagatgcacaaaattttcaaaagtggaaaaaggtcctaaccatggtgaattcacaatggaagaataatcaacaaaaaagttatagaattcgtattaagtaataaaattatggaaaatgaggcaaataaaaatctagttgagtaaattaagctattcaaatcatggaagtcgacatttctagataacgaccaactgaccatgattattcaaaatttccatttcaattgttcttttactttgctctacaatttccccaccctgctactaaactttatattgttttcactctacattctaaaagcgctgctaagctacaaaacacttactgacgcgaatataatgtagagttcacatgcaacgactctaaggcccatgtgctcaattcattcatatctagctcaagcactattctaaaacatggccacctagccctcctaagtgatgtatttcaacagaaacacatttctgtgatgtcttgtggcaaataccacaattttggagtgccttctggcaacttttcccaataaaaatacagaaaagcttttacttgcaatgcagctaataaagtgcactaattgagtgagttctgcaaatggcatactagcatcagcacgtcccaatgacaataactttggtggaaaaaataactaatgctagagacaaattaaccaatacgtgacccacatttctgtgatgtcttgtggcaaataccacaattttggagtgccttctggcaacttttcccaataaaaacacagaaatgcttttatttgcaatgcagctaagccaataaagtgcactaattatgtgagttctgcaaacggcatactagcatcagcatgtcccaatgaaaataactttggtggaaataataactaatgctagagacaaattaaccaatacatgacccaaaagaaaaaagaaagaaagtctgtagacagcaatgtatatcaattgcacctatgtcattctgtattctatagtttggccaattatgttcttctggggagaaacaacagtaacagatatcaaaagagctgcataaaaacaaatgccaaaaagtactcaccatgaactgtaatctccagatcttgctgaatgctgtaacagtccagagatatcctcccaccaccacctccaccccatccattaccaccagcagcacttatcgtaccatttccatatctaagaatggcattagaataaggagttggatctcacagatcaccacagaaagcatagaacagaagtatggggtttgattcagtaaaactcctaggggaaggtttacaaacagttaataaggataactttgtatttagaacaattgttaactaacagttaatcaagttgaggatgagtaataaacctattctggtcctatagggctattcaataccaagtgctgttgaaacctaaaccagcaatctcatgtggacagagcaatatcactggaaagcagatgagcatttttcatgttgctggaggtgcacagaagtcaatgagggtgggggagcgcagaggtggttgccatggaagaaggtaatgggatgcatggggataggagcataggagcacagagttggacgaaatctgaatcatgttataggggaaaatgacattaataatgcaatttggattaacaacaacttggattcaactttgagtgggtttcagttttctaaggaacaatattgtaaaagcctgtctgatagagcaaaatattgtgtaagataacattcaagtcacaagcagctgagcaaagcaattgaaccaaattgtatacggaatgaaagagaccatcaaacctacagaatacggctttccaattccttttaaaaataattccaactaaaacttctagatgcggatcaatccaatgctttatatagggaaatggcatggtaaatcatcaaaatgctctaaacatttctgagatagcactacctaataatgttcataagaaaacaactaagttgtcagtcggagtgttcagtttatttatctatatatcactcatattctaacattaagttatgtataaagttcaggttgttatgtggtaaagcaattcatagtagaacaggcgaaattcaaataaatgcagttcttacagcttgaaagcatatatcataatgcttcctccagacccgccgcctcctttgagactgcccacaccaccttcagcaagtacatcgccgtcgacattcatgaactcacttgccctgagcatgacacggcctccaccatctcccccaaactgatgatcagcagccatgctaccacccttgctgccgtaactccatggccacgccaacgtggaccaagcatacacatcacctccccagttggtgtcattggagaccttacacgacgcgccacgcccaccgtgcccccctccggcaccttcaaggctatgaggcgtcccactcgtctgcggagggggctctccggcaagcccggtggtgttgacagtggagcgttgatccagcgacacgtttgtcgcgtagagactaacggagcccgcaatcaaatccacgtgctcgccgatggtgatgctcccggagacattgatggcgatgtagcagccggcgacggggcagatgatcttcacatggggcgaaatcaccacgctcccgtcgccgtacacgcagaggtcgccgtccagcgaggagctggagccgatgacgcaggtggtgtcgaacgacccggacccgttcatctcttcgcacgacctcgacctcgccgtgtggctcccgcacgggaactccccccgcaccgctccgccatcgaaggagcgacctccggctccgcctccaccgccacccttgtcagcgaggaccagccccgacgcgggggacgcgccaaccaaccccgccaccgccgcggcgaccacgagcaccaccacccacaatcccacccgcctcatctccgcggatcgccccaaaacatagctcaacggcggcgggattcgcccgggggtggaggcgaggcgaggcgagggtacggatctcgcggcggatcgatccccgagccctagagcggcgaggcggtggaggagagagagagagagagagagagagagagtggagacgaagcagcggagtgttacgctacgctgcggctgcggctcgcgaggaggtgggggaaggaggagagagaaagaagagagagagagaatgaagggggatggtggccagctggcgtgatttgtgtgggtggggtcagtaatcagtccacgctgtgctgtttgcttgcttgatcacctctcttaccatcgtcgtcaagtgggaggattagaattaagcaaaagcgattagtggttagtagtcgtagtagtactagcgagcgacggggagggagggagaagagagacggtcgctgtcgcgtcatggtacatggcaccggtgtcttccatccgttccgtccgctgtcacaggatggagccgcggggccgacgctgccgtacgtggatcaccgcccatcggtttttttttctttttctttttctttttctgcggggcggttttttttctaagggttacgtatgataatgccacaaatcaaaccaccaaatgatcatatatatttctttatatttctttttagaccagcataaaaatatagtatatttaaaattcagataacacatgtacaaacggcctgatcagccatcagataacacatatacagagttaaagagtgtttgtttgagccgtttatttgaactggacagcttggtttaatggacacacgcaaatgtgatggatgattagctcatgagtcatgatcaattacgtgttaaatattaaaaaaatagatttatttcattttaaaaagacttctatataaaacaattttacataaaataattgttttgcggtatagaaagagtgtcattggaaaactagaaagttatcgttttgggttgctgaaaagaaatcggtctaaaagttatggtgaagtaaaaaccttacaccgtttctcaaaaggaaaaaaaagagaacctagcccaagaacccataagagaataatacgtgataagtgattttgtactctttgtcgaccaacaatattttaattcattgtgttgaaaaataacctaaagtaatatttttaaaatcggaaatgctagataccaggatatctttattagcgttcaagatgggatcctctcccacactcatgcgactatggataaaaatgacgtggagaacaccatatttcatgacggtcgttgcggcgcagagacaaccagatttcgcacaaggttgcggcatggtggcgcggtgggtccgttgccacaggtcatgggccttgccgacacgctgcacagctacctatgctggccgagggtagtggcgccagcgcgccgcgcagggcttggtcatcgtcgttaaaccaataggagaggtcccgcgcctgagaacatgtgagcttgggcatcagagccgatggacatgggttgtggtggcggttaggatggagctgtcattgaagtggatagacgcgaaacgaggaggacgtggccgccagtgacgagctccaacgtggggtgtggacagtggaagacctactcgcggaggatgcggccaccggtgacgagcttcggcgtggtgcctaggcagaggaggacctgctcaatgcgaaggatgtggccactggcgacgagctccggcatggtgcgttgacagtggaggaggacctacctctcgtcaaatacattgtcgcccatagggagtatcgtttgatacctcataagtatcacctaacagttcacaggaatcatttgatacctacagctattagaacctaagtatcatgtgatacctcgcaagtatcacatgacaccacacaggaatcatccgacaccgtacctataggtatcagaacctgatatcgtaagtatcttgtggtacctggtaagtatcacttgatacctcacgagaatcatctgatgcatcgcatgtatcgatgaatatcaagtgatattgtcgtaggctttccggaccttccattatatttgagggatgaagtgaataattcaagtcatcaaacaaacataatgaaacatccgacacctcgagagaagaatattggagacattgctgggcctttaacctgccagtcaacttcaacctgagatgtgcccgtcaaaccactcgaaggcggcgaccagatgtgttacacattcaggagacttgacaaaaatggctaaagatctacaacatctcaaatattcttaactcatactcatgtgaatctagttcccaggatgtgcaatagattcacactttcatctcaagcatgattatacatagcaaacacaaataagatgaaagcgattataaactacatctactttagttacattagccgaccggccaaataaatatatagaacagcggaagcttgtctacccaatccacaagcacaccgactaggggtttaccccattaagttcaagtcctagaagaagcagtcgattacccgcatcactcaaagactaagactaaaacatgcaagcaaaagattaattcaatagcaagagtcagtacattattagaaataatgtactggcaagcaccaagacaagcctaacaccctacttgcaaggcatataatcaaggaaggcatgatatggttctttttagcataaagcaggttttatttgcataaaacattttcaaatcagatttgctttcaaataaatttcagcaagcaagcacttgacatattgggcatcaaagtagtcattaatcatgtataaatgtacacctcattgccatccatggcagcaaggagatcattctcaaatcttatcacaatttgaaggtaaatttcagcatttagaagaataaacacaagtttatactcaatacatatccacatgccgctcatgaccgcgagcacggctaatcgattagttttaactctgcagagtttgtacactttacccacatgatacgaaataataatcatgcaagagcatggcatgcgatacataagtacctgatttattacccgcaacaaagcttttccaaaattcatgatttagccttacaccagcacgatacgtgttcctccatcctagtcatactggaaatatgacctagaaccgttaagtggcgggcccacgccttgaacttaacgccgtggtggcggacacaacgggaacccacccacgtggcacaataccgttgtattggacagacttagtcacctaaactaccacgtcggggtaaataggaagtttctcttagttatccgaactcatacacaccggcctaccagaatgtaaggctaaaccataaataatttactaagcttgggctatcccatactagcacatgtggttgtactgtatacgaaatgaactgacattgagtgaagtccttaggtcggtttgggcgcactctccccctatcggtacacaactaatcaccatatgtgcaccacttgaggcccaaacctaaaatccatgttttccaccattttatttatcaaatacttcatttattcatatctgtccagaacttaataaaatcatttttcatgttaatatgagcccaagtgataagtaaaactattctaagcatggctaagcaatatagtgaactagtgtcaatgtaactcatattccaagtagtattaggatatgattcctaaggttaggaatgagggagatggatatatgtggggttaaggtgataatgcaaataataggagtttgtctaacaagtttaacaagattttaatgtattagtgtacaatcgacatgcaagatttgcaaacattttcaataacctccaaaacataggttcaaagtgatcaaagagagggaggtgggacttgccttgaaactggaaaaagtcagcacctaaatcacttcttcaccgtttaagcaatcatctatacaatgtacacgttatgcaattaaaaacactgaaatatgcgaaaaatccaaaatgctctaaaatgcatgatttgtgcacagtggataggtactggtctaaaatgaatttatgtgaaagaatttctattttatctcatttcatttgagagttatgaattttagaagtttcgtcggtatagtgtaggatttacttaggtactattatgaagtgttgtcgtaaggtgattcttgttaagttcatgtttgttggggtgaagatatgtgtttttctaaaactaacacatttggtttcataatctttagagttaatatgaattctttatgtattttacatgttttaacgtgttctaggaatatagtctctatgtgtacatggcttgggagatttaggtccagaacttgctctaacttgctagtgatgtataaaatgagtattttagttatctaatctaatcttagttcataattttagagtttatattgttttactacatatttataaatagggatggtctatattagttacttataccaacctagaaattgttacacgagttaagtttgctaagtatttgggaattaatgctgcaactatgacctctctgatctaacaagttttattttggtttattcatagctaatgtgcattttaaatacctctatacatatattttgcttaaccatcacttggtgattaactcctaggttatctatttaaagattagagctataatttgtacaaaaggtgtcatattttattttactatgatgaaactcactatttgctggttctaaagaaacttagttcatttcatttggactaaaaatgaattttctaaaaattttacaaattaaaggctgctctatgttggttattccttacacgaatatttagaggcttttattacaaagtaggtatataattttattttataacttggaagtatatgctttggtgattcttcagaacttgggtttactcaaaaaggatctaagatgaattttatataaacttctaaagttcagtctatgtaaaactagttattttaaagataacaattttagaggcatttggtacaaagtaagtaattacttttattttacctaatcagagagtgcatgatgatgaatctgtataatttgagtttgtttcaaaataagttaaattgaattttctatgcattttataagtttgtatatgctttacgtatgacctaacttagataaattttagagacaaagtttgtacagtgagtgtcaagttttatattcctggaataaaggtcataactttgtgactctaaagcaactggaatcacttcaaaatgagctatatttgattttatatggattttacaactttggatgttttcctgttgaaattataatgcttagatgattttctttatattttccaatttttaaaagggatgggtgcactggtcagccctggccaatatgcaaaaaggtccctagggctttaggcaatcaacccgcagtcctgtgattgttctgtgtgtgaggtaggttttacaaaatagcacccagagttttgattcttctcaagtgaggtccttggtttgagctgatacagagcttgccatggccgagctcgttctcgagctcgccggcggtgaatggtggaaaatctcggcatgaaacctaaacagaagatgtagaggagttttgggcgaagctaatggtggtcttattgtgagcaatgttcaccggaatcaacggctacggcagcgcgagcggcggtggttcttgggtgtagagtccagatcctagcaattagtgtgcatgcatgtggtctcctagtttccagggtgctcaccgagggctcagacgaggtcgttaaggtcttggtggctgcgacggcttgcggatcattctagtggcggcgtttctccggggttgaacgacgtcggctcgaatggctcaaggacctgccatgcatgtgtgtccaagagtttcgtgaggtcccaaagatggtgtgtacacaaagaatcggactatagctcaccggagtggaaggaattgacaatggcgatggcgacgggttcagatcggcgacgaggaagaaaaggatgtgttctccgtgttcctagtgtctctggtggtgattcttggggtgtcttgaggaggaagcctaggcaatctttgcggaacagcggcttggctcgagatgaacgaggatggccagacgacgatgatgccgaagcggcggcgctccggtgcgtgctccagggcatcgtcggcgtggcttgcgttccggtggctgtgatgcacaaaacgaatggtggtcaacagagaaaatgctcggcgttgtgtggaaagatgggaacacgaaaaagatggaggtgaccttgactcaatcggcaattgcgatggtcgtctctcccgcggccggtgatgaagatgagagcagcggagaggcagaggacctactccctcggttccttcagcctcagagtgatgtgtggagttgggcgactcggtctggaggagatggaggcttgacttgaaggcgtcgacacgtcgtcaccacgcgtcgacacgctcgatctctccctctgtgttcttggtcagctgagggtgagggacagagaaaagggcaagcccaggtcactgccaagtgggtctaggacgaagtgctctaggtggaagggagaggtgtgggtaagattctgggcgaacacggttttggacgaattttcaggattatttctcttctccatctttgttaattcatatattaatttgtagtgcagaaaagctcatgtggattttactggagttatatgaatgtacctagttttcattttttttggttgtacttaaaaattatggatagattactcacagaaattagaagaaattgggccctttggatactagtttgaatttttaggagacctaaacagagaagataaattctgaaaaaaaatatatttattcatgataattaacctagtatttgaataaattattttccttatacacttccacgcaggtaaatgtacttttagacaaggtgtggttttagccaattgagaattataattaatctaatatttgactggtttgactgatttattcgaggtatcaaatttagttattaaattgtaccaaaattacagtgatatgtatttgttgagtagaacctacatgaatttttccatgattttatcttgcacaaattattttagataattagcaagacttatctcttgtatgcaaatgtatgtaaacatttatagaagttatatttggacctaaggtgatgttgatatgttagaattacagtttaccttacacatgtcataagcttcttacctatttatccataagtttactttagcattaaattaagaggatgctcataaaggtaattaagatagaatattttctatataagttaatttatttactaacttccatattcatgacatgctttcagatgaatagccaaattagtttagtgaggcttgacattagccatgttgatatattttaaggtgtatggcttctatttcgactctcctctatcccctagcactaggccctaatggtttagttgtttatctagatcttagttaatattgatgagacctattatgaaatgcaaatcgaaaatccaaatgcacatgaaggactcaagtcaaaacatgttttatgcgagtatgtatgcttacacataagtttacatttttgttctaggttataaatgaaaaagttttaattttccctccaattttattcatgcaagagttaaatcaatttcacctaggtttaaaaatggaaatttttggttcacaaaattgaagaactttgctttcaactagttttgattgaaattcaggtatgttacagatatcaacggatatcatatgctaccaacaggtatcagtcaatacctataggtctctcaagtatcactcgatacctggtaggaatcgcctaatacggagtacatgattggtatcacctgataccggttaggtatcaggacatgatacagcttagaggtatttggacttgatacctaacaggtatcattccgtccgaacgggattctgttgtatagcatccccttttagttggatgtatttgtaaaaaaaattctaaaaggttaaaatgtaattttttatttgtaagatagtaggaggaggacctatttgtaatacaaaatatttacattttgtagcccttttaaataaagaaaactattgtacaaataggtccttgtcgcaggtatgtttggtgatgacctctctacatgttggctacgaggggaatggtaaggtggtcggtgtcaacgtcattgatgccgaggaaagggttcacttctaaaataagtttttacaaagatttatttgaaaaataagtttttaaaaagaccaaaactaggagatgaatgaatgctctatccatcgatcgaacatgtgtcaattaggaagcgtgcgcggtccttccatctaggtccattctaagggcctatttagattggtgccaaaataaaccttatcaaaaaatttagcaatgccaaagttttggcaaattaataacattgtcaaaattttggtagaactggtttaataatgttaccaaaattcaatacacattgccaatatttagtaacaaactaaacatagccacatactacctctgtttcatattacaagactttctagcattacccacatacatacatacatacatacatacatacatacatacatatatacatacatacatacatatatatgtgtgtagattcattaatatctatgtgaatgtgggcaatgctagaaaatcttataatataaaacggagagagtaattattaattttaccaaataataatatggttgaaaatgtcatcaagaacatgccctaattttaccaaacctatgcagctttcactgtgactgtctctaaatatggaaaaaatttggtggagaccgggtgtaaccgatctcatctacagccctgctccggatggatgccacgtggatgacctagggattgaacggttagctcggccctgctcccggcactgcacgacgaggacacaagcggcttggctccatgagcacccgtgtctttcaggctctccgtcggctcgattttacgcacatcgcgtctcctttgcctggtgcgcagcgacctgcgtcttcctggggtcgtcctcttcctcctcctccagcaccgcggacgtcctgagactgacatatgggagcaccatggccaatgtgttgagctccaccactgacatcacttttgatgtgctctttgtactggtgttttttttttttttggcgatcggcttctagagtcaggtgctgtcgccggctgcttgtccatggcatgagaagaaaacacgcaaattaaaagtgtcataggatttgcatcagggagaagaactggaggcagcagggtcatcgtcgaagccgtaatcgatcaagtgttgcgtttcgtccgtggcggcctccaggaattggaagacgggtaccgtcgcagccagcagccaaacgcgccgcgggatcgatcgcctggcgctgcggctcgccaggcgaggagacgtggtctgcgttgaatcgagccgtcggcgaggctgaaagcgtctgcgcctggagccaactagccaagccatctgcatcctcctcgcacagcgcctggggccgagccacgtgatccattcgattctttggtagtccacgtggcaatcatccagtgcggagctgctcagctgctgatgaggccgattacacccggtctccaccaaatttttttcccctaaatatagacaggtccctcactccctctgccatgctggtcagcttcaaacgctcatggcctcttaagcgcgccattaaaactaacactacactgtctacacaccaccgcgtaccacttctcccccttcaccgccaccatgcgctccccgatccgacctcttctcctcctcctccccaccatcctctccgccctcgatctcaccgccgccgccgcggacgatgacgacaccctcaggacgtacctggtggtcgtctgccggatgaatggccccaaggaaggcggcgagccgctgcgcgcgtggcacgcctcgctgctcgcctccgtgctcaacagcacaaccgacgcgatcctctacggcgctggcgccggcggcaacaggggcgcgccggtgatcggcggggagagactggtctactcctaccagcacgtcgtcagcgggttcaccgcccggctcaggccgcgcgaggcggcggccatggcgaggctgcagtggtgcgtcgacgccgtcccggactccacgtacaccctcaccaccacggacacgccgcggctgctcggcatgagcaccccgcggaccggggcgtggagcgtggccgggaacatgggcgacggcgtcatcgtcggcgtcctcgacaacggcgtcgacccgcgccacgtctcgttcggggacgaggggatgcggccgccgccggccaagtggcgcggcaagtgcgacttcggcggcgcgccgtgcaacaacaagctcatcggcgggcgggccaagacgctggaggaccacggcacgcacacgtcgggcaccgccgtgggcgccttcgtcagggacgtcatggtggaggggtccaacctcgggatggcctccggcatggcgccccgcgcgcacctggcgatgtacgaggtgtgcctcgccgacatgtgctccgccacggagatgctcaccgccacggagaggggcgccttcctagacggcgtcgacgtgctctccatctccgcctccgacaacaagcagaagcccttctacgacgacctcatcgccgtcgggagcttctccgccgtcatggcgggcgtcttcttcagcaccagcgccgggaacgccggcccgaccgccgagacagtcaccaactgcgcgccgtggcagctcaccgtcggcgcgagcaccatgggacggcgcgtaatctccaaggtccagctcggcaacgggctggtgatctacggcgaggcttccaggaggtacaaacgcgtccagaacaagccgatcgtctacgtcggcggcaggttcgccgacggcgcgctgaaggcggtcgacgtccgggacaagatcgtgctctgcaatcgcgtcgaaagtgcagccatgctcgagaagatggtcgccgacgccggcggcgtgggcatgatcgccatctccacccagatgcagttcctcgcgacaacaccactcggcgccaacttcatgcccctgtcgcgcgtcagctaccccgacggcgagacgatcaaggcgtacatcaactccacggcgaaccccatggcgagcctccgcttcgccggcgttgtgctgaacgcgtccgcgctgccggccatcgccgagtactcctcgagagggccatgcgacctgcccaacatcggcgtgctcaagccggacatcaccggccccggcacgaacatcgtcgcggccgtcccggacaagagccccggcgcgaacgccaccgcggcgcccacccgcaccttcagcgcgaagagcggcacgtccatgtcagcgccgcacctcgccgggatcgcggccgtgataaagaaggctcacccggagtggtcaccggccgtgatcaagtcggcgatgatgacgacggccgacgtgacgcaccgtgacggcacgccggtgatcgacctgtcgacgggcgcgccggcgagctacttcgccatgggcgccgggctggtgaacccgaccaaggcgctggacccggggctcgtctacgacctcaccgccgacgacttggtcccctacatctgcggcctcggctacaacgacagcttcgtcaacgacatgatcgcgcagccgctgaagaacgtcacttgcgccaagtccaagaagatccaaggcaaggacctcaactacccgtccttcttggtgacgctcaccgcggcggcgccggtggccacggcgaggcgcacggcgaccaacatcgggaagcagccgctcgaggtgtacagagcggaggtcgtcgcgccgccgggcgtcgccgtcgaggtggtgccgaacaggctggagttcggcggcgccgcgctccagaggagggagttcaccgtcaagttcacgagaggccgcaacgccgccgtcaatggcgcggcggagggcagcttgcggtgggtctcaggcaagcattccgttcgaagcccgctcgccgttctcttgaagccatgaatggatcatcggttgtagggttagcgatgatcgattctaaataggatcattagtggaagaaaattagatcaaagtatgcggttaataagatcgccttgtctaagctctctgtttggtgtttgctatataaaatcagtttcagtaggcaacttttgtgtgtgattttcattttaaaatccacaaatccatggactagttaacaaggggtatgtgagttgcattatcctaatttcagtttttgcttcacaaaatttaggcagttcagaaactattgtcgtaataattaaacgctaaagcacacaaggcattctgaagaaaactataaaaggagtaaagcattgtcagttgttttcagaagaagtaatataatgtaccaaatattcagaatctcaatccttgaaacgttgtcagatgttttcatagtatgaagtatcaagaacaacatgaactgtaatctgagctggtaaaaatatttgaatgttacaacatattgagagatctctgtgagggtttcagatttcagcttcactctttgagagtttcaggaacaccgcagctagcgtgtacttgtccaagagcaagataatatgttgtttcagctcaaattgcctgattaaatatccaaaactttcatgaacacgtcataccagcccattataacatacaataccttcatgaacacaatgaaatcaaccgtcaacttctgcttgaaattgttaaggtttttagtccatcagaggccaaacaaattggagacaaagcactaaccatcataaaaaagtagtaatgacaacaaggttgctgcaacctaaaaacttacaatataaatcacaagaactgggcagtgttggaaattaatcttgttgtttacatttttagttattttttgtatttgcattttgggacaaggcagaagtgtagtatgtgtagcatcattttagataatggaagctttatttagactcagttaattacatcaagatgataaaatcaaactgagtcacccacggcccctgcataaaatgcacacagccaaaaaagaagaaagaaacaaccagaacatttcccaagtacaaaagtttgatagaaacatatatcttagtggctatcaatccatagactagacagctacccatgctcctgggtaaaaaactcttgcgccacctggtccaactgtcgtgataccaccgcaatagtatcccacagtcccggttggtggaggatagcccaggtacggagccaccgagtaactaaagtgataacctgcaaaggagaagacaccatcttgttattaaaaattactccattcctgcttagccaaatagaccaacacagagttgttgcacccataaaaagcagattcctcatgtctttggggacacaagatagccaactcctaaacatatgacaaatattgcgaggaggttttaaattagaagccaaatgaactacagaccacaccaagcgagataagcaacactgaaagaacaaatgttggatggtttcatccttgtgacaaaaacaacatgtcttgctacctttacaatttctcttagcatggttgtccttggtgagaaatacgcctcgacgcaac

SEQ ID NO: 29730 - DNA, 7029 bp, Oryza sativa
tctctgtgagggtttcagatttcagcttcactctttgagagtttcaggaacaccgcagctagcgtgtacttgtccaagagcaagataatatgttgtttcagctcaaattgcctgattaaatatccaaaactttcatgaacacgtcataccagcccattataacatacaataccttcatgaacacaatgaaatcaaccgtcaacttctgcttgaaattgttaaggtttttagtccatcagaggccaaacaaattggagacaaagcactaaccatcataaaaaagtagtaatgacaacaaggttgctgcaacctaaaaacttacaatataaatcacaagaactgggcagtgttggaaattaatcttgttgtttacatttttagttattttttgtatttgcattttgggacaaggcagaagtgtagtatgtgtagcatcattttagataatggaagctttatttagactcagttaattacatcaagatgataaaatcaaactgagtcacccacggcctctgcataaaatgcacacagccaaaaaagaagaaagaaacaaccagaacatttcccaagtacaaaagtttgatagaaacatatatcttagtggctatcaatccatagactagacagctacccatgctcctgggtaaaaaactcttgcgccacctggtccaactgtcgtgataccaccgcaatagtatcccacagtcccggttggtggaggatagcccaggtacggagccaccgagtaactaaagtgataacctgcaaaggagaagacaccatcttgttattaaaaattactccattcctgcttagccaaatagaccaacacagagttgttgcacccataaaaagcagattcctcatgtctttggggacacaagatagccaactcctaaacatatgacaaatattgcgaggaggttttaaattagaagccaaatgaactacagaccacaccaagcgagataagcaacactgaaagaacaaatgttggatggtttcatccttgtgacaaaaacaacatgtcttgctacctttacaatttctcttagcatggttgtccttggtgagaaatacgcctcgacgcaactaccaaatgaagattttaacttttaggggcactttctccttccaaatccgtctattgataatcggaaatgtgtaggatcatggcatagcaatttgattagcagaagcatgtgtagtgcggagtgggcagatcaacagctaggagttgagtgtctactcatacatgtgtaggtggactagattagccatgcatgtaggtgattagcagccatgcatggtgattagccaacaggggcggatctatcatggggggcgcagggtctcaatccttcactactggcgtaaggaccatgggtgccgccatgaagccccctctaaatttttgtgctataagtagatgggatgggggatgtagctttgtctagcttcttcagaccatcctgttatttcttcatagatccgccactgttagccaagtattaggatatgcacgtttggagcaagaagcggtccaggtagtacgcatgcatgcagagttagttagctttggattcatgtgtgtggttgcatgcattagcaatgtgctcctgcttatggcgtccacggctgtatcgtgtgagcgagagtagttgggttgttggccaaaaggctcggggcccaacggcctggcccacaacacggcgttttggtccggcccaagcatggcatggctcgactgctgtcgggccatgctggcccagcccgattggtgttgggccatgcttgggcctctgcctcgacatggtgggctagcccgacctagcacagtccaatgaccaaggaggcaaaataaacttatttcagccatataaggcatggaccaaagagatgaggcacgtaaaatagacttattccagccatataggacacgacccaaagaaatgaaggaggcaaatagacttattccaaggaggagcacggtgggctttcgtgccttcagggcggtctggcacggcccgagtcttattgggccgtgcctgggccgttggtgcagcccgtgggtgggcccgacccggcccgatgtaggtcgggccatgtcggtccgactgattcagacagaataaattgaacagaaactcaaagaaatctaaccaaaaacatatgcgaggctgcaccaagaaagctaccagaacagagattaactaagttgaaacttcacgcgcccaaatcaagaacagatagacaccccaaaaaatcatgtgatggtcattccctataccaaaatcttcagaatttctgtttgttacagggggtaacatgagtcacatctctggaccaaaaaataatcacaatgataaactacaagagtcacaagaatgaactaatgcaacactaggagctaacaaactcggtggggtcaccgtgtattagacatctgacggttctgggatgtggatcagagatcggacggtggatcagttgccacgacggatcacgtcgattgcttaggttcttgaaaccaatcttagtgttagtagcttcttggagattccgttatgttctttggatagagtttgtactttgggttggctgactttttgatggagctatgtgaatatttgtgcaatgacaggcaccaatttttgtcagttcttgtgattcctacaatatctgaatattgtaaatatctgaataaatgtggaatgatagtcatccatttctgtcagttcttgtgattcctacgaatctgaatattctcaatgtctaaataaatgtagaatgacaatcatgcaattttatcagttgttgtgattcctgtgatatctgaatactccgaatatctgaatgttgttactgttatgatgatcagtgcttgtttccaaaaacctgaatgtttgtgttagttcctgaaggaaattgttgggattggtgtttgtcagtcagtcactgttctggtgcttgatagatttggtgatgaattttcagttctttcgacattttactactgtactaataattcagatgtaatctttagtttaaggttgtcttgaatgtgttgagctccttcaatgtacttgatcttgtgagcacttcttagattcttatgccatgttttgtctgattcacagttaaatcttcaaattgctactctctgatgttccctgctgtttagttagagcttcagaagtagggcagtaactatgattcaggtttagtattacctagtagtcggtgttattttaatgtagatctttttgttgagttgatttgagtacatgctattgccaattttaattttgtaagttgttagtatgctttgatattgccaacagtgaagaatgtggttttgtaggacataagaaataagtcccatatccaagttcgtccctcaattgcaaaaccatgcaaactccattcttcagatctcaaaatcaggcaacaccatccctgtttgattgtaattttgacaccactgtcaaacaaagtggaggtctgggttttgtttggttttgagagcaaggaacagatttatccaattttgcacttgacacaaaaatgaaactgagtaagagctcaggtatgggtaagtatctttattcaggagatctctttattcaatggcataacaatacatagcatgatagcagtactccttacaaacaagggtggatccacagctccttgtgtaattgtttgaaactatacttccattctgttgtctacagcatacatgccaagtacatcatctctctggagtagtcatacacactgtccctatctctatctttactgatttcaagtacatgatacaattcacaccggtacatcatagactttctttaccaatctataaccggaattcagaaagagtagtcttgaacttgccatctagcccaacggagtagtaacgcgcggtgtaatctctgacgagtgcctccctgtacaaaggcgggttctcatcagacaacagctccttgatcgggccatacatcctcgtggaaatcggatgaaaatgggtgctgaagaaacaggcaatcgagactctcggttcagtgttcttcgccaccactctatgctccacactcttgtaattgtcattggagatcaactgaacatatgatcaaatggaaagaataagctccgaacaatcaagaacatgtttctagactattttctgaattcaagtttggttggtcttgactctgagcatggtacctgcaggagatcggcaacattgacgatgaacgctccaggagttggcgtgacatcgacccatcggtcctcatggaggatctggaggcccccaatgtcatcctggagaagtatggtgaggaagccggagtccgaatgccggcttgtcccgatggcgagctcaggctgggggcagggagggtagtagtggcatagtatgatttgcccctggttgcattctatgtctgtcaggtagctcggtttgagcccaaggccctccgagagcagctcgaacagtgtgttccccaaattctttacttgtttggcatattcaaacagtgcatccctgcatattaatgcaagctacatatgttacccttaaacaccaaaagagacctgatggtacgactaagtctcagcaatccaatttatagtctagaaacactatatgctaaaaaaaagggggcatctataagtacaggtaaaattctgatttcgtcaaagcagtgccccttttactgacagtacaggataaacacagggctcacttttttagataatataaaggaggtcccactctgagtaatttcattgtacaattagtttttttttgataaccatgtgatgtgagtttgaataaaaaaggctactaattatattgatatcctggaaactattcttgtatcttatttttggggcaccggacatgaaagtatgtgacccagcaatcatcttttccttctctgccctactactacgcagcttaatttgtcatttcggatactattcgaaaatttccagattcaagatgcatgatcctttcacacaaaaaagcacagcaacaacaacaacaaaaaggctgtactagttgttcttcccaataacaacaataagcttaactgggattgttaaattagtcagcaaatgactcagatcttggatctaatcaagctgatctcactacagatttcactaatgagcttaattaactcgtacaaaggccatcatattctaaagatttaccagcaatatcctaattgaagtgtgatacttgcaagatctaacagtattctagggaagaagtatacagtgaggctgtgagaggaagcggcttattaccggcagatctccggcaagtcggcggcgggcggcgggtcgggcgccatgcggaggtagagcgtgtcgcgccagttggccaccggcgactggtacaggtcgaagttgcagtggtacttgacggctctcccgggctcgcgcgagtagagccgcgccttgtcgctgccctcgccgcctccggactcgtggaacgcgcgcgccgcgcccgccgcggcgtccatcgcggcgaggggaaccccgtgccccgtcacctggaagaacccccactccgccgccgcccgccggacggcgtcgaccacggccgcgcggctcccgctgatgtcgatcaccgggacggtcgtcgtggtcgtggccgcggacgatggcgccgtcgcctccggtggttcttgatcaccatggacgacgttgtggaagatgcgggggaggtgggtggcgcccgacgcgacgaggccgcggacgccggagagggtggcgtcgagcgcgcggagctcggcggtgcggtcgtaggcggcagcggcggcggcgggggcggggtcggaggccggcatggtggctgcgcggtggattgccggtgcttggtgtatatatcggcgcaaagcgaagcgattgagcgaagcgtggcgagacgcgcgtgctcggtgctcctacggcgcgcgttttttttttctctttattctttttgagagggagtgcttctaccggcgcttgatgagtttgaccgtattaaacaccattactacgatgatatgagcatctcacgtatacccatcttatttctaagtacctcacactatgttttatattaaaaaaatagccgtaaataccagaacgagcgttaactttagaatttaaatttcagtggacaaaatttaccacagaaaaactaatcaattaataagtttcgctcacttctaatgaattaaatttgaatatatattatttattttttaagaaatatccgggatataatttttgttggtacaaatataccgccgtcgctgtatgggagtgtgaaatcaacacgatatcgctgaagcgttacacgaaaatgacgataacatgacggcgcgggcggtctggcaggaccaaacaacgacaccgcttggaaatgattaattatatcgattaattactaataatgctaagtaaagaaataacaataattaattaatttctaatgaagctaattactctattaatcgcgctagttcagatgcgaagacgcgtctcgcgcactcgtcatgcgaggtagatctgtctcgcgccctcgctctgtgagactctggcgagtgcatctcgtggcactgtcctgcgacaatggtatacgtctgcaaatttcttataaacgtgtatacttttgtaaaaccagtaaaaaaaatgttttcatatttttcccgcttctgactccctctgtttactcactccataaataagagtaaaaatttgttctaaaagattcttggtggtagagtgatctactagtcctgaatgaatataatctcttctcatcgttacgtattaataaacgataagtagtttttaatcattttcaaaatatatttagattagctaaaacacttatagttatttagagatggatgaagtaactttcgaagaatggctgctgccggtcgaaaaaaaatcggccggtcctttctatccagacgtctctctcaactctacgcattctgcacatgtactgattag

SEQ ID NO: 29731 - DNA, 541 bp, Oryza sativa
gtaaagatgccttcctctcaaatatgtgtgtaaaacaggattatagtgcttaccgcataaccaatgggcctacaattttgcaatagcaatgagaaagggaaaagataatctcttttacattccagtgattttagtgtaccctcattgattatcccaccattcactccacctgtcaaacgctttctagaaacagcatagcttgtgcaaggctgatcttgatttagcttcttggaactgatgttcttcctgtaggattaaaagcgataccactattttacacagcaagagtaatattagtaaaatatgatattgtgattggtaattatttccataccttgagcgatcgatgaattctgagacatgatcatgctgatgaagactcttatagaagtgctcattgacagcaacaacaatacctagctgataataacaagaagcagtggcttggaaccatcctaactccactcgaacaccatgccgctcaagttggggatttccatgactattaatccaagaaacaacaggtcccaaagttgatcgg

SEQ ID NO: 29732 - DNA, 676 bp, Oryza sativa
accccccacgtctcctcctcctccacgtcaaaccacaatccaaccaaagcaaagcaaaggagagagatcccggagaagaagtttgcgtgcaaggcgatcgatccatgagcctgaggcacatgacccgagtgggcgcgcgcgcggcgcaggccgtgcgggagggcgcggggaggtctgtgaaggacaaggcgcagtcggcgacgacgtcgacgtcgtcggcggcggcgaggagcagcggcggcggcagcagggcacccgccgcggggtcggtggaaaagggcagggtgagcgcggcggcggcggctagggcggcggaagagaagcggaggcgggcggagcagtcgctgcgcaccgtcatgttcctctccgtctggggtcccaacacctgatgaagactagtactagtagatgtgtaggctagcgatagcttatctgcatacggtggtgtgaaggttttgttctgcgtctgtgaaaatctcagatgtgaatgaagatgtaattaagtatgtgaatcatcgtctatggatgccgaaaatactgtttattcttggatctcgcttgtgttgttaatccttctttgttgacttcttgttaatactgtctgtctgttcatctatggtacagaaaatactagtactgtttattcttgtacctcggttgtgttgttaagcctctt

SEQ ID NO: 29733 - DNA, 534 bp, Oryza sativa
cttgttgtaatgagtacctccgactattgttgtactagtagtattgcgaactattccgtgttgtatcgtaatgttatcgtgatgagtgttcggactaaacacttttgtttgtttgtactcttgtttaatatgtgttagtaattcgcttatgaacatttattacttatgttgaactaattatttatatgtttctgatcaacctatttgatgcaggtatggcgtacgacacaccggcgctgttgaactgtgggattgacaggaaccaccgctcgttcctgtcagcagtcgagggtgcacagctcggcaccttccgtccacgcacgtcgcgcgagtggttgcgtgtcgacccccgtcacgttccttggtacgcgtatgttcacatttgaactcaactttgctttgttttgcacttatgtttgaagtttgctctatacaggttgcgtgcggcaggccttctaccactttgtaggcttgttgaggcggcggcggacgaccgtgacccagcgaagcggtgggatgcagaccggtcactcc

SEQ ID NO: 29734 - DNA, 527 bp, Oryza sativa
tgtactctgcatcaaagaaatgcatcacaacattcagcataaacaaaatgaaatgtgccacaagacttgccctacagaaacgagaagaacctgatttgttagctggttcttgaacttctcgggatttctcttcctctcagagtgaaattcgtaagacacttgtgcatccatccctgcagtatgtgaagtcatgatgaccatgtttctattactgccttattaatcatgatatgcttaaaagatactaaaatatgttctacgataatattgttaacaagtcctgattaaaaggtactggataacaacggtgactgtttgatatctgttagagcaagaactagcataaaccaaaaaaaaaaaaaaacatcatgctgtgccttggataccagaggaactcttacccatactaaagtaattccaaaatcctccacggtatgtgtggtagccctcctgaacaaaaatataaaagaaaaaactgctaagcaagcttaaagatctatatattcagttctcagcctgtccaattg

SEQ ID NO: 29735 - DNA, 1163 bp, Oryza sativa
tgccgccctgggggagggcgattttgtactgtgctctatatttttttatataaatatcaatagttatcaaatctttttatattgaaaactatacaagattaaaatctccaagactggtaaaatacaattttattattttttagggcatatttggaatgttaccgtacaaatattttgttaatgccaaaatataagcaagttttggcactaccaaatatttggtaaggtaaaattgcatttgatcatatttggtttgctgccaaaatgtaaaattgtagtgaagaatgttgtacataatctcaattctagattacgtattaccaattaataggcttccattttcgtgtgtggtgtggtagtgggaaagaagatatgaagaggttgccttcagattgtcaattatatagcgtcgttttcactgcaatacatgtgaactcaatgagatacattattcattagatgtgacaagacgatcacgcgtgggcgtgattcactttatgtcaacaggcagcgccgaaagttgatagtgataactcgagctgccgcttttcatgtgtgctgttgtggactgtgcgcgctactggatatggcactaccgtgaagcgccgaaagtgtgttgttgtgagcataagttgttcaagcaccatacgaatgaaaagaactacgtagacgagacaaacacaagtagtactgcagtagtaatagcaaaagtagtactgctttacaagtttgtaagccaaaagaaacggtcacataaggactgaagaggtagaacactactgacgaggcctcttacccctgtccctcctaccctgcgccctaatgtgcccctgggagtacgtgagtcggtccgggggtacggcacggccaacccgtcctgcctgtacaggtgtgacctctggctgctcctgagtgtgcgcctctggagctcctccaagctgagaggagcctagtacgtcctggtggtctgcaccgtgcaagtcgtcgtcgtagaactggctagtaggaccagtcctaccggcgtgagacgaagaggccccagtaccgaagatcccggctgcaaatcttgctggacaaggaccatcagtttcgtacaggtatttaacagtattaataaaaagtaaagtaccgtgtgggcgagggaacgacgctccgtgagggga

SEQ ID NO: 29736 - DNA, 614 bp, Oryza sativa
  unsure (1)..(614): unsure at all n locations
ggcaatacaagtcctttggtagcctcccctgtttttgagttggttgtaaaaagtacttctgaaactctttttagtggttaaataattctttttcttctttccatgcaccttttatactgttgagaatcttgaatacaattgttcatacctgcaggtttagtgaatttgggactgatggtggaccagcagcaaaggccttgaagccaaaattcaatctatttacgcagcaagtgtccaagagcttaggaatggcagtgccacatattgatgtatgaatatttatttgatttggctgccccattctacctaatattgtttcatttacttataccattctacctctttttctacagataaagactgtcattgctgctaccatgtttcttaaaggctttggtggtcttctgttcatcatcagcagctcatttggagcattcctacnnnnnnnnnnnnnnnnnnnnnnnnnnnnnnnncacctaatgtgttttctttatgcattctgcaccatgcctacccaaagtaaaatattatgtgtatttactattgtatgatatatgtagttcttattgttttaccatataaattggcaattttagctttatttctgatttggc

SEQ ID NO: 29737 - DNA, 2394 bp, Oryza sativa
agaggatccccagcgttaaaccgtagttgatttaacatcggggacacttgcacagtagatattgtataaaaaacatatctaggtagatataataaactaatgatctgacaatactgtatgatctgaatatgtacggtaaattgcatataagatattgcgtacctttgtagatatatgccggatatatctacgaaattagtagatcaatttaaaaattaatcttactaactaccttgggagacatggagtatgtgtcatggaaacacatataagagctctgtacggccaatatgcatgcacgtgcgcacatgggtgttggcccggtacagggacatgcagagtgacgtcgggctgtcgactgactagaaatcgtgttctagttagaaaactgtagtactaatccagcggtagatttttagctcctcgacgcgcttgcttggttggtagggatcggtgtcgggttcgacttggactcggcccgccgatgcctcacaccagttgatgtcgcacacgtcgacggatcaagctgccgccgacatcatggttctccacggcggtgattagtctcgatcttgtcggaagatatgctccgttcgggttagatctcccacggccgaagtcgtcgagtagcttgttgttggaaaatccatcttttaaacccttctcgtcgaaatcctgaaacaccaaaatctctctacctggcgcgccactgtcgacgtttgatgtctcgactacggtatttgcatagcatggggatcgttggtactaggatatacacgagactgagataaaagagatggagacaaggatttttatactggttcgggcccctgaattgtcaggtaataaccctacatcttgttggccaagccggtattgctcttattcatgataatcacaacagtacaatatttggggtagcctatcttactgttgtcgacatggcggtctgacgatctgactcatagtcgacaacagggtagccttcctcctcgaatccgtgcccggcgagatcagagatagcgcttttgtctctcctgacagtatccggagacaccgtagggtactagccgtgcttatccctgaagtcaatatccggcggcgtgtcttgccgtatgtaggcttctatattatggcttctgtgtcgattatgttgggtgttgatcctcccccctctccttctaggggggtttgtatttatacccataggtgtcaccttgtctaagtagaactagggaaaccaatatggatacaattcgagtagtcctttttcgtctccatgtagaactctggttgtctttccttatccggaactcctatatccgaaggttgcttccgtataggacatggtatgtagtgggtcctgccgagatttagtcaactactattaggtatatgggtatctataaccctgacagatctctgtccaggaaaattgtttgtgtagtagtggatgatagtcctgctttatccagagaaacagtacttgtcaacttagcacattactattctgttgggtaaggtaaaaaaaggctataccgttatgaattgaggagaaggaaatattaaatttcagaaaacaattctggaagaagtgtgtaagtttggatcctgttaatacaggtagtatcatttgctatacatgatatgttttgtaacttcttagcttaggatcttatctttttcgtttttgcttatacttatcagttaaaatttaaattttcaaccttaaatttgaagctgattttaaggttttttcatcgaagtttacttttcatcatttatttttagattgctgagaacacgtatataaaaattttatacacagatcgcttttggttttgtaaatatgccgagatggggctgttagtatgcctcgacctttcgtgaggctgtatatgtaacatgtgtacgaatctcccgacaatgtgaatatcatgataatatctcatttgacagttgaaagtttattttattttggtgcacttcctatgaaaagtttcgttttgtatgcttatttctttggcggttagctctttagagcaattttaatgatatagccaactactaactccaaaaattaaaacatcatctataactaatatagcagggtattgtatagtttgttgtagatatatacttcattactaatacctaacatatctatctctctcacatagtttattagagctcgtgctgcacatagtttcttctctcatctcctctctctcctctggaaatataaatatgatcactgggggagaagtggtttttactcccggttcgtaacccccctttagtcccggtttttcaaccgggactacgaatccgggactaaagatcgctatctttagtcccgggtgaaataaccgggagtaaaaaacgatctctagt

SEQ ID NO: 29738 - DNA, 7673 bp, Oryza sativa
ttaaagatagcgatctttagttccggaatcttagtcccgctttgcaacccgggattaaagggggttgcaaaccggggttaaagagggtttccgcagcagtgacatgactagtatataggggtaaaaatggagcagattcggatggatagtggtcataccatatcctaaaccatattttctaaacggattcagagcggctgagcggattgtttcagatgttggaaatggtgcggactcggttcagaaacggattaaatttgttggatgttatgtgtgtatgcaagcaatataccatcgagttaacaatgcaagggacaacaatgcaacaatcaatgaacgacccattgtaataattatgtgcttaagtactaaacaaacatcatgaatacatgatatccataatataaaaatatagctaagcaagtgtgagatagacggtgaaagcctcggactaaggaatctaggttaattgatgaattgggccattagatgtgctagctcatgttatatgtaacagattgagtggttgcatgggttgataattttggattatccaacaaacgacttataggataatttgacagaaatgtcggataatctgcatccgccagattttagagagaccatattcgctagatttttagaaacccataccatatccttctttcggacggatttggaatggagcagagtggataatatccgatctgttttcacccctactagcgtatccagtgataattatttgaaaccagagaaaatacaacactgggccatctttgtagcacaggtgttaaaagataaattatgttgagaacacgaatatgaattttgtttgaagatacattaataggaattagatactgaaggttgagaaacatgtatactccccaatcagccaagaattcttcagggcgaatctttaggccctgctgccatgcatgcatatatcaataccatttgcatcagtaatctggtccataacatttttgtctgctttacatttgttgtctacttttcttgtccagctctgactgcaagattgactgctgaggctgagcacccaagagttgttgttggtgagatcagtgatcctcatgtgccaagtggttcacaccaacaacagagctcttacatggacaaactgcagcagctgcttacacagaggcaaccatcacaaacccaacaaaatcagccacaataatatgtggaacttttagggtgatttctcattagagacttttgaaaggcttattgattttttttttgctaaatgttgagtaatacatgtgtggagactttcaatgtacaactagaagataccccgtgcgttgctgcaggattacagaaggtttattcagaaaaagaagtatagtttataaactatattcagttattcaccagcaagaagtgtgttaccttcagtattttaggttcagaattaggcttgattggaaaacggaaatctaacatagcctacatttcatagtagaaaacgatcatgccaataaggaccaggccagtattcccatgtgtggaatttgttcttggtcaacacaaacaaaaaactctacactggaagacaaggacagtggcaaggtatcctctatactacttctattatttgtctgcagacaagatcatcaaattgcgcacatccccatagttgatagttgcgtaccttagaaaatcaaacttcgcagaaagtggatcatcaaagtctttaacatggccggttttatttgtatgcatagagaaaagttcaggcatgcaatcaatgctaatttttgcaaggaatcactatatacaattactaccaagaaaatttaaacattatttacccattattcacgcaccaagctagggacaaagaaagccagttgggatcactacgggtcccacaccgcagtgttagtggcaggcgtcatcacacagaggaacaataaacaagtgtaccgtttgagagtcaaaacagagaaaatttggcatattacccgttttctctctccgtatttaccctcttactacgccgtcccatcaaagggtagttggcttgccttgttgtcgaacccgagaaaggcaacatggggcagcgagagaagtgacgggtggcagaaagtgtgatgatggctgtaaaggtgaagaaagttaaggatagaagaaagcacagaagagttgagacatacatgataaacatctaagaagaaagagaagatcgtagagacgtatatctccaaagaagaatagggacacgtgcccagctcgtagccgtccgtaggccggttgcctgagaggtgataggtggcaagccacctcgggtggagtaggcctagcataagtagttgggcattgatgtgtggcagtgtgatcagctcaggaccatccaccgcctcactcccagcaggtgacaaatggcggcccttgaggtcatcgccgttatcaacccgattacgtactagacatggcatttgttaccctccaagccataggcaggggagagcttaggaggccccgtgcactgacctctaacctatacgacatgctaaggagagtagagttgcaactatggtatatgaaatcgtcatgattaattgtttgcagtgtccctattgcttgtctctctagaagtccattaagctttggagagtatataagcaggagggggttccccagtgtgggggtggaaaaattttcaaaggatccaagacacatcggagttggagtgtgagttgtacatttttttgcttgatattccaaaaagggcagcagtagggtcatttcggattaggtcatatccctaaacccaccaagaaacaccgggttcgctggatttggttctgttgggcatcgcccgtcaacaccatgtaaaaaaataaggcatgccacacataaactagatggagaaattgatggatgcacaaaacagatacatagatacaatgtttgcaaaggaacgtgcgatgtggaaaataagccaaaatcgccaaagaaaaagagcatacaaaaccaaacgttttatagggagtgcaccgaaataataaaaactttgaactatcaaataggatattatcatgatagtcacatcgttgggagattcatacacatgttacatatacaatcatcatgaaaggtcaaggcataataagctaagaagttacaaaactcataatgtatagcaaatgatactacctgtatcaacagggtccaaacagacacttcttccagaattgttttctgaaagtaattatcttttctactctattcataaccgaaaatcatttatagcctttttgggacctaacccgatagagtagtaatgttctacataatctttgactagtgtttctctatacaaagcaggactatcatcggacagtagctccttgatcgggccgaacatccttgttgacgctagattgttgggaaaacacgcgatggatactcttggccttgaactttgtgccaccaccctatgttccacgcttctgaacttgtcatttgagattatctggacattggttatatatattcagaaatgaaatgacgcacatgcgttttgtgggttatcaaaaatatatgtccaacaatataaggtaaatcaagttgagttttcatgttctctcaaaataaaaaaatgttgatatttttatgtccattatgtgttgtgaagattcttgttacaaaaccgacccaaaatcaccatcgataaccaaacgtggaagagacaccattggagatccaacttccaaggacattgaggcataatatttgttaacgaggttccgctgaagcctgtgtccctgggacacggattacggtagatccccggccgaacaccaccggaagccattccctctcgcctatgctaagtcatcatacggttacaataggcatgcctctctaactaagagagcctaggatagagtctgactcttattttattcctatacctagtacaacttcaagtgctaaactgtaaccgactttgtacacatattcgaccgtaactgacaattatgaacatgatacctgtaagaggccgcctaaattcattgtgttatgtggattctaaacatgataccagcaagagacaccctaatttcattatgtgttgtggattatggcaatgatatctgcttgattcattgtatttttgtggattctgaacatgatatatgaaaaacactgtttaatttcattatgtgttttatgaacactgaacatgatactgttaacagtgaaatttggtaatcggcaaagacgtcatcggcttagaatcagtatcggctgcagcatctcggaattagccgattggagttatcaagtcgccaatagtcggattcttgctatattcggttaaggaaatcaatctactaaaggaagcttatccctaagtgaccgagtttaaagaggatgtggcatggcagtttatctattaattaggaatagtttgttagtttccttttatctttaggaaagtgtgtttagtgtccgataaggactttatattttccttttatctttaggttagtttctttcttgtccgacaaggacttgtatcaacccatgggtataaatatgtacagccggggtctatgtaatctatcgctacgatcaatacaattcggcgcatcaccagtcctccacaacaaccggtgggtcgatatcacgccattacctggagcattcatcatcaatataggcgatctcatgcaggtacctgttgacgaaaaaatcaaacacaccggcctaggagatcttcttagctccagtgcaggtccaaatatgatgagatgcgggcatgctagtcagtttgatcctgcaactgacaagatatgcaaatagtagatcaaaacagtcaatcggctgacaagccgatggagtagttccagccgatagccgataatagccgatgccgataccagccgatagcgatagggtttaagcaatcggctatctgtccaatgtagataatgatataaaggcaatcggctgatgatgatgtaataaaataacaatataatccaatataagccaatcggctagcaatgatatgataaataagcatcgatccgaaggttaaagcacacatcggctggaggtccgatgtcatgaaatccacaagattagattaaacaatgaaacctttgttgtcatcggctaaatccaacttatatgtatatgcaatcctcatgaaccgatgcaacgtccagataactcaacggctgaaaccccgatgaaacccttattggcaatcaataagcaggctagagattatggttctaagcacgacttagtagatcaaacttaactggtgcagtactaagtatgaaaagaaacataatatctagacaatgaagctgttgactgagttttcagggtggtagatgtgtagctaatctaatctagcaatgcgatttagcctataccggtagaaaccctaaaacgagaagcagccgatagagctaaattgatatgctaagactagattaacagagacatatgataaataggtaggcaaatatatcatccaaaccagagcaatccaagaggccgaatgtactgatgcagccttgaacgacgccgacgtagacaatacaattgcctgggccggcggaacattgaacttaccccttagccggagatcgaacaccgatgcagccccgcgtcaggtgccaagtcccgccggaacgtaaaaacaaaagtagtaaaggtaaaaggtggcgatgcgccgaattgtattgatcgtagcgatagattacatagactccggctgtccctatttatacccatgggttgatacaagtccttgtcggacaagaaagaaactaacctaaagataaaaggaaaatataaagtccttatcggacactaaacacactttcctaaagataaaaggaaactaacaaactattcctaattaatagataaactgccatgccgcatcctctttaaactcggtcacttagggataagcttcctttagtagattgatttccttaaccgaatatagcaggaatccgactattggcgatttgataactcccatcggctgattccgagatgctgcagccgataatgattctaagccgatgacgtctttgctgattaccaaatttcactgttaacacacacgtagtgatatatccggaatttcagaattttagaaatgggtagttcaacttacatactccctccgtttcagaattttagaaaaattcttacattcatattgatgttaatgaatctagatagatgaatgtagaaaatgctaaaatgacttacattgtgaaacggaggaagtacttttttaaaccgcaaatatagcaaggaccaaatgtgcatcatgatatattaataatggagttttttttctctttccaagagtaatgtttagctatgtatttttttatggtccccggaccactaggaccaccctttggacacatctatcagcacacgtgtttcttttacaaaattaaccatagtgatgagcatcagagattaagaggactgaattttgtactacagtttatgaaaccttgacagacagtcaaataagcttggctcacaaaacttaaaactgatgtgccataacaggaattttgagtacccattttcagatgaacaatatacacatgctttagtagtaatggtcattggattcttgcgattccagtcagtccaggctaattgtggaacaattgagtagtaaaagttatgcaaaatatatggaactcttctactattcttcaaaaaagcaaacgttatttacagccacagatttactggtactaaaaaaataaaaagaatgggggaaaaaaggaaaagaaaagagcggctctcaccggcagtattccggcaggtcaccggcgggcggcgggtcgggtgccatacggaggtagagcatgtcgcgccagttggccgccggcgactggtacaggtcgaagttgcagttgtacttggcggccctcgccgggtcacgcgagtagagccgcgccttgtcgctgccctcgctgccgcgaccgcggcgccggccacctccgccggtacgccgtggcccgtcacctagaggaatgcccactccaccgcggcgcgccggatggtcacgaccactgcctccctgtccccgcccgtgccaccgaggtcaaccaccgggatggacggtggaagcggcggcgattcttggctgctgctcggcggcggcggcggtggttcggggtccgggacgcggaagatgctggggacggcggtgacgcccgaggcgacgaggccgtggactccggacaaggtggcgttgagcgcgcggtgctcggcttcgcggtcgtaggtggcagacatggtgaaaggcttggaggggagcgtggaatcgccgcggcgagacgagaattcaagcggtaggaagaacgcactgacggttggttgagagggagaaaaaggacaatatgctatgccactcttttcgtgtggtttcgacgaaatatcacccattagaatggcaatgataaaatgccacttaataggttatttttaggatattttgccactttaaaaagttttaagaccagaatacctctgctatggacagagaggaatgtgagcgcctgggagaaggctgagctagtgctcgccggtggcgggcggcgagcacgcgggggcggactgcgatgtgc

SEQ ID NO: 29739 - DNA, 2165 bp, Oryza sativa
tgctaagctgacacgtggtggacaagaatgaccgacgtgactggtctgataccggtcatgtcgtcagcagacagccacgattccacgtcgcacctgctcccggcgaaagtggaggtagttgtgggccgtctcatcagaaggtgactcggacggcaactatacaaatctccgtccatttatgaaaagggggggggggggggtaagtccccacaaaaaagagagaaatggtgcatgtggtatccccttaagatataaaaggaggaccttgcccactgagaggggggactggacttttccagattagaaacccagaacaagggagaggctggctgatactttgtagctccttcatacacagatctcccaaaacacaggagtagggtattacgcttctcagcggcccgaacctgtatacatcgcccgtgtcttgtgtgtttcctgtctcgcgagccttccacatacagagagcttagaatctctccatgagtccccggccgaaccggcaaaggggggcctgcgcggtctcccggtgaggagccccacgctccgtcatctggcgcgccaggtagggggctctgcgagggattttctgagctctcgcactctttcgtgtgcgccaagcttttcttgttcagcccaatggccaagccagcaaaggcgcacgacctctccccgagtatgagcggtgacgacggggagccaaacccacgccgtcgagctcgtactccaccgccccctccacgccaaagtcctaggcgggagaaggcgctcgagagggccgaaggatccgcgacttcgacacccacaggaggtggagaagggcggcgagatggggagcgtcgcctcctcgtctacggcgacggcagcacgccccagggcgcgctccaagctgcgggcgcgctcctacgtcacccgcccgtcgcccatgacccggagtctccagcccaacgttggctggacgatgtggccaaattggtcatgactgcacggcagcgcctagatgctggtgggcggtcctccgccaccaaggcctctggtgctgctaccaccggctccgcatcgtcaagacggagggcgcggcgagcggcagccgctgttcgccattcggccgccactccttcgtcaacgcctccgacccgggaagatctgcttggggaaccggatgctcgcatcagtatcgagcgccggcgtaatggccgacgtgctccccacgcaacggagggcgcctcctcgtccggagtgtcacctcaccacggacgcggggatcagccctccgtgcccccggttggtggtgtcggctgtagagcctttgtggcgagccttcggaatgtccgttggcccccaaggttccggcccaccatcgccgaaaaatatgacgggagcgtcaaccccgccgagtttccccaggtctacacgaccgggatcgaggccgccgggggtgacgacagggtcatggcgaatttctttcccatggccctgaaaggacaagcgcggggttggctaatgaacttgccacccgcgtctgtccactcttgggaggatttgtgccaacagttcaccatgaacttccaaggcacatatccacgcccaggtgaggaagcggacttgcacgcagtacagcgaagggatgatgagtcacttcgctcgtacattcagcggttctgtcaagtccgcaacaccataccatgcatccctgcacacgcggtgatttacgcgttcagggggggtgtgcggcacaaccgcatgcttgaaaagatcgcctccaaggagctccaaactaccgcggagctttttcagctcgcggaccgagtggctcgtaaggaggaggcatggacctggaacccctccggttccggtgtggcagcttcggccgcccccggatccgccgctcagatagggcggcgtgacaggaggaggaagaagaggtcagcccataccgacgacgagggtcatgtcctcgccgtcgagggcgcttcgcgggccacccgaaaggggaggcctgcgggaggcaaaaagaacgaggccggcgctcccaacagggagcgcccaaccggcaagtggtgcaccgtccacaacacttcccttcacgacctcgcggactgccgtgcagtcaaaagtttggctgagcggacgaggaagtgggaggaggagaggaggcaggagcg

SEQ ID NO: 29740 - DNA, 2823 bp, Oryza sativa
caaatccccggcggttccttccggtaatcggcgaagtgaggccaagcagaaggccccccccgaggacatcgatgacggcgatgatgacctaggtttccaagagcctggggccaccattgccaccgtcgatgggggagcgtgtgctcacgtttctcgccggagcttcaaggccatgaagcgagagcttctggccgcggcccctactcatgaggcgacgtgtcgggcgcggtggtcggaggttgccctcaccttcgaccagaccgaccacccaccgtgcgttgcccggggagggcagattgcgatggtggtttctctcaccgtttgcaacgtgaagttggggcgtgtcctcattgatgggggagcggccctcaacatcctttcccctgcggcctttgacgccatcaaggccccggggatggtgctccgcccgtcccagccaattatcggtgtgacgccggggcacacgtggccgttaggtcacatcgacctaccggtcaccttcggtggatccgccaacttccgcacggagcgggtgaacttcgatgtggcggacctcagtctgccctacaacgcagtcctagggaggcccgcgttggtgaagttcatggcggcagtccactacgcctacctacagatgaagatgccgggccccggtggccccatctctgtccatggcgacctcaaagtcgcgctcgcttgtctggagcagcgcgcggaccacctcgccgctgcatccaagcccgagggtggcgacgagaggcttggcgcttccgcccccgccaccccgaggcaacggatgatcacaggcgacgaggtcccggtcaaggaggttgccctgggcgacggcccgtccaagaccacacggatcggtggtcttctggacggcaaataggaagacgcgctcgtctccttcctgcgggcaaacgctgacgtcttcgcatggagaccggcggatatgctcggggtccctagggaggtgattgagcaccgtctcgccgtgcggccgggcgcaaggccggtccggcagaaagtgcggcggcaggccccggaacgtcaagccttcatccgcgaggaggtggcgcgacttctggaagccggattcatccgtgaggtcatccatccggagtggctggcgaacccggtggtcgttcccaaggcgaacggcaagcttcggatgtgcatcgactacaccgaccttaacaaggcatgtcctaaggatccttaccccctgcctcgcatagatcagattgtcgactccactgcggggtgcgaccttttgtgttttctagatgcatactctggttaccatcagattcgcatggctagggaggatgaggaaaaaactgcgttcattacccccataggaacctattgttatacgacaatgcccttcgggttaaagaatgcaggtcctacttttcaacgtactactcgaatttctttgggtaaccaattaggacgtaatgttgaggcttatgtcgatgacttggttgtaaagacgcgcaaccaggaaatgttactctcagatctagcggaaacttttgagagtctccgctccgcccgcataaaactaaaccccgataagtgtgtgttcggtgtacctgcgggcaagcttctagggttcttggtctctgcccgaggcattgaggccaaccctgagaagatacgggctatagagcggatgcgcccccccagcaaacttagggatgtgcaatgcgtcaccggttgcatggccgccctaagtcggttcatatcgaggctgggagagaaggcgttacccttatttaagcttctcaaacgcttcggaccgtttacctggacggaggaagccgaaaatgccctcacccagttgaaggcgtatctaagctctcccccagttcagcccttgttactctacttagcggcgaccccgcaagtagttagtgtggcattggttgtggagcgcgatgagaacaattctcatttcacgcttccccaccctgtgccgacttggcctgggagagagcaaggaggagaggctcccgagccgaacggtggcccaaggcccccgacggccggagttggccctctgcccgcttgtcagacggtgctaggagcccccgacccccaggaaggccctgaggccactgtgggaaggccgcacctatcgcccttcgaccccgaggctaaccctgtgctgacccgacccgggaaagagcagggagaagaggcccccgagccgaacggaggcctaaggcccctgacgaccggagttggccctttgcccgcttttccgacgacgccaggagcccccgacccccaggacggccccgaagccactgtgggaaggccgcccctgttatcctccgaccccgaggtcatcagcacagaagataagtgcgccccacgaggctgcttggacgaagagtgccccagggatgcggcccctagcgaagaggatcggccccaccgaaaggtgcagcggcccgtctactttgttagtgaggccctccgggacgccaaaacccgataccctcaggcccagaagatgctttacgctattctgatggcctcgaggaaactgcgccattatttccaggcgcatcgggtcacagtagttacgtcttaccccctcggtcaaatcttgcataatcgagagggtacaggacgggtggtgaaatgggcaatcgaactttctgagttcgatttgcactttgaaccacgccacgctatcaagagccaggccctcgccgattttgtggcagagtggaccccggctcccgagcccgtctcgatccccgaggccagcacggacccctcgcagctgcctcacaccgcccactg

SEQ ID NO: 29741 - DNA, 3405 bp, Oryza sativa
ccgcagatggacgcctacgtgcgccaagtacggcgtatggagtgccattttgacgggattgagcttcggcatgtgcccagacgggataacatgattgccgacgaactctcacggctcgcgtcctcgcgagcccagaccccaccgggcgcctttgaagaaaggcttgcccagccgtcggcgcgacccgaccccttaagggagacggatgcgcctgaccggccaccgaggcctgtcggagtccaggcctcgggacccgaggggagtgctcccaactcccttagattgattgcttggatcgccgagatccaagcatacctcacagataagactctacccgaggaccgcgaagggagtgaacgcgtccatcgcatctccaaacgctacgtgctggtagaagggaccctctatcggcgcgcggctaatggaatcctcctgaagtgcattcctcgggaacaaggcgttgtgcttcttgccgatatccatgaaggcgaatgcggagcccactccgcctcgcgcaccttggttggtaaagcttttcgccagggtttctattggccgacagctcttaatgatgcggtcgacctggtccggcgatgtagagcgtgtcaattccacgccaagcaaatccatcagccggcccaggccctgcagaccataccactttcgtggccatttgctgtctggggactcgatatcctgggaccgtttaggcgggccccgggcgggtttgagtatctgtatgtcgcgatcgacaggttcactaagtggcccgaggcttatccggtcgtcaagatcgataagcactccgcacttaaattcattaagggcatcacggcccggtttggagtgcctaaccgtattattacggataatggcacccaattcactagtgaactcttcggcgactactgcgaagacatgggcatcaagctctgcttcgcctcacctgcccaccccagaagcaatggccaagtggagcgcgccaatgcggaaatcctcaaaggccttaaaaccaagaccttcaacatactcaagaagcatggcgattcatggatcgaggagttgccagcggtgctctgggcaaaccgaactacaccaagccgagcaaccggggaaacgcctttcttcctcgtctacggcgcggaagcggttctcccatccgagctcaccctgaggtctcctcgggctaccatatattgcgaggctgatcaaaatcagcttcgcagagatgacctcgactacttggaagagcgaaggcggcgcgcggccctccgagccgcgcgctaccagcagagcctgcggcgctaccatcagcgccacgtccgggcccgatcactctgcgtcgatgacctcgtcctacgccacgtccaaacgcgtgctggattgagcaagctttcaccaatgtgggagggtccgtatcgagtggtcggcgtcccccggccgggctccatacggctggccacgggcgacggcactgagctgcctaacccgtggaacatcgaacaccttggtcgcttctacccctgagggggggggttgggtgtcaggtttcgggctcgggccaaccccgcacccccctcgggcgtgcagggttggccgggggctacaacatatgcatattcttatttctcttatatctgaatttctataaaagcagtttcaatttcctaaaggctgtatctgtgctgttttttccttttgaagaatcttgacttgaaataggtcactcgtgctcaatcctgccctcgggggctcgggtcggctaaaatcgccaaacggggcccagaaccgagccgtgccccgaggcgtggtgaactccgggggggaatcggcaaaaacccacaatcgggtcacccataaccctcggtcaccacgttcccggcctggccagtctcgacatgtggatctccccaggcactagccccgacccgcgccttttgaggaccagaacctgggcacaagcccttattcaagctaagacacaaaaggaccacggcacagatcatcctcatctcatactcacagcaagatgaaattaacacaaaaatttcttcatttttgattacagattaagttgatctatacaaaaaagaggcccgaaggccttagaagaaagaaaagaagaaaaaactgaagaatggcgggggtctgggggctcaatccgatgcgcccggatcgccggcctcgacgtcactgtcgtctgcaccaccggcattgccctcctcgtcggagttgggggcgaacgcaagccgaggggccgagccctcgaagctgtcgacgatatggtcggcggcatcccggacctgcgcgcgcgcgcggtcctcggtcccaggagggaactcatccagcgccatccatggagagaaattggggtccctggcctggtaactcgccaggacgagctccaccgctccttgggcgaggtccctcgaggatgacttaattgtcttctcgagctcctcggggagccgttggagagccccggccatcttcgagaggcactgggcgaggcctccctggttggcggcgtactttacggtccgccctctccagaggcccacttgccgaccggcgcaatctaggcgggagacggcgtcccaaagcatgccgggccctacctcgcctgccaagcggagggcttcgacctccccggcggacgagtccagcgcgccctgcagatcggcgatggtgcgttcggcagctgcgaggcgggcggctaagtcgctttcgcccgtggccgccccgccgctgcgcgccctcgcgtccagctccttcgcccgcgcctcgagctcagcggcccgttggttcagtacggccctctcggcgcgggcaccttccagattgcggcgcgcctgctcctcctgcgctgcctcgcggagggacaggttgaccgccagctgttgcgccgcggcctcggccccctcgagagctcgctcccgtttggtgagcgcgtcctcgcggaggcggagcgtgaactctttttcggcgcaggcagcctcgtgcgccgccagcgttgcttcccggatggtgacggcggcctcgcggtccgccagatccctctccacgacgcaggcgcgctcttccagcgccatggcgcgcgcctcaagggcctcttcgcgccgccgggacgccgcttcggtctccgccgcccgctgttctcgggcagcggcagcgtcaagcaccccctgggcggcgtcgagcttcttccctagctccgcctcccagctcccgtattgaaggcggcgcacctccaccatggcctccaccgagcgtcgcccctcttcgacacgcgcccacgcggcgtcgagctccgcccgctctgcctgcaggacctccacctgggcacttaacccatccaacaccgtggtgtttgcggcggccaaggcctgcagaaggggctctgcg

SEQ ID NO: 29742 - DNA, 5025 bp, Oryza sativa
cgccggtcagattcccgcctgagggcctctgcgaccgccggatcctcggcctcagactggccggacttggaatggcgggagggacgcgacgggatctcgctgaaacgaaagaaaataccagaagacgaacaagatgggtgagtgaaaactcgcgttgagagaatgaatacagccacgatgggtgagagacgaacctgcgagggggtcggttaaacgaccactttggaggggaaatgaggtttccccgagatggttctgtctcccccatcttacggggccgcttcttcttgcgctccccctcgggctgcgatgttggcgcggccccctccgggcgcctgttactggcacgcgccgccccgccccctcggggaggagatgggggaggtgttcctccctacttcctcttcccccgggcgtcggcagggcggctgctccccgggcccctatcgcgggacccagaagcacgaccccctctcggggtagattgttcccccctgcggctcccgcctgcgccgtcgtggccctttggagctcgctcctctgaggccccgaccgccatcataatggtcaggatggaggcgcggtctggatcgctgcagagggggaggattccttggggaatgagggccgcctctacggagttgagattcagcacccgttggaccaatatcttgaagtcaatatcttgaagtcctcaggagcccagtcccatctcactccctggtgggtcctcgtgaagtcttcggacccggtgtactcccaggcgccccgagcgcgtcgctggagcggcgcaatccgacgacggaggtagtcgccgtacaccatggcccctgtgagcccctgggatcgcaggcccgccaggcggtcgaggacggcgtcatagccatcccccagatctaccggcgcccgccagctggaggcctgcgccgggggctggctcggaagtcggaggcgcgcttcgtcggcgaggggagtgtagaaccagtcgctcttccagtcgtcccacttcttgcggagggcgcaggggatgtagcggttcagcaccggcccccgtggctggaagtagcagccaccgactaccgatggcggcgacaccgactgcacggtgaagaaccaccggaacagccgaagagatgggcgcaccccaatgaacatctcgcacagatgcgcgaagatggccaatgtcatcaccgcgttgggggtgaggtgcgccatctggagatcgtagaactccagaacatccatgaagaaagaagaaaatggtggaaccagccctgccattgcaaaggggagaaagaagacggaccgccccgggtagtctggcgccgggcgtccctcgcccagcgtgactatctcccggccggtggcagattccggcatgaagcggcgcgacagcccagcctgcctctcgctcacgatccgggaaggcggcagcacgctaccatcgagcagagcggaaccccgtgccatggcgccggaggaagagaagattaagagcgagcgcgtgtggcgaaggtagggcacaggaaagaaggagttagggcgcaagcggtgaagacaaggggaataatggcgaaaggaaggaaacagatcccttcctcagtgcctttatactcttgccaacgctgtgcccggctccttgcttctcgcgcccactatttcgccccctcgtttctcgcgcccacgcttccactaatcccattcgcccgcttgcggcgcatgaggtggatatgcggttgtggcagtcgaaatagatcatatcgtgcgcgcgttaattacgctcgccgaccgaagcgacgttaccatatcttcagacgaaacgaatcgccatgtccagattcgtgtgctactcaagtaatgtggcagtcttgaagagaccgctcattgttgacagccgagttaccattgccgatgtgcgtggtttgtgaccgttgggtttctgcccaattgtggagaccggtcccacctgtcaccaggtcttaggagtggcgtcacgcccgaccgtttcccttaaagagggcgatcgtcctagctaaaaagccgggggctactgtcggtgacatgggatcaggagtatcatgactagaggtttgaggcagacacaatcgcacacgtggcctggtacccccgagggacgtcgggcccgagggtgatgcgttcgccctcctcttagtccccccgagggggtcgggccgcacccccctcggccccgagggccgaggcgccccgacccctcgtgggtttttgctccgcgtgtatgggttaggtgagcacagtggggctcacctaaccacatttattgcggtttggctgagcgtgtcacgccgcatgtaacgcagtgcagtgcactcgtttatccggtctgtgaccagtcacagaccggtcagatcgcgggttaggtggcgacaggagatctgacgcacgcctcgccccatcccgtcaggacgagggcttctaggcgctcgtccccagctggagctagcgtgttacctcccagagatggcacgttagtcctggtcagatatatgccaggcttcatcctaaccattacaggcaagatgttgtgtgaagaagggcgagcatgtagattgctaagctgacacgtggtggacaagaatgaccgacgtgactggtctgataccggtcatgtcgtcagcagacagccacgattccacgtcgcacctgctcccggcgaaagtggaggtagttgtgggccgtctcatcagaaggtgactcggacgacaactatacaaatctccgtccatttatgaaaagggggggggggggggtaagtccccacaaaaaagagagaaatggtgcatgtggtatccccttaagatataaaaggaggaccttgcccactgagaggggggactggacttttccagattagaaacccagaacaagggagaggctggctgatactttgtagctccttcatacacagatctcccaaaacacaggagtagggtattacgcttctcagcagcccgaacctgtatacatcgcccgtgtcttgtgtgtttcctgtctcgcgagccttccacatacagagagcttagaatctctccctgagtccccggccgaaccggcaaaggggggcctacgcggtctcccggtgaggagccccacgctccgtcatatgtcataataaggacacgatccaacatgtaacatgtatttggtgtaatttacttactggacaatgaattgacaaataccctgcaatgtgatgtctaattttatctactttcctccaatgcatagaatttgtaatttaggcagagtttgattcagctagttggcttaattacttcctcacttttcaagactcagggcaatctttttcttcgcatatgaccaattacaaatgtaattgtcactacatatttcttgcaccggcccagtagtttcatgagaagtacatcttaaatgcaagccatataattgcttatgggcttttggcccagataagtcataagcgcgtgttcggaataaaagacaagatgagagattgagatcggttttatcccacgcgcctttccctttctacatgccactcgtataacacaaacaaagccttcacattttgttcattgcttccctctctcacattctcaatcggcgaatcctcgtgcttgttggtaacctcccccaaaccctagccgccacttcctccccccccacccccttgctttgtgccgaacatggagggtgaaccctcacgccgcctctctttgctggaccggtgcgacgatgggagcgaggatccggtggtgccaccgcgagttcccaccatcctcaacctcacctcccaccaccgtcttgaccgatcgaaattcctaccattgatccaccctactcctgcccgcttcatctcttcaacaggatcttccttccccccctactcggaaccaccaccttcggcccctatgctagaacttggtagtggctttgggcctgaagacttatactcgttctttcctaatcattttttcttgatggaatccatcagtctaccaccatatgatgttgtagatgtgccgccggtgatccctgtcgcactacggtcggggagatctaaccaggggcttcctagcaagctaccgcttattgaggggcataggcggtcgcatagcgacatccccttcgggtattcacaagaacacccacaaatgccacctgtagcatcagttaagccggaggtcacaacgatcaaggggcaccaattggaggatgtggcggctgctgccctcaaggacatgggcatacaggcatggagcccttctggtagcatagacaaagaagttaagagctccggtgctggcagcacaacccaccattgccgcagcttgtcggttgacagcttcatgatggggaacctcaacttcggagttgttggacagcagatgtccagcccccctttgctaactacagaggtgaatgttggtggaggtgagcccattggtagtactgcttctccctttgctgcagagcttgcgaatgtgaaattcactgaggatgagaagaagaagattgtgatggataaatccctctcagagattgtcttgactgatcctaggagggtcaaaaggtgtgtgagtttcaatctttgtgtacgagactatttagggggattgacagtttgacatagtgttttggttactgaaaatcaacatcttattgtacattttcaggattctcaacaatcgggcatctgccacgaagtcaaaggagaaaaagatgaagcacgtaggggagcttcaacgcaaattgcaggtgctgcagtcggaaactactacattaggtgcacaagtgacagtgatgcaggtatgttttcaaaacaagtaatcatttgattaggagttttcacaaccttagttactgttggtgttgtttgtagaggaacaacaatgagcttgtatcacagaacaatgaactgaaaactaggttgcaagcaatggatcagctagcacagttgggagacggtaactttccttccttgtttttcagcatttatttgtt

SEQ ID NO: 29743 - DNA, 17694 bp, Oryza sativa
  unsure (1)..(17694): unsure at all n locations
tttgtgtacgagactatttagggggattgacagtttgacatagtgttttggttactgaaaatcaacatcttattgtacattttcaggattctcaacaatcgggcatctgccacgaagtcaaaggagaaaaagatgaagcacgtaggggagcttcaacgcaaattgcaggtgctgcagtcggaaactactacattaggtgcacaagtgacagtgatgcaggtatgttttcaaaacaagtaatcatttgattaggagttttcacaaccttagttactgttggtgttgtttgtagaggaacaacaatgagcttgtatcacagaacaatgaactgaaaactaggttgcaagcaatggatcagctagcacagttgggagacggtaactttccttccttgtttttcagcatttatttgttcattttttttcaaagtagtaatcttgcatctgcaaagcatgttgtatcgagtatatttcaagaagaagaatgtctttctttagaaactacattcatcgggcatcgcgatagtaatatatagcatctacaactaaaatacatagtttgaaatttaaaaaattgtgcatatatttgtacaactgtataacaaaatgtcttttattgctgaatggccgtgatttgagaattattgtttcttataacaaatgttgcttaccatacatcaagaacatgattcggatactataagaggaaaacagttcgcacgatttaatatgtatgagagaaggtaacatgtcaaagaaaaactttacagttgttttatatatggtaatgtctataatcaaaactaaaattgaaagttaaaatagaaacaacaaacacttcagcaacccaaaatattgtattatgcattttattaataatggccgttatttagagtgaaagaaaaataacagggttggaataaacctccacttactcaaaatagatggatagacgtcaggcaacttattcctagcatgccatcaaatttatttccttaacactattacctaaatcgtttaaccttcacaataaatgttttttgtcaaggaaaggagagaacaaccttgaatctatagaatttggctatctattagcagcaatgaatccctacatactaggtacaaaacacccaaggtttcttaaggagtttatatcagatctaacttgtagttcctatgatataaaacaacagttcgatcataacttatatgtcaaccattgtatgaaatgtattaaaaaaatctaatcacatttgggctaaatgatgtaccaaaagtatcaaattggtggatgaaaatggcgttgaaaaaaaagagaagtgaatgtgctacttttattatttatcaaccctcccaaatcactgtgaaacatgatacgactctgtcgacggaaagcattcagatatcttttgagtactgatcctatgttggacatttgtcaatcaactatgtcagcagaaagcattcagatatcttgtgagtactgttcctatgttggacatttgtcaatcaatagtgaacgacatatctgctaatagactcttaagctcgttagaagttagcaggatttcatatactagatgatgccctgcgtattgctgtggaaacttttataatctagttttccatagataagagctaaacattagccttgacatgtgtgagcataaacaaagcttattataatggttgtaggctttgtcagcttacgctctcaccaatatttcaagtcaaagcacttcaaaataaaactaaaagtgtacaaaacaacattattacaaatgaatctataagcgcaaagggcatggttgaagattctattcaactttaccgcttggacactgagctagaacaaattaagagagagagatgaacctgacagttcaatacaacctaatatgggtaagtaaaaagtaagaaataaaacacaacaattatagagaatccacgccaaaatagtcaaagaatacaaactgaaaaaaaatctgctgagaaactgaagaaagataatgataaaatgataatatatcaatcagtaatataatttacaatggaacaattagcatagcactacctagcatggagtacagattagtgaaaatgtgggacaaatcttttgcacctacctattacggatttggtactgaatttgaggaatgcatccaagatttggtattgaattgtggtttccatcataaaaaataaaatgggtttatatattgtctccacaaatgggagatgggccaagagatgatcgtcactggcaatggaagatgtatattataagtatttcttgtaaaggttatagatgtcatgattaattaccatgaaagtaaataggtaagataaaacggctagctagttgattaccatcttgtcagctacatgaatcctatcttactataaagtaatcccccactaactccttaagcttaatattcaaagatgccacatcatcatccactaataagatgccacatcatcatccactaacaatcatcacatttaaacatcatgcaaacatgctatatctttatagtttttataatttaagagcttttcaaatacaaatatgttaaattatcatccaacataattcacataatgtttcaatgtatatcttttatgatatcctatatacttatacagttcatcctcacttagttagtgcttaaatgattaatctatggtccaaattatatttctctttttttcctctaattaagtcatatcacatcaattgtttttagcctttagatgattaatctacggtccaaactatctttctactttttttcttccataaagtcataccaccttactttgaatcaccattctacatactatttaaatttaaattatcataaaccacattaatttacttaatctgatattatctagctatcttacatgttattttttttgttatcatactaaattctcgcagcaatgcacggggtttcacctagtaattagagaataataaaccagcaagcatgtgccttttgatgcgctacactctagctgcctggaggtgagggatggcaatatgggttgggcaccgttcttcttgtattgcattactcaatttgtagggattggaaacaaatctgggacaaccaatgttaatctagtggcttaaagtaattcagatgatgttgctgcaacagggttgagagaattagtattaattgttgttagtggggatcaactatatagagttactagatgaattcccgtgcattgttgtgggatggttgtgcatacagtaatgactttgaaaagatgtcactacaaaaataatgaaagaaaaaaaaatctgatgcttagtatttagaaataaaacaacatttactttgaggtgacttgaactattaaaagaatcaaaacactatttataatatttagaacatgaactgcttacggtagttttactttttctttgttttttaaaatggatggttaggacaaaatctgttgatgattacttatgcatatgttttattataaattactttcggttgtttcattcatttttccatgacttcgtagccgtagctcaaacgatcatggatatattgctttatttattgtttcatattgttcttgcctagttggtcacgtcgtagattaaaatagatctgtattctatgatttggtacacaatttccattgatttgcaatgtgctgtctcattgcacttgcctcattatttactcaaggattgcctgtcccagatagttctgtgcacactatggctccagttctgctaactttgatactcacatattaggctccctcctatttgtggggtagttgggtggaggaagtagtactccaaaatcctttatttatatttatggacaaatcttgaacccaaaatcccttaaatttttagagggagggactagttttttccttggggcctatagcctctagttgaacgcaagacgatagcaagagatatatggagagaacaagacaaaagtaggatatggttgagtgccctcttgttgatcgagatcgtctcgcagggccttcgattattgcggattgcagacacatgttttcaaactagtaaacggtgcatttattttaaaaaaaaaactttatatatgaaagttacattaggaaataaaacaaatccattctttttgagtttgaaatagttaacacctaattagtcatgcactgatggagtgccttatctggtaaacaagcctggtgtaaacttgataataatagagaaaggcatctacgctttagaattgtttgggctctactttggtgtagaatggtgggcaagcccttttctagtattattacttatttgcagttaatactcactctgtcctcagttacttgtcactgttcaccatcactatttcaattttaatcagtaataacttttaaacaactaatttattgttaatgaaaattatatggttaacggtacaacacacattgctaatataatatggtggtatacttttatgtttatccttttctttgacaaatatttgaaaccagagaaagtacaacactaggccacctttctagcacacgtgctaaaaatataaacttcaaagtgtactagacaaatgattaaatgaaattatgtcgagcagccttaatgggaattttgtttgaagaaacactattatgtatgtctccaaatcagccatgaatattattcagggcgaacctttaggccctgctgccatgcattttatgtcagcatttacatcagtaaatctggtccataacattttttttgtctacttttcttaatatttgttgtctacatttctttgtccagctctgacttcaagattggctgctgaggcccagcacctaagagctgttgttagtgagatcagtgatccaaatctgccaagtggttcacaccaacaactgagctctgacatcgaccaactgcagcagctgcttacacagaggcagacatcacaaatccagcataatcagccacaataaactgtggaacttttagggtgatttctcataagagacttttgaaagggttattgcatattatattttgctaaatgatgggtaataactttttattaagataatggaacaaaatccgacctttgctcaatgagctacaaccaattattacataaaattgctcaaaagcaatcacgcaccaaagagttcacaaaaacacaccaaatttaacaaaacgtaagaacaactaataggcatcaacacaaaataaagaacccacaatttattgaatcctatttgtaaacctccaccaaagatagcgaaaagctgcatttccgttgactcaagtttatgacatgcattatttattagctagcttgatgtcatcacacctttgtagttacttttctttgttgcacatcattttttagacaaaaatgtaattgcaattatactagtgaactaagtatacacaacttctgaaagacaggcataatcacggtttcggatcagtcatttccaatttgcatcctttcacaagtgtaggggcactaaggtattgttaaaaacttagacgaaactttttcttcacgtctgactaatgaaagtacatctaggcccctaattattttgggttaattggattcatgccattgcaaatatgccgattcagataaatacaattataattcgtctattcgtatccatgacattcgaaatcgcactaaattgaaaccatgtcatcgctgtcacgttttctgtatcaaaatactcctagacatatgacccacatgttagttccatcttcttcctccatcctcccctcttctttcttccaaatctctctcttcctcgtcattgctggagcaggaggtagagcagtggtgtgttacgatccctcttgacctccatcaatcaacagcaaggagaagggaaatactccaattccaacacaagatatcaagtatttgagatacaacttgaggaagggattgaatcatagacacgggaatcaacaatctagaatgggaagaagaagcaagagattggggaatcagagaattggagcttgaggtaggagagcatttgggaagaaaggagacaaggcatttgcctgttcattcatatgttcatccatgatccaaagaactgcagtgtggcttggttttatactccttgctgtttggttgggcctagagccggcccagcccatgtacatgacattctcccctcctcgaaaatcggcttgtccccaagccgatatagcggttctgccgggatcccatggaacatataaatcttcgatgcaggtagcattctcatcactagtttttcagaatattcttgccttcatgtagtttaagtagcaatttgtccagattttggtgaaatatgaagctccataccactgtgctcttgtgcttgagctgaaatacaaccatgagtttacgtacttgctgagccccttcactgtccaatctcttgctccagaaatcagcattgagatgtagctggatcccatggtaacttgaagcataaccccaataaaattgagatgcataaccattttaacaatgcacatttgcttatccatatttgctgatgtcattgagccttctgagctgatgcagttcagtttcccaactgatgcaattcccccaggatcccatggccttgacatagcatattcttgaacttgggcctcatgaaaagcagtagcttgcatgaagtaaagtatggctactagcagtttgatagtctcaagatcccaaagctatgtcatcttcatctctgttattataatctgctgaattgtagatgatactttgaaatccaagtgacgtagatttaaggaataacctatggagaaagtgaactggaataggctctgatcttgacagcacttgcacaaatcatgaacttgatttagttcttgatctccccatcttccaagagcaggccaagagcgtagtttaattagctttgtcattgaagccatgatctgcagcaatggttccaggtcagccctcaaactaactgggaagacaatttgcagtggtcgtagttgtggttgctgcatgtccttcctaacatgtaaaccatccaagtgatgcggatgaaaaataaattgccagtgcttttcagtatgcatggtcaacataagctgctgcatgaaccaatactccataatgacaaataaatcaagaactgcatttgatttcctctgaacactaagtccttgcaaaccaaattctcctggatcccaaattattcccaccaacagaatatattgcagatgaagtgtttcagccaaataagattgcatgtgaagctcccgaagatttactgagcatcccctcacatcaaagttgctcttggcaatcaattttcccatataagtcaaccattgaacattttgcaaactatcccaaggtccaaacaaaaacagccattgaaccttactcgatgtcctaccgagtgagaaaaatgctccaacatcagttttatctcctgcttcaaaaagtgctgaccgaggattcttcttgccttgtttccgtagcaattgcccctgctcctgaacaatagtcacaccaatgcgaagagaaagatcaggtagtgaccatcgttgtaggagatacatcacgtctccgctactttcattcaattgtggattaggccatggttgtggctggtgctccactcgatcacctttgcaattggctttgagaaggtggccaattccatagaaacttcactaccacgccttcactgccttgacttagctgtggatcaggccatggtaagggccgagaaccgaaggtcatctcagcttggttccatggaattactgctctccaaggtggtactggtggtgagctagctgtgtattctgagctccggtcaaggcaactatagcaagtcaagtaaacgacagaaatagcttgatggccaaaccatggattgttgaaggatgtttgcagtaatgtgaacttggaattcacttcagtgagctcaactaaatcctcggtggctatgtcatcatcatcatcattgatcatttgttcattgcctttcgtcaaacacttggtaggtgtccccatacacgactcattagtatcaaccaagctaattgaattggcctcctttctgacctccatgtgttgggaactaattcagtgttggtgctcgtaactgccaccactctggtgatatcaacgcttgcggttgactcaaccttgatgtcgcagcatgtcacgagcatgttgttgagcatggcaatcatcttggcacacaactcttggaatgtctcctctggtttcatctcagatttgtccatgtcggcctcatcctccttagtcgcggtgagggaaaccggtggcgccgctgctgctaatgcggctgagggcatagattgactcatggtggccgggaacacatgttccaatgtggtaggagtgctctcggcatcggacttggtgatggcacagcttggtaccagcatcgaacacttggtgggtgtcagcactgcaccatccttggaacaaggctgcacatgctgagcctcgagtaggcaccctccatcatagatgtggtggccatgggtggccccccgagccttctccgcaccacctctcgcccggaaccaaacaagagcctccactcgccatgcgtcggccaccagtatatgcaattcctccgctccatagatgtcataaacctggtgcaatacctcattggtcactgggtagatgatgtggctcacttggacatgaagagcagcacctgcaccagttcccaaccagctcggcatttcatcaaacacctagcaggtgcctctagtgcaactacctccaatgcttggattcagtatctggaagtcgctgctgcaaccgtgtgtcgtccaccttgtctcctggcatggaatcccacgaaccgacggctctgataccatattgttacgatccctcttgacctccatcaatcaatagcaaagagaagggaaatactccaattccaacacaagatatcaagtatttgagatacaacttgaggaaggaatagaatcatagacacgggaatcagcaatctagaatgggaagaagaagccagagattggggaattagagaattggagcttgaggtaggagagcatttgggaagaaaggagacaaggcattttcgtgttcattcatatgttcatccatgatccaaagaactacagtgtggcttggttttatcctccttgctgtttggttgggcctagagccggcccagcccatgtacatgacagggcgtcaccgctggagctgctgcggctgctggacatcccatgggtggactcctgagcgagtgccaaatcctgctgttcccgtcgaccatggcatacatgcccaccagcttcaccatcctagcacaccaggcgtggcacacactcacgctgggagcttgggactaggcaccaagtagtccaaggcggtgctcttatgttttgagtccgagggaacgaagaccgccgtcgactagctctggccggctataatcccgctcggggacgtcaacaagaagctcatccgggggctcaccggctggcagcgagatggcccggttcaagttcaggatggtctgcctcatcatctccatctccacaagttcagcgagatggccctggtcgtagtagctcactaatccaactcttcaagtgctcttgatagtttcatcagtgcaggtgttccactttgtccacaaaagaatctgcatagtccgattttttgtggtccaattggtttattccagtgtcagtgttccactttgtcccgctagaaggtgttcttacatatctactgagcccaggaggaggaaggtagagagagagagagagaagaaattggggaagaagatagaaaatgtgacggtgaattggtgatgacatggttctaattttgttcatattcggatggcatgactacaaatagatgaattatagtagtatttgtctgaattggtgtatttgcaatggcatggatccaaaataacccaattattttgatggttaatgataatgttattagtgaggactaacattttaattgagaatatgtgaaggaattttagtcctctaagagttgatgttcaaggcaatagccattcgtgtagcaaaaagatgaaaaaggtaaagattcaaatggtaaaatgttttttttcttgcttgtgtcgatagggaagtcgtacaattagatggcatgttgtctcctaggaatgagtttggtgctcaaaattgttgatgaagtgttttttattcttggactttacattctcccaatatttggaatttctaagagtggtttttgaaatttctagagtaaattttggaaaactgcaactatagtaataaaactatcagtttgctgcagcattaacgacctatttcagtttgttgcaaagattgcgtgggaaattatcacaaaagtgcaacttttacgtggcctaagcatactattgtcacctacatgtcgtttagtagcataagatgtaaaagttgtagttctatgataatttcccacgctatcgttgcagcaaggtgaaatatgttgctaatattgcaacaaactgatagttttttccctatagttgcagttttctgaaatttactcagatttctaaaaaggttacgccttgaaaaatgctcgttggtgattttcgcaagttccaaatactttttggcattctcgaaacggtcatggctagccaaaatgctctcggtgattttcgaattttccaaaaatattttttcaaaatttttggaaatgtgaaaaagctctctagtgattttcggaaattcaaaaaaagtgtatttcaaaaattttgaaaatttgattttgctctttggtgtttttttggattttccaaaaatggtttccagatttctgaaatggtaaaatctgtgaaaaagctctctgttgatttttggaatttccaaaattctattttgccgagtttctggaaatttatactgttcggaatttccgaaaatgcatttcaaattttccaaaaggggaatctttgctcccatcagcaaatatgtgggtgtgcctataaatagtcccccttcacccccaagctagggttgctgctcttattgcacactttgagtcgttggcttgctttgacttgagatttactttaaaccttgctttctcacttcttcctctccactgatcttcaatcttagatttcgtgtgtgtgtgagagagagagaaagagtgagtgtttgatttgagtttgtgtgagtgcttgatgttgactataaaaatttattgagcatttgattcatccccaagagatcattgcttcgtttgttactcttggtggttaaggacacctaaacgggttgggatcaacctcgaggcactgattcatttgtggtgtgccaaggaattttgtgaaggtcgaatctcactttcaaaagggacgatataccactaatgaaagaattgtgcatttgtgcaaccttgaggatagggttgaaaaaggacccggctctttgtgagctccacaacggtgagtagaatcctctcacgaattcgaacttcgggaacacattaacttgcaagaatcccggtgatatccctctcttactcctctagctttgttattttgtgctgctagtagtttagatggtgcattccttccatacttgtgcctagctagatctagtttaacttgtgtatatcgctttatctatgattttcagaattttcataacttccgaaaagtattgctttcgtttttacttaaaaattttaattgtctattcaccccctctaggtcgaattgaccctttcaaccaactacaaatctaagtggcattacacatttattggcatagtagtcttgtttagggctaacaaggcaagcttcaacaatctcaagtgccatcttgcatgcaatccatgccatcgcttacaagatcatggcctaaataaagcacatgccttgaaagaaagacgcgatgggaataacctgttggttttatcacacatgcctttccatttctgcaaggcaccatacaaaatgaaaaaaagaattttgccatttgattgatgccttctctcactagctttcggacctaacatccatacactgactagaagcctcctccaaaccctagtccccgccgcttcccctaggcttgtgcccaacatggaggatggcacccactatagttctcacagccggaagggtgcattgatgcgcgccggcccccatggtttgtgccctagtccctaggcttgtgtccaacatgaaatcctatcttactgtaaagttatagcccactaattctaaagttcaacatgcaagcatgccacctcatcatccactagcaataattacatacaaaacttacgtaagcatgaaacatccaaaaaggctaacgggcaatcgatcgcccctagtgatcatccccccctcctccacatagtttcctttttaggcaccacattactttcctattttagtaaatttatgcacctaaagtttgtacacttccagtttacacatctaaattttatacacataaagtttagagacccaaagtttataagtcaaaagtttatatatccgattcaatttgaatttgaattcaaatattttttacatatagtatttctatacatctaaagtttatacacctgaagtttagagacccaaagtttataagtcaaaagtttatatacccgattcaaatttaaatttaaattcaaatatttttatatatagtatttctatacatctaaaatttatacacctaaagtttaaagacccaaaatttataagtcaaaagtttgcatacctgattcaaatttgaatttgaattcaaatattagtttatagatccaaagtttataagtcaaaagtttacatacccgtttcaaatttgaacttgaattcaaatattttatatatatgtatttccatacataaatttttctaactttattttcttatttttttaaaaaaatttatggtgtagtaggaagagaagaaggggaggaggaagggggagaggagcgtatcgggggatgggggcgatcgctgggcgattacccgcccattagccacacatcatctataattcattggattctacaaatcaacatccaatcatcttccttcacattatttttcataatatttttaacatatatatccattatttttataatacttaacatatattcatccatataatcaaagtgcgagatatcatatttcatctacaatctcatacagagtctaccaaatgtatttctctatgaacatagtttgacaaatcagttttatttgttgttaataactaatataattttaacttaggaatttccccagcacatcgtgggcaattcctagtgattatagaaacatcaaagcgtggggaattcctagtgactatagaaacatcaaccaaattaagctcctttaacttaattttctttgatgtgaggcaataacatttgagcctctctaccaagtggcaagtctcagtaagtccgggtgtgtacttacccacgataacactacgtagtccatccgtcttataaaaaactaatctactaccggatgtgatatatcctcgtactatgaatctggacatacatctgtccagattcatcgtactccctccgttttgagtttttgtttgcaacgtttgaccacttgtcttattcaaattttttaaattattatttattttatttatgacttactttattatctacagtactttaagcacaacttttcatttttcatatttgcaaaaaaaaattgaataagacgagtggtcgaacattgcaataagaactcaaaatctcttatattgtgggacggagggagtattagaatatgtcacatctagtgctcgattcgtattttatgggacggagggagtagggttgtgccaccaaaacaatttaagttaaattaatataaacccaaaacaatttgtttcgattatataccgtgtatatgcatggcaatgtatcttaagcgaatcaatttaggctgtgtttatttcacttcaaaattagaaatttggttgaaattggaacgatgcgatggaaaagttagaagtttctgtgtgtaggaaaattttgatgtgatggaaaagttgaaagtttgaagaaaaactctagaactaaacccggcgttaatgccaaaagtatgaataaattcgaattcaaaaccgtgttcagaaacttccggttccggacaaaattatttagcactgaccagctgtggaagaagattccacacaaacccacccctccctctccccttccctcctccttcctaccccgccgccggtgcttgtcgccgccgccgccgtcagagagggcgaggagggcggctcgaggaggagcagcagcagcagcagcaggaggaggatggggttcatctcgttcgtcgggagggtgctcttcgcctccatcttcctcctctccgcctaccaagagtaagcacgcgcggcaccatcagatctctctccctccttgtcgctggctgaccggcttctttttgttcctcgccgatttctactagtataggtcgtgcccgtttcgtttggattggttggtaggatcgaagagtcgtcttgaggcaagatccgtgcgttcttggatctttgatgtgacagatctgagagagtgggtaggtgttgttgattagcggcatatcgtcgtgcgagtaaaggcatgggattccattccactgcaaaaggagaggggggattggggatcagatcgcacgcggcgtgaatcttgaatccctgcatgatgatgcgcatatgcatcatcagtgggagcatgcatgttctttctttcggatgcaaatacagtagcatgtttgacagtttggaacactagtttgcagttcctctgatcccatatggtccaaatactccagtgtgttcatcatctgtgctcatcaattgggtatgtgacgtccacattatgagctgatttgatatctgtttgggttggccaagattgtggtgctagcagcagcagcagcagcactgtgctattggtagactgacccgtactcccaaccgattaccaaatccatcttcgtctgataacttaggtgtggcatgagtcgagtttccaacagtttgtgccgctagtggtgaagctctctcccaaccaattccaagtttatgactggtcacaatgctgagttaacatgactgttttgaacatcttacatttggtgatcttttaggttggggcctgacatttttattatctcagggtataaatatggttcaccggagaagcagcgatttggagatcacttagtgtaactgattttcgcgttagcttatgagttacattggtcagggttctgtaaactgtctactggtacaatgccatatgtaaggaacaaatgtcttgccagttattactgtatataattggtggctttgatgcataaccagtatgagctgcatggattaatgaataacacataccatttttagtataggacattgccgtggtcatgtttgccaatgttgtgacttgtgagtaataatcgaccttgtccaatatgtaacttttatttttcttgtttaaggttatgtggatcaacaccatttcaatgaacaagggtaactaaaacttctgttgaatttttcctctctttttcattagttagtattgtgtgcatgcttttttgtcccctttgctccatagcttgccaaaacctttctacttgcttgttacagtgacgttacagcagatatcactatttttttccacattatttgaaccattgaatgtatatgcttgaatctgctatcaagtactaatacaagttttctgaaggttaagataaattttgttatcataagtaggatttgttattccatatatgtctgctctacttgtctccgtggcaaaaaggacagtcatacttctcttgtcaacccccctgaattgttctccaaaaaaaactccctcttaattggtagccaacgcccaacgcttacaagtattagttcttctgtggcttgtgactcagaatttagcgcaggaattggcaatacaagtcctttggtagcctcccctgtttttgagttggttgtaaaaagtacttctgaaactctttttagtggttaaataattctttttcttctttccatgcaccttttatactgttgagaatcttgaatacaattgttcatacctgcaggtttagtgaatttgggactgatggtggaccagcagcaaaggccttgaagccaaaattcaatctatttacgcagcaagtgtccaagagcttaggaatggcagtgccacatattgatgtatgaatatttatttgatttggctgccccattctacctaatattgtttcatttacttataccattctacctctttttctacagataaagactgtcattgctgctaccatgtttcttaaaggctttggtggtcttctgttcatcatcagcagctcatttggagcattcctacnnnnnnnnnnnnnnnnnnnnnnnnnnnnnnnncacctaatgtgttttctttatgcattctgcaccatgcctacccaaagtaaaatattatgtgtatttactattgtatgatatatgtagttcttattgttttaccatataaattggcaattttagctttatttctgctttggcacagcattttgatacattttaacgagattttgtccttttaaagtcatagcatctggaaatggaaaactaacactattttcctaagagctcagtgtgcatctcattgtcagtgtagtatatttcacttgactggtgcatataagatgcactttggagtttggagtttgacatgtgattcaccatagtccaaaggccttcatgtttttttactctggaagtaaacaaatgttctgtaatcccatgaaaaacattaacccattcaaaatatatgtaattcagatctatatatgtcacagcaacactatggatctaagtattttaaggatcctgggttaaaattattgtgtaaatgtgtgctttgtctagtgtaaccccatagtatttctttccctttctaactattcttcacattctttgtcggagattggaatactgaatatcttgctcatttgtgcagctcctgtacttagcagttataacacctgttgtgtacgacttctacaactatgaaatggagtcttcacaatttgttcagcttttcgtcaagttctcacaggtttgttagcccaccacctcacttactaaagtttttatttcaaaataattcagccgttcttgttaattgttacaatccccgcatatttttcttgtctattcagaatttggcactttttggtgccctgcttttcttcttgggaatgaagaactctattcctagaagacattccaagaggagggccgggaagaccaagacaaactgaaaccagccactgtagtaggggaagctatttgtgctccttatgtttgcatactttacaaagtacatgtctcaattttcctcttgatactccatagaaattgtgaattggggacttaacagaacctagtatgtaggatacctaagtatgtctttatcagttctgttatcggtatatcccggtgtgtttcttctgtcatgaaagtaccattttgctaccgaaattggttgtctatggaagatcaaatagattcata

SEQ ID NO: 29744 - DNA, 11070 bp, Oryza sativa
aaccaatatggtgggttttttctgtcacattcctttagccattgagcctcaccaaattgatcttgagcaagccttgtttattgtgaaaatgctctactcaggccgaccggtgcggggggagccggatcagacgctccccccgcgcaccctacccccacgtgcgcatctgctagactcacatatttctcccttcccttttacacaaaagatgtttcatctagtatatttacaacattatttataaatctaatgttgcagtgaattaaaatattcttttgcaacaaaaaacccatatattttggaaactctctattaagggaatttggtttattttttgttccatcaaaaatgtttcacctagtgtacttacaatgtttcactatatatagatctaatgttgcaatgaacgaaacattccattgcaataaaaaacccacatattttggaaaccccctattaagggaatttggtttattttttgttccaccgagaaatgtttcacatagtgtactcacaatgtttcactatgtatagatctaatgttgcagtgaactgaaatattctttcgctatttgttgaaacattgttttaatatagggtgaaacaacacccgatttaaacgagtgaaacattttcgatctacttagtgaaacaattccgatatacctggtggaatatcgtgcaatatttaaaaataattcaataataagctaattttttttcatcggaatatatccatgtgtggtcttattttgaagatttaattgcaacgaatttaatggtacaatcggatcatgatttggataagtaatttaagagataaatcagtttaaattaattttgcacgtaaatcgagcgctaacgtcatgctgacgtcagcgcccgattttacccctccggatcgggcgcccgaccgggagtcatcatctcctgtttgtttattggcttcaactttggataatatggcaatatacattggctttattccgttactcatatttgcttgtaatttaagtgattcaaattgagattgacccaaccttgtttgttggttgtcatggattacattggtctttcttttgtccaatacatggaaaatacatatgcactatagattgggggcctcaccaaattgagttttgagtgaatcatgtttgtgagctttcttataaagagattgcaatgatattttcttttcccaaaatgcagggatgagccggaggactcacatgcacactatatgcatgcatccgtgaatgtgtcctcaaacagtcaaacagatgaggagccatcgttaaatccataacctcactaaaattttattcaaaacaaactcacatggtaaaatattgggcttgtttttcaagcctggtaatggaaaagttgcctgatatatataggaataagttcactttgactcccttgaaagtgatccgaatctaatccgtgaccctcaaccgtaaaatcgtataggatgtctcccgaactattaaaatcgatgcaatttgactcccttggtggttttggaggacggttttgctgatgtggcgtctatgtggcggtgttgacctggtcttcatccaacatgatattgacgtggtacttatgtggtaatagaattaaaataatatgtgggacccatttatcatttaaaaataataattgtgggacccatgtggggcccacatgtcattatctatctcttttccttcttcgtcctccctctctctcttctctcggtctctctctgttctctttatctcccccttctcttcgtctaagcaccggcgaaggaggcggacttcgtctgagcaccggcgaaggaggcagacgaggggttgagggccgagctgttgcgggagattatcgaggactggggcatcatagcatgtaatttcatagaaagaataaaaaagatgcgaatattagggaatgacctaatatcaaataattagaaggaatgagacttcaaacccaggtcgtctagtccaccaccttatgaagctagccggaagacccctgtgtatttctcgtaatttcatagaaagaataattttccatatttcattgtcaagaaccgacgcaagaaattcagctcactccaaaaggggatataattcttcttgtgccgtaaatgtagatttctacagaatgaagggacaattacaggggatgaggaagagttagtccttacaggcatgcaagctagagtggtgctgatgagccccgtgatggggtcggtggcgagggcgagcacagcaggcaaggcgatggtgaggatgtccatgccaatctcatcaaccatgaaccacccgcgcccgagcacctcctttcctccgtccttcccctcgggcttgtcctcccgccgccaggtctccttctccttctcgtcgtctaccacgtcctccaccgccggcttcgcacggcaccgcgcaggcctccaccgaggaactacactatggcagtgatggtgggcgaaggggaaggagagatggttgagcgctggagaagtggttaggacaaacgcggcggcgacagacctcatcggccgcgaggtcgccgtcatgccacgcgagcgtgtgactgtggactgtggttgagcaccgccttctgcttggccgacgccgctccggccctcgcctgccaccgccgctgctgctccggccatcacccgccgccgccaccgctccgtctcccccctgctcgccgattgcgccacgagaaagaaggagagaagggagagagatggaggaagaagagagagagagggaggatgacatgtgggctccataatttattttatgtgtgaatcatagttttttttaattctaatgccacgttggatgaaagactaggtcaacattatcatgtcagcgtcacatcaacaaaaaccatcctctaaaacttcctttcacgtcctccgtctagcccctcgacctacggccagtccttttacgtgctactgcacagcgccggcggcacgggacgacgacgaccagtcgaccacgatgcggggatactgcaggtgctctcgcctctgacagcaacgggaacgtccacagcgggcagctcgcgccgcaacaggttgtcgatacgggtggcaaggaggaggaggatgcaggtgacagcggtggcagggagggattgcgtgaagcggatcatgggactccccgacgcgtccccgtcgaggagcgggccaaggtgctcaaccccctacagcgtgacgacagtacgcttaccgtgtcggactaaatcagaaacaccatttttttcacttcatatgtggattttaattgagctatatatgtgcagttcgtgagttctcatctgaaaatattttctggaagttcttgcatttgttcatcacaccagttcagccggcgtgtgtgatttgtttctctagtttttgcgttttttcttcacagcagttcagccctctccgtgctcgccaaagccaaggactcctccacgatcgcgctccaggggttgctgcctggaacgttcgtgccggtttcctattgtagcacaaagaagtggagttcacactactacgaaatcggtttttccatgacggggaaaatcaatttttacaagcgaaaagacgagccaccagcaaccaaaggccagagcgggcctcatccacttgtgaaaattgaatttcgcaggtggcgtattaagaaatctgctagcaaaaatcgaattttgcaggcgtcgtcctaagaaatccgccagcaaaaatggatttttttttgctgacggcacctttaggtcaaccgcgagtgaagagatttttcaaaaaaaaaatccacatattcatcatgattttcaaaacaaaaacacctcaacatcattttgaaaaaaaaaaaactcatcaacatctagattcccattaacatattcatcaatagatcagcggattcacatcaacaaattcaacaaatcaacagattcacatcaacaaattaacatcaacaaatccattacagtgaagcaaatcgattttcacagcatgcatctcgtcgccatccaccgtcgaggggcaccagcactagatctggcggacacaaagtcatcctgccggtgcagtcgccgtcgagccgaagagaggcggagggaggtgggaggccggaggcgcagagaggagagagccgcgcgccatcgctaccgagccccttgctgccaccacgcaccgtcatcactgagccccgccacgtgccatccaccaccgccaagctctgtcaccgtcgatccccttgccgctgccgagccccctcccctgcgctgccgctgacggtaaagcgggttggacgtgagctccatagcccgcccacagcctcgcctgctgccgcgagcctccccgcccccagtttcgcccgccggcgcgagcctccacgcctccgtacctccccgccgccagatccgccacgtgcgagccttcccgcagcctcgcctgacttctgctggcccgcccaccgtcgcgagcctccatgccacccacgtgccttcgcgccaccggatcgccacgcgtgagcctcctcgccgcctgatccgccgccgcagctccacttgccgccgccgccaaccacgattgagggagaggtgggagtggaggggagaggagaaatggatctaagagagaggttgagggagagatgcggtggagagatggatccggggcatatttatcctcccactaacagtttttttaaaaaaggcctcccacttggacttagtccccacgcccccacgatcttttttacggcggctgttcttataccccgccattaaaaatagagatattttcgctggtggttgtttaaatgggccgctagcgaaaatagctatatttttgctagcggtccacttaacctggccaccagcgaagatccatttttgctggcggtccgtagccaccgatcccccgttatattttcgttggcggtttcgacgtataaccgacagagaaaaaaaatgggtgatgccataaaaaattgattttgtagtagtagcgagcgaacctaagaatagatgaggaagaagaaaaaaaagggaagtttgagattgacaggtgggacccacgctgattccgtttttaaaacccagacatcaaggatgaggggtcaaaagtgaacttattcctcgacctgatcccactagagtccgtccagcctattgaatttcaactcgtttgttcaagtctcaaaaagaaggaaccatcttgtggcccaactcgtggaggatatattagtcgaaatcatatgcgtctcttcgtcccgcccacgccgccaacacacacgacaaccgcttccttggcacgcatccccccgctccccaagatccccatcttctccagcgatgccgaagccgaacccccgcaccgcctcttcctctgccgccgccgccgcgtcctccccggacaccgtacgcaaggagcgcgaggagaacacggtgcccgccgtgtacgacgccagcgccgacatcgaagatgactaccgcttgttcttggagaacttgcttgtctacgagaacgaggactttgtgctggagtacgagggcaaggtggtcaggtatggaggagacgaagccgtttctgctggtggtggcagtagaggggaggatccggtgatggagaaggagaaagagaaggagaaggaggtggacgttgtggtgatctcctcctcctctgacgacgagtctaccaagattatttcggagcctaatccgcttgacagaggcgtgtttcagtgaaaggttaatacatcgttccacttcaccaatctcttttttttttctttggttagttttgctgcatttctaacacaaattagtgttgttggcagatgaaaaaggtagtggacaaggaaaagatggatgagaagaatgaggctgctgcccctcttgttaaggggaaaggtgttggaaaggttagttctcatgaccccggttgtgcttgtttcaaagggctgatgtgagatgtggaagagaaacatgtgtgatgtgtatgccgtgtgcgcgtgcaggtgatcggaatggaagtagaagatgagcagcttgtgctggctttgccgaaaccgggcacgacgactagcttgacaaacccaagcaaacgccatgaaaccgagcctcatactacttctgtgagaatttcttgcacatgctgcttttacctgttcatgttgttgtcgattagaataaggatcgacatctgtcacatgtggttgttattggtgcctagtgtcgtagatatgtcaaatctgctttgtagttctttcagctcgtctaaagggtgtaaatgtctaggattcctatttggcgcggcacagagtccagtagtccggaggcagaggagttcgatttctctcttcttgttccttcgctcactcattcccttatctttcctccattcccgatcgacaactttgatagagctgctaatcgtcgcccattgatcttccggccacaatcctcatccctgtcgctgtctacgttcccagctgccctctattccccaatccccctctccatccgcgtgccctagctcctcaaccatagccatggggactccactatcaatgccgccgccatgcgtcgcagaggagtagcagtagcaggcaccaacgacatggtcatagctgcggtcgtgaccgggaagatggcgaccttgaggaagaagagcaattttgactatgacatgaaagttttatggatttttcaattgaaagttttgtggtttttcgatgaaagtattcattttatcgcaagtttttgtgatttttgagatgaaagttcctgattcgaactgaaagttttgtgattttgagatgaatgttttcatatcattgaaaagaatggtttttgattttcaagatcaaagtttgaggaagactataagttacagttaaatcattggtgcaagaagcggcagatgtcgaatgaagcaaaagcaaaaccagcagctaggagagcaggcatggctgtgcgcaacttccgttgctagcgcagctgcgccaactagcaacccccttcaatgttttctacaggatgactaaaaataatatctgaatccacgctagttgtaaagaaatggaaattgttataacattgttaaagatagaaacactttggctatgtttggataatgggtttgggatataatttcccactcctcaaagagtaagtttcaattctagccatccattcttctcactccatttcattctatccctccattcatttctatttcccaatcccacctctcctaacccattatccaaacatatcctttcaccattggtcatctactttgggcatgcgtaatcaaactttgccttacttgtccatgcaattccttgtaaacaagatagtggaatagcttgcacttgaaaactagtaaactattttccattatgaatttcgattgtttttagttaatacagatcacgtcccattcctttcccctctaccactcatttctctccaccaccttatccatatcctctccaccatccttctctctctcatgcatccttctctctctcacgcgaagctcagaggaggagtggctggggtaggggcagcggcggcggtggctctaacgagctgcggcatcggtggcggctccgaggaggagcggcgtcggcggcggctcgagcggaggggaggtgcatctgcggtggcgcgggtggaggaaatgtgcgtctgcggcggcataggcagaggggaggggcgtcggtgtggagattatggatatcccatatctacatggcgacgatatttggactggatataggataccgaatatatatagaatatcttatttgtatctcgggtttgtttcttaacttgtacatcaaggaaacaccttgagacttagtcggttacgactgtattttacctgtatttgtatattccgttagggatatagattatcttttgtaacccggactccttcctatatataaggggggtccgggcgcctctaggggcagagatgttgattttctccaaatcatacaatcaataacacactcggcggattcatccccggacaggagtagggtattacttcttttataagaaggcctgaacctgtataaatcctttgtctccaaacccatacactttcctagcttgatagccaccccttttattattgccgaaatctagtttcgacagttggcgcgccaggtaggggtagcgtcaagcttttcgccgatcagtgcaatgggtttcgtctccggcatcgacgacctcgtcttcccacccgggcagacgtttcggttcggcagcctcgacttcgtcaccaacaacttcggcaagatctctctccttgactcggtgtcagaccagtcgggagagaaccggatttcagtcccgtttggactcccaaacgcggctgaaagctacttcaagaccatctcaatcgagtcggcttcaaaccactcgggcgagatcgcatcttctccaacgacaccagatcaagatgatggggcttacccaccagtcctgatgaagctccccgacgatttagcggccgtctccaccacgacagcgtcttcatcccgtaggcctaggcggaagtcgacttcaacaccgatttcgcctagcttcagggaagtcggcgtcatcctccaaccactcggcacggtttcgacggatcagctggatgactacaacagctctcccaccgtcgactcacgtcctactgacatcgtggagtacgacgaatttagttctcgctacaacgacttcgacgacttcgacgacttcgacggaagcctagatgacaactacacccctctctactttggcgttttcatggccaataatgagacggaggagcaacgccaagcccgggagaccgaagaacgtcgccgactggaggaggagcatcaagcacaagaacaagaacggctacggcgtgagcagcaggaccgtgagcggaccgcgaaggaggctgaggatcgacgtcagcgagctttgaagcagggcgccgagcgcgtgatctcatcggccaacaagatgtcgaagggacaccggttttccgcacccctcaacagaatgcggttgccgcgatcacccttctcgacaccctcctcaaccaaaacgagctcaatcagtccgaccacgtcgtcaacatcttgaaccagacgaagaccatgattgcggcttcggtcccagttaactccgaaagcgtccacacgccgactggtagccgagtcccccacttccgatctcatgactaccgtcatccaagcctcagcatcaccggcgcaggatctaatcgcaggagcaggggtcacgacgagcggtccattcactcacctcccgaccaatatagggagcgccgagtggaacggcctcgctcaccacctcgtcgccgccccgtcgatcttcgcgacacaatcatacagcgccgagcagctcgaggccatcatcattcgccgaaccgccacgacgacgaccttgacggagtagcagccttcaccgacgatctgcgtcgagtggattggccagccggcttcaagccgactggaatagagaagtacgacggtaccactaatccagaatcgtggcttaccgtctacggtctcgcaatccgcgcagcaggaggagacaacaaggccatggcgaactatttaccagtggccttagcagattccgcccgatcttggctccatggattgccccgtggtacaattggatcttgggctgaattacgcgaccacttcatcgccaacttccaaggcaccttcgagcgtcccggcacacaatacgacctctacaacgttattcagaagtccggagaatcccttcgagattacatccggcgattttctgaacaacgcaacaagatctccgacatcaccgacgacgttatcatcgccgcgttcaccaaagggattcgccacgaagaattggtcggcaagttcgggcgcaagcctcccaggacagtcaagctcatgtttgaaaaagccaacgagtacgccaaagctgaagacgccgtcaccgcatcaaagcagtcgggtcccagttggaagcaaaacaagggtacgccggctacgggaggaggtggaagtaacaatcataaggaccgcaagcgtaagcctgcggaacttgttgcaaccgccagtcactcttctcgacagcgttcgcgcgtcaacacgttcgacaagatcatgaactcccaatgcccgcaccatcctaactccaaccacgtggccaaagattgtttcgtctacaagcaattcgcggatcaatacaccaagactgcacggaagaactctgacgaagaacaaagcacgtcaaggaagaaggacgacggcgacaccccggcaggttttcaagatcaccgcaaggagctcaaccatatcttcggcggccccctggcttatgagtctaaacggaagcagaagttgactgaacgggagatcaatgctgttcagcccgacacgccccagtatcttcgatggtcagagattgcaattaagtttgaccgctcggatcatcctgaccgagtggtccacccggggcggtaccccctggtactagacccagtggtccgtaatgtcaagcttcgcagaaccctcatcgacggtggcagtgcactcaatatcctcttcgccaagaccttggatgatatgcagattcctcgctccgagttaaaaccaagcaatgctccttttcacggagtaattccaggattatccgcaactccactcggccagatcaccctcccagtcacttttggcactcgggaaaacttccgcacagagaacatcagctttgaagtcgccgatttcgagacagcataccatgccatactcggacgcccggcgttagccaagttcatggccgtcccgcactacacttacatgatgatgaagatgcctggtccccgaggagtcctatccctacggagcgacatcaagcaagccgtcacatgcgacaaggagagttgcgacatggcccaaactcgcgagatggcgtctgcccgagaggatatccgactggctgcagccacggcgagcgaaggagaagtgcccgctaccaagatttcaaagagtggag

SEQ ID NO: 29745 - DNA, 4354 bp, Oryza sativa
caatgctccttttcacggagtaattccaggattatccgcaactccactcggccagatcaccctcccagtcacttttggcactcgggaaaacttccgcacagagaacatcagctttgaagtcgccgatttcgagacagcataccatgccatactcggacgcccggcgttagccaagttcatggccgtcccgcactacacttacatgatgatgaagatgcctggtccccgaggagtcctatccctacggagcgacatcaagcaagccgtcacatgcgacaaggagagttgcgacatggcccaaactcgcgagatggcgtctgcccgagaggatatccgactggctgcagccacggcgagcgaaggagaagtgcccgctaccaagatttcaaagagtggagaaagcgaagccaagactaagaagattcccctagatccctctgatcctactaaaactgctgtaataggcgccgagttagattgtaaataggaaagcgcgctcatcacctttcttcagaacaataaagatatctttgcgtggaaaccatctgatatgcccggtattcctagagaggtgattgagcactccttacatgtcaaagaagatgccaagcctatcaaacaacgactccgccgattcgcacaagacaggaaggacgcgatcaaggaggaattaaccaagctgttagcagcaggcttcatcaaagaagtccttcatcccgactggctggcaaacccggttctagttcggaagaaaacagggcaatggcgcatgtgtgttgattatactgacctcaacaaatcctgccctaaagatccttttgggttgcctcgcattgaccaggtagtcgactcgaccgccggctgtgagcttctcagttttttggattgctactcggggtatcatcagatccgactgaaggaatccgactgcttgaagacttcattcatcacgccttttggggcatactgctacgtcaccatgccgttcggactaaaaaacgcaggagcaacttatcaacgtatgatccaaagatgcttctcaacgcagatcggccgcaacgttgaagcctatgtggatgatgtagtcgtcaagaccaagcaaaaggatgatttgatctcggatctagaagaaacctttgcgagcatccgtgctttcaggatgaaattgaaccctgaaaagtgcaccttcggagtaccgtcagggaagctgcttggttttatggtgtctcataggggcatccaagccaacccggagaaagttactgctatcctcaacatgaaaccgccaagtacccagaaagatgttcagaagttgactgggtgcatggcggcgctcagccgatttgtttcaagacttggtgagcgggggatgcccttctttaagctactgaagaaaacagatgatttccagtggggacccgaagcacagaaggccttcgaagatttcaagaaactcctcaccgagccacccgtcttagcttcaccacacccgcaggagccgttgttgctgtatgtatcagccacctcccaggttgtgagcacagtcttggtcgttgagcgcgaggaagaaggccatgtccaaaaagtccagcgaccgatttattttgtcagcgaggtcctagccgactccaaaacgaggtaccctcaggttcagaagctgttatatggtattctaattactaccaggaagctatctcactactttcaaggtcactcggtaacggtggtcacatcatttccactcggtgatatactgcacaaccgcgaagtaaacggacgtattgctaagtgggctttggagttgatgtctttggacatatcattcaagccccgaatttcaatcaagtcccaagcgttagctgattttgtcgccgaatggaccgagtgccaggaggatacccccgcggagaacatggagcactggaccatgcattttgacggatccaaacgactttcgggcactggagcaggagtggttttgatttccccaactggagaaagattgagctatgtgctttggatacatttttcggcgtcccacaacgtcgccgagtatgaggccctccttcatggactgcggattgcaatttccctagggataaagcgtctaatagttcgaggcgattcacagctggttgtcaaccaagttatgaaagagtggtcctaccttgacgacaatatgatggcatatcgacaagaggtacgcaagttggaagacaagttcgatggactcgagctcagtcacgttcttcgacacaacaatgaagccgccgacagacttgccaactttggatccaagcgtgaggcggcaccctctgatgttttcgtcgaacacctttatacgccgacagtacctcacaaagatactactcaagttgcgggcactcatgacgcagctatggttgaagtagactggcgagagcccctcatacgatttttgacttctcaagaactcccccaagacaaagatgaagccgagcggatttcaaggcggagcaaactttatgttttgcatgaagccgagttatacaagaaaagcccttcaggaattctgcaacgctgcgtatctttagaggaagggagacaattgctaaaagacatacattctgggatatgcggaaaccatgccgctgcacgcaccattgttggcaaagcttaccggcagggttttttctggcctactgcagtgtccgacgccgacaagattgtgcgcacgtgcgaaggttgccaatttttcgccagacaaattcacttaccagctcaagagttgcaaactatcccgctgtcttggccgtttgcggtttgggggctcgacatggttggcccgtttaaaaaggcagtcggcggttacacgcatctctttgtggccattgacaaattctccaagtggattgaagctaaaccggttgtcacaatcacagcagataatgcgcgagacttcttcatcaacattgtgcatagatttggagtgcccaatcggatcatcactgataatggcacacaattcactggcggagtttttaaagacttttgtgaggactttggaattaagatttgctatgcctcagtggcacaccccatgagcaatggacaggtggagcgagccaatggcatgatacttcaagggattaaagcgcgtgtctttgaccggctaaaaccctatgccggcaaatgggtgcaacagctgccatcagtactttggtctttgcgaactacacccagtcgggccacaggccagtcaccctttttccttgtctatggggcagaagcaatgttgccgagtgaagttgaatttgaatctctgcgctttcggaatttccgtgaagaacgctacgaagaggaccgagtggatgacttgcaccgtttggaagaagtccgcgaagcagctttgattcggtcggctcgatacttacaagggttgcggcgttatcataatcgcaatgttcgatcccgtgcctttctagtcggcgacctggttttgaggaaaattcaaactacacgagatcggcacaagttatctcctttatgggaggggccatttatcatctctgaagtcacccgaccaggttcctaccgactcaagcgcgaagacggtactctcgtcgacaactcttggaacattgaacaccttcgtcgtttctatgcttaagcttatcattgtatttccctatcttgactgtcaccatcaagttttcttcttgccgttgtcagtcgggggctatcatcataataatggagtgtgattttttatcaatttaatttgcttacttggtctatcattgccttgtttgattttttctacttagtctgcgaggattgaaagtttttaatagcttctttgggttttaggctcaacaaagcttgataaaagcttttaagaaatcaaagacttggttagaactatcaagcacagcataaatacaccagtattgtacaaattgagcctccatttgctacatttacactcagtcagaatcagtcctttcatcatcagagttattattgctcggctgaaggtcgttgttgcggaattgctctacaacatcacttacaatcttgtcagccgcactttgagcattactgataagatcaagagcagcttcttcgcttgtcccgtctgcaaagccatcaatggtatcaatttcaatcctcgggtacaaggatttggtcatcgccaatgccatactagctcccatacttccagcttttttgatattcttgaaatatacatccggtgcaactctcagcttgtcaaagatttcggttgcgtcaagtgcactcggaccactgttattaaggaacatagcttggacgagtggtgtagcgacattggcgacttcgtctcttgctcctt

SEQ ID NO: 29746 - DNA, 646 bp, Oryza sativa
cggtatagttattttgaatttttatggacatagagcattccatggtacttacataagctaataggttgggaaagtccatcagccgaggtaagctaatcttcagaccacttacaatctccaagagtataacaccatagctatatgtgtcggacttgactgaaaaggcgccatccattgcatattcaggagacatgtaaccactgcttaacagttttagtaataagtaacaaaggatttttcaggaaatcaatgtaatagtaaaaaacaaattcctggatcactcactatgttccaacaactcggttagtattggcttcttgctggttgccaccgaagattcttgccataccaaaatcagatatcttagggctcatatccacatccaacaagatgttgcttgatttgagatctctatgaattattgtcaaccttgagtcttggtggagataaagaagtcctctagctactcctttgattatcttaaaccttgttggccaatcaagagcatacttacttgcaggatctatcaagaatggtatacaatgttcttatagtaaggataattttatcatctttgagaaagtactggtaagtatcacattgtttattgtaaattttggtaccttcagatactaaatatctcaag

SEQ ID NO: 29747 - DNA, 612 bp, Oryza sativa
ctcttgttgggcatgtattcatacagcaacatcttctcttctccatgaacacaacaaccaaagagcctaaccaaattccggtgttgcagtttggatagaactatcacctcgttcttgaactcttccaatccctgactggatctgtttgacagcctcttgacagcaatctcctggccatcaggtagtaccccctagaagtaatatcaactatgttggttcaggtattgatcttatagcattacgattttgaattccaggtcagaacaaagatagtaaaaacaacaatttcattcatattaacaagataggataaaatgataaaatgtttaaatgaccataccttgtaaacaaaaccaaatccgcctccaccaagcttgttgctaaaattatttgttgctgaataaatcgtgctaaactcaactagtggtgagcttagaactgcggatttcactgaatcacttctgaatatagcttcatctgcaggtggtccagcttcttttgtgatcagccgtggtgcttgtattctccttatgcctgcagattagtaaaaatattagatataaacctaccagacagctgttaacgcaaactgaactatatcagcaatctcta

SEQ ID NO: 29748 - DNA, 9845 bp, Oryza sativa
tcctttttttttttgtaccatggtcatgtacacttcatcaacccaactaaaacaatggaacctttttatttcttattattacatactcatgtttgattgtattgaactgccaggttgatatgtccgtctttgtgctatctcagtgcgcaagtggtaaagctgcatagaatcttcaataatcatgccccttccgcttacagattcgtttgtaataatgttgttttttatacttctccttctacttgaagtgctttgatttgaaatactggttagatcaacataagttgacaaaatctataactattatacataggaagagtgcacacaagaaatctgaatgctttctgttggcagagttgtaccatgtttcatagtgatttgggagggttgattttaggaaagggtgatacatcataaaagtagcccattcacttctctttttattttcttgattattgccttttatgtccaccaatttgatacttttggtacaacatttagccaaaatgcgattaggttttcttctatacatttcctacaatggttgacatataagttatgatatgtttgataatataggaactgtcggttggacctaaaataaattccttaagaaacctggggtgttctgtacctagtattcaaggattcattgatgctaatgaagagccaaattctgaagattcatggttgtgctctccttttcttgccagaaacatttattatgaaggttaaacgatttaggtaacaatattaaggaaattaatttgatgtcatgttaggaataagttgcatgacgtctatccatccattttgagtaagtggagatttattacaaccctattgtcttttttactctaaataacagccactataaaatgcataatacaatattttgtttggtgcttctttgttcattctttatactattaactttcaatcttaatttttctttgacgtgctaccttctctcacacatattaaattgtgcaaaccacattttccactcatagtatccgaatcaagttcttgacatatggtaagacaaatttgttataagaaatcaacaattctcaaatctcacccattcaaaaaaggacattttctttacaattgtataaatacatgcacattttctgaatgtttaaaggatgtactgttgttgtagatgctatacattactaccgtgatgcctgatgaatgcagtttctaaagaaaagcatttgtgttcttgaaatatattcaatacaacatactttaaacatgcatgatactactttgcaaaatgaacaaatgaatgttgaaagacaaggaaagagagttaccatctccccactgtgcttgctgatccattgcttgcagtctggtttttagctcattgttcagagatacaagtccattgttgttcctctgcaaacaatataaaaaattactaagattgtgaaaactccgaatcaaaatgaccacaccttctaataacatacctgcatcattgccacttgtgctcataatgtagcagtctccaactgcaacacctagaatttgtgttgaagctcccctatatacttcatctttttctcctttgactttgcggcagatgatcgattgttcaggatcctgaaaaaattacaataagatggtgattttcactaacaaagaacattgtgtcaaactatcaatccgcatgcacggactagtacacaagaattgaagttcacacacctcttgaccctcctaggatcagtcaagacaatctctgagaggaatttatccgccacaaccttcttcttatcatcctcagtgaatttcacatttggcaatggactcgccttcaccaccatttgcctctatagttagcagaggggggctggacatctgctgtccaacagctccaaaattgaggttccccatcatgaagctgtcaaccgacgagctgtggcaatggtgggttgtactgccagcaccagagctcttagcttcattctctctgcttccagaagggctccatgcctgtatgcccatgtccttaaggacagcagccaccatgccccccgattgatgcccctcggtcgttgtgacctttgtcttaactgatgctataggtagcatttgcgggttttgatgtgaataccctaagaggatgtaactatgcgaccgcctatgccccaccataagcggtagcctgctaggcggcccctggttagatctcgtcgaatgcagtgcaagagaggtcatcggtggcacatctatggcatcatatggaggtggaacgatggattccactgagaaaaaagtattaggaaagaacaagtaaaagtcttcgggtgcaaagccactgccaacttcgtaccatagaagccgatagtggtggttccgagcagggggacaaggcagataccgtcgaagaggtgaagtgggcaggagcagggtggatcaacggtaggaatttcgattggtcgaggcacttgtgggaggcgaggttgaggatggaggggactcgcggtggaaccaccggattctcgctcccatcaccgcaccggtccaacaaagagaggcggcacgagggttcgccctccatgttcggcacaaagcaagggggacgaagtggcgcggccgctagggttttggggatgctaccaacaagcacgaggatttgttgattggtaatgcgagagagggaagcaatgagaaaattgtgaaggttgtatttgtgttgtatgggtggcatgcaaaaatggaaaggcgcgtgggataaaaccggcatcactctctcatcttgtattttgttctgagcacacgcgtatgacttatctgggccaaaagcccataagcaatgatgtggcttactcttaagatggacttctcatggaactactggtctggtgcaagaaatatgtaatgacacatattcaatgagatgagtacagcacatttttttgcataacttttacttttcaattgttccactattaggctggactaaaataatcacaagaatccaatgaccactactattagctaaaacatgagtgtattgttcatctcaaaataggtactgaaaattctcattatgccatatcagttctaagttttgtaagctaagcttaattaagtcattatgcccttgtaagaactattccctctgtttcatttttattttactgaaaatactagtacaatgtttcccccagtagtcatatctccgttttatattataagacactttgacttttttcttagttaattctttttgtcagtttgacaaactttatagaaaaacatagaaacgattctaacaaaaaaacaaacatactatcaaaatattcaatgttagatttaatgaaactagtttggtggtctagatgttgctaagtttctctatacatttttctaaacttaagaaagtttaactagaaaaatattcaaaacgctttgtaatatgatacggagagagtacttgatttccattagtggaaatataggggtttctctcttgatcagaaaaaataaatggctgtcgttgtttcatacactgtgcaaaaatcagtcctctgaatatctgatgcagaccagtcaccagtcaccccctatatatggttaaatttgtaaagaaaaggcaaaatttgctacaggatactaaaaaatcgtgtaattagctgagggacactgaaaaacgtgacactatcgatggacactacaaaattgtgtaattggatgtaggacaccggaggcactattttctaatttctaggctgaaagaggggagagaaattttgaaatgacgggaatgcccccctctactccttcctttcttctcgatgcagctgacatgtgggcccgcgcacaatgctgtcgtcctcctctctccaacgcccgacgccactgcatcccttccaaaatccgatccattccctcgcccgtttccaaaataagttgaggggatttgatgtcctcactttcctcttcgatttccctcaagaatcctttgatatcccaatctaaatcgctcagatttgagtaaagttcgagctttcctttacctacgaagaaccctaattttcctaattctttttcgccgcatccgagtcggattcttcctcgtccacctttaaatagcatgccccagagctcctctctcaaattcccctttagccctggcttgccgctgcccggaatcctctcttcgcgcgttcgagcagatgggggacgatgagaggacgacgacttcctagagcacgctcctcgtggagtacacgtgggtcgaactctgggcagagtgcgtcgagtcatttgatgccatggtatgcaagagatggaggcctgacgagagctccatggttggcgtgcgtacctaggtgcccatggcatcgagaaggtgacggtggtgttcgacgtgatggacgacaagaacgcgtggacaattctcacatgtctcccttcttgcaaggtccctagctgggcgcacgcctttatgaagatgaacgggaacatgtagctgtcgggctcgatgccatgctccaccatgttccaccatgtccatgcagaggaagaagaaaggaaggagtggagaaggagagagaacaagaaaaagggttgaaccgtacttttacatatatttctctctccattttctttggaaataataaaataatgtcgtgagtgtctggtagctaattatcagttttttgtgatgccctacagaaaatactcgttcttgcaatgccctccaactaattacacgttttctggatgtcctgtagcaaattttgacaaaagaaaaatgagtgcttgcagggattcttctttgggtatgctagcaacatcgagggcttgctagacaccttgttcatgttgctatcagaggctcttgggcctaagtagagttacctggatgcaaccaggctgccaagcaggggtagatgataatttgccactactaccctctatgcccccagcttgagatcgccatcaggacaacacgccattcggactccaacttcctgaccgtgctcctttaggatcaaactggtggcctgcaagtcctctttgacaatcggtgggtcgatgtcacgctgatacccggagcactcatcttcaatataggcaatctcatgcaggtatcatgttcagagttcatgaaacacacaatgagaagaataggcattgccttgcagatatcattttcagaatccacaaaaatacaatgaatcttgcagataccatcagaatccacaaaacacacaatgacttaggtggtctcttgctggtatcaagttgagaatccacataacacacgataatcaacatgaaaattcaaaattttgttttgagacaacattaaaaacccaacttgtttaccctacattattgaacatatatttttgagaacacgcaaaacacttgcgcatcatttcatttctgaacatatatcggagacctgttttaactaatgtccatatgatctcgaatgactagttcaaaagcatggaacattcaaacaggggcacaaagttcagggccaagagtatcaatcgcgtgtttacccagcaaatccagcatcgacaaagatgttcagtccgttcaaatagctgttgtttgatcactactacacaaacgatttttccgtgcggtcgaaactcactttcgcgtgcggttgtttcgcccgtctggaacgaagggtctgcgaaaatcgtgattttcgcgtgcgggcgcttaagccgctcacacgggaaaatagaaaatcgaaacaaaaaaaaagaaaatcaaaaccaaaaccctaaccctaaccctaatctagccgcctgtcgggtcccaaaactaaagacttagatccgactaagattaatgtatcaatccctggatcagtaaatattgatgcatataatacagctggttcttcattgcatacgttaaagtttacaatactaagagttttacaagaataggtactcacctaattaaacataggtactaatattacacagcagaagttctaacacattctaactaggaaagtataacctctaaggattttctaagttatcagggtcgtcatagtaataaacataggagtcctcctcttgacccaaatctgaaaaagggttataagagcaagggtgagtattcacaatactcagcaagttaccaaggaaacatgttatgcattggcatagagtagagttctttgcaaaaggcaataatagacaatatggaagtattaaagcaagagtttgtaaaacatatactttaggtttctaaccaaggtaccatatgagtcccggtactcaattccgtgagtacggctattcgaatagtttcatgaatattctactgcagcagatgtacgctttacccgtagtccacgacttgccaattttcattagcttagtcatggcccagtattaggttattaacaattgtggtacctgttccgtgaacttatatcctcatgcgctctgaacgtgacgttaacagcagtgagagcagttctggcgttcccggggtatttaaggggaactgatcgtatgacaccacgtcatctcgatcagggtttagaattaccattatacttataattatactcgagtgtcataaaccaattacctgtacatggtaatggtaaaatttgcccttcgcggctatagttgcctcctgctcgaggacttaaaaataaataccatgatatagaggtaccacattgctaattaacataatgactaggtctgtccccattctagaaactgcggtcatacccattcgtttgacataagtacctgataataactatatcgatcgagacagtactagccaccaagaaatcatcccattctaacgtactgtcccaatttaagtgtaagacattttaaccagattgtaagcagagtaagcaatactaaattgtctgggtttctatggttgaattatgcataaaaatagagtattgaacagaaaggctataaataaataatttgtaaaatataggcttaaatgatcaaaagatgtatagtaacttgccttgctcgatgtccggagattgactgatattatctagtgtgtcagaagaatcctcaaggccaagggttagacatataaaatttaaattcaaaaagggattcaaataaaatcctaaaataggaaaaatataaaataaaatagaaaaatagaaaaagtagtctcaaaagatagagaatgattttaggagaatattggttcaagtttcactgaaattggatctatattttaaaagatatgggcttctaaagtttgaaaatcaaattaaatgtgaaatggcactgtgtacgggtcccacctgtcagtctctctctctctcttctcttcttcaacctccagccgttccccatttacggccggcggtgctagggttagtgatttcggcggcgatagagggagaaaggggttgcggccgaggaggggaggtagctagggttctccggcgacggcgagtggcagcggagggattaatttgatgtgtggatagcctagcggctagggtggcggtgccatggatgagctgagatggtgatcaaagtggtgagagttagacatggctcggagagggttcctagagcatctatgaggtacctagaaggatttaggtagcttgccgacctttggcaaggtgtggaaaatacttgccaacgagcgcctccattagcggcagtcgtgtgcacgtcggcagccaaggaggttgtatggtagtgccaacctattgcgaaaatggaatctagggggtatgtagatggttaaaatggaagaactcaccgagataggctgagacgacggattacggccgaaaaaacttctcggcggtgaagaacagagcagagcaggagcgacagtgctcggctcagtgcggtgaggtgaaactcgacacggagcttcggttaggctttagtaagctagaacatggttgaatataggtgttctaagggttggttagggtggagggtggatggaggggtgtaaagtcgatcgcgcacaaggtgttcgaccgatgggcgagagtggttgatgatatgaattggcaaagcagggcttcggggttgtggggttatggttggtgatgatcgatgatggacaaggaaggggctgaggtcttatttatagggctaggagaagcggatgagttcgggcgccattatcgccattgatgaactcgggaattaggtgtggcaggggtggcagagggctgagagagggagggcaagatcaatttgagtggcgggaggccatgttcaaattcttaccgatgaaggcttgacttggccgcgggtgaaaacggctggcgacatgttggcgccaatccgagcacgacgcgcggcggcggcgatggttaaaacggccagctcggtggtgattggtttgaattgagagaggggaaaccatcgtatatattcaatccaaccgtgcggcaagaattggcgcgattcaccccgggtagaagaaaaatcggactcggcggcggctttggacgggcatgcacggcatcgagcggcgattacttgtggcggaggtcgtcccggcttcgtcctcatcaagattggtgcgacggcggtggtctgagaggagttgtgcggctggcggcgcgtcaaggcagtcgggcacacgcgagcagccctgaagctgaagcgagtaaaggggatggaaaggcaaagaagaccacggccttgggtgggttgtggtccccaaggacccaacctagactttgttaaagattggatggatgttgggctgctctagttggactgggcatttcatcgagcaccttgagtgcgatgaacagtgttttcagagaattttgaatatttttcctagaaaagaatgaatttaaactataaatttgagaaggtttcaccagggtttaaagtatagcaaactctcactactaaaagggtaaactaaggaaataaactaaagtttgaaatttgagagattttgctcaaattcactaaggtttaggttaggggaataattaaagtaggttaaaagaattctaaaggagtaatacttgaaccaataaaataagaataacaaggattcaaatagatttttaaattatattaatctagtcaaaagccagcatgatgcagtcaaaatttagtttaaaatttgaggatgttacaccgccgctgccctagccgaggcccaccgccaccgcccgctcccgttgccgatgccggccaaacaccccccatcagcgccgcccgccatcgacacccctcccctctgccggaactagggagggaaggaaggggaggggagggaagccggatcccgtgcgggaggagggaggccggctgccgtatctgtgcggggacagccgccactgccaggtccgtgcagggacgaccgccgcccaccggatcctgcacctccaccgctgccgcgtggaggaggccgctgcgtgccgccgtcactgttgccgctggcctccggcccacctcgtcatcgtcagcgcccgcctcccgccggcctcccgtcggcgccgccgctcccggcctttgcgccgcccgcctctcaccggcctccatgtcacccaccgccatcgccgtgggccgccgaggagagaggagagaggagtgaggaggagagaagggaggagtgaggagtgaggagaggagaggaagcatgagagagaggactgaggcgtgagagagagcgcacgtgagtgaggggacttagccgcgcggataggggagaggagagaaaaaggaaaatttttaaagtgggtaggagggaaactattttcccgtgcggctctcttaataggtacgcatgggaaaatcgactcattttcgcgtgcggggcatttaagaggacagcat

SEQ ID NO: 29749 - DNA, 2303 bp, Oryza sativa
aattttctcgtgcggtcctcttaaatggaccgcacacgaaaatgagccgattttcccgtgcggaccgagttaccgcccgcacacaatctaaaagggtcgtgtcgacgtttgatgtctcgactacggtatttgcatggcatggggattgttggtactaggatatacgcgagactgaggtaaaagagatggagacagagatttttatacaggttcgggcccctgaattgtcaggtaataaccctacatcctgttggccgaagccggtattgctcttattcatgataatcacaccagtacaatatttggggtagcctatctaactgttgtcgacatggcggtctgacgatctaactcgtagtcgacaacagggtagccttcctcctcgaatccgtgctcggcgagatcagagatagcgctttcgtctctcctgacagtatccggagacaccgtagggtactagccgtgcttatccctgaagtcgatatccagcggcgtgtcttggcgtatgtaggcttctatgttatggcttctatgtcgattgtgttgggtgttgatcctcccccctctcctcctaggggggcttgtatttatacccataggtgtccccttgtccaagtagaactagggaaaccaatatggatacaatccgagtagtccttgtcgtctccatgtagaactctggttgtctttccttatccggaactcctcctatatccgaaggttgcttccatataggacatggtatgtagtgggtcctgccgagatttattcaactgctattaggtatgtggtatccataaccctgacagtaacccccgacttcaatgcaaatgaacgagttcatattctcaaccgcagaccttggaggaactgttattgagcgcacgtgaccgttctcggtgagttcagagataacgttagacttcctttatcagcctcgtgcggacacctaaagggtttatctgagtcaatctccgacgtcaaccaagaaagtacaaagcatacgactaagtctcccgtcttgctgtaatcgagaatttggattgaagtcaagaaattttatctcggcgggcacaccatctcttcattccatattccttgtcgagatccaccaaccgttctcgagtaatcgagtaggtgtagagtctgcgacggagccttgtcaacatttgtcgtactcgccttagtcgatcttggtgtagaaccatagagacatggagtcttcaataatgtcgaatagaattttcctgaaatcaatactcagaaaagaatattagatagaaatagcccccgagcgagtgctcaaagggtaacatgttatagaatgtatggaaaactgaacatgaattaggtttacaaaccagtgttttgtatatgagcgtctactcttttaccgacttcgaccagtcagtttgttgagttatacactctccctagcccccagccttgtcgtcggagaatagttctcggatgataaggctcttagacctttgacctgccttagttgaacaagcactgatcctagcccccagccgtgaagttggaaaatccatttccgattacacggcttggttaatacgcacggcgagaactattacacgaccagatcttacatggtctttcgtctctgaaggatccgacaaagccttatccgctctgggcgtccccagccgaagttcccttaggttcctcagaggctttgtcaagacagcgtaaagggacattaggataggtttcaacgctaggtgtcttttgtggtaagggatctttgggtaaaacacttggcgatattgtgcacctgatatcaactttgttgaggtagaggtagtgggagaatcgctacacctctggtcgaggaccaggtagtagtcgtaactcgaccacttaaagtggaagtagtgggagaaacgctacaccgctggtcgaggaccaggtagtagtcgtaactcgaccactagaagtaaatgtatgagagatcgctacgattaactggttgagaaccagtgagtaggtgtctttcgatcaattggagtcgtggtacgaggatcgctacgctgccggtcgaagactagtcgtagctgttcctcaaccatctgaagtcatggtgcgaggaccgctgcgttattgctgtagtcgtacctcgaccatctgaagttaaggtgcgagagattgctacgttttactagttcgagaaccagcgagcgagtagaattatctctcgaacaccaatggaagttgcggtgcgagagattgctacgtactggttcgaggaccagcgagcgagtagaattatctctcaaaca

SEQ ID NO: 29750 - DNA, 771 bp, Oryza sativa
gtgctttcagaatgtatgtgaaagtgctcttgatgtgggattctgagattcagatagatggtgggggtaaggatgttgttcttgcatctatgcttgaggccagaaaccttgttgtactcagggtatgttgtttgaaaaaaaaaactcactgtcaactttttgttagttgtggaattttaatttttttttaatgtaactactacagcatgggtcagtcatatcttcgaatgctgctttgggagtctatgggcaaggacttcttaacttgactggccctggtgatggaataaaagcacgccgactttttctctctctgttttacaacattgaagtaagattaattgcatccttttgtaacatttgtggtacagtgtatctttatgctatacattaccttttgtatatgctagataatacctctattttatatgcactttccactaggtatccactaagtcatattatgctgggacaattgatatactatattccatcacaaatatattagtttcttataatttcttaaagaccctataacttacaaagtaaatgtttgagctgggttgcattcagagtttcagactgtctgcaccagaggggcatttttaaagctgtttcttaatataatctactccctccatcccaaaatatattaacctagtattacgattagacatctcctattattaagaatgtgattagctagaactaggtgccttttatcgttctgtaagcttggttcgctgttcttttgaactcgcagtgcccttt

SEQ ID NO: 29751 - DNA, 626 bp, Oryza sativa
ggacttggatcgatccatgacacgccatccgataagacccaaatgcttcgtccaaccgagtatgccattgccgaggatatccagaattttttctcttaatcaatttgattaagctcttgttagatgcctcggcttgcccattagcttgtgcataatatggtgaagaattcaacaatttgatacccatgctatcgacaaactgaacaaactcatcggacacgaaaattgaaccttgatcggttgtaatagtttgaggaataccaaaccgatagattatatgttcttgaacaaattgaattgcatccccagaatcaacttttttcaaaggaatcgcctctaccaatttggtgaaataatcagtcgccaccaatataaacttatgtcctttactcgatggtcgacttatcataccgatcatatcaattccccaacctctgaatggccatggcttaataataggattcatagccgacgccggcgctcgctgaattgctccaaacttctgacaatcttgacaccctttataatatttgaaacaatcttccagcattgtcggccaaaaataccttgcacgccgaagtaaccacttcatcttatgagccgattgatgagtaccacaaattcct

SEQ ID NO: 29752 - DNA, 3780 bp, Oryza sativa
  unsure (1)..(3780): unsure at all n locations
cctcttgttgaagatcgaaaccgatgcagctcaacccgaaagcaagaactcatcgaaataaaactaaagcaaaaagggtggcgatgcgccgaaattgtattgaacgtgtgtgttaaaaattacatagggctcggggtctatttatacccgagaattacaagatatgtccataccggacacgactattatctctaacaaactctaagataccataagtccttgcggcagacttttgcccatatttatctgtaaaaaatttatataaaatatcataattaatagatacaattgccttcccaggactttatccatgtatggcaatcatcttgaagtacgtcaactcaaacccgatatcgaatacaagtcgtattgtcggaatcggctgcatcacttaacccagtctgacttggacttaaccgatactaatcgtagccgatctgggctccagccgattcttgctctgttctcgaatcgatctccgccatcggctccacttcgatctaatcctcttttccgatgctgatattaccaaatttggtcgttaacacatgccccccaagtccggaatatttggtaatgtttcggattttcttaacatcgactccgagcaagtttcgcactttaccgttttccgactgttattcaagcgctttaaatactagggaaaattggaaccatgccattataattttgcaaagtttgagatgtgccatnctgaccgacatgtcattgactcatgtgggtcctacatgtcattgagataccgatggcatatctcaaactttgcaaaattataatggcatggtttcaatttaccgatgccgcagagaaatcttacaccattactcccgttttcaccgctcaagtgaaactctgccttctctctctacggcgattcttccaatgcacaaagcgatttccaggcgacttcacccttggcgagatctccgcccgcaacgatgtcgtcctccgccagcccgtctgctgcgccatcagctgagtatgccgaggtaagtccccatcggctagatcccctttctcaacagcagatcgattttccttacctcacattgctcttcttctttccggttgctttggatttgcagcatctttccaacctaattgcgattcccagcttgtcgcatgaaaaccactattttctgggtccaatcggcaatcttgactccactgattttatcattggtgaaaccaataggatcccctttaggctagccaaccctaacctgagccactggaaaaacactttcaagtcttggccatctcttgagaaaaccacccctgagaaaagttggatcacatggtaccagcgcgtatcggctaataagaaagttcactgggatgagattggaatcggccaagcacttgacctaaccatagccaacttagctaaggacgagcccttaatggcagccgcctcttatttttggtccaacaccattaacgccttcttgttcaaccaagggccaatgactccaactttgatcgacattaccatgatcaccggtttagatgtaacttcatcggctaatcccatgagcatgaacaccaaaaatcagtttgatttcagaaccaaaagcataggtggctggtctggctatatggcggcatatatgggccaaggatctgttacccctcgagagcatgtagctttcttgctcatgtggctagaaaagttcctcttctgtggatccagttgtggccctacaaccaactagcaatttgtagccgaagccttagaatcaaagaaagaatttccattaggcaagatcctcctcggttacttataccaaacattgaacaacgcatcggccaaaatagccgttggctcagtagttggtgcaggtagaccatggtggctgctacaaacctggttgaacctgatggttaggaaagttttcaatcagccgcctgtgacagaagctgagttcccattgccagagccgattgtaggagacgatggagaagaacgcactcatcacatatgcacatcatacggagaatatacatccacacaaaccgatgctcgagcgaagctatcggctgagctactcaaggactggttctgcagcttctacgaaggttttaagaaagatgcacgggtgtggttttcttatgaagactcagcagatcttgaacttccatcagactttagatttcaagacattaatcatgaaaaattccaaaaatctagagaagttcttacagcttcaatcagtccatgcatccttcatgtcaacattcaccaagggagaaacatctaagtctcctacgaattttatcacccaatgagctcggccagacaacttggattgtgccaactcccaatcagcttattctttgccgacaagattcagtgccgaggagaaatcacatccactctaatgatggatcggctacttaacctaccaggaccccttctgggcagtattgataatattgagttggcaggatttagaagcaaaaatttcgacagatggtggggtgaatggaagttgcacttgtttcatcaatcagcttcgatgtatatgacagatctattccctgatgtcatacctcaggtaaacctcaccattgttagcttgaataattgttagccgattcattacttgactaatctcttgtttttgttctacagacaatcgactcttcggctaattactcatagactttgtggttgcagaagaagaaaactgctgtgaagaaaaaaccagcagcaacaattgtcaagtcggctccaccagtaagatgtctttaattcttttacttaatcaatctcaaccggctctatataacacttgtctattctacagcctcctcctcctccttctcctcctgtacagcaaccgtcaagtgaccagactccatcggctgtggagagtcatcacatcgaggaggaagaacaaccagctgctcctgctatcccaataagtttttctttgtctcaataattagatcagctacattttacccagctcttactctttccgaaattgtctctgcaggttttagccgatcttttctcttttgacatcagagattatcttgataaggcagaagaagatacttcaagcaaagctttagctcctctatctgacgatgtaaagataacacttgaagatatctctcaacggctagctagaagcctcttctttagatagcttggtagttgactgcggatcaattaggacacggctgcatgaagttcaagctctgattcccgaagaattggccgatgtcctaactccagccgcttatcttgaacaacatcagttcaagctggaaaaagccaagctaagactagccgaacgccgtgagcgcaaggagattgaagccacaatccaggtcaatcggcagcttgtgcatgaagaaaaagtcaaactcgatcagctatctgagggtccgattaagtccaatattgatcggctcgaagctcacaagatcgatctcttggcacagcttgaagaatgcaatgctgaactggatatggagcacaaaaagctagccgatctcccaaaatctatcaaagaacaaaaggcaaggctcaaatcgactatcaagaatgttgctgacctaaccaagtccctgaaggtcatctctggaactgatgctcaagatgcccaagccattgaagaagttgaacaaattaggctatccagcagtacttatctcaataactcttgtgtaataggacctagaaatttttgtaatcggctaagatgccttaatgacccgctgttttaacactacctttgtgccgat

SEQ ID NO: 29753 - DNA, 14327 bp, Oryza sativa
aatatatgtgccccccctaattttataatgtcaacagcattaataaaattatacaagcaacttagggcgatatagtaataccggccattgcacatcggtaaaccataaccgattacaattggaaaaaaaaaactaagggcgatataacaatatcggccatctctaggcgatgaaaattcatcggctatcatgtatcggcaacatcagccgatcatgcattaacccaaacacttaggtaatatttcttcaaatacttgccatttagtaattccgttcttctagagccgattctaacctcccatggcaaaatagcctcatgtccataaacaagcttatagggagggacttggatcgatccatgacacgccatccgataagaccacaatgcttcgtccaaccgagtatgccattgccgaggataatcagaattttttctcttaatcaatttgattaagctcttgttagatgcctcggcttgcccattagcttgtgcataatatggtgaagaattcaacaatttgatacccatgctatcgacaaactgaacaaactcatcggacacgaaaattgaaccttgatcggttgtaatagtttgaggaataccaaaccgatagattatatgttcttgaacaaattgaatgcatccccagaatcaactttttcaaaggaatcgcttctaccaatttggtgaaataatcagtcgccaccaatataaacttatgtcctttactcgatggtcgacttatcataccgatcatatcaattccccaacctctgaatggccatggcttaataataggattcatagccgacgccggcgctcgctgaattgctccaaacttctgacaatcttgacaccctttataatatttgaaacaatcttccagcattgtcggccaaaaataccttgcacgccgaagtaaccacttcatcttatgagccgattgatgagtaccacaaattccttcatgaacttcgccgattgcaactttagcctgatcggcactcaaacacttaagtaacactccatcaatcgtccgatagtaaagctcatcatccaatagagtatacttcaacgccttatatctcaatttcctagaagctgattgagatggattatgtaaatattgatgcacatcatacctccaatcaccggctgttattgctgcaatttcagccttaacatctttgatcatcggcttataccccgatgccccctgggccaaatcattagcttcaatattttgttctcgagacacatgctttaaagtaaccagccgaaattcctgcatcagttcttggcacttctcattataaaccattaatgtatcactcttgcattcatattcccctgccaattgactgattaccagcaaagaatcccccatgatttcaatagcatcggcttcaacttccttgagtaattgcaaccctttgagcactgcctcatactcagcttgattattagtcgcataaggttttatagtataagcaaacttgaaacatgccccccgaggggaaattataaccaagcctataccacaatcatgagtacacaccgatccatcaaagaatgaagtccatggcacaacttcaaccgagccgattgaatcatcacaatgttccacaataaaatcggctatagcttgtcccttaatagccttcggcgactcataccttagatcaaactcagttaaggaaaatatccactttccaacccttccttttaaaatcggagccgataacatgtatttgataacatcggctttgcatatgacagtacactcgttagatagtagataatggctcaaccttgtacatgaaaaatacaaacacaagcacaacttctccataggggaatatctagtttcaacatccaagagccgacgactgagataaaatacaacgcgctcttttccatccaactcctgaatcaagactgagccgattgacttctcaccggccgatagatataatctgaaagatatccctttctgtggaggaatcaaaacaggaggagagctaagatattctttaatatcatccaaagccttctgttgctctgccccccaagtaaactgctgatcagcttttaatctcaacaatggtgtaaaaggctctaaccttccagacagataagaaataaatcttctaacaaaatttatcttgccgttcatctcttgtagttctgtcttgttctccggaggctgaatcttcttgattgcattaacactcctttgagtcacctcaatccccctctcatgaacaagaaatcccaaaaactggccaaccgatacaccaaaagcacattttgtcggattcatcttcaggccatattttctggttctctcgaaaaccttcctcaaatcggctatatggtcctctatttctttagacttaacaaccacatcatcaatgtagacttcaaccaaccagccgattagatcatgatatatgtaattcatggctctttgatatgtagctccagcactcttcaagccgaaagtcatcacaacccattcaaataagccgattgcaccaggacatctaaaagctgtcttatgtatatcttcttcggccataaagatttgattatatcctacgtttccatccatataactcaaaattttgttccctgacgcagcatcaaccagctgatcggctactggcattgggtattcatccttcggggtagctttattcaagtctcagaaatcaatgcacaccctgaccttaccattcttcttaataacaggaactatactagaaacccattcagcatatcggcaaggacgaataaaacaagcatcatataatcgtttaatttcaactttgacaggttcaagcatatcggctttgcatcttctcagaggttgctggtgtggtctaacccctggtttgataggtagccgatgttctacaatcgatcggctgagtccaggcatctcataatactcccaagcgaagcaatctctgaattctttcaacagctctatcaacttggctctaaattctgtagataaattcttacaaataaatgtcggccttggtcgatcacctggacctatatcaatttcttccaaatcatcggccgatataaaaccctgtccttgtttgtcatcgagatcatctaccgtgtccttgatgtagacatttgaaccctccacaacgccctcgaaataacagcttgggttctccatcttcaattggctgtatattagaatcggacacttttagaaaatctctatcccaaacttttccagataaacaatcgagaccatccatctcccaaagagctaaatcagcactagcaacattgactgacctgtcggctggcacaatctcaatcttgtcgtcttgccactgaatcaagcattgatgcatggttgaaggaatgcaacaattagcatgaatccaatcccttccaagcaacaagctataagaaccattcccatcgatgacaaagaatgttgtagggatagttttgttaccaactgtcagttccacattcgaaactcctttggtttctgatagattgccgccaaagtctatgagcaccatgtttgtcttgatgagatcttcaacgtttctgcccaactttctgaatgtagcataaggcatcaagttaacttcagccccaccgtcgaccatcatcttggacattggcttcccattgacataaccatttatatacaatggcttaagatgccgattctccgtcccctctggcttctcaaaaattgcctgctctggcaacaaaatcaatttggctgattcttcttcaacttcatcgacatcggcttgcttggtcccaatctcagcaggcaacgtgaaaaccatgttgaccgaagcagttacgacacttttccccttagctaacctttttgcctcctcagctgtagcttcatcggctacaggaacctgattcttaacacgccactcctgcctcgactttgttttctgcagccgatggttaatttcctgttcaacctcctaaaagcactccctgttcctcaatctttgaacccttctcttttgattcttcgtgaaaataccagaaggacaccactgatttttcctgatttcattgtcctcttggccatgatcttgattcactggacccaatctttgatgaacaggaactcttgtctgccttagccgattgcccctaccatatgatcggcttgaattcttggcaatatcactgcacccaggacagtcttcaatagacggcagccttagaccttcatttcaacaaaatctaaagaactcacaacctcaatgaggatcaaaaccatcgtcatcttcttcatgatgcttctcctgctgcttgtcatacttcctctgatatttgttgataatcttagccgaattcacctgaaaaccccttgcacggcccctatcggctgttcggccagctgtatgcaccatattaacaggaaaaggattgccatcaaccttcatcagcctcttagagtcgtcaaacttgattttgcctccctcaatagccgcttggatctgctgcctgaagaccttgcaatcattagtcgtatgagatccagaattatgccacttgcaatatcttttcttccctaattcttcagccgatggaattgtgtgaccggcaggaagttgaatctgtttctctcggagtagcaagtcgaaaatcttatcagccttggatatatcaaagtcatacctttcctctttacctgagttctttacccattggcatggtataaccttcttactccttacccactcggctgcagctatctcagaatcatcatcttcatcatccgatccatatttataagggcaaacatgattaaccttcctagaatttttcctagcctctgcatacctttgttcatgcaaggctaccttctgtgtaagatgtgacaggctttcaaagtcttcagatgataacttctccctaattggagcaatcataccctgaaaagccaaatcggctaactgggcgtcagttaaactcaagctgtaacacttatttctcatctccctaaatctctggatatactcatgtactggctcatcatgcttttgcttgattgacgtcagatcggacagtttcatctcatgaatcccactatagaaatagctatgaaactgcttttctaaatcagcccaactgttaattgatccatatggtaaagaagaaaaccaagtaaaggttgacccagctaaagacaaccggaataacctaactttcaaagcatccacagccgatgcttcaccacattgagctaaaaatcggctaatgtgctcataagttgatgtactatcttgccatgagaactttgaaaaatctggaactttgaaccggttgggcaaaggaactctctcaaaccacttaggatatggctgccgatatagatttccagcatctttcggcctaagcctgaactgctccttcatgacatctgcaatcaaatcggcccatggccactattgaggtgtcccttgaggttgttgtggcatcggctcgaattggttgtattgaagaacaaattggggctgagccgatcctgcttgctggtattgaacatgaggtgatggtggctgatattgataattcaaattgccccctggtaattttgaagatccggctgaatattacgcaccaaatgttcaggaataactagcggaattaccgtgccatctggttgtacgtgatgtactaaatgctctgggacaacctaatttgtagcatgttgcacaggctgcccaccaggtgttgcaaaccctgccgatgaattcattgaaccttgctgttgaatcggctggacaacctgttgccttaatggagtttgctgaaccggtcgtacaactcattgagctaggggtgtttgctgcactggttgcacaatttgttggatttggggtgtttgctgaatcggctgttgcgggttggatcaacagtgttttggggaggcaaaaacatagatgcaacctggtcttgtgttagccgatccacattttgtccagcgtgttgtggctgttctcttatcagcaatcggggattgaccaattggcctggagccgaaggtggtacagtaggtgcgggagccgatgctggtgccatcggctgagccgatggtgcaataaaaggagctgcttgaacggatggatgactgttggtgatcaaaggccgataatttggaaatactcctccttgcaaataaactgggcctgcagcttggtattcagctattgtaccatcgaccattgacttcatcatatttgacaatgtattgactaacatcccagattgattgatcaaagcattgtgcacggcatagtcaacccgatcttggaagttattgaaaaactcctatgatgcattgccatcctgataaaaatttcctccacgcaacccctaagcaacatcaccttgaactccatgcaccccatcaccttgaaccccatggactccttgagaattgtcacgttgacctcctagagaaccgtctgtagcaccattgtcactcggttgagccataccgtccggagcttgtttaccatcttcacctttagaagaactggtcccaggatcatcggcaactacctttactttatacttctgaaccactgttcccttgctagtctgcatgaatgagttcaagaattgatcccgtgcctgctgcatcatcgcgtcgaaatctttcttctgatcaggtgtgaatttttctggatcgatgggcacgacgtttccttcattgacgtcggtcaatcccaacttctggatcttttccttaacagtgcttggactagccgaggatggcgatagcggtggtttctcggccatgaggaagaattgcttgctgacttcttcttggtcccactgggcatgccaaaagcgtgttgacgtaaaacacgaggcctgcgagatctgcttaactccagtgcaggtccaaagctcgccttcgggtatgttagcgtgccagttgatttgatcctgcaatcaacaagaaatagagacaaagaaaccgcggttaaacctataaatgatagacgatcggctaagtgccgatgacatatcatttatctttgagccgatgtcatatgtaaatctatcggcggttataaatagataataaagaactaaacctactcgatcgactgtagatatcaacaatatataattttatatcgatatatacataaatcgagtgattgggatagatcggtcgccatgccaagacagtataaatcacttagattgaaatatatattaataacagaactatatatgtttatagcatagccgatcggatagatctagcatgtatcggctaatactccaatacaacactatgttaagatgttgaaacaaacagaatataccaaacataagcttaatatacttagatgcaataatatcctgacataaagggcagatttaacatgtcaatgaaacatataaagcaaatataattaaatcagataagatcagctgaaactccgatactaccctaattggcaaccagaaggcaggctagatattgatattctaagcatgacttaatagatcaaactcaactgatacagcattacgtatgaaaagaagaacaatatctagacaatcaagtcgctggaagtttcatatagtggtgggtatcttatataatctaaaccaacatcgatatttaacctaatcggctgccctctattaacagatgttagccgattgtaggctagatggcgatatcgttagagattatgtaagatatatgataactcggcaaattacataaacaaaattagagtatcataaagatggaaggactaatcccgagaacacaagccgacataacaagttttacctcttgttgaagatcgaaaccgatgcaactcaacccgaaagcaagaaatcatcgaaataaaactaaagcaaaaagggtggcgatgcgccgaaattgtattgaacgtgtgtgttaaaaattacatagggctcggggtctatttatacccgagaattacaagatatgtccataccggacacgactattatctctaacaaactctaagataccataagtctttgtggcagacttttgcccatatttatctctaagaaatttacataaaatatcctaattaatagatacaattgccttcccaggactttatccatgtatggcaatcatcttgaagtacgtcaactcaaacccgatatcgaatacaagtcgtattgtcagaatcggctgcatcacttaacccagtcttactcggacttaaccgattctaatcgtagccgatctaggctccagccgattcttgctctattctcgaatcgatctccgccttcggctccacttcgatctaatcctcttttccgatgctgatattactaaatttggtcgttaacagctttgtccaagccatccactctctcttgaagttgagcatttgccacctcaagattagcgtgagactctttggtttgcttgtaaagccgtaccaaagcctcatttttctctctccttagcaagctcacccttgagttcatgagaccgctctttctcacgaatgagtaatgcctcttgcctcctctcaagggttgcatactgatcatcaattctcccaagcaactcactcaagtgtggtagagactccttggttatggacttgaacaattcctcatccataacctcatcctcaacatcatcctcctcatcacaaacaagatcaacattgattgacttgagggaggaaggtaccttaggctcttttgccatgaggcaaatgggagcatcctcatcacttgagtagttgaagagtcttggtggtgatgaaggcttgacggcaaacgtggcaactccttcatcacttgagcttgactcggagtcggagccgaaaatcatcccaaggtgagcttggccataacgttcccgcttgctatgcttgtgcttctccttcttctcatccttcttttcgcccttcttatcttccttgatgtgggaaccatccttgaggtaagggcaatccgcaatgaattgcccgggctctttgcacacgtagcacacccttgcagaatgtcttccacttgacttgttggagtggtgcttggaagaacttcccttgaagaagcagcttcacctcatcaacttgccgaacttcttgacgaagagagccatttcttcatcatcgatctcctccttgctcttgctcttgcggctctattcttcttcttcctttgccttcaatgccaaatcttccttcttgatgcttgtcgttgagctttggttgatgtattggatgacctccttggactcttgcacaagcatgtcatgggctaggatgcgcccgagcaaatcatgaggtgtgagagtcttgttgtccagacgctcacgaatgatagttactaaggtagagttccttggagtgattgctcgaaccatcttcttgaccacaacctcatcggtcatgtccttggagccaagtcccttgatctcattgacgatcttgctcaaacggtcatacatgtcgcttgggctctctccatccaacatcacaaacctctcaaattgccctttgaggatctccaccttggactcgcgaacactatccgtgccttcatgcaaattccgaagcgtgtcccaaatcaccttggcactctcaataccgtccacgcggttgaactcacttccactcaaggcgctaagtattgcattagcggcttgagcgttcttgtgctcgttctcgtcatcctccttggtgggatcctcaggtttttgcaaaacatagcccttttcgactattctccaaatagatgggttaataaacttcaaatgcatcttcatcttatgtttccaagcggcatagtccgtgccgttgaagtacgaagctttgccgctataggtactcacataagaggtagatgtggatggatagtcataaggaaacgtagatcccttatcaccatctttgccatcccccgtttggcccgacatgatctctccaagcggttaagcctaattagtagattaggctctgataccaattgaaagggtcaattaggcctagagggggtgaataggctaatttaaaactttatgcggaagctcacactgagttagggtcggaaagtctgatccacagtcagaccatctgaaaatatcagatagtctgatgttggatcagactgtctgatccactaaagaaacacaacaagtagatctagtgcacaaacaggagtatagcgcaaacagcgactagatctatagcggcacaattaagcaaagctaaagaagggatgaagagatatcaccaacaatgaagttcaccgagttgttcccggagttcaaatccttgaggggattctactctccgttgaggagctcactaagagcggggtctttgctaaccctttcctcaagaggttgcactaagcactcctccttccactaaggggtatctctttccttgcggaggcgagatccggccttcacaaacttctcccggccaaccacacgtagatcggtggctcgggagtaacacctagccgtctaggagtcctcaacctccaagagtaacaaacaccacacaactcttggtcaaaccctagtgctcaagatcgagtgaaacagacagtaggccctcaaacaccaaatccacaaccaccaagatccaccacacaaagaacgaggagggatttgagagagggagaaagagctcaaatatccaaagcaccttagcaccaagctcaacccaaagtgaatgtgaatgaatgagttgggtaaccctagaaaagggttaggtggggggtatttatagatcccccaaaatgtggccgttgggagaaaatattttcatcccacctcggaaagtccgaggtgacatcggatagtccgatgtttttgacccccaagcacgccagagacagagaacgaaattctggagaatttcggacaatccgatcgatcggatagtctgatgttatattggatattccgttatttttgaatcatgaatttcatcctctcacagagactcaagttccattgaatttcagagtctctgggtcatccgatactccgatcacatcggatagtctgatttgaaaaatcactcaagaggaataaaaagcaattcaagacagagagtgaagttctgagaaagttcagacagtccgatgtatcggacaatccgaccttatatcggattgtccgatattttttagccaacactcagaccaaagacagagggaaaagttctaagaaatttcggatagtctgagcatcggatagtcttatcaggatcggatagtccgacaggaataaaataggaacagtccaaataaaggattttgagcactagtgttctaccaattatatgcatgtggtagccctcttaatagtacggcatcctaatactcaagaacacaagatatacatggaatagaagataattaccacaaaagatgccgcaaagcttgtaaattcaagttccactcctttttatccttgcatccatctcaacaaagagcattagtgaacctctaattgtgttgttattaacaccaaaataaatgaggggtcctagatgcactttcagggtgaataggctttcctgaaaatcacaaacaaatcgcagcggtaaaatttaacaggcccggaacctcctggtgtagaacaccggaatttccggtctgctcagacaatccggaacttccggtgttcttgtaccggaacttccaggcaatagaaaaacctgggaaaaactaacagggactaaagctaaaattcacgagatgaatcacaggataactgcagtagcacaatcacatgcacatgcacagaaacatcacagagtggacaaagatgattttttttcccgaagttcgaatcttgcaatcctactctccgttgaggtgctccaaagagccggagctcgattaaccccttgcctcacttgtgcaaaatccttagaggaaatccacagccttcaaccccaacacctataggttgttttctagaattgagtgaccaccaagatccaactcaacctccttctagaaaacaccacaagtgtgagtagctctactaggaaaacctctaggacttcagcacaaggttctttactcacttacctcattttcttacggaggtgaggaataccttcacaaactttcccgggacatccacaattgcaaggaagctcgcgggcgacacctaaccgtctaggagaagatctccaagagtaataagcaccgagatgacagcccacgagataccctaagtgctcacaccaatcttagccttcaaaccttctccaactcttctccttcaccctcaaaatctcactctcttacaagaatggctcaagattgggtggaggaagcaaagaagctcatgggagaggctagcaacagctatggagtggaaaagcaaaactgaaatggccaaagggtgagctggggacgatctagatatatataacggctaggtgacgtcatctagccgttactcacatttttgaactgggaagggtccggaacttcctgaccactggaagttccggacaacacttaggaaaaatttcacctctcaaaggtccagaacttctgggtccaaggaccggaactttcggccagccttctctgcccgaggaagggctatttccaaaaatagctcccaaaaatatttcaacacttgaatctccctaagagcacttgttgtatcccagaaccacacctggaacccctcttaatagtacggtttttcctaaaactcgaatgcaaaaattaaactatcctatgcgcccttcgagttccaattccgcttgaatatttgttgtggggggttctccaagcatctcttgatcacatacaatcatcttgggactaaacacctgagtatgctcaataatactcattagtcccttaaccctattcgtcattaatcaccaaaacccactagggggataaatgcaacttcaacaccaagctgtgagatcgattaggtcgggtggttggggtggaacgtgaatcctgtggtggaaaactccccatacttgattggagaaggaacacgccacaagtaggtgatagcatatcaacggctccatcatgcaaaggggacaaactagctaacttggcaatccccatcaatctaggttggctgacatcaagcaactcttccatgtggcaaggtacatgaacatcttacagcgacctagaatcttagcccccccaaatcagctcagcgcaacccacgaggactttccccaagaagtacagaatagctatcgttaaatgttagcttcaacatcggaaacttgatcccacaactgaagatattctagtagtgtccacatcaaaagtctgtctttaattacacgcacccacgtgtaatcgtcgagagccgctaccaccgtgtgcatgctccttagtacaaaagaaaagagcacctttctgaaactcattcttcatacaactaagggtgtgttcgggagggagagttcggaacttctcctccctgcaaggaaaatgagatcgctcattagcgcatggttaattaagtatgtcggaggaatggagatgcggtcgccatctccccgggtcctcagggctttgacaaattaagtcaacaagagacatacaagatctacatctacaagagacgtacaagatttacatattcaagagatgtacaagatttatatcttcaagagacttataagattacatcttcaaggcgtctagaagagtgaggaaacataagagatctatatcttcaaggtgttgaagacggggcgtaccacttagcacgcctcaatcaggttatatccatcaagaactccttcaatcattgacatcttggagaagcttgtccgagtcaagaagaaaatctataaaacagcgatggagttgatgcgagcgccctgggcatgttggatgcccccggcatgcactatgtcctgaaaacacgatagtccctggcacacccccttgatttgggcatgccacaagccctgggctcatcaccgagggctttgcctcctgccctgggctcgccctgggtttctctgtatacctaggatggcctagtggtttaactgcagctaacctcatgattatcattataggggctacccgcatctgcatcttggtggtggcaccgtatgtagcctcctacatgccacatcaaccaaaggagtaagagagaggcagcgtgtcacgtcctcaggcgtccaccgcccaatattccatcagctgtcccatgggctgacccatgggctcatgatataactagatggaaacttcttcaaactcagcaccatctaacagttgtgggagaact

SEQ ID NO: 29754 - DNA, 1726 bp, Oryza sativa
agcgccctgggcatgttggatgcccccggcatgcactatgtcctgaaaacaccatagtccctggcacacccccttgatttgggcatgccacaagccctgggctcatcaccgagggctttgcctcctgccctgggctcgccctgggtttctctgtatacctaggatggcctagtggtttaactgcagctaacctcatgattatcattataggggctacccgcatctgcatcttggtggtggcaccgtatgtagcctcctacatgccacatcaaccaaaggagtaagagagaggcagcgtgtcacgtcctcaggcgtccaccgcccaatattccatcagctgtcccatgggctgacccatgggctcatgatataactagatggaaacttcttcaaactcagcaccatctaacagttgtgggagaactgacacattcgcctggcatgtcaggagggacattgacaagactaagtatatcgatttcgttggagtgggccctgcttctacatacatgtattggtatggtggactcccattcgcctgtaaaaggaggatccatgccaacgaataaggggttcgattccttagcaattagatctcgtaaaagttaatttcacaattcttagttaatcatataatcattattcgcatatgtatttagcatatgattaatattttaatattagcccatacaatacacgggttgatgactagtaatcacaatgcagcaaaatttttccacaaaatcaatgaggatgaaagtggtaaatgtttaaattaaaaacaagttatggatggattaattgttaaaatagaattttaaactaaaatagaatgatgccccgtcattgcgtattttttttcttacaattctagcaaatgtttcaacggcaataatttgtttcacatagatttcagacttggacataatataatccctaattaatccagacgacactcctattagtctctaggtgatcaggtacacagagatatcggcgaagggcaccaaatcagcatggagcagcttttgctagttgacaagggcgcatgtcctccggatctccccctggctgccggtgagcacgcccaccctgcccatgttcaccattgacacgccaaagtcccggaggaagctctcctccgatctcatgtactcgtagacgagccccctggtaacgtcgttccggagcagcgcctcgtcggagtggaacatgcccttccgctcggcgacgaggccgtagtaggtggcgtcgaaggtggtcgagctgccgggcaccatctccagctgggtggtgttgtccttggccgacctgcactgccgccgcagccccgcggcgtacgtcgcatccagggtcgggtccgtgttgtggtgcgccgtgaagttgcgcagacgcttcgctatcgatgggcagtgcgtgttgcccagcgcgtgggcgcctgaaagttcaaagtgtcatgcataagaatataaacaaagttaaataatctttaagaatgctagggtacactggtagagaaaccatctttggtcggtcgacccatatccacaatagtcccggttccattaaaaaccgggactaaaaatgatttttagtcccggttaataagagaagatctttagtcccggttgttgttaccaaccgggactaaaaatcatctttactcccggttggtaactccaaccgggactaaagttcatttttagtcccggttgattccatgtca

SEQ ID NO: 29755 - DNA, 28073 bp, Oryza sativa
  unsure (1)..(28073): unsure at all n locations
cgcctcgctgtcgacgggtacgtcgcctaccactgaaagcacaacaccgttaaatcctagaaaattcgctctcatagagagtcgaacctagaaccttagatgctactgaggctctcgtaaacactaggctacagactacaggccctttcgcaaatcgtaatagtttctcctacacgcgacatcaataggccagtagtaaaagagacatgtgacttcatgctctacaggccctttctcaaatcgtaatagtttctcctacacgcgacatcaataggccagtagtaaaagagacatgtgacttcatgctctgtctgatactagctttgacggtcgacattgtcatacaaaactacaatgggtttcaagtagggcatcatatcgacctcatgacaaaaattacatatacatggttgttattcaaaatttttaactgaacagggggtttagacctgaaataattcaatcaaaaatattggaaagtaattaaatacatatcaccagtactgaccacttcgttgtcaatttgttacattttggaatatttcactcttagtataggccctattcatgttgccagacaacggagcagctgcaaccactatgagtacacaggcacaagtaagctacctgactgctgcagccattgccgcagaactggatgcccaacaaccgcgtaaaaaactactcaatccattttatattataagacgttttgatttttttaatcatttttctaaaatttaactaagtttgtagagaaatatagcaacatctataacacaaaataaattagttttactaaatttaatattgtatatattacgataatatgtttgttttggattaaaaatattgctatatttttctaaaaaaattcagtggtgtgaaaacggtatcattatgttttcactgagatgatgtcatactatctcctttatatttttttccttgcatatttgtataagtaatgattggaagtgcacgggtgatatatcggcaactacatgttgtcctgaacaggaaactactcatggtctaattttgccactattggaatgctatcgtggtgaatccactagaatcttttaatgttttcacatgaagccaattcaaaatttttactatatatgttatttcagaccgagtatagttctaattttttttttcaaacttccaactttttcatcacatcaaaactttcctacacatacaaacttcaaacttttccgtcatatagttccaattttaacgaaacttccaattttgacgtgaactaaacatatcctcaatatctcatcaggtgaagtttgaacacttttggtctgcaagaaactgtatgtgtgacgcctgaaagctaggctgaatggagattaaatatgtggctacgtacctgacagaacagccagatccttgaggctgaggcccttggaagcaaacctggtgatgagcctgcgaattccatcgaaggagtcgggcaagtaggtcaccgcctccttggcgctcgacacgcggccgtctcgccggccggtctccacctcgtacaagttgccgtccttgctccaccgtccttgcctcaccgcctttgttgcctaagcacaaagacttgcatcttagagtgattttacagtttctgataaggtattgagagttacaatatttttttaagtgtaaaatgatctctcacgatatctccagtactaaaagagatcaaactttatattaaaaattatattaaaattgtgataaaatttttcaacatattaaggtatgagatggaattattaattaataatcttcattaattactactccctccgtcccaaaataagtccagttttatactattaatctccaacattcgattgttcttcttatttaaaaatattttatgattagtattttttattattattaggtgataaaacatactccatcgtttcacaatgtaagtcattctagcatttgtcatattcatattaatattaatatatatttagattcattaacatcaatataaatataggaaatattaaaatgacttacattggaaagcggagggtaaatactagtactttatgtgtgactaatttttttaataagacggatgattaaacattagacacggatactcacgactatatttattttaaaacggaggtactagtgattaccaaggagacggcgtctctggcagcaatggcgaggatgtcggcgcaggagacggtagcggggcacttgtgctccagcttctccttgattgcgtcgatgacgtcgtacgcgtccagcgtgtgattcggcttggcgtccttctccgccgtgttcttcttggtcgagttgatcagcaccgatccttcacacccctgtacgttcatcgaccaattccatggtaacatatcgatcaaacaatcatggtcttgaaagaatgctaatttgcacattttaatttgtacagaccacttcatctacggcattgcggatgtttgtcttgtggaaagaaaaaatttggcacttgtcagggcttgtgagtggattactagtgtttttttatgattattttatacagaaagtttcagagggtcaccactttagtttgtggacgactgatgatggactgcatctcatcattttagaccggctttggatgccatttcactcaaaaaggcaatcaaacaggatgcagaaaaaaggcccattttgaaggaatctagctaacccacatatcttatcctctcctcctttttactttttcaccttcactagctcacagttaaaccctttttttttttagctttgaataatgaaacctttgaatcagtagtaaaagagtaaagatgacatttggacttcaatctataaaaagaaaataacgagacaagtagtaataatgcattttagtttaccctgacgaaacaatcgtggaagtgaagcctgagcagcggcgcggtggtggtcgggtcgtcatggacagccgccgccaccaccttgcgcactatcttctccgcctccgggcacgactccttgtagaacccgaccgtcagcccaccgccgccgccgtatccatggacgacgggaacagccgccgccaccaccagcagcagagaagaaagcaagaaccaccggcgaggaggaggaagaagcacgcgcactgccatggcagtacactacactacactacgctgcaggtagcttagcgctctagcaatgcttaagtgcagctggcttgtcagagagaaaacacttgttaaaaatggagtgccgtgtgtgtgtttgagcaggcagcgagtgagtgggacgtgtgcctgtgtgtatgtatataaagggccaaggagtcgaggagtgtgtgtatatgtgtggatgccatctacggagtacgagatcttggggagtgttatataaatggagttgctgtttccccggctgtcatgggcatgatgccatgtgattaggcgtgggtttccgggattttagcaccgtgacagcgtggtagagatgttatctgaaatgtaattaaactctagcagggcgcgcgatcgacctatgctgattaacccagtgctagttgttgccatcagaatatcctggtgatcgcggatcagatgctgacagacgggccaaattaccctctccgggtttttcttttcttttggatttgctaaaaaaaaaaccttgacagtttctccctcaaaactttccgtttgtgaaaccgttagatcgtgtggagatttgtttgagggagtgaagatttttttttttttgacatagctgcacaaggcggactttcgtacgagaagccagattgctaaggggcgatcgattgccccagcgatcatattcgtatcgccctctccctccacctgttttttttttggcaccacattacttttttattttagtaaatttatgtacctaaagtttatacacctcaagtttacacatccaaagtttagaaacctaaagtttataaatcaaaagtttatatatccgattcaaatttgaatttgaattcaaatattttttatatatagtatttctatacatctaaagtttatagacccaaagtttataagtcaaaagtttacatccccgattcaaatttgaatttgaattatatccgattcaaatttgaatttgaattcaaatattttttatatatggtatttctatacatctaatgtttatacacctaaagtttatagacccaaagtttataagtcaaaagtttacaaatccgtttcaaatttgaatttgaattcaaatatttttttatatagtatttctataaataaatttttcaactttatattttttattgttttttaaattacgtagttcctacgaggtgatctcgtagttcctacggggtggagataattggggtgtagtaggaagagaagaagggaaggaggaaggggggagaggagagtataggggtggatggggatcgatcgcttggggtcttttttaaaaaaaagaccacataggttgtcttttttaaaaaaagaccacataggtggtctcatagcataacatagcacataggcatgctagccaccgtgcctatgtggtcttttttattttattctatctctattttttaaatatatgaagccattaattttttacaaccattcgtcttattcaaatgaataatatttaagtaaatatcttttcttttgttgtggcttgatttatcaataaaggaactttaaacattacttatatttttttatatttgcacaaatttttgaataagttgaatgatctaagtttgtaataaaagtcaacaatgctatgtattaaaaaaacatagggagtagtaatttatataagttaagtatatcgcagtgtaattataatgtacatcctccattcaaaagtcttaaggatattttatttattatttttcaaaatgagataggtgtgtgtatatatagtcttcctgcatctaagacttacataaaaatattgtgtttttgttttgtagtgctagattaaattattgattggaaatcgaaacccgaataaccatcttaatatttaatactcctcattggtttgcatgcaggcgtataatccttggtactttttttttctcaatgaaaaaagtaatatgccttagatttggatggagggagtaattgtcgaatgttctatggcaactattttttttcatattggtcatctttaacttttggataagactatttatcttataaaaaactaatcccttcgttttatattataagtcacttttactttttttttccaaatcaaacatttttaagtttgatcaaatttataaaaaaatatataaatatttccaacacaacacaatcagattatcaaaatgtattaaatattacttttaataaaactaatttggtgttgtagatgtcgctaaatttttctataacattgattaaacttaaagaaatttgagaagaaaaaaaataaaacgacttataatataaaaggagggagtatgtaattatcatttgttttgccctgatttattttaccattaaaggcaatgtcttatatatttttttaatatttgcacaaaattttacaaacttggtgtttcataatttatttttattttatatatgaaaaagtactgatcaaagcttggtacaactcgatcatgaactcaatgtgaaaagtacgaccagcgtgcgaacgagaagagagtaccacaacggtagctgcggtgaatgttgcgctgtgggatattctgttatagttaatcgtgtttactgcatttcctgcggattaattaattggttgatgattgattattaaattagctagtcgtataacagagcagccagtcagtagtagatggaattacgatgcgatcggatttcaagcatacaggaccccaagtgcggaccacgtggggtcggggagattatttgctttcttttctatgcggcctgatggcccaatcttctgccgtatgtcctggttgatcttatctatagcttgctagtttcattagcttagaggcgactttgaccaaagcttttactcgccaatcagccatacactaattaagctactcttgatattacccttcaaattaaggatcaaggcatgcatgttccggtgttcattatgacaagtaccacggtggggtgtgtcacatgcatgttttgcagctggagatgtatagaaaaccgtgtattactacttgagcgaggtacaaaaggtcaccgtcgtacgtcggcaagctcgagcggcctcaactgttatgccctcgggtgggtcggcacacgggccaaactcttgctgaagtgcttctccaagtcatgctctactgccgaccgtgctcggctgctcgccttgcattgtgccctcatttcagccgccacgcctgccgatatggcgatatctgctactgctactggtactgcttttattttcctcctttgtcctcttgctatttattttttggtcatggctcacaattcctgccggttaggattgttttctacgcgcaccctctattataataaaataaatcaatatatataatatttttagattcgcaatcattttagtagttaggaattgatttattttaagcaagaagcaagcaggaactatgattgatccttagaactcatatgtgtttggttttataggataggatggatcgagcccacttttgagggtatttggtgtgtctatcatctaaaaataatattcctttaaaatttatgttggcatttttcccaatcaaagctagagttctctcgtgttgatatgtgggccatgtcttgaaaactaggaccattacacccctcatgccgaactgatagttaggatcattccatccaaatacatggatgagtctaacatatcctatttcatcccgaaaccaaacacacactagaaggagaggcaaagcttttaaggctaatggggactatagcttctctagcttttgaaaattagaataaagtccttgttattatttcatgactccaatgatattgtagtttagctagtttgctcttcttttatacttgatgtgatatactccaaatcaatacatgtaaataggagtagagccattacccatatcaagtccgaacctgtataaaatttttatcccatgtcctctttattccatattcatgtatgccatgtataccttgttatcagtagtaccttacgtccctaaatactgtggtagagtataacccgttgaaagtgattagctagatagagggcctgtactccaaggtattatcaagatgacttcgagacactggcggagggctcggtagggcgaggtgtggcgttcgccatacctcgcgccgcccgctaaccccccaccccctcatgtcacagagcggcaaccgccagccggaaaggacgcagagagcgcggcgactctggaggaagacgagcgatgaccgagacacgtcgtgggcgtgtccgcgcgtggccgtgctgggcctctcgttggtagctagtaggcccattgtgttcaggcctgccagtggtttcaaatccacctcgcacctacaccaacccaaaagcaactacactagcccacccaatccaaaccaacccacaaaataattttctaaaccccacccaaccccacctgcacattctatccacccgatccaatccaacccgcaagttgttccccacaggcaacccatggattctacccatggctaaccaaaacacacaagcacacaacagttggctaacaaaaacacatagtgacacagccacacagtaacacaggcacaactgaaattagtcaggaaatttgtacaacactttgtcaatattacacgaatagttagtttaacatgtagaagcatgctacttccgcagctcaaatcagttagcatgcaagccatgatcctctgatgtgattgcttgatgtggttatccccacaaccaaaaagtggtactactctcttgaagctcatccatctcaggtgctttgatctgtaatagcatcaagagagtagaaccaaaaggttacagtaaagattcaataatactgataccacaaaatttaagtgtaaaatatcaacttagagctaaaatccatcatacaaaaaactactaccttttcagaccatcatactttagaataagttagcgtacaaaaataaatgatatggccacacatacaagcatcagctaccaactgcattacagttttcaagttaatttgagaataatcatgcaaactatagagaccaagttttcttacaagctaagaaagaaacaatgttactttgttagtctagctagtagtagataggcaaaaaaatatacatttaattaccttgtttcttcggtttaaataaccaatctttagcacaaactagtgcctcaagcatatccggtgtcaaggaacttcttgtgtctccaagtatccttcctccacaactaaaagctgattccgaaggcacaatgctgagtggaattgctagaaaatcccaagtcataattgccagtacaggaaaccttttagcatttctcttccaccaagccaaaacatcgaaatctttactatcatcctcacaaacttcttctagatatgtctcaatctcagacttatgtaatcgtgttcggtttgacttgaaaatagcaaactcttggtcaagttttcttttgcctagaactggcgagcctacaccactagcttctccttgcccagaatgtgataggcaggatacaccccttctccttgcaattccttcatatactctaaagtaagacttcatccactctataacagaatccactttagtttcagcttcattcatattgggagacaccttggcataaaagaattccaaataatctcgttttcttcttggatctaagacagtgctaatgacaagtgccaaattaaaattgtttggcaatttttcatcccaatacttagcaaacttcatatgcatagcactagccaattgagtcaaaatactagttgtttgcgaatcaaaatcacttaaagcatggcgaatgcagagaaccaagtgcaagaatgagtgtgctgttggtttcctgtcagctgacacaagtctagtagcctcttcaaaggctttaagaaactcacaaattgattcagcagtcagccactcttcgtcagatggtgcaacctcaccattttcattggcataactattaaggacagctctatagaccaatgcttctaaaaccattttgaaagttgtgttccaacggttaggtacatcaacagttaaaccaaattttgaacaaaggcatgaactgttggcaattgaattgaacgcttggatacgtgaggctgaattttctatgtatttcaagagctcatgtatcttatgtattgccccacgaattaacctcattccatcttgaaccaataaattgaggatgtgtgcgcagcacctaacatgaaaatgtctaccttcaaataacaactcattcttctgatttttcaccatttcctcacaagcagccgtgttattactagcattatccaaagttaaagtaaatagtttgcccctcaagccccaatcagtcaaacacctcatcatggcttcttctatagcaaagctagtatgtggatacttcacaggcttcaagcttatgattttctttttcagactgaattctgcatcaatataatgtgccgtgacaaccatatatcttaagttttgatttgaggtccacatatctgatgttaggcacacacgtgaatcaatattttgtaattcatcatgcagttcttgtttcatcctaatgtacaggtgtaaatcttatcacgaattgtttggcgaccaacaactttaaaggttggttgcatggacttccatccactcagcaaagtaaggatcttcgatttttcgaaatggtatctcgtcatggatgaaaaattttatcatcaattcttcactccttctaggataaaacacaaaattttccacgggttgtttccgagcaattgctatgaacctatttctaacttcaacctcaactagtggacaagagtcgcaaacatggtttatgagatgactagttcctgattttctagttgctgtcaacattaaccgacaatatttgcactgtgctttggggacaccatctaccataacaagctcctgctcaaaatgttcccacacctttgctcttttacgtggttgtaaagataattcatgactagaactattgccagttgaactttctgaattgtgtgtagacatgtttaataagcctgcttgtgacaatattaaaaaattaacattcaatctgctacaaacagccaaattaatatgaatctaattcaacccatatttgtaatcttgtagaatctactatcaatctgaggtatttccaaatcagtattaccaggcataagtcataagtcctgaaaaggagagaatacttgctggatcttgaagggagagagtattgctagatcttgtgggggccggggcagggacacacggcaacagatcttgcatggaggagagcagcagcttcttggcgccgacggagcggagatggcgatctggcggagcggtgccgggagatgacgccggagcggaggacgagcgggaggccgggagccagtggagctgcagccgcttgcagccaggtcgaagtggcgagcagcagcaacttcttggcgccgatgaagaggagatcgtgatctggcggaggcgcggagcacgccgggagatgacgctgaagcggaggacgagcgggagccggtggggccgcagccgtttgcagtgaggacggagtggtgaggaaccaccacagcagcgaccccgtcggtggcaatggtggcagcggcggcggaggagaaggagcggaggacccaagaagaagaatgagttagcgtgtggattcagtccatggattagtcccgtggattcagtccatgaatcagttattttactcagcctgcatccaccccaaaccaatccacatgttttgtaagctcagtttaattgggttcaaaatgacattttaggttgtttcaatttaataaaaggattaaaatgaggatctagtccacttaatctaaataaagtcagctcattggtaggtcgaattgtgcttgttctgtgtgantgtaaatgtggaaccccatctcctccacttccatcgggcaggcagggcagcatggaggccggagggtacaacagcaaaagcaagccaagcgctcaaccagccatcactctagccactcattgctatttatcttatcaacctcaaatatactatactaattaatctttgctatttgttttgcatattctacatatatctaatatctttcctcactcactagttcctacatgtatgcaatgtatcgttgaaagtctgaattttgaggagttgaggcattttttaagtatctactcttctatttgtacttgtttgcaaatggatgatgaattgtgaacttgtgattagggcttgttattaagataatgttgtgtcgtacaacatcgtgcattgagattgttttttcctatatttttgatatgtgctaacttttgctgtggcccacctaaattttttttcattcttccgcacttgcttcgaaaggaagttttttccaatgaaggttttatgatcgctctgatcagggagatacaccccaatcgatgttcaccctcctttggatcggcccgtaactttccaagtctactcagcatcgatgctcccgatcaattatcccactgttgggaggaccatgtcagatcgacccaatcagcttactcttgtcccaaaagtggtggtgtccaattcataggacatggtaccactccttcattgaatgtaagtttttttcacagggtagcagccaacaagccgttgttttatattctggtcgagttcaaggtgtttctcagataggtgccaagtaaaccacaccctaccgaagcttttgagggccaggaactttagtttagtattctcactactacgaaaaccatttttcgtggcggccattttggatttttgctggcggaatttgcagccgccacaaagcaaagaccagtgaaaatcaagatcttcgctagcggttattgaccaccagcaaaaatctattttcgctggcgttggcttaagccagccgccagcaaaaatccattttcgctggcgttggcttaagacggcgctggcggttgtgttaaatcgaaaatacccatgcagctgcagagcccgccagcaaaaatacacatgaagccccatgttttgattcattaaatttcaaaattcaaatccacatctagatgctcatttccaaattcaaacacgaatttacacatcatttactcatcatcatcagcacagatcaaacatcatttacacagatcaaaacatgtgcatcatctggaacaacatgcaaaaaaaaagagaaaaaaaaatcaaatccagccgcgggagcacggtcgacggcgtcgaggtcggtgccgccctccccgtggtccagcggcggcggatccggcctcccggtggcccgacggcggcggatcgggcctccccacggcacggcggcggcggatccgccctccccgcggcctagcggtggcggatccgccctccccgtgagcagccgcctactcccgagcgccgccgcgttcgcgcccgagtcgccactgcccgcgcccgagctcgccgccgccttcgccgcgcactccatgttgggagatagggagctggaagaggaagagaagagggtcggagcggcggtcatatgcggcggtggagctgcggtgatggcagccggcggtggtagggaggcgacgagctggcgcggtggagaagggagggaggagagacggagagagacgggaagggaggagagacgggagagacggtggaaaagggataaagatgggactggtgggtgggcggtggattttattagcctcgaattttttttagcggtctttcttacctaccaccagcgaaaacgtgatttttcgctggcggacacttaagaggtccgcctcaaaaaatagagtatttttcatggcgaacctcttagcgtggccgctagcaaaaatcggttttcgctggtggtccatggccccccacccctcgatatgtttttgctggcggttttcgcgtatgcccgcaagcgaaaataataggccaacgccatgaaaaatcgtttttctagtagtgtctagtgctaagtggagtagaatagaatagctctcgttgtcctcggagtctttggaggaattcgggtatggctctagtagcttttcttatttcttttgtaagactttcggaagtaatgaaatgttattctttatatactctcggtactttagtttatctgagtatcggccttactttctatttgcatcggtatagtcgtgtagtcagcctaccagggaggtgcagtggtgtggatttagtgtccggttattcggttgctctatgtcatcttggaggatgtagagtagtatttaataatgtagacgtggtgtctagattattaagtatcattatctgggcatatatgctacaggtcagtcgaggtgagccgctgatgatgacagctcagtacgggcattcctccacgatagtatatattcctaagaaactttcctggggagggtactcctccgtatttagccccggttggaccatgacaggttgtcgtaaggaactcggcaatccgaagtggtccctcgaagcaccaggagggcattgttagggggtattggctacatggttgtatactaatagatgtaaactaagattgagtgtatactattattataagaattgattgtttttctatttcttcttccacatagcttaggaatgattagtgagagatatgagttctttgcttcgtgtcactttaccctataaatatattaacccatgcttagactctgatcatacaagtggcatatatacattattagcatagttctctcttacaatcttcccttgggattaaataaatacgatactttagaatactcttgggtgaaatgctacaatggtatatccgtgcgcttgcggattctttctttaacaatatatatttcttgtaatgtcattcagaaatatcaacaggaatcggtctccagccatcatccatccttcatcagctaactccataatttcgcacccaatgcgcaccatctgatacagcctttctagccttaacaaatgcaatatgagatcctaaaatcacgtcgttgacttcgctccatattttccttacttaacggaatatacaaaattttacagttagcactaccttgtaggatttaaatttaaacaaattttaactgaagttaaatatatttaggaaaactaaaaacttgccccacattgggtaaatgacaattacccaaaaaaatgaaattcaaaaacaaatattgccttttttttctaaaaagatataaaatgtttgtaatttaaacaatttacgaaatttttaaattttgtaaaatatatctaaattcagccaaaatagtttcagatttaaatcttgcaaagggtgaaatcatcttttgcaatgttttttttccattagaagataatatattaaaactatggccgagtgtttgttagtaaacaactataatattagggtgtcataaagcaaattttgcatacaattttctttaacaaagccctcacatgcaacaacatggaaagaaaagagggttaatttgcattttttttagcttgtcatatgaactcacatggtgttcaacttggcagaaaaaaacaacatgaacaattcacttattcaatttacatgattagtgattatatcacgccaacctcgccagttatggtattagtgtattttaataattatttgtttgaaattcattttatgcaaaaagtactcccccaatattaagaatataaggcttattagcttttttttacattctctaatactccatctgtttcatattataagtggcttatcttctttttttcaaacttttctgagttataaaaatatagtaacgttttgaatcccaacaaacatactatcaaaatatattcaaagtacgttaggttcaattaaattattttggtgttataagagttgttatcattgtttataaacttgatcaacttgtaaaaatttaacttataaaaaaaccactgtgatttatatatgaaacggagggagtattataatcgggccattgatttctttagtaatgtactaatatcaacaactacgaaattaagatcatacgaaaacattttctgaaataagaatacaatgatattatgtgtgtgatactaacacatactatattgttattagtagattcttaggtggcgttttctaattgagttacagatttttcgtaggtttctgttaggcttttcagatgattaaacggtgtatttcgtgcaaaaaatttatatatagaagttgttttaaaatatcaagtaaacctatttttcaagtttgtaataattaaaagttaattaatcataacctaacttcaccttcctcttcatccatctcaaattttttcaatgatgattttgctgaaaacaaagagcgcctttactgaaaacaaagggcataggtcagatgtgcataggatcatcttgttttctatatagctctattaaagcatgttattataagggaaaagaaaagggatgttaaccgatatattttattttcgaggggaaaggcaggagctctgccaatttcattaaaaaaggagagaaacaacgtacctcaaggggtgccacccaaagaaggtacaatgcagtcgcaaaagattttcaggaaatgtaaagctacaagcatcaataagtggtgctaaattatctaaagaatctgagcttcatcaagtcgtgtagatggttaaaccatcaagatttcgcctattttctttgatcatttttctccgacaagcttcccaccattccataatgtccccattggaaagggatgtcgtgggcatatgaaggcctagttttgaccaaattttgctccatacctatctagcgaacgggcaatccatgaagaggtgtctggctgtctccggctcaactccacaaagggagcaaattgggctattgtcccaaccctggagctggagcttatcggaggttaggattttcctttggaccattagccaaccgaaaaattttcacttggttttccatctttgctttccagatgtagttgaacctctcctcctgtatgctccccaggaattggatccggtaagccgagtttgctgagtagatgccaattgggatccatctccaagttactatggtatccgtttgctcctctagatgtacctgttggattaggtgccaaagaagaatgaactctctgacctgggtggttgtgttcatcctcttcatcagtctcaaccaacagttgtcttgtaactcctgtcctatgccactgtcctatttttccttgtcacgagctgaaaaagagatggagtcaattccttgggcgattgcccttccagccatctgtcatgccaaatttaacttttccccatttgttaaccgatagtaaatttaatatgtttttgtcatttgtagataactaaatgcccatgctttgctatggctaaaaggaaaaaaataataatattgttgcctaaaataaaaaaatatttttcatgaaatattttacccaccttttagatttagttactacatctgtttcatattataagttattttgattttttttcttagccaaacttctttaagcttgaacaagcttataaaaaaatatagcaataattttaacacaacacaacttatttttaatgaaactaattcggttttgttgatgtattttttctataatcttgatcaaacttaaagaagccttactaaagaaagacaaaataacttataatatgaaacaaatggagtatgtcatgttgaaaagtataaggggtaacatataaaaaccagaatggagtagtgtcactagaattttttgaattggagtatagataatgagacacaaacttttatacggattaagttctttggaataattgttgaaatagattttttctaaaaaaagagaatctcatgggatattaggaaacaatacaaatttaaatattttttaactcgtggtatgggagtatgagacaatgcttgctgcaccacgatatctttttcataaaacttgattgttttgaggaaaaagaagttcaatagataaagtaaaaacggggccttgtagcagaagttcttctggtggcaaaagcgggctttcgggacttgtgctgtggatactgttgtgggctttgggatttcatgcggacttgagtccaaatccagtccgccaatcgcatccagggtctctctcgtcggcctatcccaacgaaatctctcccaatccctctcttatcccctgaaaaccactcaccgtccatttcccctctccccacctccgcgtctcctcaccatggcttccgccttctcccccgccaccgccgcgcccgccgcgtcgccggccctcttctccgcctccacctcccggcctctctccctcaccgccgccgccgctgccgtctcaggtaacatctcctctccctctccgcttttccgtttccaaaagcaccgcattcgaatcccccaagccaggaccttggcaatttacttacactcgagagtggtttctgctgcgcagcccgtatcccgtcacggagagggttccgccgcggccgcttcaccgtctgcaatgtagccgccccctccgccacccagcaggtaaccccacgccctcaaatcccttcgagacttgggtggattgtttcgctcatgtccagcatcttggtgaaatgcgcgtaggaggctaaggcggcgggcgcgaaggagagccaacggccggtgtatccgttcgcggcgatcgtggggcaggacgagatgaagctgtgcctgctgctcaacgtcatcgaccctaagatcggcggtgtcatgatcatgggagaccgtggcaccggcaaatccaccaccgtccgctcgctcgtcgacctgctcccggatatccccgtcgttgttggcgaccctttcaattccgaccctgacgatcccgaggtcatgggccctgaggtccgggaacgcgtgctggagggtgagaagcttcctgttgtcacggccaagatcaccatggtagatcttccccttggtgccactgaggatagagtctgtggcaccattgatattgagaaggcgctcaccgatggtgtcaaggcgttcgagcctggtttgcttgccaaggccaacagggggattctttatgtggatgaggtcaatttgttggatgaccatctagtagatgtgcttctggattctgctgcgtcaggatggaacaccgtgaagagagagggtatctccatctcccaccctgctcggttcatcctcattgggtctggtaaccccgaggaaggggagctccggccacagctgcttgaccggtttggcatgcacgcgcaggttggtactgtcagggatgctgaactcagggtgaaaattgttgaagagagagctcggttcgacagggatccaaaggcgttccgtgagtcctacttggaggaacaagacaagctccagcagcagatttcatctgctcggagtaaccttggtgctgtgcagattgaccatgatcttcgtgttaagatttctaaagtgtgtgcagagttgaatgttgatggattaagaggggacattgtgactaacagggctgccaaggcgttggcagcactcaaaggcagggacactgtcactgtagaggacattgccactgttatccccaactgcttgaggcatcggcttcggaaggacccacttgaatcaattgactcaggattgctcgtggttgagaagttttatgaagtcttcacctaaattattctggaggtaaatggttttctatcagaaagttcggcaggagggcttttgtttgagtttaatgacattgtttcagaggcttgaacttgatgtctatttgtacatctatcattagtatagattttattccccttcaatcgaaatgcctgctatgagttgcagacggttcgtacatttgaatcttccttgtagtcattgatgcagccaatgattaggaaaggagcatctaagtcaagctaacatcttatatttctttttgaaaaaaaaaaagaatcttgcagcatatatgaacaatctttgaactagtgtccagagataatgtcatgccataaatattctgctgcttttgtcatttctcctagatgaaaggtcctaaaaatagaaaatacaatgctagaaatcttgaatggatcttttgcccaagtaagcttcaatagtaattatctgttggtattttagggaattacattctgtgctactagaagttttcatcatcatttttactcactgtttcaatgaaacaatgtacaatggaggtcctggactcacttgtcattgggtcaatgaggagttttgcaatttcttagtggcatataataagaatagctgaatgcccaggtgttgtgattgaatagaaaaatgaattgaatgtcactttaactatgtgcttacatgtttttaatattggtaaaacattaaacacgtcttgtgcaaacataagggtataagataaagggtgcatcagtccatgggagcatattttcctttttcttgtacatattttctttgtacaaaaatacatgacaacgaaatgttattctccaaaatgatatattattatctcaaatgataactgatcgagtaagattataaaataatctgtaattgtgacaattgatggtactaaagaaattcttgacattccaaactatgaaaagaaggtgagttcaggtctctctgacattctacatgcataaaaaaaagcacgcattcattttgatttatcaaattattggtcacctgtaatgcctaaaaaatatagtaacaaacttcagcaacttgagaaactctttacaaatatgttaatgaaaaggactcctggatattgtaggtttatttatctcacccaacaataaactcgagaaacagttcctttttgtgttgagtaattagatcagttagttacatgcatagtgcggatgctgctttcatgagggtataggtactgcagaacacaagtagcataacgagcaatttactaaatcaagttgtataagaatgtagtaccaaaattcacaactttgaactatggacaaatgttcaagtttgtccacacgctaattacttgaactgtagttttgctgaagactgttacttatactctacactagtaatcgtgcacgtgcaaggcacgttttggcaatctatgtacgaaggtagaacaatagtaacttttttaaggcgatccttttttttaattgtgcacgtccaatgcacgtcatgacatacattaaacttacattcattcgaaaatcaaattcatagtagtatataatcaaaagctaggactttttaataaaattatcagtcaagcatcatgtcctacaagtcaataacattatatatttaaaaacaaaggtagtaatattcatgcatcaaagtgtgactgcaattttggatctttcatcaggccccttgattgagcaatgtaccagttagacagacttaagagaaataatttttttcatgtttagtataaaatttcttagaatttctaactgttccctatgcgccaagtgggcaacaaagctgaggggaatgtcttggttaggtataatttattcgaaaattgtaaatataacccctttctcactccatgccaaattttgcacagaacaaaatgtaatgccctgctaggttgctatagagtacaaccacttaacattggtaacacttgatgaattacaacagctagacgattatgagggtacaaaacaccatatgaggaaaaaagcattagtttaacctaagataatttattgtgctaaccatcttcctcatgtattgccttcctcgaactgaatcatgcattatgcactttgtgaattactgcattgatatcctagatcattcatgctccggatctgagcgatggtcaatcgaatcaccatggaaaagctgttttcattttatttttttttaataatgagtttcccttccatttatgcctatgaagacatggtcagacttaactgtgctgtaaaacaattttatcactgccccatcttgttgttgccttttgctcttgagcagcaacttgtattttatttttcaatctcaaaccattaaagccacaaatggatcaattttgatttaacaaaattcatagtaattaaagctccttatgacataccatcctagtgatataaactattcgttgttcaatttggaactgcacatatgtcaaatgaagctcggatccaaattatagctattgaagcggcaatcttatgataagaaagtgatctagctagctgcatacaacttccaacctgcagttaggactaaataaatatgtaaccctcttttcaatttggcaatttagaaaaaatattaactggcatatgatgaacatcaagagtatctcgacaattccagatttgcatcaaagtggacatgcatgaatggagggatggcaatataagtgaaaaaaaaaacagtagttttttttaaaataaattcagtcacaacccatcaatagactatcagtagcacagtgccgtgtaaaaataaagaattgcaaatatgtacaaatatgttcaagtgcatagcagggaaatgttgggctagttgtttatgcgcaatcaacacaatctattatagataggtgttcaggagtaaagaaaaactctcatattgtctgcaatatatatatatatatatatatatatatatatatatatatatatctttgacttgtaagcaatactggtttagctgccaactggacctggaaaacgtaatcaaactttggagataattagacaaaaaagaatcaaatagcatgcaagcgtataacagtacctaagaagcattttgtcgaacatttgctgctcacgcaagagtgtgatgcaacatctcgcaccaaaggttattaccttgtgtctgttgcttgttaccaggattgggaagaaatcgtggttaagccgtttcaacaaacacccttgcaagcacagttaatcagtttgtctagcaatcaagagacatgacatgcaattctgaactttcttttcatccacaaattctttcacttcagtttcgtgcgaaacaatcatggtagacaaaacaacaaattgagtgaaaggaagatggcaaagtttaactcacctacaactgagcagcccattcttctggccggtgcatcggatccggtcgtcgatctggcttgactggggatttcatcggcacgggggatgcttgactagtcgatctggttgcggcgtcggcggaggcatggtgttgtggtcctgtgggcagggcgacggcgttggttgcgggcagcgacgatggtaacccaccctcaagtggctcgctgcgccaccggcgagttccatagcgatgcggaggcggcggcaaccggggcgcagctgagcggacgactcctctcgtgagtcgcgagctctccttcgcgctgggacggaggaaacggcatggcagattggtgggttgtctgggcacggtacaaagctaggaacgcgatttggggaggaaatagcggccagtgatggagctgcggtgtttgcgcagcgggaggatgccccatgcgaggaggtgttcggcgtccggggatagcgcggcgcggcagcggtgtaaacacggggcggatttcgcggtggtggggtgcgtcgaggttacgtgatttcacggtaggatcgcctgctcgtaaccatttggagccatcggatgaaaagatgatttcacctagtggactgacggatgagatgatgtcacctggctgatcgatagatgagatgagatgggatgatttggcagataggattgggaggtacaactcctttttatattagtatagataattgtagcattaccacataatttaatcggtaagtacccttatttcctcctgttacatcattttttactgagtttcccccttgccttctcatcatcgtgtggtctttgacatgttcagtacaattggtggattgattcattcagctacttctgcttccttttgcactagccttttatttcagtgaactctggttctgtacaacaattgctgatcacagtattacttatgaaaataggaaacatatgttttatattaaagcatctatgtagcaacaagcaggtgaaaacatcagttaaacatagttcaggtgtagtagactgaacacctgcaaatctatctgtgcaccatagcaaattgactgaattgtgatttgccagcacattagaatcaccctttcttcagttgcttttactgtcgaatgctcggtaactaatcgccataagaattcactgaagcgtgtgtccgacgtgatcaaactacatggactacaccttggtgcagaccctggcatccttgtacaccttgccggggcgacacacataaccttgctccggcgcgcagtgcgcgtcctgcgagcacacacacatcccctccagcgcgcaacccggcgcgtccctggtcggcgcacggccgccaatgccaagcatcatgtcgctccagtcgctggagaagaggccgtcggggtcataggcgtccttgatgcggaggaactcgccgatgcgcgggtacttacgggcggcgccgacgaaggcgaggttgcggttcttgccccagtgcggcaggccgccgtacttgaacacccccatctgctcgatctcctccaggacatcctcgaacagccgcgccctgttggggtcgcggctgcggtagtacgtcatgtcgagtccaccatgtcgtccgactggccgcctcctgccgccggtttcccgaggtgcgcggtcgacgccttgacgtagcggatcaggattccgtcgtagagctccacaccgcagagcgctttggggttcatgtcacggagccgccggacctcctcgacgaacgccccggcacggctcaccggcaggctgaaggtggtctggtggaagaagctggagcccctcacccgggggtcccacgggcacgccgtcaggagcgcgtcctccggcccggtgatgcagccgccggacgcctgcatcaggtgctgcgggcccaccaccgggtacccggtgaacagcccgccgctccgccgcatcagcccgtacccggccgacgagagcgccgcgtgggtgacccttgacgtcacgcacttgccgttgccgttgcccgcgcgctcgaacagctcctccgcgaggcggttagtacggatcagaagtctcggcgtggcacggaagccgatgaagtcgaggacgccctcgccggaggcgttcatcggcagccggtcgtccacgcggtacaccgctcgcccgatgcccgggtaccaggcgatgtcggcgaactcgtgctggtagccgaacttggtcacctggtccgccaggtcgtcgtcgtcgcgctccatgaacgtcacagaacgcttgaacagaggttgcagcgccagagtcacctgcactaatcccatggctgtgcattacttggtttgtgcaacggatcaaattttagagggaaagaaaggaaataagatggtttcaaaattaaatttatcccaaaaaaaactttctaaattccccctttttaatcactatttagtatttactcggtccctccttttggccttgccggatcttaaagaaaaagtaagaggaactgaaagcacaaatttataatgaaggacaggatgcaagatgcatcatgacagcatgtgaagaaatgagaataaattctttgtagcccaaacaactccaaaagaactaaagtggaaaagattgtgataattacactaaagctggttattttgtactccaagtatcatattttgtactccaagtatcacacaatcccggcagatcgactacgtactcattaaaaagcgatgtactaattcgtggaagtacttgtacgtaataagaaatgagcaatctgtcacactgtataggagtgactctgatgaatcaattgtttagatctcaagtttcaggtaaaaggagtgtttgctaacacatatcccgctagatttgcatgttaattgaataaacatgtgtcacgagataatatttttttaaactaaaagatgaccgcgttggcctatatttttttttggatggacataattaaaggaggaaaaattttaagaccagaaaattcaacgaatagtaattcctctatttcacattataagacgctttgggttttgatatattcatgtgtctatgtatatgttttatatatgtgtttaaattcttataaatgttagtgaatccagacgaaagataaagatgtcaaaacaccttatgacgtggactgaacgaagggagttagcctgattatcactatgtaagtgccgttaattctaattatataaacaaaccaaactattacatcatattcacttgtatgtccaagggtaacatcaactgtagtttgatccttttgtatatcatcgtttgtcaatcgtagacaaaaattaattctatgttagagttgattttgagttttttttgacataattcaaaccactaatcatacacatacattttgcccataattgtttttttttacttgcatataagtaattaattgttgtttctactggatcggtcaataggaaacggcccctgtaccagctggagtgcttatatggtactacccctttttattagcgtctctaccagactagcgatgtaccctgtaggctgaaaaccttcagaaaacgtgttaagttttagtgcattttcttcagacgtttttatctcctatcaccaagttgtcccacaaattaatactgcatattattaataagaattgtaaaaaaaatcatatcagtgatcaacccatttcgatacaatggttgatgtaaaaccaaaatgaaattgtcagtctttagtcacaaaaggttttagaaaaatagacgaagaggctgcaattttttgtggcgaagagcacttcaaaaaaaaaaaggggggggggaggataatcaatatattttcaataatgccaggaagaaacagaaacaacctataattaacttagctaaaatgtttcgtcgtcttgttcaatactagtcctacatatagctacatataacttaaacgtacgcatacagtggagcatacctagataccttacctgagaaatgactcctaggacgcctagggagaccttggcggcgtcaagctccgggtcggccgcggtgagcacccgcaccttggcgtacccgtcggcggcgggcgccggcgtgacgatgcgcatcccgaccacgtactcgtgcacggcgctgcctttcccccacagcgagctgccgtgcgcgcccgtgccgagcatgccgcccacggtgagcccccaccagtagggcgcgtacggcagcgccatcccggccttgcccgcctcggcgatgagctcccgcagcgatatgccgctctccaccgtcacctccatcctgccggcgtcgacggccaccacgcggttgagccgcctagtgctgatgacgaggccctcgccgtcgccgtcgccggggcaggccagctgcgggatgctgtgggagtacctggtggccaccttcatcttggtcccggacgctgtcgcgttggccacggcccggaccagctcctcctccgtagaaggatacacggcggcggccgcgcggcacgtcgaccggtccgggaagacgccgtacgcgctcgacacggtgcagtcggccgtgccgctgccggacgagcactgcaccgggtccggtggggggctcgcggcggccggcgcctcagccgcaggccacgccaatgccacgacgaggacgagcggcagcaaccgcacgagagtgatcatcatcttgttgtgctcgaggctcattctaattaagcgacggcagctgcagccactacatatatatgttgcaatcaaccattggtagcaagcaaagcagcttgcttccacgcctatatactccctccgcattataatatatgacaccgtttactttttaccaatatttgactactcatcttattcaaaatttttatgcaaatataaaaatacttatgtcatgcttaaagaatatttgatgataaatcaagttgcaataaaataaattataattatataatttttttaaataagacgaaaggtcaaacatttgtcgaaaaatcaacggcgtcataaattaaaatagactgatggaatttaatttttgtgtgatgaactagcggccgttctagctagtgacagcgggaattgatgataaatatatactccatatatatgcccaagcatcaaatttgcctataaaaaacatgtacttcattttttttttacagaatctgcatgcatgtgcaccaaagtaagtaaagcatgcaagccagattgcgatatatacgagtatatgaccaagatttgataactcgtaggagtgcaacaaaacatagcgtgtggtgaggagcttgctctacagaaactagcctggtactagcaaattgaagtagaggaaagcttgaagcattatcttcttctgctcatgtggtctataactagtcaggtgtcaggatgtccgttacaagcttgcaataaactgcttggcgcatctacttcatatttggggttgccacttttagatttatcaattaactatttgccacacctatctcagtgacatgtgggtccacatgtgtttatgacatgtgagtccagtggcaaatagttaattgccacatctaagagtggcatatagttcaatatctctcatatttgtgtctacgcgcgtacttcttcttccaactgggatcgacgttatctcttatatacgaaatgccatttaaactttctataaacgcttataagccatcacacactggtggagaaaccatctttggttggtcgacccaaatctacaatagttccggttggacaaaaaagatttttaagtcccggtttataagaacaacat

SEQ ID NO: 29756 - DNA, 20868 bp, Oryza sativa
ttaaaaaatttgtgatttattgcatgatctatgatgtatttgatttgtgtgtgatgtgaacttgtgatgtatttgcgatgaattttgtagaacttgtgatgtaatttgatttatgtgtaatttttttaggatttgtgatgtatttgatttgtgtgtataagtaactttaagatttgtgatgtggatttgggatgttactttgatttgggatttggagatatgcatgccacttgattcgggagaaaataaaaaagaaaaaaaaggaagaaaggggaccatctggactgctgttatcccctctttagtcccggttggtaacaccaaccgggaataaagatagggatctttagtcccggttatttcgttcgggactaaagatagcgatctttagtcccggattcatagttagggggttacgaactgggaggaaagatggtttctccaccagtgacatgtacttgtacaaacgttcgtagatcgtcatgtggcgttctaataaatttgagaaaatactaaaaatactaagaaagaaagaaaaacattcgatcgttgattttctcttagagcccctttgatttggtggaaaaacatagaaattttggagaatttaaatcctataggaaaaattccaatgaatgcttttgaatcaaagaattgaatcctatccaatcctttgaaattcctatagaatggacaatcctatagagattttggaggaaatttagcaagagctctatcctcttggaaaatttcctttgagtctatctcttttatccgattcctgtatttttttcctacagtccaattaaacgatcattgctgtgtttttttatgttttgcaatcctttgttttatacttcaattcctgtcaaaatcctgtgtagatcctcccttccaaattgtcgtcgctcgtatattctcatgccacaaaccccagatcggtcatatgaatagtaatagacgagaagccatggatttcactcatataagccattccctatatgatacgaccgtcgcatcctgactcatagtgttcaacacatcattggacagtgatggtcttcatatcttgatcgtgttttacggcgactagttttctttagtagatttaagatgaggaagatgagttcggtgcaatgctgtgtcgctgataaaaaagatgtgtttgggatatattcatagaggaatgcgctatgtcatacaacatataaggaaagagggcaaaataaaaacacgcagacaacgggaattggggaggaactgacatagctaaatttattatatcaaaatcttaattatattgcacataagtattcgctttgttttgtactataaggcacattttgtttcgttaggattaaggtttcgactcatagttactttactaacataatacaaaagtataatgataatacagatctaataacatcgattttctattgagaaagcaatcttatgttatccttatctattatatctatctatctatctattatatactaaaagtctaatgaaactttctacaaacactctcaagtcgtcacgtggtgctcctaaaaacgctcctaagtcgccacgtggcgcattgataaatcctaaaaattcttaggaaaaaacaaaacatctaaccgttattttcatttaatcgggtagacccattattttcaactattttacaaaattaccaaatcaaccaccgttagatctatcttacgagtacaaaattaccaaatcaatttatctctcttaaattatccctcggtccgtgtacctgtacagcatgtacgtttgtacgtacgtatcatcccaccgtacttctttttctatttttttctttcttatttagattagatgaaaaacgaaaataaataattcaagtccattcacaaccattgattttccataaaacatggtggactaattagatttttgttattaaaaaattgaaaggtccacgtgtgccacgtcctctcttccatcatgtacgtccgtacttagtacatacatgtatatatcggtccctctacccattcggttccctctctctatgatgtattattagcaatcaaatcgtattcacaatggttgtgtagagcctcacacactatatactacatccgtcccataaaaattaaatttttaccttcgaaccttttcccataaaagttatatttctgctaatgtgggacccagtaaactgattatatttccttgtaatcttctttctttccatctcatctctaacctattctctttaacattccttttaatcaagtttatacatggaatgtgtatatgtactgtgttcattaaatagggttattgaagtcatttgtctatcgtcctaatatgtccttaattccctagaaattcaatttttatgggacggaggtagtatgaaatgttcccaaatgaattatctatcatataatgcaaatattttggagtatacaaacccatcaatttaccatagccttatgtcccatataatctatttattaataaataatgagaatctataccaatcttacttgcttattgatagtttttttttaaaaaaaaagttgcacatagggtgtaatgatgtcactatttgtcatatcatgcatttgaacttaaaataatatttgtataaaataaaacaaaagtgtaaaatgaaccaattctagaaaaccttataatttcttagaaccattgtggttcataactttcccttaaattgagacaaccatgcataaccacttcatcattttaagtgactacatatcaatagacttctctctgttctatgccatagcagaagatagttggctttgaatattatatttcttactattaaatttgggttttaacactcgggtttgactaaatgtatttaaacaaatatatagatcacacatattataggaagcgaggtctagaatatatctactctatatttttattgattcatacataagtacgtataacaaattgcatcaaatgtgaaccaattaaaagaaggaataaaacacatttattataaataacctttttgagattttttttaaataagagcccaaaacatttaattaaaaagaaaaacaacaccttactttaatttggatttaaagacccacgtcttcttaaatgatgaagatgattaactttatagataggtgcttatatagataaatcaaatattacatattgtaaactaacaaatatcttaaaagaaacatttaagctatgattcaggaatgcccgcgcgaatgcgcgggctaccatcctagttattaaaacagccttgaaagaaggcaccacgttcgctgtggaggctagaaattttcacattaattggagaaaaagaaaagaagagttaaagtagaatacaacttagacatatctgaaattcggaattaaaaataagtaatattggaagaagagtcaatacagaatcaaatacgagattaattaaaattcagaattaaaaataaaataaattctgaaattagaaaaaagaaaaagagagttcaattagaaatacaatttataaataactgaaattcctaattaaaaataagtaatattagaaaaggagtcaatatacaatcgaatacgagaataattaaaattcggaattaaaaataaaataaattctgaaattagaaaagagaaaaagagagttcaagtaggaatacaatttagaaataactgaaatttagaattaaaaataattaatatttgaagaagagttcttatagaactgaatacaagaataattaaaattagaaataaaaaaataaaataaatttcgaaaatagaaaaataaatataagagttcaagtaggaatacactttataaataaaaaatatcagaataaaaaatatggaatttttaaaaattaatcaacctagaactcaacgatgacaaataacaataaataagggacaagtaataggcccgtaaaacagtaagatggtgaacggttgatgagaaatctaaaaattataaacaaaaccaccaatagaacccccaaggacgattaagaggtggtacgacagatagaatgttaagcagcatagacacgatggttggcgggacttttataaagtaaaaaataaatcgcaataacaatcatgttttatttttaaaatcttaatgataataaacaggggaggcaatgggtaggccatacaggagtataatagtgtggagccggcggcggttggcgggacttctagaaatttaaaaaatgagtacttaaaattcgaaataaaaaataaaaaaatttaaaaatagaaaaataattctaagagttcaagtaggaatacactttacaaataacaaaatatcggaatgaaaaatatggaattttttttaaaaaatagtccatctagaactaagcaatgacagataacaataaagaggagagaaatattaggcccataaaggagtaagttggtggcagttgatgcgacatctaaaaactataaacaaaaccacaaatagaatctcaatgatgattaagaggggggacgatagacaagccgttaagcaacacggtcacgatggttggtgggacttctagaaagtaaaaaagtaaatcgcaatgacaatcatgttcgattttgaaaatctcaatgataataaaaatacattagtatagtatggcgaagccggcggcggttgggcagatttctagaaaataaaagatgaaccccaacgatagttatgttcaatttttaaaatcccaacaacaataaatatgggagacaacaggttgatcatgaagaaatacaatattgatgtttgacaacattcctaaaaattataataattgaacctgacgagacaatgaactctaaaaactagaaggtgtattttttagtggtttaaaggaagataaataaaagccgtgatatattgggtaaacaaataaagggttgataaaagagtaagaattaaggactggtgttacttttaaataaaaactataaaagattaaggatgataagattcgatcttttaaggttataagacaacgtaatggctatttaacaaattttaagtaatgacaaatatagaaaaatagataattttatatgggtgctagccgcgcaattgcacgggtcacccagctagttagtaataaaaatacaacttattcttttaaaggagtgagagtatatatatatatatatatatatatatatatatatatatatatatatatatatatatatatatatatatatatatatatatgtatatatatatatgtatatgtatatatatatatatatatatgtatgtatgtatgtatgtatgtatgtatgtatgtatgtatgtatgtatgtatgtatgtatatgtgtgtgtttgtgtgtctaaatatatgacggccgttttgtacttccgggagtacgtattcttattatcatccgattgaggttttgatcttattaaggaaacatatactccctccatcccataatataagggattttgagtttttgcttgtactgtttgaccactcgtcttattcaaaaattttggaattattatttatttttttgtgacttactttattatccaaagtactttaagcataactttttgtttttcatatttgcacaaatttttagaataagatgagtggtcaaataatgtaaacaaaaacttaaaatcccttatattatgggacggaggaagtataatttaccgttgcgtgcatgcacacctgattccggattcattgcagcgattcgttgcagcggcatgtgattcaattcaacttattaaatgttaaccataggatgaataaccaacatgatccttgaactttcgcttaaggattaatttagtccttgatattttgtattgtccaaacaagtccctaaagtccattgtatgatttaatatagtccttaaaccctctaaaaatgccatgtgtacatgccacatcatctatgcaagcatattgaatatttaaatatccattctacccttacgttttcatagaaaataaagaacaactattgagaaaaaaacaaaaaaaaggttttggcaattggtaaaaagatgtagcattggtaacaaaaagaatttggcattttcctttgttttatgatggcttcttcttgtttttccctttgtttttttataaaaaatgtaaggttaaaatggacattgaaatgttaacttgacatgcatgaatgatgtggacatgccacatcgcaatttaagtggttccaaggactatattaagccgcatgataagtttggacattacaaaacatcaaagacgaattgacatctgaacaaaagttgtagactggactggctattcacccttaacaatattgctaatattccaattagcatatactataagttatcagatactactactctttcttttcttgctaactgcttcttagaagtatatgctacttacgcaatgcaacagtacatatatatatgtatatatacgtgtatgacgtgaccatggttgctattgatataaccattgctcacatcatggatcaacaagaattcatcacgatcaagtcatctaagtgctggaatctgattcggccacctactacgctgacttcaaacggccactccgttttcgggccgcgagtacttgatgaaaagctctcggagtcctctttccaatggatccagccacatctccaaattctatctcagtcagctgtaatcgtataaacaaggtgttacgtcacttataatgggcgtatgaacttgtaactttatttgggaccccggcccatgtggggtgcgccccaaccaggtggagctcgactctggagaccccttgatcgtcctcccacctccttaaatagctaggtatcccttcagggtttcttgggttttgtttagattaaagtttcgcttcgcaactttgccgtgtgatccactggtcgattagatcgtcgttttgctagttacggaatccgaacttatcatttgtgttcaattcctatttgcaatttagattgtttttatcttgttctgcttgtttcttcactttttttttgcaggaataaggttgatctgcaccggcaagatcaacaacccatggagggctgtattgatcgctaaggcggaacaccacaacatctcatacgattgtagtcgggtcgtcaacgtttcacctaaatcgtagttatcatcaactcatcgaaagatcggaccaatagaaaatagccagaaaatattgcacccattagaaaatagccatagaaaatattgcatccattacctagccatctttgtgcccgctgcattggtcttttaagtttttactttgttgagttttgcgttgcatcgtcgagtcgtgttactggttttagcgtctagttagtttgaagtttcgagttatggtcacgtttagtaccactgttgtcaccgccgccgtgagtttgttgtcgtcgggacctgcaaaaaggggctcgtctcaccaccgggggttcgattttggtagtttttagaaatttccatcggtccatttgggaattgcatgtaaggtttgcctagacgtctaggtctttgcagtgatcgagagcttctgtttttgcatgcgaggaataaggaaggggacaagtagattagattggatcggttaaaagttagtttccgtttatatcttgtgcaagtccgcactcgccgtccttcaacacaaagaaatggcacatctctccttcgaatctgatttctccgtctactctctgtttcaatctataacgtgagttgcccaacagcttggtggaattttatcgagtgtcggattgaagatctgtttgcaaaaacaaaacctatgaatgagagcatcccattttttataattttaattttaggtttgcacttttgcagttgagttcctataattttcatatttacgtttgagtccctgcaatcttacattaaggtacttgaggtctttttttaaaaaaaaatccaaaaaagagaaaaaaaagtagaaaggtgctaaaaaaagaaaagaaaagccaaaaaaaaaactactgttgcctctagctggatccgccgcaaggccgcatcgctgcaggtgcaggaaccacctctgaccaacacccccttttcatcgctgctctggatgccacaaccattgctccctccacgcgctgccacccgtgcccccgcacggtgctgctgcagcttgagctcctgcagaccaccaccgtagaactcgccaccgagaaggcctgagatgaatggataagtggactggaaatgtggggatagggtttgtatactaaggggcattttggtcagtttaggatagtaaatacattttttttcctatatgaaaccctaaaggtgtagtgaaaatagggttagatgattgcttcgattgtaatagttacaaacttataaaagtgggatcgaatgagcaaacttataaaagtggggtcagatcggtagttaggcttcaaaacaaggtcaaataaaaaatcgccccatatataaaatatattatttttgacatatggaaattggacaaaatattctaactagacccaattgtaatacttagcaagtgtaaaccctatacaaaatactacttggcccatctttcaaaaaaaaaaactacttggactacttgtcatactctagacttaaataaataaaactacttgtggtggagtcgcatggtcgcaacgttaccactgtagtcgtgcaagtgctgagggtcatccccatggaagagcacgtgttgcgggtcggtgccggggcactagtggtcggccatatccggaacaagagctggggttcggtgtagcgccttctccttcacctatgcagccgccagcatttattttcagctggccggcaccctggctagcggctcatctagcggagccacagccacgcaagcacccccccccccccttcttgcgactccgcttcgtggaactcctcagctgcctctttcttcacgcttccctccacagtcattgccctcttcattgtcatcggagttagagtaggagtcgttggagtccttcttcggcagggccctgtactatcacttgaagtcgttgtccctttcattttcgcctgtcattttgcatggcaatggaggctgtgctttccactctaacgaggtggtgtcgccggaggagctgccggtgtagccttcgtcctcctcctcactggtgctaatgtattgggctgctgcagtgattcgctaccgcaggattgtgggtggagaaaggtgagacataaagatggtgtgccaagaaaacccacattacttattgttgacggtcgttatcgactagtttcgaccgtcaatattacccaattaatgaagactaactatgcttgtaatgcattattccataaataaaatattctattccactatatgcttggaaaactaaccatgcaggagaagctatcaaaatggaggagaatcgacagtacaacaatcgatcaatcaaacagacactgccgagaatcagacgtgtggatagatgggctgagaactcagatatgacatgatcaaataagcccaaaattctctgttctgagttaaggggcaaacgaggaatccacctgccgaattgtgggctgattgggcctggctagggttcggccgaaccaccagctggcccaatccagtccattttccaccggcagttatctacaggtatcctatgatggttgggagcaattctactagtagaaaccgtcataagcatggacacatggcacaaggaggtgaaatatgctctttggatgcttcatcatgctacatgtcaagaggagagcaaagatgctcctaggatgcttggagcatctccacactcccaaggcacctcatgggctataaatacccctcctctcattcattcccacacacacatcaaaaagaagatcaagagctctctcaagtattgtttagtagttctagtattagtggagtaggaaatataatagtctttatagtcctcgagtcttcaggagaattcgggtatggctttagtagcttttctctcttcttttgtaagacttattgaattaatagaatattcttctttataccctttcgataatttattccattcatattacttgagtgccgactttactttatacttgaattaatatagtcgtgtaactagctttccagataggtgtattggtgtgggtttagtgtccgattattcggttgctctatgtcggttgcaaggatgtaaagtagtatttagtaatataagcgcggtgcttagattattagataccattaattggggttgtatattgcggatgagaggtgggccgctgatggtgacagctcagtacgggtattcctccgcgccggtatataatcctaagttaattctctggggagggtattcctccgtatttagccccggttgtacggtcatgacgggccgtcgtaaggaactcggcagtcaggggtggcttctcgaaacaccaggaggacactgggtacggggtattggttgcatgactgtataatagcaagtatagactaaagatgtatgtactagaagtacaagaatgatacttttcttattctttctccacttagcttagactatattttagtgagagtagttcttagttctttcttctgtgtgtcaccctaccctttgaactaaattaacccctgcatagactattagcatagtactctcttatcatatcttctcttgggataaaataaatatgataccttggaatactcccgggtgaaatgctacaatagtatatccgtgcgcttgcggatcacatctgtaaccataatataccaggaatatttctagtgctactgctgggaattatattttcagtagtgtcgctaagaaataccaacacttatcctctatttatagcacaatagttgttccatgggagctaagaaggtgcagcatggtagtggaggacatgaccggcattcggcagttcatcctccggggagaagtgactacagtccacgtgaaaaccaatggtagtggatgttgttgaagactttaaattagtggaagggaagaagaaatgacatcaacacaacatggaaaatctgttttatatggcagcgcgtagtagacgagtcatatgtgaactagctactttgtggggattgggggaaggattggacaatatgcatatgtgaaccattttgtaattcaggatgttgatttggtgatcgcaattgaattattttttatttgagaagttgattttgggattacaacgtgtcgacttggctcggctcggctcgacttggcttggctcgttagagataacaagctagctcgagctagctcgcgagctggtcacgaccttaacgagccagagcacatgagctgtgggcctgtggactgtggcatagctgcatagaatagaaggcccaacagcctaacttggcaacagaaaaccctagctagtgtcgatcggtcaataccctttcatgactcctcgagtcgatccccttctcgtcgttctcgactcctctttcgcactgcaccgccgccagccaccaccgcctctgccgcctgctctcctctcctcacgcgttggcggcgccggacttcttctctcaattcctgcatctggccatccttagccaccaaaggagcggcgccagcgtcttctctcgccgcccgcatccagccatcctcagctaccgaaggagcacgacgctagcgtcttctcttgccgcccgcatctggccatcctcagccaccgaaggagcagcgccgacgtcttctctcgccgttcgtatccagccgtcctcagccaccgaaggagtgcggcaccggcgtcttctctcgccgccgcatcaggccgtcctcagctaccaaaggagcaccatcctctcctcctctgctggctgcgactgaaatggatgaagaacaagaggtgctgctttgacttctgagttctgtttggatggttttgctcgcgagcctaacgagctagctcaagctttcaaacgagtcgagccgagctaggtttctagctcgttaggatgatgagccgagccgagctagctcgttaggagctagactaagccgagccaagctggctcgctatccacccctatctatgcctataggtattgggggcgatcggctcaatttgaaccgattcattgagctgcttttttaaaaaaatttgtcactcctcttcggtgcctgttgtcaatcaggcacagatgagctcaccctatcaatgccgaggtgcctatcccaaatctggtgtttatggggttttggaaccgacgcatattagtttttctgtagtagtagttcgtggtatcccttctttcttaaacttaatgccaaaagttcaaacctcatgcttccacgtcatcatcaattgtgaaccgttagatgaatgcattagattgcttctcagtcgttggatggaacgcaacatagagcccaacccatcaggcaccgggtgagtctcttcgcctcttcagtgtcaaatgtagcccacatgaacacattggcccaacttcatacacatctacatgtatccggcccaacaatccatataaaagagctttatggttgaatgcccattcagataacattacaatttgttaacttacgtcataccattttgcttctttgtagcttatgctttgaatgtgctgtttgctaaaaagattttctccaagaaaaccatttgtttcttctgtttcttcttgagattgtacctcctatctaacaaattgatgttaaccaagtcccgcagcaacgcgcggggcatcctctagttctatttatatgggtgggtatttaaccctcttaccgggtaaacattatgtagtggttatgtatttttattcgcccgtgaaattaacgttagggggcatgtgaaattgatttctctagtagtgtctgatgtattaattactaactcagcatcatgtttacattttcgagggcagggcataagcaagcactctgtagacactggttagctcttccaaagaaatatacatgccaccttaattgacagcttttttttttaattctcttgctttccattcaacagtttggcagtcccctgacgatggatgtgtaccgtagagtcagcaatatatattaatttaagtgattcgatcaatccgatccgctggatcaccgatccgatatgcatgtgtaccacggtgacgaactaattaatctttatatgtttagcactccctgatggaggagcactaatgcatgcgtcgatcatgcatagggatggcaatcgggcgcgacaggcacgggtagtgcctacccatacccatgcccgtgagattatttttgcccgtgggtatacccattactacatgacgggtaaggatggttgtccatgcccattgcccgcgggcaccttatgcccgtgggcgtgcctgtttacccgccacaacaaaagcagtggaacaaaaagtctacaagctactaagttcgaatcgaacttaaaacatcaaatattctccgcctcggtgtcgtgtctctcctctggcggcgatagagtaagaggagagaaataataagggaaataaaagagaaaccgtagaaaacaaagaacgtggcttatgtattctagtggattttgctcctaacctacatgtaagttagattttgcgggtaaacgggcaaagcgggcatgggtagtgattacccatacccatgcccatttatccatcgggcatagcttttgacccaataagatacccatgggtataaaatagagaacaaacccaaccctaatagggtttttacccgtgggtaaacgggcaaacgggcacaattgccatccctaatcatgcatatgccactcgaacatataagctagtggggttgggggtgtgccagcgttatactggccttttgaggcgacatggcatcattagcgtcacgagtggtgagtgcaggtgaaaaagcaagtcaaagaagcttttatgtggtcgatcatgtacaaaaaacttgctcacggctctgctaccagcttatacgagcaggggtgattgatattttgatgagtggaagataactacggtttagaaaaaaaaaaaaaccttgagctaaaatcgtacaatacgtggtcatgtttttccatagcttattgatattattatgtagatcaaccttattcctctaaacaaatcaaacaaataaaccataactagataaaagtaatcaaacttgtagataaaaatcaaatctcaccataaatcggacactcggtaagatggggttccgaggacgagtaactaggaggttttatcgacacgcgcaactataaggttaaatagcaatgattaaattttaatctaaacagtattaaaaaaagatttttgcagatagcacggaaagggttttcacgtgcggtagggctagccgtgcgtgctaaatggtatgcaaaaattgctatttttgcatgcgggtggcgcaaccgcacgcgaaaattttgattttcgcgtgcgggtgattacgtcgcccgtacgcaaaaataaaaatatgaaaaaaaattaaaatcctaaaaatcatgaaaccctaaccctagaagctgccgctgcgccatcctcgtggtggccgttgtcttcgtcgtcgcatcgtcccttgttgtcaccgttgacctcatcctcgtcctcatgggggtgtaggaggcaaggggtggccgggtccagccactcccatcaccgtcgccgaagccggactcgttgcccctgtgcctccccatcatcggatccgccgctgccgcacctcctcatcgtccgatttgccgtcgccagcatcctattgatggtcgttataaaccaatttcaaccgttaataaaactataataaaagagaattagttatgcttataatacatatttgttttagaataatatagttctacttgtgcttggagaataatttattgcaggaattgagcaaataaaataaagaaaaatgaggaaaactcacttccaagcaagcttatggataagatgggcccacaagtcaggtgtaaccgtcctgaaaactgcgtcaactacaataacagtcataaggacccacctgtcaatgacccagagaagtgtggaggcatgctgggccagcctaggttcggccgaaccaggggttcggttgaatcttggctgctgcggctccggctggccttacacgtggacgtctaggatggcttgctgatggtggttgccgggtagaatggtcatttcgccttttctacaaccttcataccgaccttataaatggaggagctcattttacttcacacacactcaagcaatctcaagattcctctctacactttagtttagtatttttagtgctaagtggagtagaacataatagttcccagagtccttggagtcttcgaaagagttctggtatggctctagtagcttttctatctgcttttgtaagactttcagtattaataaaatattcttatttatatacttcggtactttacttagtctgagtatcgactttattttacatccgtgtcgttataattatgtgggtagcctaccagagaggtgcagtagtgtgggtttaatgtccgatttatcggttgcactatgttcttcgcgggagtgtagagtagtatttattaatgtaagcaaggtgcttagattagtaaatatcattatctaggcatatatgccgcagggcagtagagttgggccgctgatagtgagagctcagtacgggtatttctccacgttggtatatattcctaaggcaaattcctggggagggtactcctctatatttagcccgtttggatggccatgacaggttgtcgtaaggaactcggcaacccggagtggtctctcgaaacaccaggagggcactgctaggaggtattggccacatgattatatactagcaaatgtagactaaagattgggtgtgtcacatcctgattttcgtcttaggatttataaattatttaataaattatttttacaatttatattaaatgttcattaatttacaagtaaagttaaatgtgggaaataaaatttcctaaatataaagcatagctggatttaatttttattaaattctccatggttaattataatctttggaattttctcggatttttcggagctcaattcctaattttaataatacaaagagcatttcagaaaccatttaaatattaaattagtcataaaatggtctgattataatcttgttaagtactttgagtgtccaatcagtttcaggattttccttgaaattatttgagcattggaagtacttttaacaattcaaagatcatttccgtgattaatttaattggaaaagtatttaaaatccccttctccttttcgggccgaaataggaaaagttcagcttcagtcctcggcccattctcccttcctttctgctggccttatccctcctccaaagtccatttgtggtccctccttcaatcgggcctagtataggaaaccacacagaaaagtctagtttgcgtccccgcgctactgttcttcttcaagctccagccgcccgtgctgagctctgtgctgccgcttcctccgttgaatccgccgcatcccgtgcttcgtttgcaaaattagttgaggggatttgtttcccttatcctcctctatcttttcccccaagaatcggactttatcccgatgaaatcaacacggaatcgagctcgattcgtgtttatctctccaaaccaaaccctaggttttcccggcgcgattacttgcgttccaagcccgatctctctcatccatgcctatataaaggatcccctagccgccctctttcgtttgccacccttggccgagctcgctgtcgcccgtagcgccctagccgcctccaccctagcgccgccgccgtcgtagccgctccagccgtgccgctcgtctccgtccatcgtcgccttcggtcgccgtcgacaccatcgggttcgcaaggaggagttgcacaccgtccacccctcggccgaagccgaagcccgccggagcgccgcggacgccgtcaagccgagcccgtcgccgcttcaatctcgtcgccggccgtcgtttgtcgtcgttcgtcgttgttctttgcaccggtgagttcgcgtcgtcgtcctcttcgtgttggtgtcttcggatagcccaaccgagctctctatcgccggcgcagttgtggtccagtgccatggctgcgatgatgtcatcgtgacatcataaaatcttttttttagtttttctgtattagatgaaatctgattaaacttcggaaattcataagtaaatcatcgtaactcggatttaagttgttcaagttgctaaattcatctaaaatcatgatctacatgtttgtttactttttatgtactttttatttggtttttattagtctttttctttgtgttgcgtgttagcttgtcgttttcgtcgttgcgaaggttcgtgagtgcgtcagaagagattcagaagactaattgaagaccgattattgcaaggcaagtcacatagatcccaaacaaccctttgagcatgttgaacccgtttaaagctaatgttttatttcaacttatgcattattttttgaatgtcatcgggtggtgagcctttctcaattaattaatggccgaagatgactttattttcctatgggttataatttgattagctagaaccttatatattagtttggttcaactaaatgctacatatgtaattgattagccatgcttagaaacattagctcattaatgagatgaatcatactacattattatttatgattatatttaatggtagctcacgatggttaatcgtgttatgataattaaatgataattaaaacctgtcaatggtgggttgtgagcacatggttttgaaggtcgtgttcatgacaattaaggaccggttcgcgagctaccgttgtgagacattaaccgtaacaaccagaagccagcgtgggtaacggctttaccttttgtatagcatgattcattgcggggtgccagattgagaagtggcgagaagtctgtgggggtcgctggggagtccatgcctctggttatatttatagagggggtgattatgatccaggaatggtgcactgtggtgagttgtgttgtgcagaaggtactgtcacagcctctattcgggtactttccagtatcgcgacgcatggaagacatgatgttgaggctgtgtcttgtgggtacagtggtacacctctggccagattaaaactattcgaatagccgtgcccgcggttatgggcgggttgagcaatgtttttcatgattagtctcacacctctcacaataattattgatgctataattggtaataatttgcttagctcctggtatggagttagatctgtgcagccgggtttggttgttcagaatggttgggcctgagcagcatgggtgtgctgttcagtgttgattaaaattgatgattactctactgttttactattcttaaatatttgctaaatactgcttttgcaaatgagcctatattatgcaatcctttggtatccttgtgcacttgcatatttgctgtgtggcttgcggagtatgtcatatgttcaccttgcaataatcaatcaacctcagttgaagaaaaggatccagaaggagaagacgtttggcttataccccagttgagctgcctgtgggagtggagctgaagccatcgctagaccgttaattccgctgctgttttcttttcttttgtaagtatgtaacgttattattacgatggatttgtatattaaattgtcagtttgtgtacctcggatgatttctggatgaggattttatgcacaaattagttcagaaattactagtgaatttccgggtgtgacagggtgtatattagaagtataggagttgagttctttctatttcttcttctacttagcttaggattatttatttgagggaatctaaaagcttcgcttcgtgtcactctacacatatattaaattaaccccttcttagactttgatgaaggcaagtaatatatatgtgtataattattagcatggttttctctttcacatcttcccttgggattaaataaatacgataccttggaatagttcaaggtgaaatgctaatagtggtatatccgtgcacttgcggattacttctataaccataaatatactagaactatttccgtgccattgctgggaaatgaatatttctagtaatatcgttaagaaataccaacacatccccaccaccagatctgccgccgcgccttcccaccatcatgcctcaccactgccagatccgtggctgccgcacgtgaggagtgcagccgccgtcggatccgcgtgggcgacggccagcagatgatggccgccatcagatctgcgccgtcgcacgcctcctctacccttcctcgttgtcccgccgcaatcgccactgtcgccgtcggagtggggagaagtgggggagtggggtagtggggagagagagaaagagtgcagggagagagttatgggagagagagaggagtggagattcagtaaaatgagagtgggaatctttggggtatttttgcatgcgggtgagttaagagcactgcatgcgtaaaaacccttacttttgcgtgcaaataatttaagcgggccgtctaaaaaaaatggatttttgcataaagatgtctgaaggagacacaagcacacacgtgtgtgaaagagatttagattgtagaaggcagaaaggctatgacgcgaccgcgcgagcggagtcagatgcgccccgctcgtgtgacgaggcccctttccttttttatcccaaatcccatttcctttctaagtagttcattttgtggtttctattttttttttggaaaaagtacaccgaaggtcccttaacttgtcatcgaattataaaatcatccttaaaccgcaaaaccggatacaacacatcccccaacttacaaaaccagtgtaaattatgtcccttggcagttttgactccggttttgtccgatgtggcagctgactcagcgtcggacccacgtggatcccacatatcagcctcttcttcccctctcctctccacctctctacctctcatccactttccacgggcgacattgacggagagcagttgggcatggtgcagcgcgcgtgggcggcggggtagcagctgggcacgaccgatggccggctggggaggtggtgggcacggccgacggccagcgggggaggagcggggcatggccggcacccgccgggaaaggagctaggtagcggcggcggggaggaactggatgcagccgccgcccggtgcgggaggttggagaggatgctgaggttggtgaagaaggcgatgacgaccgtggcgaggagcatgacgacggtgccggggcaggcgcggagctggccggcctcggcgacgtcctggcgcttccttgtcgtcgccgttgaaccccatgacggcagatgggcgggggcaacgctggccctagtagagtgatgatggcgagaacgcagtagagcgcggtggtaagcgaaggtcgcggtaatggggaaggaagagaggacgagaaccgctgtgaggaggaccgagcacgaggtggttcgtcggcgaggtgggggagagcaagcagaggacgtcatcgaggccttcgagcgggagcgctggaaaaaggggcgcctcggcgcaggcgtcacggaagacggtgtggagcacggattccgcggtgggaggaccgcacggcctcccgcccgccctcccctgtcgccgtgctcccccagccgcgcaccgctccacaccgctcccgacggctgcgcgcctgtgaccagctcctcccttgtcggtgtcggcgtgggagggtggg

SEQ ID NO: 29757 - DNA, 7473 bp, Oryza sativa
cccccaccggcctcctccccacccgccgggtgccctgcccaactgaggagaaaagtgagagaaaagaaaaagagagaggaaggtaggaggagaggggaggggaagaagaggttgacatgttgtaacatcctgaaaattcctcacaataaaaattactaaaatttcgaactttttaaaacttttgcagcatgctggttgttatgattgctatggcttgccaaaccgtaaatgatcacaaagaaagtaaagaaaagatcgacatttaagcaatagatataatttacaagaatatatttaaccctacgaatatttatgcacaagatattaaaatcaaataaaagaaaagttatcattaagctatttcatcaaatattaaaatatttgaataatgtaggtgggtgccataatatgagtacacatgaaatgatgatcattcaaataaactaacatataaataaattgagctaatgctactgtgttaataacggtctcattaggaaattatagaatctttaataaatcttaaatatcggacaatattaaattttgggaaaattcacacttggacacttaatatggtcacccaaatgcataggagtaatacaaatttaatttataacttttctcaatttataaatcaaccaaagccctaaaagtaggaaaataggaatacttaggaaaatatataataaaaataaaaatatgttcaatattaaatttgaatacaaatttcgatggagtaacttaggattggtgtattttacattgtgacaaaattagtggcaatagtatatttttcctaattgcaaaataccctctaaaataaaaaaatagttggctagcactgttcattagccctctaggtgtttgatttggttccctaaccaccacccctcctctgccgcgctccgcctggaggcctgcgtcgcccctgcgtgtgctgcgccgctgccttgcaccccgcgccgccgcgcgccgtcttgtcaccgccgtcaccctgccgcgccgccacgtcatgtcgccgtcgccgcgccgtcttcattccgccgcacgccgtcgctgttgtcggtcgcatcgtctcgagccccacccctctgtgcgtgccgtcgccttcgccgtcacgtcgtcatcatcgccgcgccgcgcgccgtcgccatcgccgtcgcgtcggcttcgctgccacgccgcgcgccgtcttgtcgcgccccgcgccgccaagccatgtgccgctgctgcaccgtcgtccgtcgcgtctcacaacgatgagccccgtgccacgtcccgtcaccgcgcgaacgtcctgtcaaggcgccatgccatgtgcgcctatgccctatcctcctctagcccagcatctagcccggttggcaatgggttggcaagcttatcttctccggcttgcctataaaagcatccccaccatctcccttcctccccacgccatcttggctgccatcacaaggccaagcccccataaaaccccatccctctctgcctcttccttgtacacatttcgtcgaacatcttgtgggcgtgctgcaccttcttctccacaccaccactgcagccgatcttcgttgtcccgccgtctatcggtaagtcctcgctcctctggcctcccctagttccgtagaaactagagccccctttaatttcaccaattagcaaccgtcgccgtgccggtccggccaccgttttgccgccggtgagctcgccgtggacaagccattccggagctcctcgtagtcatctcgttagtaaaatggaaccctcacacgtcgtagatactcacgtcctcaccaatttggtcgaaaaccctccgtatcgccctagcacctagctacccgtgcccggccatggcggccatggcggccatgcggcgccgctcgccctcgcgccgtcctgcgcagtgactgccgacaggtggacgccggagccttgccgctccctcccctggtcaccgtcgggtcgccctcggccggccttgccgcgcgcgctgcgtctcccctgctactcccgctcggtctggagggagagaagaggaaaacagagaaagagagagagaaaagagaacagagaagagaggttagagtgggcccacctgtcaatggttcataggatttgctttagaaaaataatccagtaggaaagcaaatacaatcctaaaccccacatgtcagtcacttggagttttggataaagtttaggaataaaaataatggattaggaacagtacctttttacaatttctcggatttattcaaatttgaaactttaaactagcataactctctcattttaactcggatttgagtgaaacttgaacctaaatttatctaaattcataagctttccaatggtatataattcactattttataaaatacatttataattattaaataactaatactaagataatgcataatagttaaaaatgtgctaataaataaaattgatattgtactgtaaagtagatgtcaaataattgtctttaacacgctttttcactgtaaaacctatgtaaactaattaggagcattgtttcaaattaattaaagcataggaaatactagtgccatttattaatatatgtcatgtcaatatataattatacccataacgtccaaactatataaataatgtttagcctcatattttgtgactaaaatataaacacatgttgatgagtctttaacttgtttatgagaaataatagcagagcttgtatgattaaaccaccaatatgaaattaattaacgacatttccaatacagtagtatatgtttaggttggaaatcgacccttaagttgtatagacagtaactcactcataaatccacttaaaatcacatgtactatatagcttaagaaaatagcagctattcaaataaatgattcaatattaagatattgtgcactcacatatactgtacagtccattatagctatacgttgtagtattaaatcgcttgattgcacatattaaaattaaagaggatatatgacaaacatgtatggtggataaatactaattatagaccttgaccttatataacccaagtccaattgtagattaggattattcattgtaaaattatgtgatgggataatctgtaaccataatatgattaacctaaacaactctaacatacaaagcatggataattattaaccttttataatttattgtgacaagtaaaatatgttcataattaaagcaaagcctccatcaattaaataataatacaaatgattcattatttgattgatactaaatccatctaacaacagaacctctggtatgtaaccgtgctatttagatagatgcatatatagccataatccttccatagccatttgatagactaaaccgccgattagccaaatatatatgtataccataaatgctatgttggttaactcctaaatagaccacgatgaaaatagaaagattaagaaactttagcccttggcatgattggaatccattagcaaacacgaatagtacattttattgtgcatatttgattgttgttgaatattagtttttctcgcgtattatagaccttgtgtatcggttagtcgtgaggcaacgtctgcaacttctaggaggtgaaggttgatcaagaattatatcaagaataaggattatcctgagcaggcaagtcatcactattctttgaacatgttgatcccaattgcgaaattattttgtttacaaataaaattgcatgcaatgatgaacatcccacttgattatgccatgccttgattgttgtttacccttaaaatctttgtaaccatgattacgtatgagtccttgtcaattatgacaattgcttagaaatgctattctagaatcatgcatactcatatttatcaaatgctatatgcttgggcaattacctttgggaaggtaattgagatgcggcatgtggagacatgagcgccacattgccatgatgttgatgacatgatttgtgaaaggagaaataaaattaaacaactgttttcgactggggcggacggaggatttgggtggtgtccggaaaaggctagtgccgtccccggtcaattaaggaccgagccatgaagttaagcatgaaacgacccccctacaaccgcacttctcgtatgggtatagacctagcggagtagatagctgagcggaggcaatatccatgcatagtggtttcttgatgtgtgaggcaggggctctacggtggggcagccattggtaggaccacgaggcgggtgtctacagtggtgtcgccattggtaggactgccatgtgagaatttaaacataattataacttaatgcatgtgtgagtcttcccttcccgggtgcgccagaactcctctcactgctagaaatcgtattacgcctagagtgcatgaggatgtaaagttcatggagcgggtactgccaatgcgaggttatcaaaaggctttgccgtgacgcatctcatgtgttgggatgaggctcatgtgttgggcagtcgcggagtgctggtaaagtgtacatccaccgcagtgtgagtaaaccaaatctattcgaatagccgtgttcgcggttattgagcaccgggacgtgtattacacttggctagactctaaattcttaacttgtgtgggatgggttattgcatgatgattttatgctgtgggagccacttcctgagaggagggaaggtggacgtcctcagaaaaccatgacgactcaatgggggggaagcaatccttgggatcacaatggatggtggacagaaccgtcgttgtttaatgtgaacactggtattaaaatttgatcaatctatgctaggtcttaggcttgtgaaaagatttgcaaaacttgctttgcgcaaaggaacctgaagccattccttgaaataccctatatcatatgcatcgttgctgtggtggcttgctgagtacggttggtactcacccttgctatttatatattttttaggagagtgttgaagagaagcccttgtcggtacgcttgcgtatccaacaagatgatcggagtgcggtcttgttctaggtctcgtttccccagtcgactgcctgtggcatgttaaccgggcccttatattattttgtcttccgctgttgttctctgatagttgttggcctacctggccctaatgtaagtatttaactcttttagcctgaattcattcgtgatatgttgtgatccaactatgtatgtgtgtaccaactactgatccagggattggtacggataaacacagaggatttccgattttcaaaatcgggggtctacacatgtgggacccatgtgggtcccacgctcatgagtcagctgccatgtcaattaaaaccgtagtcaaaactgttgagggacctagtttgcactggttttgtaagttgggggacacgttgtatccggttttgcagttcaaggatgattttgtaactcaacgacaagttaagggaccttggttactttttccttttatttttttttcaacggatggggctacgagctacatgcttgggaggcccacgactgcatgcgcgcccttatatacccacctttgggcctccctactagttgggctatttttacccaaattcctaagaatacaagtttttttttaacttttttttatcgatgggaactgcacagtatcgatattcaaatgttcgtatttttataaaaaaattgtatttagaaagttttagggataattgtgttcttgtccttactttgagttacaattgtaattttgcccctcttttttagggtttgtgattttaccctactttttttgaattgaagcttcggtttgcccctgttttagatggcattaggtgggtccagattctgtaagataataaaatgaataaggtaaagaaaaaattgtttacaaaatgtagaaagaccattgtagccctgtaaaaaacacttaccagttaccaccacccagccatccaacccatcctcctctcccatcccaaacaggtggatgcatgcgacggaggtggcggcaccggagcaactcacgagcaggctacgacggcgcaagtggtagcgcttgccggcgtgagcagcggctgctcggtagagagggagtaggcggtgctgctcggtcaacacgcgagcaggtggtggctcagcgacgcaatagcaggggaaggggtggctcagcttggctcagagacgctgtagcttgctgcgaacatcgtttagagtaggagcagccacaaggacacacgacaagcaagctgtggagattatagataccctatacccacatggtatatatatccgactgggtataggggtactgtatgtagatagaatatctttaagagacttgggttaaattccaaacttgtgtatcaaggaaatacccggagtcttagtcgtttacgattgtattttatctttactcgcctattccgttaggaatatgggctgtaccttgtaatacggactccttcccctatataaggaggggtccgggtgcctcttggggcataacttttctcccagatcatacgatcaataatacactcgacggaccaatccatggacaggagtagggtattacttctcattgaaagggcctgaacctgtataaaattctgtgtctctaaacccatccacttctccagattgatagctacccctttttgtattgctgaaattttgtttcgacaggttgcgtgccaggtaggcgtagcgtcaagtttttcgccgactagtgcgatgggttttgtctccggcatcgacgacttcgtcttccctcccgggcaggcgttccagttcggcagcctcgacttcatcactaacgactttggcaatatttctctccttgactcggatccgaaccagtcagggagaggtcaggcctctgccccgttcggtctcccaaactcggccgagatctactccaagatcatctcatctgagtcggcttcaaactactcggaagagatccaatctacttcgacacgacctgatcaagacgatggggcctatccttcaatcctgatgaagctccccgatgacttggctgctatttttaccacaaggatgtctcctccccgtaggtctagacgggatctggtctctgctccaatccaatctagctccagggaagtcggcgtcatactccagcctctcgggacagtttcgacggaagaattggacggctacctcagcttccccggtgtcgactctcgaccgacggagatcctcgagtacgacaacttcggctaccactacgactacagcaacctcgacgacttcgacgaaggctacgaagacaactacatgcctctcttctttggcgttttcatggctaataacgagacggcataacagcgccaagcccgagaagcagaagaacaacgcacatgacaagaagctgagcgtcgccgactggaggaggagcgactagcacaagagcgagaccggctgcagcgtgagcaa

SEQ ID NO: 29758 - DNA, 13758 bp, Oryza sativa
gattttaagattatcatcaaacaagcctcagtgttgttgccgtaggatccaatagtaggagcagggatcatggtgaacgatctgttcactcacctgtcgataggcatagggagtgcagggctgaacagcaccgctcttcgcgtcgcaggcgtcccgtcgatcttcgcgatactatcaatcggcgtcacgcgaaagaggctatattccccaccattcaccagatcgttacgacgacgatgtggatggagttgccgccttcacaagcgacctgcgtcgagtggattggccagccggcttcaagccgactggaatcgagaagtacgacggcacaacaaatcctgagtcttggctcaccgtctacggtctcgcaattcgtgcagcagaaggagatagcaaagccatggctaattatctgcccgtggccttagtggactctgcccggtcctggcttcacgggttaccccgtggcacgattggatcttgggcagagcttcgcgagcacttcatcgccaacttccagggcacttttgaacgccctggcacccagttgacctctacaacgtcatctagaagcctggagaatcccttcgagattatatccgacgtttttctgaacaacgcaacaagatctctgacattaccgacgacgttatcattgccgccttcactaaaggtattcgtcatgaacttttagtcggcaagtttggacgcaagcctcccaggacagtcaagcagatgttcgaaaaggccaacgaatacgccaaagcagaagacgatgtcactgcatctaagcagtcgggcagtacctggaaacaaaagaaagatgcgccaactacaggagggagtggaagtgccaatcacaaggatcgcaagcgtaagcccgaggaacttgtggcaactactacaccatcttcccgacagcaatcacgtgtcaatacctttgacaagattatgaatgcccaatgctcacatcatccgaactcaaaccatgcggccaaagattgcttcgtttataaacagttcgcagaacaatataccaagaaagcgcggaagccaactgatggagaacagagctcgtcaaaaaagaaagatgaagaagacgatgcaccgattggctttcaagatcctcgaaaggaactcaatcacatttttggtggccccatggcatatgagtccaagagcaagcaaaagctgactgaacgggagatcaacgccgtccagcccgatacaccccaatatcttcggtggtcggagacaacaatcaagtttgactgctcggatcatcctgaccgagtggtccacccggggcggtaccccctggtactagacccagtggttcacaacgtcaaactccgacgatccctcattgatggtggcagtgcactcaatatcctttttgccaagactctggatgacatgcggatccctcggactgagctgaagccgagtagtgcgtcctttcatggagtcatccccgggctatcttctactcggccagatcactttgccggtcaccttcggcattcgggagaactttcgcacagagaacatttgcttcgaagttgttgatttcgagacagcgtatcacgctatactcggacacccggcgttagccaagttcatggccgtcccacattacacctacatgatgatgaagatgccaggacctcgaggagtcatatctttgcggagcaacatcaagcaagccgtcacctgcgataaggaaagctgcgagatggcccagacacgtgagatcacacttgctcgagaggagatccgactggctgcatcaacgacaaccgaaggagaagtgcctgcacccaagatatcaaagaacagagaaagcgacgccaagaccaagaaaattccccttgacccttctgatcctactaaaactgctgtaataggtgccgagttagattgtaaataggaaagcgtgctcatcacctttcttcaagctaataaagatatttttgcatggaaaccatctgatatgcctggtattcctagagaggtgattgagcactctttacatgttaaggaaggcgctaaacctgttaagcaacgactccaccgtttcgcacaagatagaaaagacgcaatcaaggaggaattaaccaagctgttagcagccgggttcattaaggaagtcctacatcccgactggctggcaaacccagttctggttcggaagaaaacaggacaatggcgtatgtgtgttgactacaccgacctcaataaatcttgtcctaaggatccctttgggttacctcgcattgaccaggtagttgactcaatggccggctgcgagttactcagctttttggattgctactcgggttatcatcagatcagcttaaaagagtccgactgcttgaagacctcattcattacgccttttggggcttactgctacatcactatgcccttcggattgaagaacgttggagcaacttatcaatgcatgatccagaggtgtttttcaacttagattggccgcaatgttgaagcctatgtcgacgacgtcgttatcaagaccaagtagaaggatgatttgattgcagatctagaagagacctttgccagcatccgcgcattcaggatgaagttgaatcctgagaaatgcaccttcggagtaccgtcagggaagctgcttggctttatggtgtcccgtaggggtatacaagccaacctggagaaaatcaatgccatcctcaacatgaaaccgccgagttcccagaaagatgtccaaaagctgactggatgcatggcggcactcagccggatcgtttcacgactcggcgagcggggatgccctttttcaagttgctgaagaaaaccaacaatttccagttgggacccgaagcctagaaagcctttgaagacttcaagaaacttctcacaactccaccagtcctggcttcaccacatccgcaagaaccactgctattatatgtgtcggtaacatctcaagttgtgagcacagtcctggttgtcgagcgggaagaagatggccatgttcaaaaagtccaacgaccaatttacttcgttagcgaggttttggccgactccaagaaaagatatccccaggtacaaaagttgttatatggtgttttaattaccatcgggaaattatcccactattttcaaggtcactcggtcacggtggtcacgtcatttccactcggagatatacttcgtaatcgtgaggcaaatggacggatagcaaagtgggccctagagttgatgtctttggatctatccttcaagccacgcacctcaatcaagtcccaggccttggcagattttgtcgccgagtggaccgagtgccaagaagacacgcctaaggaaaagatggaatactgaaccatgcactttgacgggtcaaagaggctttcaggcactggagcaggggttgtactgatttccccaactggagaaaggttaagctacgtactgtggatacatttttctgcatctcacaatgtggcagaatatgaggcacttcttcatggattaaggatcgcggaatccttagggattcggcgtctgatagtacatggagattctcagttggtcgttaatcaagtcatgaaagaatggtcctgcctcgatgacaatacggctgcttatcgacaggaggtacgcaagttggaagataaattcgatggcctgaagttaacccatgttctccggcatgataatgaagcggccgacaggttggccaattttggttcgaaacgagaaacagctccttgtgatgtgtttgttgagcatctttatgaaccaaccgtaccaagaaaagaaataaccgaggcggtagacattcaaaaagtaagcatgatcgacaccgactggagagagcccttcatcaagtttttaacaaagcaagcactccctcaagataaagacgaagccgagcgaatttccaggcgcagcaagctttatgtcatgcataagaccgagctgtatgagaagagcccatcaggaattctgcaacgctgtgtttctttggaggagggaaggcaattgctaaaagatatccactcgggcatttgtggaaatcacgctggcgcacgaaccattgttggcaaggcttatcgcagggttttttctggcccaccgcagtatccgacgccggcaaaattgtgcgaacatgcgaaggttgtcaattttttgccagacaaattcatctaccaactcaggagttgcaaactatcccattgtcctgaccgttcgcggtttgggggctcaatatggttggccctttcaaaaaggctaccggtggtttcactcatctttttgtagctgtggacaagttttccaagtggattgaagccaaaccaatcatcacaatcacagcggacaaggctagagatttcttcatcaacatcgtgcactggttcggggtacccaatcgaattatcactgataatggtactcaattcactaatggtgtgtttaaagatttttatgaagactttggcatcaaaatttactatgcctccgtagcgcatcctatgagcaatggacaaattgaacgcgccaatggtatggtacttcaaggcatcaaagcacaagtctttgaccgactacgtccctacgccggcaagtgggttgatcaactgccatctatactttggtctctgcgcactacacccagtcgggctacagggcaatcaccgttttttctggtttatggcgcggaagcaatgttgccgagtgaggtagaattcgaatctttgcgatttcgcaacttcaaggagcgctacggagaagaccgagttgatgatcttaaccgactggaggaagctcgcgaggcagccttgattcagtcggcccggtatttacaagggttgcggcgctatcacaaccgcaatgttcgatcgcaggcattcttggtcggagacatggttttgaggaagattcaatctacacgagatcggcacaagttatctcctctatgggagggaccgttcataatttctgaggttactcggccatgttcttatcgactcaagcgcgaagacggtactcacgtcgacaactcttgaaatattgagtatcttcgttgtttttatgcttaggcattactcatgtatattcttttcctttttgactgccaacatcaaattatctcttgaagttaccagtcgggggctattataataataatggagtgtgatttttatcaattcaatttgcttacttaatttatcattgccctgtctgattttttggcttagctaatgaggattgaaagttttttaaggacttttgcgggttctaggctcaacaaggtctgacgagaacttttaagaaatcgaacgctaagtctagattatcaagcacagcataaatacatcagtattgtacaaattgagcctccagcatcaaagattacatcatcaattagattcagttttctcatcgtcagattcatcagacccagtcggaccaagattgttgtcttgaaatctctcaacaacatcagcagcaatcttgtcggcagccttctgtgcattgttgatgaggtcaagggcatcttcttcacttgtcccatccgcaaagcagtcgatggcgtcaatatcgatcttcggatacaaggacttggtcatcgccaatgccatgctcgctcccatgcatccagcttctttgatgttcttaaagtatgtatccggagtagttctcagcttgtcaaagatttcaacaacgtcgaatgtactcggaccattgttattaaaaaacatagcttggatgagtggtgtagcggcatttgtgccttcatccctagctccttctagcttcttaatcttgttgaccaagacttcgaattgagcctgagatttaattttgcgatctgcataaaaggttcaaatcaatgtctgggcacgaagacaagaatagttctagagttctaactacaaataccttcaacgtccttgagagctgagtctcttcgcttggttagttcacccttgtctttttccagagctttgattcgcttttctagctcggtgatcttggcagcttgtactgtgatacatcctagtggttaattgaatgcggatggcggcttggagtaagttaatcaaggatagggaatacctttggatgaaccactcagctcgaaattggaatcttgaagctcagcaattcgatccctgagatcatgttctgtctttctggctagctccctggtttcatggagttgggttctagttgcttctagagtcccgagatgagggaccagtttctcaagggttgttgtttttgcttcgttccgaagatggattctctgcatcacaaatttattcagttcagcggagtggccgacaggataggtaaagctatatgcaggaaacatacatttacaaaacgggtggcttgattgagtgtttttgcaagcagagacacttcctcgtcttctttctgcttatttattacgatcccttgtggctgcatttcatcatctcaccatataactaagatgggtgggcgagaatcttcagctgattgaatccgaagaacttcttcttcgtcaccaatcattgggcctttacatatgcatagatggtggtaaagcaatcgaagagaatttttcaaatgtaaatgaattcagagaattgattacatgctataatcttcggtggaggacgagcaggctcttgcaccttatcagatgaactggatttcgggccggtgtcggtatcttttgggggagggctgcttgcttgtgcatctgtttccgggatatccttattatgttccatacccgactggtctctagtcgggggctcctgattagcatcggcctcagcttcagccgactggtttccagtcgggggttcatccccagtctttacattgtcggtcgccggctgatcaccagtcgggtgattttcgtcagtcggcccggtttctttggtggtcgtagatccagtctccttgtcagttgattcagggtcttttccagatagagcaatgtcagatggcttcctgcagattcaagatatgccatcaacgatatcttgatggagtgtttgacaatacaggagaaaattgcaagatgactcatacctggatgacttcctgattttgggtatcggacggctggatgttttcttcttcgggttagcctgttttggctgctttccagtcacctctttgcttaaagttttttcagcattgtcaccctcgtcatcgctcaagactaattttctcttctgagagcccgactggttagtcggctttgggctgctcggttgaacagttggctggaattttggactgccactggcctgaccagtttgtcggcgaggagagcggcattgagcggttggaggatcagatttcattagagaaaattcctatgcatgatatttctagttctcagccaatattacaaaagataaaaggatatcgtaaggaatgccggaatatttgatacataccggtggaggagggttgaaggcgttatatggcaccactggcagtaggtgcgaatagctgaccacaataccggttaagaaaattttatacatcctctccttcatgatcttaaattcgagggactccggatcttcacggttggggtcatttttgccatcaaactcaaaggcggtgcgggatctttctttgataggcgccagtcggctcttgatgaagtgccgagtgatttgctccccttgcagaccttgctctttaagtttcagcatgcgctccatcagggtaagcgcttgaacagcttcatctcccattggaagcgagttccaggtgtcttgatatactggaggaaggcaagagtactcgggaagcgccagttcaggattctgcacatagaaccagtttgcgtgccaacccttgtttgatgttttgaagggcatgaagaaatatttctggctcagggtgccccttagctgaaaaccggctcccccaacaacgcacggcttacttttgtttggctggggcttcaggaagaaaatgcggcggaatagggcaaaatgtggcctaatccccagaaaagctttgcaggcatggataaagttggcaatatgaactatggaattggggttcagatgatgcaagctgattccataaaactccagaatctccctaaagaatttcgaagttggaagagaaaaaccaccataaaagaaatgggagaatacaacgacctcgtgcgtgtccggggtcgggaatgcttcgccatacgctggacgccagccgatgatctcctttgtcagaagaacaccgtgcgccaccatctctttcaagttttcctccgttacatcggagggagcccattgactctcgaagctttctctctcctctgccatggatgtgagatagatgatgagatttgaagtgggaatggcaaaggaatagatgggagattgatgcagcggttgcgcggaagatcttcgcggagctacaaagcctcgtcaaggtggattgatgtggatttgtgaaccctaattttcgctggagtggttgttgtactgtagcgaagaatggggatagtggcggatgtttcggcggggaagacgaaacgactcttgttctgtgtcttttgttagggtatcgggaggtactaacgggcccgggcctacacagtactttcagcccaacttcattattggcgtggttggtcgtgatccttagggatttaagcatatatttttgccttggtaaaaattgctcacaacagaatagcccaatgccgttaaaatcctttttgatgcagctagataattctttggaattactacaatgcgaaataaaaaggtgcccgacagaaaagtgtaatactaatttttttggccttcttaggctacaaagctgcttgggttttattgagatggctaatttcagatggctattctctcagcatgttatatgcttatttcgataatgacataagtcatagcttaggctattttgacttgtcatttgtcattctttatacaacggttgatgaaccctttaagagttttttactcggattcttatcatatatgttggtctatagatctttagagtatttttcactcgggtctttctctgccttttcgggcattttaaactaaagcagtcggccggatattttatcaggtgccacatatgcttaactatataatcaccttggagattcagttgtaaaaccactcggatggatatttcatgtaccttgactatatgtttagttcttatttaactaatcacatagtcgggggctacacctaattaggtgcatctagtcgatgcacctgattttttattttttagcccttcacagtctttgatttaagtattcgggagaccaaggcaggaataattaaagcacttgggatatcggttttcaagattacaagagaaggctattccgtcgactgtaaaggcctcaggggctactgtggagattatagataccccatacctacatggtatgtatatccgactgggtataagggtactgtatgtagatagaatatctttaagggactcgggttaaattccaaactagtgtatcaaggaaatacccggagtcttagtcggttacgattgtattttatctttactcgcctattccgttaggaatatgggctgtaccttgtaatacggactcctccccctatataaggaggggtccgggtgcctcttgggtcataacttttctcccagatcatacgatcaataatacactcgacggatcaatcctccgacaggagtagggtattacttctcattgagagtgcctgaaactgtataaaattctgtgtctctaaacacatccacttttccagcttcatagccacccctttttgtattaccgaaatcttgtttcgacacaagctcatccacgaggtcaatgcaagggatgctgcctcctgattttctttttgtttttttgcccatctcatagtatatatttgggagaattttgtttggtagattttttttcttgtgaatgcgatgaatccttggtgaattttttgcgccctgtgcaacttctgtaaaagtgatatccaagctctatcaaaatctgtcaagtttggtcaaatttgagagcaaatgtaatgggtatatatgtcttcttgcagctcatttgacaccgttagttggtcttaacagagtaagggcaaattgaaacttcgtttgaaaaaagcaagggcaaaatcacaaaccttaaaaagaaggggtaaaattacaattacaatccaaaataggggtaagaatgcaattgccctaaagttttaatatataaattttctacctatctctactataataaaaattgaagatgtttttattggtattttgatatgtcattcgtatttgagtcggtttttaagtttattttttggaaatacagatccgtgtatgagtcggatttaaattcgtttgcttttagaaatacaaaagaagtcgtataagaaatttctttaaaaaaattttgcatgctatcttgaggtaaaagttaaactcctaattacagctaatgattttctaaaaatactatctaagtgaattcacataatgattttcatcctagctaaatgttgacgtaaaacatgaggcctgggagatctgcttaactccagtgcaggtccaaaactcgccttcgggtatactagtgtcccagttgatttgatcctgcaatcaataaggaatagagacaaagaaaccgcgattaaacctataaatgatagccgatcggctagatgccgatgacatatcatttatctttgagccgatgtcatatgtaaatcaatcagcgtatagttcttatatcgatatatacttaaatcatgtgattaggatagatcggtcgccatgccgagacagtataaatcacttagatcgaaatatatattaataacaggactatatatgtttatagcatagccgatcggatagatccagcatgtatcggctaatattccgatacgactttatgttaagatgttaaaacaggcagaatataccaaacagaagcttaatatatttgtatgcaatgaaatcttaacataaagggcagatttaacgtgttaataaagcatatagagcaaatatagttaaatcagataagatcggctgaaactccgacactaccttaatcggcaaccaggaagcaggctagagattggtattctaagcacgatttaatagatcaaactcaactgatgcaacattaagtatgaaaagaagagcaatttctagacaatcaagccgctggaagtttcatagagtggtggatatcttatataatataaatcaacgtcattgtctaacctaatcaactgccctcttccaacagatgttagccgattgtaggttaaataacgatattgccaaagattatgtaagatatatgataactcgacagattacataaacaagattagagtatcataaagatggaagcactaatcccgagaacacaagccgttataacaagttttacctcttgttgaagatcgaaaccgatgcagctcaacccgaaagcaagaactcgtcgaaataaaactaaagcaaggcgatgcgctaaaattgtattgaacgtgtgtgttaattgattacatggggttcggggtctatttatacctgaaaattacaaacaatgtccatatcggacacgactcttatctctaacaaactctaagataccataagtctttacggcagacttttgcccaaacatatctctaaggaaattacataaaatatcctaattaatagatacaattgccttctcaggactctatccatgtgcggcaatcatcttgaagtacctcgatccaacccgatgtcataaaccaagtcgtattgtcggaatcggctgcatcggcttacctagtccgactcagacccagtcgatcctaatcgtagccgatctggactccagccgattctttctctgttctcgaaccgatctccgccttcgactccacttcaatctaatcttctttttcgatgccgatattaccaaatttggttgtcaacactaaaccatataataataataaaattaaaatagcaatcacccgttataacgcacgggtattttttctagtagttatatacattgaaactttacacatacaaatgcatatacatagaaagtatatacatggaagaaatatctacgtataaagtatatatacaagaaaatatctacaaagaaagtttatacatagaaagaaatttgaatggaaagtttgtacattgaaatttgggtatataacacgaatagaaaaaagaaagaaaaatatgtgcattcgatcaagaagataaaattaaaggtgctcgtgaacctgtgtgcacatgtcattttttaaaacaaaattatacgtgtatgcatttttcttttgaaacattcagactttcgtgaccaggggcggagccacatgcattaggggggtgcccagaacccggttcataaattttgttaactatagtttatctattttcaccatatatatataacctgtcaatttaaacttaggcacccgtatcaagctaaatttgatccaaaccaaagtatagcaagcgagtggaacccccctcattttattctagctccgcccctgttcgtgaccttaggaaaagacctcgtgcaagtgtgagttacacattgatactgatagacacaatagactcgcgccggccgactagacgaagcctgcgatgcgatcgcgtgtggcccaccctcgcggtcggtcgcattctagaggtacctgtagacggaagaactctgctttcggaaccaaaataagggcatgtttagttccaaacaaaatttttcacgctgtcacatcaaatttggacacatgcatgaagtactaaatgtagaaaaaaactaattacacagtttgtcaggaagttgcgagacgaatcttttaaggctaattgcgctatgatttgataatgtagtgctaccgtaaacatttgctaatgacggattaattaggtttaataaattcgtctcgcagtttcctggcggaatttttaatttgttttgttattaaacaacgtttaatagttaaaatgtgtgtctgtatatccaatgtgacattgcatggcacaatttttttttgccaactaaacatgcccttaaaaaaagtaaaaaatgaaaaaaatagttccttagccttggaataagtccactttgactcccttaaaagtgacccgaatctaatccgtaaccctcaaccgcaaaaccggataagacgactccccaaactattgaaaccagtgcaatttgacttccttagtgttttggaggacggttttgctgatgtggcgctgacatggcgatgttgacctagccttcgtcccacgtggtgcttacgtggcattagaattaaaaaatatatgtggggcccatatgtaattcacacataaaaaatattgtgggcccacatgtcatcctccctctctcttcttcttcctcttccctctctctcccttctctctctttctttctcgtggcacaattggtaggcaggggctacgacggcaggcgggagttggagcggtgggcgagcaatagccggagcggcaacggcggcggtaggcgagggccggagcagcatcgggcaagctgagatgtcggcgagcggcggagacacgggcatggcgtggcggcccgcgagcggcggagactcatgattggcgtggcattggggaggacgacggtggtgcttaacctctcgccggtgatagggcaggtgcggcaccccgcctcgatctcca

SEQ ID NO: 29759 - DNA, 14266 bp, Oryza sativa
cggaggtggccaaggcgctctgctctgcagaggctcttgcggtcgccggacgctgccggagctatcgctcgacccgcctccgcactcctccaccccctccccactcgcgccactagggtcgccgcacgccaccggagctgctgctcgatccgctcgagttcctctcctgctcatagagcgccttcgctgtcgacgtccctcacccgccgctgccgccgtggggttccatgacgctcccgccctcgccctaggtggcgctcgccgccgactggctctaaatcgacatgtgaagagaaagagggagggagaagggagagagggggagcaagaagaagagaaagagagagaggacgacatgtgggtcccacatgtcagtggggcccataactttgtgtgtgtgaatgacaaatgggtcccaccgatatttttttaattgtaatgacatataagcgccacggtgggacgaataccggtcaacaccgccatatcagcgccacgtcagtaaaactgccctccaaaaccgctgagggagtcaaactgcactggttttaatagttcgggaagtcgtcctatccagttttgcggttgaaggtcatagattagatcgggtcactttaagggagtaaaagtggacttattcctaatgtggtattctctattgggcccattgcccatgggctctaagcccatcttccacatcttcatttattgaggtgtgttcgcatgtggtggccgggaacttattccctcctcaccaaaaacacgcgtgattaattaagtattacctaattttttttaaaaatggattaatttgatttttaagcaatttttgtatataaatcttttataaaaatcacaccgtttagcagtttgaaaagcatgcgcgcggaaaatgagggagagtgctgggaaggttgcaaacacagctgcgcccctctcaaaaaaaaaaaagaaacctatacctgcgctgtcgctgtccacccgtccgtccgtcgtcgatggcgtcgtcgtcgccgccggtccggccatgggcggacctgcagcacgacctgctcgtgatgatcatgtcccgggtgggcctccccgatctcctctccggcggcgccacccgcgcctgctccgcatggcgggcctcggcgcgcgacccgctcgtgtggcgccgcgttgacctccgcgactgggccgtcctgacctcggcccggcgccggctcgctgcgggagacggtgaagcagcagccgccgggcgcgggcgtgtccctcttcaagccgctctctgcagtgtgctggagatcgtcgtgcggcgggcggccggtcggatggaggccttgctcctaccggagttcgccgatgaggagcacctcctcttcctcgctcagaggtaacgcctccttctcactgtctctttagtatatgttttgtgattgatgtgaagatcccgtaacgaaattagtgtatattcctcccaaatccgctcatttctggttgaaagagagatattttcttagttcattgtggtcctttggtactgtagatagatagaaatgctgaattcttgcaaccttaaaaggaatgatgtcacaacagatgttctattcatttttcatgggaaatttcatcttattgtcataatgggatgaaaatttcatttttgttgtttcagtgttggaatttagatggattgggttcacctgacttgaatggtgaaatatcacgtttaaacgaaattaatcctctttttttccctgaattaaggatgtcccagagcatcttttgggacctaattatcccagatatcctctaacctacctgactattaggatatctttgctaatagcttcaccatattgcagtcaccctaaacaggaaaaaggccagactgtactgtgaacaaaagaacacctttccattgagcggtaaactgtattcaatgcttttccaatttgtcatgcatggatcttggtataggactataggagcccattgcttgtggtgggaagtttctccacaccaagtatactattgctgtttcacttttcaatataccttccagaacggtaggaatgtacaagcatggaaggttatgataccaggacatcttagtcatactgccttctttcaaaacaatatccttttttttttcaaagaatggctgctaaacgaacatatgagaaaaatttctacaggttacttttttggttacccagtaatggaaatgaactaaagaaacagcctatgtcacaagacaaatgctcgtagtggtatggaccactttgcccactacacctggaatgatacttttctattgtttgtctgtgatatgttaacaaagagcttgcagggttcccaacccagtttctcccccacaagttattcaaatgactccctgttcaatttttcaacatatttaaacttaagttgtattgtgcttttccaaatatgttcatgagataggttctccagatatctaaacatgtgtttgcactttgcacagaatttgcagtgaagtcaccagatttttcataaccatgagaatgtgatctatcacttttactgttagttagaaacaatatgaaaaaaaaattgcttttcttttgtggggttcaactactacatttatggagttaggatggctctataattttcacgaggcataataataaaattgaaagatagtttgccaccgtcaaatatatgattgccattcctggctggctggctggtcataagtcaaggataagtagcgaaccagcaacaacacctttgctttattaactgtatcatatcattattggctattttgttgcattcaaaatctatttcctacccgttagttgtgttcaatactctattagctatgttaaggaatagacactctaatataagagttcattgtgtcttaagtttggcaagcagaaaaaatcggcaaaacgtctatgtctgcactgataacaatttggaactgccaccatgccacattacaattaaatgttctcttcaaaataagtctaaatggaaatgtaagctagtgcatggaaattcgacaatgtctggatgtggtagcaagtgtttgatttcagtgcatgatcctacaatgtttttttagataatggattttcattaatccgtcctctatatccataaagaatatacacaaccaaaacatgcactagttcttagactccaatcctcacactaaggaatacacacaaacacacacacaaaaaaaatgaaaagcttgaagacttagcttaaaccttcatcgacaacctaaactttccaccttagtgcgagagggtggaagaggagaattggaactaagtccgtgctgcccatcgccgcaccatctccgtctttgcagatcacaacaccatctgttgccaactgatgttgtccgccatcatcgtccaaaaccccttacgctgccactgcattccgaacgccactactgcaccctgagttgctctgctgcgccaccatcatcttgcgcatactgtcgaactcactgtcgctcttagagcaacgcgaagccgtccagcataacatgcaactgactttactgccatcagctcacggcgtcaaacacctaaccgcagctagaccttggcgtcgattctcgcttggcaactgctgcctgtaggacaccgctgccgagagtctctgttgccactgccctcatccgcgtcaggcgagccaacgaccatcacatcaatagccactgacacccaccgtcctcccatcctcacctggctgtggtcagatccgagcgctggagcttgcctagacgctgccgcctctagaatgccgtcaccgagagtctccgctgtggttttctccatctactgtggctgacctgaccatataccatcgtcgccatgtgcaacaactgacctgccatcgagggagaagggttagcccccactgttgcccgttgtcgctaaccctcgctataggtgccgtggaagggatggaggactagccctgtctctgcccgatggcgccaccgccgccgcccaccaacgttgcctgcgacggaggaagggatggagaactagcccctatctccatccaacgcaatcgcccaccaagtctgtcgccgttgctagtcctcgccatcggtcacagaggaagggacaggggactagccctcatctctgctgcccaccaattccgccgatgacagaggaagggatggagggcttagcccccgtctctgcccaactccgccactaaccacgtacgctggtcctcgccgccacagcaaccacggccgccaccggagctcctagctgactggcaaccgcctcactgccacctccctcagccacctcgggcgccgccgccacctctgtcggcatcaccgccgctgtgctgcttgccagatccaggcgagtcttgccatgtcgccccatccaggagtacggaggaggaagccacgccgccagccaaccatagggcgccacacctccagccaatacagagcatcgtagtgatggctaggatttgaaaaactgcaactgaatctgaagaaccaaagaagaagggaaggaaaagaaggggagaagaagatgatggagaggaaacaaggagggcgggggtggcgccgctgccggctccaccgccggtgacagcctcgccggtggcagcagggtcggccggtggaggatccttggtggcgaagttttttggtctcccgggttgctccgtgggagcgacacggaagttggttcgactccttccgtcggtcacaacaattggtaggatcttagagaatctcacatgatcctacaaatacaatgatgcccttccatttcacagtatttctccttattataaccactttacctctttcaaactgtttaattactgagagtatggaaacactgaaataacatcttgaattctgtaatgcactaatattgacatagagacattgtgaggcggatagactactacgaaacaatcctgcattcgtaatatattaaagacgataacaaatactgcctaggatcctgatataacagtcaccgctacatacaggtgggatgtgctgtccacaaggttcggagttcagaataagtttattcagtatttctggaattactggccacccagtgaaatgttactatctcctttgatgtccaggaggcacatggaagcaagtgtagcctacacatctattgtcaaaattaatccaacggccattttctactaagatatcatctggtttaatgattcccctaccatcagcaaatgactgtacagctttcaacttctatttccaaatagcatttactagtgccagagtgaaacttgctgcagcgtaaagatgccatttcccttgcgtgtgcactctgatgtgccgtctggttacaccatcagtgctctggtgaacagtgcatgccattgctcaggcctcatgctgttgcactgagccactgaccatctggactcatgatcccgactcctctgatggcagtggcttcgatgaaagaggttggtcaatcaaccaacctgtctcaactcttcccgattcagcagcttcctaaactttttgctctgaatttccattagaatgatgtcggagcattgtgctctttgcatgttagcagttagcgcgaatactctctgccccctgtagttctttttttctcgtgttctacggatctgctcaaacaaagaactaggagaagtcatctcatacatttccaatttagtgccataaatgattactctattattttccctccaaaatgatttctttaagaaaaaagtaatgatttctttaagaaaaagttttgtgaatgaaccccgggcattggattaatttagacagtagatatatgtaggcaacatttcaccctaagatgcctcttggatgtcagatgatccagttcccagtgaaatctggtgacctgcggtctgcggagactgcaagctaccatagttattgagaccggaccggaccggaccggcggttggaccggaaaaaaccgaaaccagagcctccaccggtctggtccggatgaaagatcgctgtgcaattgactcggcagaaattggatggaccgtccggtttttcgttaaaaccagctagaaaaccagtccttgatccgccgattgatgctaactatggcggggcgcgtgcatgcatgagcgacatgagtggagaaaattgacaaaaaaggattttggtgggaattgaacctaggagcacatgcaaggaagccacgcaccttcccaccaggctaagcttgcccttatgtttgaatggaatcagtagtttatataaacattattgaactgctttagaccaggggttcaattggtcagaccaatgaaccgttgaaccaaaggcttcgccggttagattgccggtccagtctcaataactatgccagctactgggtagaaatttaataaaagaattgaattttgactggtaaccggctgatacatttccaaatttaaagttccggtttcaaatttgaatttatatcctctggctggtaaccgcccctaatttttctttcatagtgttggagaaacaatctatcacgtgaacgtgcctttttgggacccaagcaaatctcactccttttattgcgatattagtcaaattttccatcttttcactagctatttctgattcagtaatgcttgtcaaatattttttgtcagaacgttgtgaattatgtgataaatggtatttttgatgaggcttaaggccaaaactatccaacattgaattgagattcaattacatgtggttttgcagtgtgttctgttcctcataatactcttatggcattttgtgttaggtatcatttgtatgtaattatttgtggcagtgcgctatttgtttcgtctggatacttttggccaaattggctaacagttattttccagatatttatggaaatattgttatggttaaccatggactaagtgtatttcatgttatttttctgcaggaatccaaatctgcactatttcagccttcctgccacatgtataacttatgatcagttccgtaaggcaattgacaaattacaatttcttaaaggcatggcagtggatgagggtcttattaatcacgatgttctcagccatgtacatcagtgttgtccagattttctggagttgaaggtgtttgctctttatgtcgacgaagagatggcttcaatcatttgcaactcccttccacgtctgaagaagcttgagataccaaactctgatatgtcttgtgctgcaataataaaattccttgattgcctagaggagcttgagtacttggacatatctggttatgagacttcggcaatatcaagtgctgtgctccaaaaagcttctcggctgaacatcttcatctggaactcaaaatttgagcttggggagttcacggactgttcgaattgtggtgaacattgcattaatcctcaagagccttgtaagtgcgtgatggagcacagagtcatggactggctggctggaccttcacaaccttcctgatgcagtaaactgtgacttaagttaaattgacaatcctacctgctcgtcaaatttcaacatttgtctgggttacttgtcaatcaaatggtgggtaaggtggtaccacgctttgatgtgccttatgtggcactttattttggagtttaatatgtatgtgatatcacgatttccagcattttattgtcaatgatgtcttgtgagaacgaagcaacgcacgctacttggtgcagtgttgagccttgttttacaataaattttaagtcgttgcagtctcttgggcctgagcgagctggcaaacgcatggctgttcggctgttccgcctgtgcagagtactctgctttgtactcttttgttaagcaaaagatgccctgtgtttcctcgagaggcatttacgttggagatctccatgattgcactctttttttttaagttcttttactgtggtctgtggagtgtggactactgcatcgtggtgtgaattcttttaccgcctccgcctccccctcgcgccatcgccatcgtcgtctccttcggctcgcgtcgccactgccgccgctttctccaccgccgtcgccaccgcctccccctcgcgccgccacctccgcctccgcctccgcctccgtctccacctccgcctccgccgccgccgtcgcgccgccatctccgagctcctccgcctccccctcacatcgtcgccgtcgcggagcggcggtgaaggcgggtgctatctccatcggcgacgaggtcggagcaccgacgaccacgccacaggtcccagtctccctcgaccctagcagccgcccttagccctccgccctctgccgcctctgtcccatccgccgccaccgtctccgtctccgtttccgtctccgctccgcctgcgccgttgccgagcgtctttccctcgcggcacgccgtcgccgtcgctgggtgcgccacctctgcatccgcctccatctcacgccgccactgccgccgtcgctgccgaccgccgacgtctggatccggcctctggctcggcggggtccagctcggtggtgaggagatccaaggccgtcgagcgcatcctggatctccggcaccaatgaccgcgcgcatggaactggcagtggcagtgaggagcacggtgacggcgcgccaatttctgagataagttttttgcggtttgtactagaaagaatagcccttccaattttttctgcgtcgcccattggatgggaggaggttagaagaagatagaggcagtgttatacagggttccaccgggtggcttctcatggaggatgctggtacagggagtggtgaagcatggtggaggatgcaagacggtgcggtgctcgagaggcgggcgcgaggtgatgtccggatgaggtcggcatcgggtgggaagaggacggtggggtactttctttcttaatctaggcaactcgttggtccatttttgcttgattttgtttctgcttatgatggttgaaaagaagtttggtctttgcagcttgatgtttcccctttgtgactgttttcatgtacaggtttggagttgcactaaatcaaaaccgcatttcatcaatggtatagggagctccgtttcagatttggggaagcacagaacttgtccatgtttgaggatggcaccgttgtgtcaaagtccgaggaggctggatttacttactgttaaagatggtgattatccctcttccttaatctccctgtcaaatatttgctgttcagagtgttgaactcaatcaactgcttatattaactaatgaaagtttggtactttggttccaaggttcttttgtcctgcactgcccaaagctataaaaaccatgaaaaaaagcagacaagttgctccttacagctaaaccatgaaaaatattattcagtttacttactaaaagcaatctatctcttctgtcatgcagatgagaggcctcctgtgatttacctgtaggatcatgtgagaatacaccaatctgcaggcggtatacattcatttatctgttttttctggaaatcctataggagatgcaattctgtcaacataagtgtgtatagtgtgttgtggagtctgatcgaagtgctaagcattcatactcagttctgtgtccctgaaacttaattttgtatgtagattaactatcacagttgtctctgaagtgatgatacacttctttttttttaaaaaaaaacttatatctcgcaaactgacttaacctttgatatcaaattatttaatatgtaggaaaaaaaaagttcagattgtcgaagcaaagctgactggacaccatgccaattgctattgtttactgcacaatcaaggagatttttggctgattctactaaatttctgtttggtaaaggtaatttccttccatcatgattaccccttacaaatagtgcaaatgtctcctgcatggatcaatcttcgctaaatggtctgtaaacatttctactgcaccatgctaagggttaaattgtagccatccagtcaagaatttctttctttgaacctacagtaccttggacatacaagcagatttctctttgtgctgatgtcatgtgccgaatacttcgtaacaagggagttgtgtgggctgttaggattcacgtctcagtcattcagtttctattctagatagcaaaatttgctatagggcatccaaaaaacgtgtaatttcacaatgtgtctgtgattaaattaaactgattactccaaataaattacaagaaccacatccacgtagcttattaatttgcttaggattacaaatgattccgagcgccacagtcagtcctacaagatcagcgtcggcagtcctctctgccctggtacaatgcgagctccttcctcttcttgatctatcctcaattggactaaagtcttagaaaaaaatacaacttgttgatcatgcagattaaggagtgcttgaacaaggttgcctagacggtgtttttcctcgctcatcctgaaagccctgatcctgaaggttcattccttctattactgacatcataactgaagcttgcaacagtttatgtgtcatattaatgccattggtattcaatccatttcctgataatatagaattgctcttattttccttgtaaaattatgtgcaagcagtaagattttaaattggttattgtcttcatgatcattggctcttttttttccaatgaagtgtattgaactagagcaaactgttactctgaacatgtcaaatcggtcatttatctgaatttataaaatagcgttaacttcctttttcgttcacaaatttcttgctttgcaatcaatataaattcagacaaattttcaagctgttaatatatcaatgaccactacatatcctatagcaactaattaaatcttctaataatggagatatttactaaaatataatggagatatttactaaaaataagatggtgttacttatttcagattcagcacatgatttatatttcagattttgtatataactcagtttaaagttcagaatgtaaataggcacaatatttagttgaatcatttggaaataaaacatgcttatgctgaactgctggtatccctatagactgaacagctagaaaaacatgcgtacactgaactgctgataagacagtttaagttcaaacatttattaagtatactgaatcattgggaattcctgtagattgcttccccatttgaattttactgacattacccatgtactgtatcaatgttaaattttggttgcatcaataaatcttctacttgttaccagcatctttgtcgcacctacttaatttgtttgatataacgaaatgaacaaggatgtgaactacagttggtacactgaattgctaagagaaatgcttgtaacaacatgtatattgttgataatattaagtattttcagtaaatacctaagcacaacctgtactgattcactatgctatgctaaggtgcatccatacatgctgattctgtgctctcatcccattattctttgacgcaagatgatcaaccctgattttgtatgtgatgtctaaaaatttgcaaaggttgagtggaactgatttttgtatgatcaaaccattattcattgctcatcccagttttagactagattgatcaagattcatcactgatccaaattttgccatgaattggacgaggttgataaagataattgtatgatttcaggcctaataaagttgtatgctttagaatggtcaattaattgcatgttttagacccaagaaaattgaaattaaactacggatcttattttatgaaagatggcttctgtactcagctcactgaatcaggttttttaattgaactctccgatacttaagttaatgtgttgaaactatgcttgattgctaattatatacttttagttttgccggatgtcatatgtgatgcttctgagggagcctaatgtacagcttgagattatttactcttaacctgatgcgctcatatgtgatgctcctggaggatatttatataaatcgatgtcgtcttctcaaattataatttactgtttttaataatttgtactggcatatcaaattactgtttttaataatttgtactggcatatcaaattaactgatgtttttaataatttgtactgatatatcaaaatcactgttgttacgcttcatggctcataataaatcgctggtgcattgatatctacatgttttcacatttgctatttacagctcaggtactttcagtgaacatgaagcttactcataaggaatcaaaccaattgtgaagatagcaggtactctgagaattgacagagatgagagtctggctaaatagtcagccatgtgaaatgccttaatgaactctgtatttcgatagatgagatagctcatttaggcagtacatacatgacgtgggttcttcgatccattcaaactctagtgctgatccatttatagatatttctcccttgcatatgctctttgcattgactcccaaccatataacattgcggggccctaaaatttatattactacctacacgaaatcagtgtaatgcacaatttattttttatgtagatatattgtactcttaaatttgtttatacaaatgatttttatttttaggtaatacaatattgctaaagtacctaaatgaaataaatgtgacatgatatccaactagcaattttcgattagatgaaatgttatgtgatttgtttgtaaatcacattatatgtttgttgtggactaaggtagattgatgttttatcggataggaatggatccaaatggatcggcgtttgaagaacgcgccccatttcgagacataactaatatttcttcaggtattgtgacatgtatatattttggactttctttgtgatctctacatactcccatcgcatatattcatataccttgtctgctgatttttcgataagcatagatgcaagagctggaagtacaacttctactaagcttcaacgtaagaaggagatgcttattaatatcatattattatgcattatgacacgggggcacatatatatgcattatatatgtgcatgaattggcatatcatattattatactttatgttaaatatatttgtgcatgacataaattgaattaaagctcaaatgtaccgttcatatagtaatattttttgctaacatgaaaattttaaaaattattaaagacaaatagaattacaccgtagcatttagcacgggcatattactagtagatgttaatgtaccagctgcagcctgcaaaaactctctccatcagcaactttttaatgctcattcagttctttcacaaacaatgcaaatactaatagaagtattttcatacaggcaacactaagcgtacgcttgagctgtgtttctgtgcaaagaatgttgatccaacagctgacttgaaaaagtatatcgaagatcttgagtgcctagaccgttcaagcaaattctatgctgttgctgtgaataacacattcatgaagcaggatagagttgtaagttcctacacctgctgctcatttatttatatacaccatacatggctatctatcttaccaattataagtcaaggctgatatacaatgccaattacagtactttacgaaagaattttctaaagactacttaaagccattgatggacggcaaggaaaccatcagcattggagttcaaatggcaggtggtgtttcaaagaatatgatgctccagatgtcaacggatgatcgatgcaacctgaagaaagtatgggcaaaatttgcaacccgcaatcacatatacctacaatcactatgcaccttccatttcaacaaaacaactcgcctggaagccaccttcgatgttctataaagaacatagcaatactcatggctatgttgcagccattcttttgctgccaccaaccaggttgatcactgtcaagataacctgtattagttctaggccttacatggtaatcatggaacctcctaatatgaagaaacatctatatatgtacttactgctattagagacctctaaatatcaagatgcctgtgtgtaatttgtactatggacacttcctcatactttctgcccctgcttgcgtccaggcggcgcgccaacggcgcgcccctagctctagtgtgcttgtatcaatcaaacaaaatgttgacacatacagtttgtgctaaatctgaacatatttttcttcaggtgctgctacctgctagcctgctgcgattcacaagcaaaaccgag

SEQ ID NO: 29760 - DNA, 681 bp, Oryza sativa
tcggttgggctatccgaagacaccacacgaagaggacgacgacgcgaactcaccggtgcaaagaacaacgacgaacgacgacaaacgacggccggcgacgagattgaagcggcgacgggctcggcttgacggcgtccgcggcgctccggcgggcttcggcttcggccgaggggtggacggtgtgcaactcctccttgcgaacccgatggtgtcgacggcgaccgaaggcgacgatggacggagacgagcggcacggctggagcggctacgacggcggcggcgctagggtggaggcggctagggcgctacgggcgacagcgagctcggccaagggtggcaaacgaaagagggcggctaggggatcctttatataggcatggatgagagagatcgggcttggaacgcaagtaatcgcgccgggaaaacctagggtttggtttggagagataaacacgaatcgagctcgattccgtgttgatttcatcgggataaagtccgattcttgggggaaaagatagaggaggataagggaaacaaatcccctcaactaattttgcaaacgaagcacgggatgcggcggattcaacggaggaagcggcagcacagagctcagcacgggcggctggagcttgaagaagaacagtagcgcggggacgcaaactagacttttctgtgtggttt

SEQ ID NO: 29761 - DNA, 700 bp, Oryza sativa
atccttttcttcaactgaggttgattgattattgcaaggtgaacatatgacatactccgcaagccacacagcaaatatgcaagtgcacaaggataccaaaggattgcataatataggctcatttgcaaaagcagtatttagcaaatatttaagaatagtaaaacagtagagtaatcatcaattttaatcaacactgaacagcacacccatgctgctcaggcccaaccattctgaacaaccaaacccggctgcacagatctaactccataccaggagctaagcaaattattaccaattatagcatcaataattattgtgagaggtgtgagactaatcatgaaaaacattgctcaacccgcccataaccgcgggcacggctattcgaatagttttaatctggccagaggtgtaccactgtacccacaagacacagcctcaacatcatgtcttccatgcgtcgcgatactggaaagtacccgaatagaggctgtgacagtacctcctgcacaacacaactcaccacagtgcaccattcctggatcataatcaccccctaaatataaccagaggcatggactccccagcgacccccgtgggcttatctcgccacttctcaatctggtaccccgcaatgaaccatgctatacaaaagggtaaagccgttacccacgctggcttctggttggtccggttaatgtct

SEQ ID NO: 29762 - DNA, 2237 bp, Oryza sativa
  unsure (1)..(2237): unsure at all n locations
gatgcgacacctcgccgtcgtcctcctcctcctcctcctcctcgccgccctcgccgcctcccgggaattcacctactccggcttccgcaacggcggcggcggcggcggcgccgggaacagcccgaacctgacgctgaacggcgtgacggagctccggccggacggcatcctgcggctcaccaacgagacgtcgcggctcatcggccacgcgttctacccgtcccccctccgcctcctcgccggcggcgcggcggtgtcgttctcgacggagttcgcgttcgcggtggtgccggagtatccgaagctgggcggccatggcctcgcgttcgtcgtcgcgcccgacccgcgcctccccggcgcgctgccgagccagtacctggggctgctcagcgccgccgacgtcggcaacgccaccaaccacgtcctcgcggtggagttcgacaccgtgcaggacttcgagttcggcgacatcaatgacaaccacgtcggcgtcgacctcaacagcctcgtctccaacgcctccgcctccgccgcgccggtcaacctcaagtccggcgacaccatcgtcgcctgggtcgactacgacggcggcgcgaagctactgaacgtctccatcgccgccgcgtcggcgtcgaagccggcgtcgccgctcatctcgttccacgtcgacctgtccccgatcttcctcgaccagatgttcgtcggcttctcggcgtccacgggccttctcgcgagctcccactacctcatgggctggagcttcaagctcggcggcggcgccgcgccgccgctcgacgtcccctccctcccgtcgctgccccgccccgccgccggcggcaagaaccgcacgtcggcgatcctcgccgcggcgttctcggcgttcgtcgcgctcgtcgccctcgccggggccgccgcctacgccgcccaccggtacaagaaccgcgacgtggtcgagccatgggagctcgactacgggcgcaccgctacagctacgccgagctgcggcgcgccacgcgcgggttccgcgaccgcgagctcctcggcgccggcgggttcggcaaggtgtaccgcggtgtgctcccggggaagccgccgcgcacggtggtcgccgtgaagcgcgtctcccacgagtcccggcagggcctccgcgagttcgtcgccgagatcgcgtccatcgggaggctccgccaccgcaacctcgtccagctccaggggtggtgccgccgccgcggcgacctcctcctcgtctacgactacatgcccaacggctccctcgacaagcacctgttcggcgacggcctcgcggccgcgcggctgacgtggggcgcccgcgtgaaggtcctccgcgacgtggcggcggcgctgctctacctccacgaggggtgggagcgcgttgtgctccaccgcgacgtgaaggcgagcaacgtgctcctcgacggcgacatgtccgggcggctcggcgacttcgggctcgcgaagctgcacgagcacggcgcgaacccgagcacgacgagggtggtggggacgctgggttacctggcgccggagctgacgaggacggggaaggcgacggcggcggcggacgtgttcgcgttcggggcgctggcgctcgaggtggtggcggggcggcggccgatcgagccgcgggcgccgccggaggagctcgtgctggcggagtgggcgtgggagaggtaccccgccggcgaggtgggggcggtggtggacgcgaggctgcgcggggagttcgacgccggcgaggcggagcgggcggtgaaggtcgcgttctggtgctcgcacccggcgccggcggtgcggccgacgatgagggaggtggcgaggtacctcgacgccggcggcgcggcggaggtgcnggagcngccgccgccgccgcctcccccgccggtgagctccggcgaggtcggctactacgacttcgtgcactcgtacccgacgtcgtcgtacgagagggcggcggcggcggcggacggcgtgacgcagacgtcggtggccacgttcccctactcgccgctgtcgatgaggtcatcccacgtcagcgtatgactccacagcctgggcccgcctgtcagtataacgataggtgggacccactgcccgcaaccttggttcaagtgggaccagagaacccattgtgatactctgttcttgccaccaaggtcgttagcgttgggatacatattgtaggatactgtggtggatagaaccgcacatatcgattt

SEQ ID NO: 29763 - DNA, 977 bp, Oryza sativa
aaatcttgtgcttcgtggtggatggcgtcgctgtccaaataaccggccaactcttcggccacaacatgcgaagaggcgtctccacttgtagccgacgaactgccacccacttggattgaacttgaagacgatccaccccaaatcctaccccactgtatcttcttcttacctgtagtggggataggagggggtctctgctggcgaacttcctgaaactttacttcatatcttccaaaaacctcatataatttacgtctaacctcagtataaaaagaactataatctacacctatagtatctccaacaagtgataaaatagcagacaatccccttaatttacacctaggatctaaaacaaaagcaagagcatacaacataggtatatttttccaatatttcaaatatttttgtttcatgtgaaagacaggttcagttagaacgtcatcattttcgtattctttaaataaagtagcaatttcaagaaggttgtgcaaaattatattagcagttggataataaacttgtgacaaagttagagtacaatcataaaaagtttctagaaattggtaaaatttttggacaattgcccaaacatgctcgttcagtactgaagacccgtcactgtttcttgggccaccacgtgactgaacaaaatcagaaagtaaactactataaggtaaaacaacttttaacattaaatacgttgcattccaccgatgctctgcatcggtggcaaacttacgagctttcacaccggccgcattgcaaaacctcttccatgcagcaatccgcgggttagaagcagttaaccacgcgattgcttgacgaacagcatcgatgtggtcacctaccctcttcatgccagtcttaacaatcaaattaattatatgacatgcacaacgctgatggagtagaaaagattgagcatacacacaaaataaaggttgcaatatttcaatagccctagaattagcaga

SEQ ID NO: 29764 - DNA, 1124 bp, Oryza sativa
gggctgtgtcttgtgggtacagttgtacacctctgatcagagtaaaactattcgaatagccgtgcccgcggttatgggcggtcaaccagattcaccgtgattagtctcaccctagtgtaatcttttgaatttggatagtttaggtggatggttgggcctgtcgcaacgtgggttagcgttggacagcggatgtttaatattaattaattgttacaactgtttaaatctttcaatttccgtttataaatgctcgctttatgcaaatgagccactctagctcttctttgttaattccctgcatcatacccctattccggtatgacttgctgagtacagtgggtagtactcagtcttgctctacttttcccaaccccagaggacgggtatgtgtcagatgaaggtttccccgaggagtaggcttcgtccgtgccgtcgaggatgcctgtggagtggtgttcccgctgcagtttagtcaaagtttagtcaaggcttagctccagttatcttttgttttccgctgcatttttgtaagacttttatgatgtttgtaagacgtggatctgtatgtcaacattgtcgcttgtgtaccccggctggtcctggacggggatttttatgcacattctgcttggaattctattcgggaatttctgggcgtgacagtaaagccgttgcccacgctggcttgtggttggcacggttaatgtttcacaatagtagctcgcgaaccggtccttaattgtcatgagcacgactctcaaaaccatgtgctcacaacccaccattatcaagttttagttggcaaataattaattaaccaatcacgattgaccatcgtgaactatcattaagccatcattaaataatagtgagtcataagttatcccaatagtgtgctaatgtttctaagcatggctaagcaatcatatctaatatctagctgaaccaatatatatagctcaactagtcaagttataataacccaaggtatcaaggaataaagtaatcaatgcaaacaggccataacaaaggaatagattcacaccacccagtgacattcgaaaataaatgcacagttgaaataaatagagaatttaaatataggatcaacatgctcaaaggat

SEQ ID NO: 29765 - DNA, 1051 bp, Oryza sativa
ggctcccctgataagctagttactcagccaggggtgtcccattccacccatgtggtcgtacttgtcttatctttggatgaaattccaaggaaacggtccttaagtgcaagagtggaaaaccgtacacccggtacgttccccggtccgcggttttgggaatttcatttagttcgcaagcaccgacccaggtgtcgggttttccaagtcttttgtaaaacccaagttttatccaagttgtttttcagatttttaagtttgaaggcgaccgtcgatactcgcacagggtgcacgaatatcgaggcacaactagatggttacaaggggacatgatatatcaattaacaaaggaaggatcaaatgcaacaaactaggtaggtccgccaatctgccttgcagacgggacaaacagattaagtgcgatcctatcaatgcataatattttgcaagcaacataattaaattcaaatataggctcaagatgttcaaaggtggcttgcctttctcgagatctggagcttgatcctcgaaatcctcgcactgcgggtcttcgggcttcgaaactacacgcaaaacgggatgactcaacaaacggtgaaaataaagccctattaatgacctataagcttgccattagatagatctcgagatttgaggaattttggaagttgaacggagtcaaacggatttacggttgggaagatattgaattttaagattattggatttttggtctaaaggaaaaaggatttaattaaatccttttttggaaaagaaaagaaaagaaaagaaaagaaaagagggagggaaatcagacttttcctcgggcggctagggcgcggcccgagagaaatggagcggtccggccgagctaaatgggccggccggcccaaggcggcccaaggcgcgcgtgcgcgggagggaggagagagagagccggtggaccgggctcaccacgcgtggtcccgggtgggacccgcttgttggtgacacggttcaccgtgcggagcgagcacgcggcgcacgcgcgcgggcgggggagggacgcggtgca

SEQ ID NO: 29766 - DNA, 744 bp, Oryza sativa
ataagtataaaccaaaagatgaggcccattagtatttacatgtacttcctccggtacggtaaaatctctctacactaatttttaaagattaagatccctctttacttaaagactacggaagagtgcatgacagatggagtagtgatgatggctgtggccatgtgggtcccatcgcgagctcactacaaaagctgccctgatgctctgaggcctctccaatctccgtagccagttacccactgtcccccccccccactctctctctgtctctctctctctcttgccgcgagatgaagaggaacgaggtaaaggagaaggagaagacggacaagccttcgacccgccgccgcatcctcggcgtcaccgccttcatcgccgccgccgccgccggcaccttgttcctgctgtcggcgatcggggagagcagtggagacccggacaagacggcagatgatgatccgccgacgacccggacaatgaaggcgccgggctttgacggcaaggtgatgatctcccgcgacaagttcgagggtaacccgaaggagtacttcagggccagccggaagggagacgaggaagacgttggcgctttcaagtaacggatcggaggacgccggcaactaaacacagcctatatgtgatctgaaaactctgcatgtaccagctggcctggatgttagcttaaatacgtacgtatagtacgatgtactatgtcagtatatgtgtgtgatcgaggcgatgagt

SEQ ID NO: 29767 - DNA, 732 bp, Oryza sativa
gatcaaattatcagcccattagaagtaacgggccattcaacgtgtgactgagctaacttaactgatttcagcccagtttaacgtcgtcaggtgtaaacattgaggacacatcatatggcaagcaaatgggaaataaacgattctcaaactacaaaatctcaatcagtactcgcttcagcatcgaccatctcaatctgacttctacacatttcatcaggaaactgccttgagggaggaactcgctaagtaaaatgtcgatccatcctagtcagcatagtcaggttttgtacatcagtcgttctttctactacgagtaggcacgggaaagaggattgattaccaaaaggggagcaggagcgtcattctttggatgaagactggccatggctttgagggggctaagaagcacgaccttccaaaatcagctccttttgaatcaaccatagagggaaacagcatggtggtcatagttacaacaaatccagcttacagttgtctggttgggtgcaggttgggtgttctttggaacaggatcgcgtcataccaccctgcacaattcacaactgatctggtcagaaattaacacagttcagagtattaattaaaaagttaatttgctacatgagttctgaagcaaactgggaaggtccctaagggcagtcccaacccataacactagacatggtttccataaactccacatcatcaagaaactagtactagacactactc

SEQ ID NO: 29768 - DNA, 12543 bp, Oryza sativa
ttttagctttaagaaacatgtgggccttcatcagttgatggaattcaatatccatacattttgacggctgggattgaagaagattatcttttcctttggctaatgatgtaaaggccaagcatcccttttctctgtcccccagaaaacaggcccagttcttggatactgtaaaaaaaaaggacattgtcaaagggagggaaagtcagtagtatcatatattgagaaacgagtttaaaactatattgagagagagagagagagagagagagagaaatgcaggaaaaagaaggatgctctttatttatggtgaaaaaaattatagaatggaaaactgcgatttttatgtgcagtttaaaatacgatttgaccaaatgttaagctaagcgtgttctcaatgtttttgttgaaatcattattcagtaatagtatgtgtatggaataaaaaaaatggcactcttgttttaatgtataaatgatgtgaaagatgataatttccaataaactaacttgtatggcgtgaaatggaacgaacacaatcacaacaaaatgtgtaatgtaaacaaaaatcaacatgaagacaaaggaacagggaatatattgttctttttagaaacatggtgaatatactgccattactatgtagcatcaatgtacaaaatttgctaaactaatgaagaccatttctatgagctctctgagttggaccatagaattccagatttgttaattaatttaataataataataataataataataataataataataataataataataataataataataataataataataataataataataataatatccagtcaaatccatgtttttacgtcatctcttgaaaacttctctaagagtatatcttgtaatatatattttaactcggaaacttcaagggtatcgcttgaagcgataagttaaaaaggagaatatcaaattaatccgctagtaataggagcattttcttttgtaatttttttacttttaaaaagtcaaagctatttactataacacattttatcatcatttcagtattgggttgattataatacaagatctctcaaattttgccagactagatcgatttttgaagcagccatgaatttataagtttttatggctaaaatatgtgccaacacagagtaaattcagataccctattggttatacccaatcctcctctaggcctttttattgtggcctgcgtgaatcgtggtctaaatggctgtaaaataaaatcagctcacaatgcgctcgaatttccccttttaatccacttagattatgtttatcttttttagaaaaaataaagagtaaattgcattttgcactgagtaaagcgcacccggtctcactttacaccaggtgctagtttagcacgtacttttagtttataccaggttgccttcaaataaatttcagttaacaccgggatacatcattaaacctataaaaatttcatgaaattttatataaaatgaatgaaactttgtgaaacatggtctatttttttttaaaaaaaacataaggtccactcgtgatttataaataatttccttcagttatatgacacaatctactgctacctccgtttcaggttacaagacgttttgactttggacaaagtcaaactgttctaagtttgtagaaaaaataaaaatattttcaacccaagacaaatttattatgaaaatatattcaattactgatttaatgaaactaatttggtattgtaaatattaatatatttgcctcaaacttgaagcagtttaactttgatcaaagtcaaaatgtcttataacttgaaacggagggagtacaaaataaaaactatttttatatatcctgatgtaaaataaaaatatatagtaaacccggtgtaagtgcaaaatactatacaatttactctaaattaaatgtttttatgtttttttttctgttttggggtgttcttgttgcctctttcggaccaacccaaacccccccaaatctcactccccaaatgcctcctctccactgattcctctccgccgccgccgccggctcgctttctcgtcgccggctcgccgcgccggcggcagcattgtgagcctccctcccctccctgtggctgtgcctcccccggtggccagccgccggcctttggcagtagtccctgcgcggcggcgggccggcggcgaggctggtctggacgcggcggaggcgactccgtccttccatctcggcttcgaatcgaattcgaaggtatcccctctctccctcctccaccaccgccgccgccgccgccgccgcggcgtggactgggaatcaatccgggcttggattggtttcgtttctctctctagtgaaaccctactagcttcttcaggatttctttgatgggtgcgtggtgtagaagaagtagaactaataacatcttgtgcttgcagagagagaaaaatttggggggtttgagctgagctgaccaccacgtctaggtcaggtccacccccctgctgttcaagctgtggagtgaggagatgcgtctacttttgccaaggaattagcgaggcattgccaggtttccgatggataataagcatcataagaatgttgaggcagggaaaagctcattccacaggatggttcttgggcagcttgttggggaattcggtttcgacgaggagaatgttccttgcaatactccgagaagctcggttcgctcgcggttcggtgcttcggctagcagaatcgtcgcgtctactagcggtgcgtcagttagccccggtgagtatgtcagagatcctgggtccatattgagcctgcagccttggatctttaagaggagtggctctcagaagaatgaggaaaagatgatgctcgcaagtggtagtagggttgttggtgaaggcaagaatctgatggattcctttcgagatggctcggctgttgaggtctctccaaggagccctggtcttggttctggacctgggagaggtcgaggtgctcttaggagcagacggtcgcgtaggcacttgattaggccactcgtgccgatggagaattcctacattcctcaactttatagtgcagattttgaaattgatgagtgcacgtttgggccagctccctcccccgcttctgctaggccgttcatcgtaacagatggaaggagagtcattagtaagtcacgttatcaaccagtgcctgtaccatttcatattggatttgagaaggaagggcgtcgaaacagctcagaaatggtggaaagtgtaattgggattgctcctctacctgagctgaagaaatcaaaaagggagaggcagggatcacacaatggagggatgggtttgtctgctttcgagagtagtaagccatcaaaatcaacaggtaatttcagcatcatgctgcagttattgcaatacaataaacacataactccatattctaaatattttttctcctcatgtttctgtcacctagaatactagataaaattcattggatcaaaataggtcagtgttccttggagttgatcctcatatgctctgacatgtcacagtaagcacaactcctgaatttttgttttcaacagaacacttttattaggttaagtgttgcaattgatgaagtaaaacttttttttttcaagtgaggtcaattacatcgttcttaaaataaatggaaaccatacaaattaggctaccatgcctattagagtttggctatgttattcattggttttctgagaacccagacacccagttctttgtcctgtgtttcttggctcaaccacataggaataggataggagacttacatctatcatctgatgatgtggtcaacactgacatctatgccccagtgctatactggaatgcttgcagtggctcttctgttgaacttctgttcgttgtgatgagattagttcaattattatgtgcttcacttatgcactactcttctcaagtcagtttccaatgtttaacaatgttctcagtggtttaaaatgtattgatgattatttcaagaaattgtttaatctgtgctcattactttgtactctgagaactagagctcttaattgctgagataatttagaagagattacagtccatttatcatcgagccttgtatgtcaacatgatttcgtgggcatttgtctcttctgatgtcctctttctcaaacccaagtaaagcctattaaagtatcattttttaagcatgaattacatgctaaatacatacatttgatctgcagatttacttgctcgactgcgcatattctctactggtgtcagtattggtattatatcatccactttatcaaacaagaatgagcttgatgcattaaagggtacagtgaaacgaatggagaacttgattcaagatctgcatgatgagctggagatgagagagggtttaactgtaaaggaattgcctaatgaaatgtctgtaaaaattgatggtaaagtatcaactaccaaaacaaagaactttcttttacatacacaaactgaaaagaattgtattgtttgttaatgctagatgatgagagcaaagctcatgtaactgattcagagcccatgagcaaaatcgaagaagagcttgaagctgagcttgcgagattggaattaaatataacttcaaactgcttgaaagaacaaacatttgacttcagtgaggtaacagttatactgaaacattatgcattacatctgaatgtggccaccttctacaagtctactgaatagataatcacttttctaggttgaacaggatctcattggagatattgtccagggagaactgaagatcgatacaacccattgtgatcttgctgaccacagcagtgagagtgcccatggcagggatagtagagaaagctccccagattacacacatgatgcaaactatcctgtctcacctagggatctcagcctccgtctccacaaggtaatccaacagagactcgaggagcgaatcaaggaacttgagacaacacttgcccagagtgagatgcagacgcaggtgcaagtgatggccaccgagcagatcttgtgtgaaagaacctgctcagacagtgattctggttctcccaaccaggaaagtccagtgtatatacaagaaactaactccttggtagaaccgttctgtctaaacctagctggagacgcgctagaggcttacgatgaagcttatgaggaattcatgagaattgcggactccccttgcaccacaagtaccaacgggaagcctcaagttcatgaagattactcggtggaccgcagcttgatctggggcttggaggatggcagtgcaaggaagctgaaaaaagtgcccacttgggagcgaattttaaagagcagagagcctaacagaactcaggagagtgacggagatgatgaagatgaatttgaagatgatgaccaggatagtaagatgctcatccaacagattatagagagaactaaacaaggctcacctgtactaattcatgctcaaagaatattgttttctgtggatgattagattgttggactatattgaattagaatttagtgccaattgattgtttagagaaaaaaacataatattattcttttcatcatcttccggtgatacaatttttcaatgtgtgttataagctctgctctgcttctcttgaaacacttatcgatttcaaaatgttcttattcattaccgggttgcgtttagtccagggaggactgtgttgcatcactacaggtaacgttgacgactagtatggctagaacacacaaaataccgaataatttgaacgttattacaattttgatttgaccatgttaattgaacaagaggtgtttgagggcgttttaatatgggttgaagggtgttttaatacatgtattcgaacaggtgtttgaattcaatgggtgagtgtgttttactataagtattatgtaaagattagaaggtctcacccataataaattagaaaaggtgtatgtttgtgtgtctataaattgaaaaggagtgattgaaaaaggtgtatgttttcgtgtctgtataaattgagaaggtgtgtgtttccgcccatgataaattgaaaaaggtgtatgtttttgtctctgtataaattgaaaggagtgattgaaaaaggtgtatgttttcgtgtctgtataaattgaaaatgtgtgtttctgtataaattgaaaggagtgattgaaaaaggtgtatgttttcgtgtctgtataaattgaaaatgtgtgtttccgtgtctaatcttgtacacactgatcaactggaacttaagatgagattgaactaagatgaaggagccaattgtggtcttgtacccactcatcgattggaactaagatgaagaaaggagccaattgtggtcttgtacccactcccaaactaagatgaagaaaggagccaattgtggtcttgtacccactctcactcatcgattagaactaagatgaagaaaggagccaattgtggtcttgtacccactcatcgattgaaactaagatgaagaagctaatgtcgacatcactactcctctgacagcctaaaacacaaacaacataaattagatttaaaaatatgaatgaatttctattttatactatgataattcataggaaaaataagtaaaatgggctgattgacagattcttaccagtagatttgtttcccacaaatatcccataccctgaaacagctgtagatagaaatatgaacgtcaagcccatctcccagaaatagcactctctttctatatataatcttcttacaagcaattagttgaaatcatgctagaactgtgcagcttccatataggagatgtgaccttcacaatttcattatagtttgaagagtcactcaagaagtgtgatgtgtgcattatgtccattgttgttgccatgatgcttgcaggtgcagcggctctctccgatctacaaagcaaaatggaaatgatattagttgcagcatccaaaacatgttctagtgcatagtgcatgataatgttgttcagttgttcttgtgttggtttaacttttgctcgctaattctgattgtttgtttgcaaaatatcaccctgaatgctccaaatgagtgggaaagtggcatgggtttgaatctttgctcggataattcagataatcttgggaatatattgcaacaattggcatgctgaagtgatgccaattcctttttttttctctaggccgaggaatacaccggccaaacttttattaagcaagaggagatagtttacaacaggccaacacacactcaagccagggtgaagaagccccgttgcccactaatgccttagagcaggtacaatagcaggccctgctattagccagctataaatatattttaatgagataaaatatgagagagaagagcagcgggctacagatctgtacccagctgcagcacggactccaagacgcagtgtgtgtatgacaggtgggactatatattaatagtatagtaagcaactattgtatatatgaattggctattagattggttatagatgaattggagttagtagtgggctatactattaaacttgctcttaggggctgaactataggaacagaaaactcggtgaattactcacagcgcacttcgcaaccccgccgactttctagtctttcgttcctctttgatggttgtgcacacttgcatgacggatgctgccttccattcgaaaatacgggcgttgcgctcccacatcaaaagttttcctgtcatgctttgtcaccatcttgcgagccacacaccaccaggtagcgaagccagatgtcggagttgcgcatgcgagtccttaggtgcatccggactcaatcccacacttgttgtgagaagacgcaagcttagaagatgtgggtacatcgttggcagaaagatgacatcggggggctagggatcaggatcctctgcagtcgaagtcacgtgactttgtcactaacatatgagcctgatgatccctaggcccacatgtaagtgacaaaagtatcgtgcatttgactgtagaggatctcaatccgggggctaggtgccaacctcagcgctgcaaatcgttcgttgtgaggcaagcgccccgcatcacacaaaatattggagaacttgcatctcgccggaattttttttattttgtttcgatcaaattttcaacggtgcgatcttctcccgtgaatgtatgaatgcaggcatgtagtggcacccttagcccgttcaattccaaaatcttggttcacattttaggctgtgttttgttgggccggccctgtttataagtaaacaagtaaacaattgtggcccttgtctattttagcaaactgctatagtatcatttgttctttccttgtcttgtgcaaggctcctttttatctacaggctcaagcttaacactttgttaaggcattggattatagcctgatacttgttgttctattcaagaacaaaatagaaaagtagatgaacctaaaatggacaaatgaaatgaaaatgaaaaggccaaagaaaaaaatggcaccaagcaaacttaccaatcaagaagaagaatgcaaaacccagaatctagaaaaaatactaaatctagaaaaaaaaaactgtagtgaaatctaattttgatgcattatgtgtaagtgctatgtaactgaatgtaagtacattgtaactgagtgtaaatgctctgtaattgagtgcaactgtaagttggatatataggaacacgaattttaatgcaagatcctacggacgaaaaattaaaagataagagcccaaaaatctatcgtaagtgaaatagtaaaaccgaccaacagaaacagaaagaaaatggagggagcagtagagtttactcatagcttttcatatcacgtagctgcaaaaataattatggtggcaaattgactaacttttaaaaaaaatggtgacatatttatagaaaatccgttggttaaattaatttagagtaaattttacaaaactacatgttttatggttcaaattgtagaaaaccacacatattttgacacttagcatttaagtacatatattttggtagtttagttttacaaaaccacactatcgatgaatggattcacccgtgagataacatggttgttccatctaggatgaggacgtgacatcctattaatttcgtgcgatggctggtaataggatgccatatcctcgtcctagatgaaatagccacgtcatctcgcgggtgaatccattcatcgatagtgtggttttgtgaaactacacaaccaaaatatatgtacttaagtgccaagtgtcaaagtgtgtgtgattttctgcaacttggaccacaaaacgtgtagttttgtgaaatttactcattaatttaaccagcggatttgctataaatatgtcaccatttttttttgttaaaagttagtcaattttttttggccataggatatacattaagattcgtgctattttcatatcacgtagttgcaaaaacaattatggtggcaatttaaccatcggatcctatatgcctatacaagtcatcccctacaattgaaactaatttcctgtgatatgagtgagccacgtcacctatattaatcccagccatcatattacagatgagcgtttgttactctgcagaacatagatgtactctacaggtgaatgttctcctatctcaacgcatggcaccacaaatcaaagtgaacgacccactaattaatgtggtaacgcctaggagcccactaaagctcaaccgtttcatctccacgaaaaaaataaagaagctcaaccatttaatcccactaagcaacacacatctcaaagaaaaataaacggttgacgctattttaacttgattgatgagtgaagtaagcaggtactccctccattccataatataagacacaaccattttcttaatgctccataatataagacatgcatgcatgtagggaattaattatgaccccttctctattaaattattacttttttaaatcctccactcttatgttctcttattctattagatgcatgcattgtatttattaggatgatccaaattacaagataataataattatattcttggtctttggattaggggtggttatgccttatattttagaatggatggagtataatagcaggctataagtcggctataaacatattttaaggagataaaatagaagagagaagagcagcgggctatagatttgtagccagctatagcacggactccaagacgtaatgtgtgtatgacaaatgggaccaggtattaatagtgtagtatgtaactattgtatgagttggctgttaaattaactatagataatttaaagttagtagttggttatactattaaacttgctctaaacagtcttcatgcctttatatattcatctactaggaacgtcgagatattcatcctcctggtgttcatcgaaatatgcttatgaaggatgaaccgcatgtggcagctgaagctccgctttaatttaccttcatcgatgttgtaagtgatcagttccagagcttccgcggtaggtgcaggtgctttgcctcaaatcaactcatcgtcaatcggaacaatcgctgtgtcatcagtgaatcggcgccaacgctggacggcagagttactgtcacatctcacaataggtaacatatttctcctctttcaatttttattcagtagctgtcgctttcgattctccaactgggctggatgaaaatgaagattttcatggcgcgcttttcaaactgctaaacggtgtgtttcgtacgaaaactttctatataaaagttgttctaaaatattagattaatccatttttcaagtttgtaataattaaaactcaattaatcacatgttattactacctcgttttgcgtgaaatatttaaacttcatcttcaggtagccatgcaattggctcatcggaagtattcaccattttcagaactgctgacagcaagtccttcttcaatggattttcaggacactgtctgtttgccctgatttgaaagctggtgcactccatgttttgataatttttcaacacaaaatcatttcttttctttccaatgatatggtcgcatcctctgatttgatcaagctcagaagtgcaactgatcgccattcgcagccagggcacatgtgtttgtctatttgattattggcctcttcagatttttcttaaaaaatatataatttccatgctctcaaaattgacccaaccagtccattcaaaagcacctcaaaatggaccttctatctctgtaccggttattaatttggtactccctccgtttcataatgtaagtcattctagcattgtccatattcatatgaatgttaatgaatctagacacacacacatatatatatatatatatattcattaacatttatatgaatatgggcaatgctagaatgacttacgttatgaaacggaggaagtataatagttaatacaaatttcgttgaacatagtattggaggcaacttttacaggtagatgttttcatatgatatagtaaatagtagattgagttggaaaaagaagacaatgacaagttttgcaatttatcctctatttttctaccactaagatactgccagttgatcttctttccatattgtattatgacatctgtttattatattaagcttgactgttcaaccttttattaacctcatttcatcacaatggatatgttacaattatatcattattcgttcttgcaaaccatctcaccgagcaatatatagtatctaacttagatttcccgcaacaacgcgcggggtattatctagtttgctataaatgtgtcacctttttttttgttaaaaaattgtcaatttttttggccataggatatacattaagattcatgctagtgcctagttgcaggaaaaaaaataggcaatggcagggagcatgaaaaaatactcactgctcagtagtagagagagctcctaaccaacagagcacagtagagtcttctttccccttccccctttctacagtagccgctcccattccccatctcccggcccctcttcctcctcgattctggcgccgccagcgagggttggaggagtggtccggccacctcccccctactagtattgtgtgtttatgtcagttattaagtcgtcaggttcttcctgttgttaaggtttgtctctagttagtgcttttgccggcgagttcccatgggtgccggagtggtcggcggaggtgttggttggtggcggtggaagtgcaagatccgaagatcagtgggcaatttgatggatggagctggcttcttgtggtggcgtcggctgcgtcgccgtcttcagctgggaggccgccgccctgcttcttgcatcggctgcggcggcttcctgtgtcccttgctggctggttctgttgtcgcccggagctcgccgctcgtggtgcggacgacagcccgtcagcgttgtggcggcggtttctctggtgcctgaacatgtgcttccaatgccatggttctatcagtc

SEQ ID NO: 29769 - DNA, 534 bp, Oryza sativa
atgtcccctgagcttcaaaggaaatatgatgcattggatgctcatacgataatcacgagactacgtaacatgtttgaggaccaagcaagagctgagaggtttaatacctcaaagtccttggttgcgtgcaggctagcagaaggtaatccaatgagcccacatgtgatcaaaatgattggttacgccgagagtctggataagcttggttttccccttagccgagagttggttactgatttgattctccagtcgctacctcccagctttgagccgttcataatgaatttcaatatgaacaacctgaacaggaccttggcagaattgcatgggatgctaaagactgctgaggaaagcattaagaaaaactccaaccatgtgatagttgtgcataagcgcaagcccaacaacaagaaaagttgtcaaaagagaaagctaaactctgatgagatcacgagtactagcaactctaagaccaaggttcaaaagacagggcccgctaaggatgcagagtgcttcttttgcaaggagacaggt

SEQ ID NO: 29770 - DNA, 619 bp, Oryza sativa
ccttcgggcctcttttttgtatacatcaacttaatctgtaatcaaaaatgaagaaatttttgtgttaatttcatcttgctgtgagtatgagatgaggatgatctgtgccgtggtccttttgtgtcttagcttgaataagggcttgtgcccaggttctggtcctcaaaaggcgcgggtcggggctagtgcctgggagatccacatgtcgagactggccaggccgggaacgtggtgaccgagggttatgggtgacccgattgtgggtttttgccgattcccccccggagttcaccacgcctcggggcacggctcggttctgggccccgttttgcgattttagccgacccgagcccccgagggcaggattgagcacgagtgacctatttcaagtcaagattcttcaaaaggaaaaaaaaaaacagcacagatacagcctttaggaaattgaaacttcttttattgaaatactgaaaaaaaaaagaaataagaatgtgcatgtgtggcagcccccggccaaccctacacgcccgagggggtgcggggttggcccgagcccgaaacctgacacccgacccccccctcaggggtagaagcgacgaaggtgttcgatgttccacgg

SEQ ID NO: 29771 - DNA, 749 bp, Oryza sativa
gacatactcaacaagccacacagcaaatatgcaagtgcacaaggataccaaaggatggcataatataggctcatttgcgaaagcagcatttagcaaagagttaagagtagtaaaacagtagagtaattaattaaaaattttaatcaacactgaacagcacacccatgctgtacaggcccaaccatcctgaacaaccatacccggctgtacagatctaactccaaaccaggagctaagcaaattattatcaggtattaacatccataattattgtgagaggtgtgagactaatcacgaaaaacattgctcaacccgcccataaccgcgggcacggctattcgaatagttttactctggccagaggtgtaccactgtacccacaagacacaaccccacatcatgtcaccatgtgcctcaataccaccacggtacctcggaaaggagttgtgacaataccccttgcacaacataatccattacagcgcacctttcctggatcataatcaccccctcaaaaaccagaggcatggactccccagcgacccccgtggacttctcgccacttctcagtctggcgcactataatgaatcacgctatacaaaagataaagccgttgcccacgctggcttgtggttggcacgataaatgtctcacaacagtagctcgcgaaccggtccttaattgtcatgagcacgactctcaaaaccatgtgctcacaacccaccattatcaagttttagttggcaag

SEQ ID NO: 29772 - DNA, 1316 bp, Oryza sativa
cttaatcacgcgtgcatgattttttttcacgatttttttttatttttttgtgaattttttaaatcatgtgcacctgaatgcgcctgattcaactcgaattttgagtcaaaagtttttaaaattttagttaaaagttttgaattttgagatgaaagttttcatatttgagttaaaagttttcaaaatccgatataaaagtttttaaatcttgactttgaaagttttcaaatctggattaaaaattttcaaaaaatcttgttaagttttcaaatctaagttgaaagttttaatttgaaactttttaaatctaagttgaaaattttccaaatcgttaaaagttttattgatgtactaggaggagaggccgagaggggctgtgccatctagcacgcacgtacccattaggaatctctatagcacacatttaactatgcgcgaagatgaccttttaactttattcttacatcatcacactccacataacatcattatatgatgattaacgatatgataataagtttgataaacaatataaacaaagttcaacagtactttagcatcgataagctgaggagaccaaagttcagcaaaatccacatgccacatcatagggttagcaacattttcttggtcacttccccttttttatgagctgcaagcgtaccaggctttcttcatttatgggcttccgatgggtttggccggctgagccactggggaactttcagatttttttttcagaattttgacgaaaactaccgtacaaatacagttaccgacaaaccggtcgggaaaacctccatcctatttccactaccattttcggaagatattatcgtttccatttccaccaccgtcggttaccgataccgactgaaacagtcgatgcaaactgaaaacggcagccgaaaatctcggaaatttccagatcgttttcacccctacgaggaggcgggttgtgtcgtggcgcaactgggcagaacgcattttcgggtggtggtttggtctttggtggatgtgaaggaggtgggaagcagtgcctaggcatgttaacacttaccccctctgtccgaaaaaaaaacaatcttaggtttgaacctggatacatgtgtgtctgtgtccaatttaggttcaaacccatgattgatttttttttggagggggcggaggggacggagggagtactggccatagtggcatcggtggcgcagctttgcgtcgtcgtggtttgcatgtacactcagccatccgcaagtggccgctacgcgtgcaagttctctagtgtctggctaggattgagcgagccaaaaatatcg

SEQ ID NO: 29773 - DNA, 1063 bp, Oryza sativa
ccagaagatgctttacgctattctgatggcctcgaggaaactgcgccattatttccaagcgcatcgggtcacggtggttacgtcttaccccctcggccaaatcttgcataatcgagagggtactggacgggtggtgaaatgggcaatcgaactttctgagttcgatttgcactttgaaccacaccacgctatcaagagccaggctctcgccgattttgtggcagagtggaccccagctcccgagcctgtctcagtccccgaggccagctcgggcccctcacagctgcctcacaccgctcactgggtgatgcagttcgacggctccctgtctcttcagggcgccggtgcgggggtcacgttgacctctccgagcggagacgtcctcagatacttggtccgcctcgactttcgagcgaccaataatatggcagaatacgagggactccttgccggactaagagtggcagctgcactggggatccgccgcctcctggtgttaggcgactcccagctggtcgttaactaagtctgtaaggagtaccggtgctctgacccgtagatggacgcctacgtgcgccaagtacggcgtatggagcgccattttgacgggattgagcttcggcatgtgcccagacgggataacatgattgccagcgaactctcacggctcgcgtcctcgcgagcccagaccccaccgggcgcctttgaagaaaggcttgcccagccgtcggcgcgacccgaccccttaggggagatggatgcgcctgaccggcccccgaggcccgtcggagtccaggcctcgggacctgaggggagtgctcccaactcccttagattgattgcttggatcgccgagatccaagcatacctcacagataagactctacccgaggaccgcgaagggagtgaacgcgtccatcgcatctccaaacgctacgtgctggtagaagggaccctctatcggcgcgcggctaatggaatcctcctgaagtgcattcctcgggaacaaggcgttgtgcttcttgccgatatccatgaaggcgaatgcggagcccactccgcc

SEQ ID NO: 29774 - DNA, 1086 bp, Oryza sativa
tggagtagttcattgatgagtgtgtaactatactaggttgcttgcttaatcaacttgaacaatataatggtctacacacatcagatcagtgttaacctggttaaggtcttgtctttagtgtaacccctctccttctaccttttctaatctgcatcagaatggtgggatcatttccggatgaacagagcagaacgacaaccaatcacttgggaagagtttaccgaaggattcaagaagacacacgtacctgtaggagttgttgctttgaagaagcgtgagtttagggctttgaagcaaaaggatcgtaccgtggcagagtatcttcatgagttcaatcgtctggctcgctatgctccagaagatgtgcgtactgacgaggaaaggcaagagaaattcttggaaggtccgaaggatgaactgtcagttatgttgatctctcatgactatgaggattttcaggagttggttgataaagcaattcgactggaagacaagaagaacaagatggataaccgtaaaaggaaaatgactgtatcccaggaggcacaaggtagtagccagaggcagcgtatcaagccactccaaattggtgaatctttttctgcaggtcaagaacagtcacaacagttgggcatcagtggtgagatcaactcagagactaatgcaagcaatgaagacaatgatgagcaagctactcaatcagtgtcatttcagcaggatcagtctcaagaagataacagtaatggaagggagcatcgggtgtgtttcaattgttatgagccaggtcacttcgtaaaagagtgtccgaagccgaagcgtcaacagccacaaggccaagtcaacaacattgtcctcacaggagcaaatgcagtgccggttgcgtctcaagggatacagctcagccatcagttccaaagcagcagtagctttctttaaaaccttagaataattattggagttgtggaataaaagatagactgtagtttacctatgcctttttctttctagccgttccgaatctcgggatgagattctttgtaaggggggtagatttgtcacatcctgattttcgtttcaggatttata

SEQ ID NO: 29775 - DNA, 2042 bp, Oryza sativa
aattagatagtcatggctaacaaaaatattaaaaaaattctattttttgtcaatccgaaataatatttggctaatgtgaaacattaatgacgatggcatagatggaataaaccattaattcaaatttagcataacacccgagaacagatctacgaatgacttatggatccatacaaattaatgactagtgcattttacatgtattactgcatggcagttcaattcaacgagcgggtgtgaatcggggtgagaaattctgaatatttaccttgtaggctttaatcttcaaccaaaacccaagaaaaatcaagcaaaaccgcttccacctcctctagcggatcgatgggcacccttaacataaatttgagataaatcaaactatcaatggatattttcgtggccttaacatagtttgacaagcattaatttgactaatggccatgacgtagatcgaagaaaacattaacgcaaatttagcatttcatccaacaatagacacaaaagagataaaaagaattatccctaaaaacaacacccatagcgtattttacatgcatacgtgcagcacacgacaattcaaatcaacaaccaagagttaaacgaagcgagaaataatgaatatttacctttaggcttcaatatttaaccaaactgtcacatcctgattttcgtttcaggatttataaattatttaataaattattaatagaatttatattaaacgttcattaatttactagtgaagttaaatgtgggaaataaaatttcctaaatataaagcatggatggatttaatttttattaaattctccatggttaattatactctctggagttttctcggatttttcggagctcaattcataatttttaatcatacaaagagcatttcagtaattaaccacatattaaattaatcattaaatggtctaattgtaatttttttaagtactttgagtgtccaagtattttcaggatttttcttcaaattatttgagcattggaagtatttttaataattcaaagatcatttaagtgattattttaattgggaaagtaataaaatcctcctcctcagcttgggccattttcggcccattccttcctttccttcctctctcttccgccggcccaacctgagccgcctcctctcctctcagctcagccggaaaagtctactttccctccctgcgctactgttcatcttccaactcaggcagagcccgagccagccgtgccgtgcacagtgccgccgcctcttccttccaaatctcgcctccccgttgctctttttctccaattttgctgaggggaaatattcctcttatcctcctctatctttacccccaaaaatcggagcaaatcgttgagtatcttatccgaatcaaactcgttttcgagtttatctccaaaaccgagtttttgatttcccggatcgatttcttgcgggaggagtccgatctcttcaatccaaggctataaataggaccccctagtcctcctctttcgtttgccccctctcccgtcctcttccgtgctccgtagctccgtcgccaccgccgccaagcaaaccgccgccgccggccatctccggtgccgccgcgccgccgtctccatcgtcgtcgccggtcgccgtcaccaccgttgggtgcgccgtggtgaggggaagctcggccacccttccttttccgtcgccggtcatcggagctccgccgccccgtgcaacccgagccgccgccgtcgcctcctcgtcgccggccgtcgtcggtcgtcgtttggcacgagggtgagtatcgttgggttcgtctcgtcgtcctctacgtgttcatgtcctccaaatccgcagccggtcgctctatctccggcgaggtcgccatcttggtccggccattgatgatgtcatcatgacgtcatcatcttctccttttccagttttttctaatagattaaatcttcggaaattcataactaaatcatcgtaactcggttttgagtggttcaagttgctaaattcatctaaaatcatgatctacatgtttgtt

SEQ ID NO: 29776 - DNA, 600 bp, Oryza sativa
atcgcatctccaaacgctacgtgctggtagaagggaccctctatcggcgcgcggctaatggaatcctcctgaagtgcattcctcgggaacaaggcgttgtgcttcttgccgatatccatgaaggcgaatgcggagcccactccgcctcgcgcaccttggttggtaaagcttttcgccagggtttctattggccgatagctcttaatgatgcggtcgacctggtccggcgatgcagagtgtgtcaattccacgccaagcaaatccatcagccggcccaggccctgcagaccataccactttcgtggccatttgctgtctggggactcgatatcctgggaccgtttaggcgggccccgggcgggtttgagtatctgtatgtcgcgatcgacaggttcactaagtggcccgaggcttatccggtcgtcaagatcgataagcactccgcacttaaattcattaagggcatcacggcccggtttggagtgcctaaccgtattattacggataatggcacccaattcactagtgaactcttcgacgactactgtgaagacatgggcatcaagctctgcttcgcctcacctgcccaccccagaagca

SEQ ID NO: 29777 - DNA, 673 bp, Oryza sativa
tgttttcttttttttttttgcggggacaccttcctgttgttgttagtattgcatacatcaaaacatttatctcatgcttgttcggtggcctcaataatcctcctgtacagactgcgcaattcaaacatatccttggagtgaagccaacaccgcatagtgtgctaaatgatgtccctgtcaaaacttatccaagatcgctgatgcttccaaaggagtttgatgccaggtctgcatggtcacagtgtaacacaattgggaccatacttggtaagttcaattagtacctcaatgtttgacctgtaattagttctaatgaatacactaaccattcttcatttcctcaataattttccaccaaaccatgggaaatgttgattttcatgcgcagatcaggtaaactacgcgcaccaccataaattgttaatcccatgagggtttagaatgcaagatataataggtattatgtcttggttgacaatgacagggtcactgtggctcgtgttgggcatttggtgctgtggagtgtctccaggatcgtttctgcattcatttcaacatggtcagtgaatatgaatgacaagtccgttctcatggccaaggcttctaacttaatttattgttcctttgctcacatagccaagctactgttttttattccttgtagaacatttcg

SEQ ID NO: 29778 - DNA, 2324 bp, Oryza sativa
  unsure (1)..(2324): unsure at all n locations
gggcgatgtaagtccttggcaaatatataagttcaataagtgaaatgttgcataatttgtattttttgagctattaataatgtttggtcggtgatactggtaggatgggtacttcaagatcataaggggcacaaacgaatgtggcatcgaagaagatgttgttgctggtatgccctcgacgaagaacatggtgaggaactatgatagcgccttcggagtcggaacggccatagtttgactttaatcaatgttaatggcctcaaatacggttgggatcatgtaaatttgtcctgggtgatttctggattttgcacacacgggcaggcttctcgagactgatcggagtttaggctacttgtccagaaacacattggaataatatctgaataatagatgtattctctctctctctctctctctctctctctctctctctctacgtccggttaactacgggatgtgacgtagaggtgttagggaggagcgcacgttaatctcgctgtaatccaagttgagacttgaagaattaatgtgtatgctgtaagtcaaatgatatgcgatctgtgcgctgcttactagtatcccaaaagtatggattttgttcaatcagtctacagcttgacacaattgcagcagcaagcactcgcttggacgcatctagctccaaattcctgcaaaacactggatatcttggttcaatgggaaccgagaagtcggacaatgacagcaggcatcgatttcaggattccccattcaaggtaccagaatgcagatacagtaaataaaaacgatgatacattcatatggacagaatcacagaatacaaacagcgcagagcaatcggtacaatcgacaacagatcgaatggcacactgcctttttcctatcagtaagagttagctcagcgactccgagacgcagccgccatggccgtctccatggcattcttgaggagcaacatttccttggcattcttgaggagcaacataaacgatgatacattcataatcggtacaatcggcaacagatcgaatggcacactgcctttttcctattagtaagagcttagctcagcgactccgagacgcagccgccatcgccgtctccatggcattcttgaggagcaacatcatttccttggcattcttgatggctttcctgaggaggagcaacagcaacatcccgcggcggccagtgctccaccagcctctccacgggcactttgacgacatcgcggcgaacaccgatatctgagacatatcgccccacgcagtacatgccgctcgtcacaaccaccagcccaccagcgctggtcgtcaggaaccggagcggcgacgaggccaccgcgctgaaggcagccgtgagggaggccagctgcccgctgcgccccacgctgaaagcggtctccaccagcagccccgtcttgcagtatatcgcaaagtcctcgcaattgttcttgaacaggctatacgtcccgaacccgctgttcaggaggtgctgggcacggtggatcacgatgtcngcggggtccgaggctgccagggtgcacgttcctcctcgcgctntcacgaggaagaaagcgggggacaccgcgtagtcgaacaggtacggattgcccccatccaagaagcaatcgaggcacgacattatgaccccctgctgcttaatcaggtgaccacatttctcgcagggaggaccctcctccgttgctggagatgagctgaaaaggaacatgtccaagaatgttcctgtcccaatttcatgtccagttgctcttgtaaaatgaataaccatggcatcaccaatatatatccctgaaaatgaagttcaatttcgggaacaggtcagagacatggtcttagcgagtatccttgctccttagcaaataagtcaacaggaaaacatgaactgactgtataatgtggggttaacggacatggagcacataaatgttgcgtggcatgccaatcaagtaatgagtgttatgttttccataatagatggcaaatgacatcgccgacggtatattgtgcatatgtcggttaccagcatgtaggagaggctttattttcgggaatgcgcaaaatgattgcacgtcaatatattagaataggagaggctttatttggaaaggggatggccattgtgatggtggattggtgggcattgtttagttaattgtctaaggtttgtacaccaaaaaaaagggcaggttgggcataaaatacctacctgtgttcgggagagctctaaatttgagatggatttatcttaaatggaaagataagcagaatccttcgattgagatgcaggttccatgcgac

SEQ ID NO: 29779 - DNA, 583 bp, Oryza sativa
cttcagtgcctttatactcttgccaacgctgtgcccggctcctcgcttctcgcgccctctatttcgccccctcgtttctcgcacccacgcttccactaatcctattcgcccgcttgcggcgcatgaggtggatatgcggttgtggcagtcgagatagatcatatcgtgcgcgcgctaattacgctcgccgaccgaagcgacgttaccatatctccagatgaaacgaatcgccatgtccagattcgtgtgctactcaagtaatgtggcagtcttgaagagaccgctcattgttgacagccgagttaccattgccgatgtgcgtggtttgtgaccgttgggtttctgcccaattgtggagaccggtcccacctgtcaccaggccttaggagtggcgtcatgcccgaccgtttcccttaaagagggcgatcgccctggcataacgccgggggctactgtcggtgacatgggatcaggagtatcatgactggaggtttgaggcagacacaatcgcacacgtggccttgcacccccgagggacgtcgggcccgagggtgatgtggtcgccctcctcttagtccccccg

SEQ ID NO: 29780 - DNA, 1212 bp, Oryza sativa
ttagcggccaccaaacgagccctctgcgaatactttggcgggttaccatccttcagaggacggattccagtaacctgcaaggcatgcagaaaacaacattatgataaaatgaaaccagaaggaagatcaaatatggagaagtgcgagtctgtaaacaaatatggggagattaccaaccttcaaatcactgaatgtactcgatgcggaaaatccaatagatatggggaaaaatgttgatggatcagctggggggacaacgaattccatggagccactgcaaataagggggaaaagagttaacaacggagggcaaaaaacccaaatagaagtacaaaacataattatatgaactcatatttcaaggacctgcggttcgactgatcgataagaagaatggaccattccaacacggagtttctcgagtcatacctgtatgcacagtgaaatgtgaaacaggcattagaccaataagctttcactgtgctgtctacgttattgccaacaaggaaaaaaaagttgagctctatctacaagagatgtcatttaggaccaattcatacaagggatctggactaaatcccgataaattcaaaacacatccctcttaagcatacagattaacagtttgagatgccaataagactgtcaggaacaaaagccagaattgaaagttatcacttgttatattttaatactcctaccatcaagactaaggaaggagacaagtatgacctgttggaggattattttagtataatataacagataagttcactaaagaggaatttgaaacattacttccattctccatcaatctgtctaacacttggagcctcccggagagcaggcaatggtatagagatgacaacattgtgcaggtcaaacatctcagcagcttcatactcaatgttgacataggtttcacttccagatactgatggccagcagttgactatgcgaagaaaaagcaagttaccaaaagtattaagcaaccagtgtaagagaaatacatgtccttgaaggacgagttagtggacaggagaaaataaaatgattgtgcacctgatacaggtaacgatgactgatccatcccctgaattctccatttaaccagaggagtttcattttgaccacttgggaatggcctgtttggctcttttgctctcgcgccgtgttgtctgatacacagatccacgctgatattggggtgtg

SEQ ID NO: 29781 - DNA, 587 bp, Oryza sativa
ctcgtatagatttatataagaaacaaacaaaaattgtgttacattctttggtgttgagaatttctgtaaaaaaaagaattcaagcagaatgctataagttcagaaggaatgttacctgcaactggataaacccatctgcatcattaaggacctgaagagcaagggttccttgcacatcaaagttattaacacctccatctcttttaactgtaacattgagtttttcttcaattgtcactgtgacaggatcacttggtggaagaggcgatgcccttgactgaactgagctgggttgtacatcctccagaatgacttctccttcagctttcaaagactctaggaactgattcgtcttctgtgttttgcctaatttcataccaagacctttaccaggagcagtagcagctgcagatggacggcctgtgcaaatattgctagcaaacataagtaacattgtatagctgactgaactttgtcaagcagttttatgtaaagcaggagtactggcatggggaaactatattacgaatttaagtcttgagatatttgaatatcaagtaccacaagaagaaagtcctaggttaaca

SEQ ID NO: 29782 - DNA, 977 bp, Oryza sativa
cagtgaacatatgggaaaaaaggatacaagcttagagagcagcctcaaggtgtccagatcttcaagaatattgctctgcttgtttgtgataagtagcaagtacaggccttctattggctgataaacatagcgaacattttcagtctcaacataagtgtgctgcttcccagttccaaccagtttggggaaagctgcaagtaatccttcaatccttatgcgagacatgtcaacaaactgtcttgaaacaagtgctgcaattgaaaagcacagaaaagaaacagcatttagtctaatcacattaacttcctggaatgaagcatcaacaaattggtaaccaggaggtgctcactacataggattttagggttataggagttaagaatctactgaggtaacacgataacagctagtttagtatttgggttccacaaatttgcatatgagctaacactcttattagcataggtgaatgataaaaacttatacaaatactttttttttctttttctatgaacaaaaggatttgttttgattacaatataacaatataaattaaaaaaacttcttttcggcactgagaataatacaatacaatatataaacaacagaatatttcaagccagctgacctttcccggactttgaaatgatggaagcagcaagaaccacctgcggtacacaaaaaccaataataagctctcctaaacaaatcaaccacttgcttataccagcaaaatgtcagaatgttccttcttaatattacaaagagtaataaaccattaggcataccattttgagggcttttttggtactcagaattactgcacttaaaatggattcaggaattatgcgcctgccagaagtggaaaaaacaagagattattcaatcagtacgacataatcagaagatctcctgcgagcttagatccaggccccaactttttttttttgcttccagatcttactacttagtactaa

SEQ ID NO: 29783 - DNA, 16594 bp, Oryza sativa
atatgactgtgacaggagttccacaacaagtgcaggttgggcaaaacatggtaaatgctctttctgctaagccctaccatcctgtgttttctgtctcacatggtacaagtgccagttcatcttcacaacacccatatatggcgagacagttgctagagcaccctgaatacaatccaaggatgcatcgcacccatccttcattgcaaccaacaatcgaagctgcatccacctcaatgacatcccatgttaaagagccctgttaccaagaaaatgttggggatagcaacccaggtatgtccctgcttcgcagcacagctgtttcctccagggatgtagagaacaaatctcccaacctgggtgatagggtgcatgctgatgtttcggaaatatactccactttggatcaccaaacttcagctaacagcatgcagattcagtatgctcctcaggttgtaaggcaaccatcacaacagtccctgcattctgatgttacagaaacatattcagcttttggtcatcagtctgcagccagcaatatacagaggcagtttgctcctcgggttacaagacaagcatcacacaggtccctatatgaaagcagcaatagcagtctatggactggacctcatgatgattcccagatggaactgttcaggccatcctcgtctcgcagaattagtactaatgtcatctctggtgaattgccaaggatcaacttgcagagtgagacaatgatgggaaatgctgatttcaaccagcaaaatcttcggagacaaatttctctccgtgaaaacactgaatctcactcttttggcacatataacgagttgccaagaacatcttcctttttgcgccgtcaaagctctgaatcctcacaactgaatagtgcttctgtcaaatgttcaccaggttctggtagctcatcaaccacgatgggtcctcctcgccctttcaatacagtatcaggaggtgccagttctctgctaggaagtcctctttcttccatgtctggaggttcaagttctggtggtaatcctgatcatcagggcactgttttatcttcaatataccaaccagatggatacaatattaattccaccttgcctctaagaatgagaacacatgcaagggaggcctatgccacatctgttctacctcaagccacaaggcgaagccaccaagtgaactttgattctgcagaacggagaccccaatatgttcaacaaaggggtctggatgacactataaattcaaacatgttgagtgctcggcagcagtttcagaggcaggttgaaaggcagcttcagaggcaacttgaaaggcaacttcagaggcaacttgaaaggcaacttcagaggcaggttcaaaggcagcttcagaggcatcatgagagagcagctgcatctgaagcacatccattttatggcaatgatgagacttctgtcaggatgaacccaactgaggaatttcttgatatagtaaaggatcatgaagcattcttcctttcattttatcatccttctcgtattccagcccgtgtcatgaatacagtagatcaatgctatggtgttgatatggaaagggagatgccacatcaagagagtcatccaacacctggctgtggtactgagctttctcataagaatgacacttcaggttttgaaagatctgatgtggatgtcgcacacatacatgattccaaaaggctaaataatgaggaactcaatgcccttctattacataggaagttcagcagcttaaacaaagggaattaccggctttttcacatagaaggccatgtgcttcaatgcaggtctgtgaactttgtatcaactctgaagttgcagatgataggctgctaaagaaccattcacatgtatgcaagacataaaactatgttttctgatggccacattgctgttcttgttttctcttttgcagcattgatcagtgtgggagccgctttatacagcagaagcttccaacagcgacacctgatgagaaactcatggtctttaaagaaatcatgcctcattttcttgaaatggtgactgatgtatttggaaattatgtgctgcaaaaggttttactccaaatgatttcaactttctacatttgaatatgtaagcagacactagaaaattcacacacttatatttatttccttttccaccagatgatcgagcatggagccccatttcaaagaagggaaattacagcttgcctttttggaagtgtttcgagcttaagctgtcaactatacgggtgtcgagtagtccagagggtaatgtgcatttcatgtctaatatcacttcatactgttgcatatctgattttcttcatataaagatctaaatctcagtctggtattctcttgaacgggggtatgattaggggaaggggattagtcgaatttcacacctttgaatttttcttgctgatttgtgctcttgagcggcgttgtccacttctatcagctgtgtcagtttcacatcaaggactcctatctcttgattgttccactttgatacactccccttcacctgctgcatccccaccaacactgatgggtcagtgctcaagtttaccaggtaagagttggcctttaccagagctccctaccccagaaggtagggagtagggtgggtggtgataagtagcagatctggcggcaacttgagatggaaagatcaaagatggcagtcatagcggtggaggggtggcgcaggagaaagtatgaggtggtggaatcaaatttctcacttgcacaagaggtggcagccacaaagggcctcgccggcaccaggagcagccctggtgccggcgagggagatggaggcagcgtaggagcggttgatcgaggcggcggctagggggattagggttggagtgttgggtcacataggtgggattatatagggaagataggagaatctgggcggttggatctccatcaacggtcaaaagaaattcgaccaattttgagcagagaaacagacacataatgtatataggacaagggaaataaataaagtttagatgtcgacaaatgaggttggtgagtaaaggaggacatcattgataataggggaaaactgaaggtactgacatttatcaaagaaaagattaccccaatctaccgtttttgggaataattaccatattttgaagtggcgtgtacttttgcccatgtgcgcctatgctactgttagaaacaaagcaccttcattgttttagtttgtctatcatctatgtattaatagaacacataattaagttctttattttccttgaagtgttatgtttggttagctaatgcccacaactccttttcttgccccttgctttcttatgcaggctgtagagcttagtgatctagatcagaagatacagattgccaaggagctcaatagtaatatcatgaaatgtatacatgacccaaatgcaaaccatgttgtccagaaatgtatagagcatgtgccaccacgattcatacagttctttgtggagagcatgtatgggcgtgttgtggagttatcagtccatccatacggatgccgtgtcatccaggtaatttaattcattactttttcgctaatttgcaatgcatttgtagcacggagtcaactaatccatatgtcatcctccccatttattttcagagaattctggagtactttgattcatcgatccaggagatctttctagaagagattatagaggaggtttactatatggcgaaagatcaatacgctaactatgttgtgcaggtcagtcagtttgtattgccttcttgatgttattcattattcattactactatacatatattgttctaagaagctgcaggatctgcaaattttcttacctaccatacatggatgggggttgctatgaattttttgtaccggatgtgcattcccatttaccttgttgtttgatttatttcttttgcagaacatattgcagcacgggaaagcccttgtgcgatctgcaattataaagaaatttattgggagagttgtggccatgagcaagcaaaaattcgcctctaatgtcattgaaaagtgcttaatatttggtagctatgatgaaaaacagaagatcattaatgaggtcatcggcacaacggacctcgtcagaagtggtgaaaccgaggctcttgtggtatatatcaaccttcttctgaatatctgatgcttaggtggctagatgtattcatagaaatgatagaacttaaaatgaacataaaaataatttgaaatgaatcttccagcacatggaagttacatcaaagttattagcatgaagtgtagcttcttgtccactctacaatggttcctgaaaagcatccatacttttttgaaagaaaaaaaacagtttacactggtacttaaatgctcttgaaaatgatacaaccattgtgaatctggtcttatatatttctgtggataatgcaggttatggtgaacgaccaatatgctaactacgttgtacagaaggtgattgaaacctgcgacgagtggcagcggaagctaatactcaggcgcttgagggcgcaccacagcctgcttcacgactgcacctatgcaaagcacgtcgtggcacgactggataggctcatcgatatcgggggtacgcaatctgtctccctgatcacttgaacagtcatgagatataccagaaatgcaccaaaaatacactcttttttgcagtaaaaaaagaggttccacatgactttgttctaaacccattttgctattgccttttctccagagcgcaaaatggcgaatcccaggcgccccaggcgacatgggaaagatcctgtgccaccactgacctagaaatgagctcgagtaaatcagctgaaggggacgacggtgacctctgtccactgctgcttctgtctgcagcttactgaatcctactactgcggtaaattcgacgatcaatcgagactgctgagatgatgaactggtcatgaactctctgtaatgttagtgaataatggatgtgaagatcgaatgaacatttggatatctgtaatgtcacttgaactctggtaactgcgaggtctattctacctgtgtttgtaaggggacgagactttactatgcctgtcagagacatgtatcaacggccccatgtttaatctgtttagagggggccaaatgggccgggccaaaggggcggcccggggcacggccgaacctgtagcaagcacggcccggcacggcctgctacagtaacgggccgtgccggcacggcacgagtagcgtgccgtgcttgggccgctggcccgagcccgcgggccggcacggcacgacacggctactgtagcgggccggcacggcacggcccgcggcacggcacggcacggcacgccggcggcccgtcaggcgcggacagggcgggcggcggtcgaatgggaaggcgccacgtggcactaacggctatttgaccgttcaaatttgaaaataaccgttgggaggctaaaaaattcataaaaatttcgaaaaaattccaaaaaatctcaaatttcgccctataaatagggcatgaaccccagccatttctcctcatcccacactcctcatcttgtgctctcaagtgttttaagtgctctctttgttctcaagtgtgcattttttttgattttgacaaaatttgctcaaattttgtcaaaaatcaaaattagtttcgtagttcaacagtttgatcgcagaggtttgaagagctcgcggttggaaagatgtaagtaatattcaaatttgtgtattatttgtattgtgtttgtgaattcaataaatattcgaaaatttgtttatgtcggtttaaattttcagaatggatccgaactttccataccagtcgccgtcgttcaccttgggtgatttcgaccccaactacatgtcggggtttgacggtacctccggatcggctccaactccaccatctgtggaggaggtaccggttcatacggatgtcgttgaggaggtaccggttcaggcggagacagcttcggaaggattttccggaaccgcgagcggaagtgtttcgacacacaccggctcgaagagatcgagaacctccggtgtgtggcaaagcttcgacgagataaaggaaacatgccccgacggaagggaggtatcgaaagcccgttgtagaatatgtaggcaaattttatctgctcgttcttctggtggtacaggtcacctcaagcgccatgcggagtcgtgtgccaagaagcaaggaatacaactccggcagcagcaacttatggtaaacccagacggtacggtacgcagttgggagtacgatcccatggttgctcgggaatctcttgtccggttaatcgccaggcaagatttacccctgaactttggggagtcccctgcttttgaacattacattcagcaatctcataaccctaggtttaaagctgtgagtaggcaaacatcaactagagatttagagaatgtttatcacaaggaagcaactgcacttaaggaactgtttagtacatgtactttctctgttagtgttacttcagatatatggagtagtagagctagagaggattatcttagcgtagttgttcattttgttgatgatgattggcaattacaaaagagagttttagggcttaggttaatagatgtctcacatacaggagaaaacatagctgaaagaattagggaagtaattaatgaatttaatcttgctgataaaatatttgctgtcaccctagataatgcatctgctaattctagggctattgaaatattgcaacctttattttgtgtgtatgctcaatcttttctactccatcagcgttgtgcatgtcatataattaatttgattgttaagactggcatgaagagggtaggtgaccacatcgatgctgttcgtcaagcaatcgcgtggttaactgcttctaacccgcggattgctgcatggaagaggttttgcaatgcggccggtgtgaaagctcgtaagtttgccaccgatgcagagcatcggtggaatgcaacgtatttaatgttaaaagttgttttaccttatagtagtttactttctgattttgttcagtcacgtggtggcccaagaaacagtgacgggtcttcagtactgaacgagcatgtttgggcaattgtccaaaaattttaccaatttctagaaactttttatgattgtactctaactttgtcacaagtttattatccaactgctaatataattttgcacaaccttcttgaaattgctactttatttaaagaatacgaaaatgatgacgttctaactgaacctgtctttcacatgaaacaaaaatatttgaaatattggaaaaatatacctatgttgtatgctcttgcttttgttttagatcctaggtgtaaattaaggggattgtctgctattttatcacttgttggagatactataggtgtagattatagttctttttatactgaggttagacgtaaattatatgaggtttttggaagatatgaagtaaagtttcaggaagttcgccagcagagaccccctcctatccccactacaggtaagaagaagatacagtggggtaggatttggggtggatcgtcttcaagttcaatccaaggtggtggcagttcgtcggctacaagtggagacgcctcttcgcatgttgtggccgaagagttgtccggttatttggacagcgacgccatccaccacgaagcacaagatttcaacgtcctcgggtggtggaatgaccacaagataacatatcctgtgctttcaaaactagcacgggatgtgttgacggtgcccgtgtcgacggtgtcctccgaatcggccttcagtctatgcggccgaatcatcgaagaccggaggacgactctgcgcagcgaccacgtcgaaatgctactaagcgttaaagactgggagcttgctcgacaacatgcccaatacactgcggacaaccaagaattggccgcccagttcgagcaactctacctggatccagaccaaccccagtagaattttgttagaagtagttctgacctttgagctgtactcttttctttgtcatggttttctcattttcccctatgagtttttacatgacaaagtttttaacgaggcagcatgtatcattgtatcctgtaatgatataaacatcaataaaggtcattactatttttaacaaattcttttgcaatattttcgcaagtgtggatttatctttaaattatttcaaaataatgaatcacaatctatatttttaaatttttcaacacaacaaaaaaataccattttttcttttttttaacattagcaaatcattacttttttaaaaaacttttatttccattttttaaataccattttttcattttttaacattagtaaatcattacttttttttaaacattttatttccatttttaattttttttccttatacatttcctttgcttttttttttaaaaaaaacactgtgcactgcaggctggcgggctggcggcctgccttcacgggccgccgtgccccgaacggcccgtgggccgcgggcgtgccgtgccggcacgggcacggcccggccatccatgggccgtgcttgggccggcggctcggcacgtgggccggcacggcacggcccgtttcatcagccgtgcctaacgggccgtgccgaaacgggccgtgccggaaccgtgcccgtgccgggccgggccgtgccgcccgtttggacacctataaatctgttgtactactaccaggtttgtgtaatggtgtttatggattcagctgagtgcatgtttgtttgataataatcgggttttaaatctctgactatatagctaccgttatctccggccatagctgttcaagaagggttcgctctcatatacaatttagccgctatatctccatttaacccactataactattagagaagatcaaccgctaaatatctttgcctgctatttaaaacactaataataatgcagctttgctttcatatggattttggttagaatgactgggtcaaattattcaaagcatacttcatattcttcatctattaacaaaatgtttttttttaaaaaaagaaaattatttctggatgctgctgttatgcctaactaaaatggattaaagatttgtgatatgcttttctgactttctttttgaaacaaacatacccccttgtcttcatcaaatcatcagtacgacatctgtgcttttcattgacgggatagaaattttggtaggtggaagaccaaccaaccaaccatcagtactggtattgacttatcattagcagaattttgtacaaaatcattatacaatgccacccattgaggttaacaaattcagctcaaatacacaacttcaaattcacagactaactacagctaagcggcgaagaatctgttcaaatcgagaggtttcgctcaatttgtccctgcctcaaaattttgtcatttgtctctaattttacaaaatttaaacaaaacagatgctccacacttcactggtatcccgatcctaacacgattctatactccgtatctccatactagcacgataaaacctaaaatgatcataaaatcgatatgtgcggttctatccaccacagtatcctacaatatgtatcccaacgctaacgaccttggtggcaagaacagagtatcacaatgggttctctggtcccacttgaaccaaggttgcgggcagtgggtcccacctatcgttatactgacaggcgggcccaggctgtggagtcatacgctgacgtgggatgacctcatcgacagcggcgagtaggggaacgtggccaccgacgtctgcgtcacgccgtccgccgccgccgccgccctctcgtacgacgacgtcgggtacgagtgcacgaagtcgtagtagccgacctcgccggagctcaccggcgggggaggcggcggcggcggcggctccggcacctccgccgcgccgccggcgtcgaggtacctcgccacctccctcatcgtcggccgcaccgccggcgccgggtgcgagcaccagagcgcgaccttcaccgccgcctccgcctcgccggcgtcgaactccccgcgcagcctcgcgtccaccaccgcccccacctcgccggcggcgtacctctcccacgcccactccgccagcacgagctcctccggcggcgcccgcggctcgatcggccgccgccccgccaccacctcgagcgccagcgccccgaacgcgaacacgtccgccgccgccgtcgccttccccgtcctcgtcagctccggcgccaggtaacccagcgtccccaccaccctcgtcgtgctcgggttcgcgccgtgctcgtgcagcttcgcgagcccgaagtcgccgagccgcccggacatgtcgccgtcgaggagcacgttgctcgccttcacgtcgcggtggagcacaacgcgctcccacccctcgtggaggtagagcagcgccgccgccacgtcgcggaggaccttcacgcgggcgccccacgtcagccgcgcggccgcgaggccgtcgccgaacaggtgcttgtcgagggagccgttgggcatgtagtcgtagacgaggaggaggtcgccgcggcggcggcaccacccctggagctggacgaggttgcggtggcggagcctcccgatggacgcgatctcggcgacgaactcgcggaggccctgccgggactcgtgggagacgcgcttcacggcgaccaccgtgcgcggcggcttccccgggagcacaccgcggtacaccttgccgaacccgccggcgccgaggagctcgcggtcgcggaacccgcgcgtggcgcgccgcagctcggcgtagctgtagcggtgtggcccgtagtcgagctcccatggctcgaccacgtcgcggttcttgtaccggtgggcggcgtaggcggcggcgccggcgagggcgacgagcgcgacgaacgccgagaacgccgcggcgaggatcgccgacgtgcggttcttgccgccggcggcggggcggggcagcgacgggagggaggggacgtcgagcggcggcgcggcgccgccgccgagcttgaagctccagcccatgaggtagtgggagctcgcgaggaggcccgtggacgccgagaagccgacgaacatctggtcgaggaagatcggggacaggtcgacgtggaacgagatgagcggcgacgccggcttcgacgccgacgcggcggcgatggagacgttcagtagcttcgcgccgccgtcgtagtcgacccaggcgacgatggtgtcgccggacttgaggttgaccggcgcggcggaggcggaggcgttggaaacaaggctgttgaggtcgacgccgacgtggttgtcattgatgtcgccgaactcgaagtcctgcacggtgtcgaactccaccgcgaggacgtggttggtggcgttgccgacgtcggcggcgctgagcagccccaggtactggctcggcagcgcgccggggaggcgcgggtcgggcgcgacgacgaacgcgaggccatggccgcccagcttcggatactccggcaccaccgcgaacgcgaactccgtcgagaacgacaccgccgcgccgccggcgaggaggcggaggggggacgggtagaacgcgtggccgatgagccgcgacgtctcgttggtgagccgcaggatgccgtccggccggagctccgtcacgccgttcagcgtcaggttcgggctgttcccggcgccgccgccgccgccgccgttgcggaagccggagtaggtgaattcctgggaggcggcgagggcggcgaggaggaggaggaggaggaggacgacggcgaggtgtcgcatcgcatcggagacggagaagacgacggcggtggacaggtgatcgtccgtggattctttggaggaggaatggaattcggaatggtaatctcgggggtttttttttgtagtgatgataaagaagagaagaaggggagaggagtgacgtggcaccactatgagtgttaactaaatgactctttctcatgtcactaatatttgatgtcgtgtagaggataatgcaataacattatgaaaggacatgcagttcggtggttgcagtgacctaagtagcacattaagatcgtaagttcaaatctttataagagcgaatttcagattgagttatttgagagctaagtttctaatttaaaaaaagtcctgagttcaaatctccataaataagttccctgtttaataggctaagtttctaatttaaaaaaaatcataagttcctaatttaaaaaagtaatgagtttaaatcttcataggcaagtttcctgtttgataggctaagtttctaatttaaaaatattgcatatatccggttgaatgtagagaccaggttaaaaataccattctctacaaaacaaaaataatattgtgcagtgttgaatattggtgcaaggtgtaaaataatttctttttttgcttgatttattatttttaaccacttaatcaatgcttgggatggaagtgacaatgacactcaagtggctatcatttttattttgtatggttctagatagccagatgcgcgctctctctatagccataaaaaaaatgtcatcttctttaagaaaaaaaaagagtcaaaattttaaaactttgaagacagatgtctttaataatattgagattgaaaatcgtatggctttggatagcctactacatctttaggaaaaaaaccaaccatggaactttccacccaaactatcaagttttgccgttgagttgaactatttgttttaatttgtaatgtttcaaatagaacattataatttcgaatactattttatgtcgaagtggccatacgaggaccatgaaccaatgcattataaggctgcgttcttttcccctctttttcaactcacctccctcattttccgtgcgcacgtttttcaaacggctagacaatgcattttttaaaagttttttttatatgaaagttgctttaaaaaatcatattaatctatttttaagttttttttgctattaattaattaatctctcaacaatcgcgtgtcaaaaccaagtcttaaagtttactaccaaccaagtgtaatggaacggttagcacccaaatttgtcaaccctatcaaaagagagactttgggttcgaatctgagccatggtatggtgaagcaaaggataaaaacacaggcttcaagagtcaaccctatcaagacaactcttacacaatgtccagagaggttggcactaatcaattgactttgaccccaggtatcaaggaagaaaaatggagtactcctgctaggtgattattatttccggatgcagcctcatttggagggcagaatttcagagacttcataagagatactcctacgggaaagaatccttaaaacataaacttaaaaagtaaaaaaaaaacaaacaaacaagtcgtccaagcaacaagtctaagcgacataatataaaaaaatttctttaagaaaatgtgttttttttgaagcgtggagtaaataataatacatttcaataatccggtgaataatgtgataagaacatggcctatgttttaagttgttttctaaagtattttatttgtctttaaaagtagataatcagtcacaatagtccactaataataaatcaaatagggccacgctgaaaaaaaaaatccctaaacagggtggggtggtgttcttgaattcgtgcattcattggtcataactacaatgctcaatgccttaaatgctccattcgtcttaaaaaaaggattttagatgaatggaacatttctctatatagattcgtactatgatacatcacacccatctaaaattacttatattttatactttaaaacgaagagaaaactactatcaatctatctgtagcagtctctcactcccagtggataacaggagaaggggccaatccacatccatgtagagtacttctacagcagtatgaaggtctctgtaggcctgtaattggctgggtcagctgttctgcatggagtcaagcgtaacagatcatgaaagcaactgtggagaaccagagagtgaaattactctgaatttgtgaaaaaggtcttatactgtgaaacagggaacaaaatggtggatataatttgtgttttaaatcgaactatgctcctttggaacacatgattattggaagaattcaatcctatggaaaaaattatcctatcagatcatttggatcaaagaaatatctatccaaaaattctatgaaattcttttggcttgactcaaaactagaaaactggagggattctagcatgtgcttcaacctcgtgtgaaaaaaaaaatcctttgtgcctttctcttctaatccctttatttttatcgttatgttttttcaatccataggattcgaagttgatagaacacttcaatcctatattgtttctgtttatatgttttgagaatcttgcgttctaaaggagccagaaatatttcaaacatgcggagcgtctttgttttgttttggcatatcttatgcttcagtttcttgtaacggcagagttacaatatcatgtttttttcttaaaaaaaagaggtgtgattcataaaaagaaaataaagaaaaaacagtaacactctatcgtttatcagactattgccgaccataaacgtgaggcattggaggacatttgaaattccaaatatacgcagttgggctcagatcctcggacatactcatgacggatgcttacataatactccctccgtcctataatataagggattttaattttttttcttgcaacgtttgatcactcgtcttattcaaaattttttgaaattattatttattttatttgtgacttactttattatctatagtactttaagcacaactttttattttttatatttataaaaaaaattagaataagacgagtggtcaaacgtgataagaaaaactcaaaatcccttatattatgggacggaaggagaagtagtttaaattgaccatcgcaaagctagccgaaagccaaagttctggtgaaaccgcattttgcaaagcaaataattgttaattcgctgacacttgcttccagacctctaattaatacagatttagtcgaaaggattagaaattttagttggattccctggtctgcttgctcgatgcgtatgtgaatgtgatgatgtattgacagttaattctggttcacgaccgaagtcgtaaagctggaaattttcaaaagaggttaagttaaaccaccgtttcagttcgtaaaccatttcagctatggaaatcatggtgatttaattagatattctgcacattaatcagttgaattcatacccctttttttttttgcttgatgaaccagaacatgtctggccgaaaagttttatgtgattttctaatgtttccacacgaggcagcgaaaattcttccttttacgcttttcttttctacgaaaacatcatatcgccaccaactttgctggagaaatcaaactgaccatcaatctattcttcaaatgactcatgtctaacttgggcttcacaccgatcaagtacaaaagtaagaaaaatagagaagacccgccgtattccctctcacaataaggcctcgtttatttggggaaaaattttagatttagttgccacatcggatatacagacacacatttgaagtattaaacgtagtctaataacaaaacaaattatagatttcgccacgaaactgttagacgaatttattaagcctaattaatccgtcattagtaaatgtttactgtagcaccacattgtcaaattatgacgcatttaggtttaaaagattcatctcggaatttacatgcaatctgtgtaattgtttttttctacttttaatactccatacatgtatgatgtgacagcgagaaaatttttgttatatgaactaaacagggcctaaacctactatccgtgagaaaaatgttcaagaattcggagaccaaagtttatccctgaacacatatagtgggatgtgtggtgagccatccactaaaatctccatggttggatccactgttgtagtggtggctgatcatggtgtacaatcaatttgtggcttttagcattgcatacttgcaacttgctaagaaggagatcaatggagtgtgtgagcttagcttagtcaatgaaagtggctagaactggtcaacaaattcgcctccagatccaagccggttcagccattggacaattagtagcactatagtgcagcatgcttgcttgctcttgtgaattgtgatccatatccaattattagtaaatattcctaagcttggtgtatggtctgactcattgaaaacacctttttgttccctctcttgttgttttgctaggatggagccatgagcacttgatgtgatgttgatcggtgttaattagtgcattatcctaatattagtcttagggagttggaataagatatactagaatctggttggtgtgtcccaattgaatattgtgttgcatattccttgcaactattttcaggttgccatttttttgaacgaattgcacgttgccacttggcaattcttttttttttgggggggggg

SEQ ID NO: 29784 - DNA, 4417 bp, Oryza sativa
  unsure (1)..(4417): unsure at all n locations
tccgccctaaaatataagtttttaatacctcgatataattttaagatgctactttgactaacaataactataaaagtaagatgatctaaataaaaagagttaaatattataatagtttgtttaatgataaatctagtaacatcaattttacatgattaatcttttttattttcttgctattaatagttaaaagaaaaaaggttttacttagcactattttaaaaatgcttatattttgagacggagggtttacggagcattaaagtctcactgtaaatcaactggaagccaattaaagatgacgcagggtctactgaaaactaactacagtacttcaaagctaattaaggctgtgtttagttcctgaaaaaagttgaaagtttagggaaagttggtagtttgaaaaaaaagttagaagtttatatgtatagaaaagtttttgatgtgatgtgaaggaaagttaaaagttgagaatagttggaggtgaactgaacacggcctaaatatggtgtatcaattgaatttggcatgaaagttgacaggactacttcaaagagaaccccacacgttgacctatcagtcgtatgtgatgtgatttttatatgcatagtacagtatatgtcctatactatttgctggagcaattgccgatcatgaatagttttgattatccttctttatcttgtctcaataagaaataaatcaaattttcagtctctcattcaaagttggcagtatataataatattactagtgaacagagaacgaaaatgacagctacattatgccacatttgcaagcatgcagctgctcctgctcctctggttgactgcatatgaaaggaatttgattgaatttgcagattattttgtccaacgaggccatttaaaatataactccaaaaactactgatcacacatccagtgaaggtctagctggtgactattaattgcactcttcagtaccgtctggtcagttgctttcaaattaattaatcctcttaactagacgagtggttgacacaggtggcacgcacaatgcaacacacagattctcgtccacttgtccttacctctgactttgactccagtagagtactcgacaaaactacaagtcgatagatagactgatacctttgacaacaaagtcgttgcaaatcaggcatgaaagggagcgacatatatatagtattaaggctatgtttagttcacgccaaaaaaatcaggcataaaagggagcgacatatatagtatgaaggctgtgtttagttcacgctaaaattagaagttcggttaaaattaaaacgatacgacaggaaagttagaagtttatgtgtgtagaaaagttttgatgtgataggaaaagttggaagtttgaagaaatatttcggaaaacacggcgtaagttgagtattgaagaaagtaagagccatgctctctccatcctaaaaaaaacccaacctggttggggatgggacattaaccaaacgtacgtaatgggccaaaatgacatgttaatcaactttggtgtgtcaaatttatcatggcccattaaacatgacagcctcgatcaaattatcagcccattagaagtaacgggccattcaacgtgtgactgagctaacttaactgatttcagcccagtttaacgtcgtcaggtgtaaacattgaggacacatcatatggcaagcaaatgggaaataaacgattctcaaactacaaaatctcaatcagtactcgcttcagcatcgaccatctcaatctgacttctacacatttcatcaggaaactgccttgagggaggaactcgctaagtaaaatgtcgatccatcctagtcagcatagtcaggttttgtacatcagtcgttctttctactacgagtaggcacgggaaagaggattgattaccaaaaggggagcaggagcgtcattctttggatgaagactggccatggctttgagggggctaagaagcacgaccttccaaaatcagctccttttgaatcaaccatagagggaaacagcatggtggtcatagttacaacaaatccagcttacagttgtctggttgggtgcaggttgggtgttctttggaacaggatcgcgtcataccaccctgcacaattcacaactgatctggtcagaaattaacacagttcagagtattaattaaaaagttaatttgctacatgagttctgaagcaaactgggaaggtccctaagggcagtcccaacccataacactagacatggtttccataaactccacatcatcaagaaactagtactagacactactcttccaatgcaaaaaccactattctacttcaatttaatgctacttatctcacatgatgtcttggatgttgtgtagaaaccatgtctcatacaagacatggtttccttctctttcctcatttattcacttgccacatcattttttatcctaggtggcaacttatttaatgctatggacaccatcatagtcattgggttgggaatgccctaacaagtcaatcaacaaaaagtttctatcctactactagactattcaaagtacactgatatcgttgcatgacagattttatgcatcattatcactttgcattttgttgacataggtgcgagattgttcaataggggaaatcatgcatgtcctccattgtgatcatgaaaactattaaacacttttcaacagttgggaacttgagtggtcatccatctatcattaggtttgctgtgagcagcattgagcttttccttttaaccaccggtgcaggaaaacttcccaaaaaacattgaccaagtttctatatcagctctaaccaagaaaccatgcaaccaatagttcagctgtcagagagtgggaatccactttaaggaggtaggacagcataaatatctcataaaaaatatgtataattcatttgtaacacttagacattatgatgcttaactaactagcagtataaaaagatccacagttccacactttttagctataaagggtgaagcagccaaaacagaaaggtgggggtatatctataccggtatacccagcacaggacaatgataacttctgattcttgacagatttcttcattaagttttgagtagttgtaccgcaggtgggatgcaatggatacggaccatatgaggtaacaagagcagtagtttagtttgcctagtcccaacaggcataccaaaaccctcttcactgtgtgtgcatagctatatatgtattctagtttatcatcaaacaagacacatctgttaagcaaaatgtaatacagtgttcattgatctaaacacaaccaatgttatgataattcattatcttgaccaaatagcttgtttcaaatcagctaggtactaaagtttaacacatgtaacacaacaaattccaaatttcagcaaatcacatattcactattaacatttcactacaagtccaaatacgtgcatccttgtccagttgtcctcaatatttatcagtgtaaaacaagtatgtgccacatgttctagttgtcatttcactgtttcatgtctacgtagaaatttaacaacatgattattacaaagcactgtaggcctattccattctatctaatgtattacttgctgaaattctaaagctaacagtttactagccataagcccctaattagttatacaagcgggaacactccaacataccttgagataacgcgcattgaagatccagaaaaagaaaacatgtacaatgttgatagctctgcttatcccaagatcaacattatgcagcattaaagctgcggaagctcctgtgggttctccattgatgcccttagtatcatgcccgccctccgcttccgctcatcctttacttcctccttcaagaaagacggatcctccctcagatccaggggttttgaattcaacacagctgataacggcttcttatcaattccaatcttgaggtgcaccggtgccctctctttgggaacaatgctcttctgattctgattgttgtcccaacctggcccagtatcaatgtccatnnnnnnnnnnnnnnnnnnnnctggtgcaaatgcgtcgaggacagagattttcctcctctgtggttgcatagcaacatcagacacctccttctccccaggtggcaatgcaggctcaaggaatggatttctcttgctcccagccacctgtatctccttccccttttccgcagtattctctgtaaccgctggcctaaatccatcagcacctgcaagtgccaaccgccgctgcaagctgagcagtgacttctcagccttcctccgctgccgcacctgctcaaccttgtccaccctggccttggcctcctcttcgctccaaacctctgtccttatgtacgtgtgtggatccgggaacaccgggagccattccggcacatgctt

SEQ ID NO: 29785 - DNA, 9885 bp, Oryza sativa
ggggtttagggtttcgggggggaagcggagaggggaggaggaggagaccgttgggtggattggattagggcttggaggagggtttggattcggatccgagcacgcgaagcgaagtggggggaaggtcgaggtggagacgaaggggagagagagagaggatggctttatagaggaggagtcggtgggtggtgcgcggagctggaagacgaagacaagtggcgctcggtgattggattagcctggtggcacggttttatgggccaacttgtagcacggcccaattaggcccaaatcgtcgaatgaaaagaatacacaatgcactactaataaccagatctccctgatacaggtttgagaacttgcaatggatggcagagtatatgaggaacaaaatttgacagaatataggtagtagtagaacattgcatgctccatccccatcacggcatgatcacaaccacatctggtgaacttctggggaacccaactttgcaacctctgacggtatccagcatcgcggtgggaagcaatctcgggcagcatggcgaaatggcgagtcgcagtcagacttcgctttagtggagcagaagagcaagggagtttgtggcctctactgatcatctcagctcgctgtgcagccatgggagagatcctctcagcgtgcacgctggtgaatctccacgctgccagcggaagcctggttcgcggctcggttgctcccgaagttcttgcggtttgattctctcgctattcttgaaccaaactgcgtgaagcataggatgggagtagtggtgtcaagtcacaaactacagcttctatgttttctttaaatattaattctatggaattaactggttggtatatgcacctggattgcccgctttggttgaagtgcagcctcttttaagcccagtaggtttgcaaccttcaacatcatcacagatatgtatgtattaacgtcacccacagatattgagttacaaaaagaagatttatgcatcgtgatgtatcatgtacttcctccgtttgacgttctagcatttcccacattcatatagatgttaataaatctagatatacatatgtgtctagatacattaacatttatatgaaggtgggcaatgctagaaagtctcacattatgaaacggagggagtacatgttactacttaacaaaaatcaatgcattgaaacacaagaatgcaaatcatgctccaccagaactatttttttttctagaaaaggaattctatgtgttgcttttactcaatgagttatatgtgaatttcaaatgcgaacttcaatttaatgtaacagcccccatatggactaagctcagaacaagcacaaacctctctcaagatcttcttgtcgccctttccaacaggttcatcaagtttagcaatatcccacaatggaatttccaacaaagttttgatcacattctcatcaagaaatggaaaacgtgcctgtagcatggacagtagtacacatcagattgctaaacaaaaattgctgaacatttctaattcagaaagcatgaccgaaattacctccttgccatggtcagaaatgcacctatcgtctcttcccatatttcttttccagattctctgtacatctagtctcatctcctcatcaagtaaaacccagctaaatagaggcaaaaaaaaattcaacattcttgcagttgcagtgtaagaacatctcatggggtatgcattgcacaacctgatatgcaagtatagaacaaacaaattgatgcttacgcacataccctccaagtctatatttagtcctatgtcttccataaccagcgcactgctcatcagccccagaaccgactaaaagaactctagaagttgacttgtacttgtagcgacaaccatcttgcatgttgcatatacttccatccacccaaccatccccaccagcagccaaccagagagctataccaatatttaaatcctgtacaaaaaaaagcagaattataactttataaagctactgtaaaacatttgaagtaatatatcaaagctataaccaaggtacaaaccatataagtatttgaagggtatataagtgacatcacatgttcactttctcctttcaagtttgtcaaaactgtgtcaatctcaacaagacgccatctgcgagtaagaaaacaaacagctcgatttagcactacacaaacataatgattgcagcatggtaaacaataaaaaggggtagagaagtatttagtaacgagagtatggaaataaggaagtccaatcaaaaggcttccacttgattatagaagaaaacaaatggaaggtaaacatggatgagctatcaataagaaggcacaaaagtgtaattaaacataatatattcaatttgcatcggtggcttgatcaaattcactggccagctagaagactatagaaggaaacaaaacaggcaaataattcatcaggctgtaagagtgtcaatttttttttttacaaaaacactgcagggggagcccccacatgagagtgtcaaaaagggagtacataattcaattaaacagaaatcttgtgcaattgaagtgtgcaaaacagttaagacttgaccaaaggtagctcatggctaaggatgtgagatgttcagaagtcaaatcacctacggataggggaaattctctgaagttccttcagtcctgccagtgcagaaatcctatctggagcaagttgcccatcaaaactgacattcaacaaatcaattgtccctgttcaaaatttcaataactgttcctcatatatattgaagtatagtgtgtagcataagcagctaatcttcttgcactaatgtactataaaaatttaaaattcttagagtactgaacacaataaaagcaacggttggctaatatattgaactgctaacagtattgaacaagaaacagtaaaagcaatagttgaacttacatttggaatcaaggcactggtctaataatgctgcaagtatcatggagtccaagccaccagagaaaaggattgctattggggctagctcatcatcctttagtttatttagatcatcctgtccacaagaatggactatcaatagagtatataacaagaaacacaacaaggtccagacaatatagaactattttcaagtagcctgctggagttggggaaaaaagagtcatatagcagttttaagtcagtgccttggtggtcactcacctgaaagagtctgttcaaattggttcgcagcattacagattcccgcaacgcaatcaacaccttatacgctgaatggaaatataattgtaaagaagtatctgtattagcaactttccttaacagtattttgtttcaaaaaacttcaggagtaattatctgtagaactttactgctttatgtgaactgctggaaacatagaagaaaagatctctatttcccagtcaattaggcccttaccagcatttttgtcagcttcggttgagtttctgaagctctgagacaaacaatagtcccctacagaattctgatgtgaagttaagtcatccacagtaggaactatcgatttcttcttccattggattaattcatccaatgaagagttgatccagtcatgcctcctaacttcggagacacatgcttccttcatacacatgccacttttttcaaggcttttcaattggatgctgtatatcccacaaggaagctcttcccagtaactcatgttggtggactcaggaaaatcattatcttcccctgactccataactttgacagttggcgctgtaggagtgaagaagagtatataaatgagatgattatcaatcaagtagagagtaataatcactctccaaagcatgaatagaatttgaagtattaggtgaaattttcaaatttttttgtaaaagaacagaatatatgcaaacatttgatatggtaggcacatcaagattaaaaatatcttaccagagttattacttgcaaatgaagggggtgatactgatgataatataaagcgtggatcatcaggtgatggccaatgtaccaagaggcttcttctcccgaatgcatcccggccaaaccacattgtttttgagtccttctgagagttcaagcaggctcaggtgttagaaagttcaatctacaacaaattgcaaacaggacaaacatcacgattacctgcctgccagtatatcaaagcccaggggcctttgattgtggaaaggatctgtggaactgatttcccaacacttccacaacagagacatgcttcatctctaacaagagcatggcactcacaggaacaacaagattccagtgatgacagaagtgattgagtatcattttggtcatcagcaacatggactcctccatagatctcaccttaattgaaaaaatagtttcagtatcaagttcaagtaagctaatcactcaactactaacatggaagcaacactaatacgctactaaaaagtcaatcgatgcacgagttcgaatcatcaatcaggaaaagtcccagagtatggaaatcggtacatgtaaaggctatatcttacaccacaatagcatacgttccacacaatgaaatacgaaaaggaatcaattggtaatagtaacagggaaaattttagatgagcagaattaccgttatatactaaaacatttcctgattgacccaccatcggctgcaaaatcggctcagctcccctgagctgcagcgttgctccgatgaagcacaactcagtgtcacccacatcacccccattcccaactccacaatcacacccatcactccctgaaacgcaggacaatcaaatcacgaaacgcccgaagcaattaatcaaccaaaactcccaactcccaagcacagggggttacaaagcaacctaaggtcgtgccatccgcgcggacgcggagcctctcgcagccgaggctatccgggccacgccgccgcagggctgccttgagctcatccaccgtcacgcccttcccctgcaagcacgcaccaggctaactaactcgattccagggtttagggtttgggaaaccacggcggatgccaatccgaaagggagggggtttccatacttttccattcgaggatggtaggaacagtacctcgtcgcttggttggattccgacggcagcaacggcggcggcggcggcggcggagggagcgacgactacgcggccgccgccggagaggacgagggctatgccgcacatcgctggctcctggaccccacttgtcagttgctcgagccaagccgtagccgcgtgaagtcaagtgcaaatatgcttgccaatttgcagaaaagacccggagaagaagtatatttgcatttgacgagttcaggctgtgactattagctttacaaaagaattttttttggaactagctatatttattatatttgtggcgccatatttttcacaaaatatagtcggcgtgtgtttacattgtaagtcactaaattacatatgtaattttagtgtatttacaatataagacccaaaattacatatgtaagtcttaaaattacatatgtaaatcctaaaattacatatgtaaatagtgtgttagtgaggtgtaactacaatgtaaatttatataaatatataatttacaacaacaacaaagtttaaaaagcatatcagtatgcatctatgtcgtgtcagaaccaatcacagcaaagcgtgtgtgctgatgccccgtgagcacgaatcttcatgccaatcctaaggctgaaaattcgactgcgtttgtgggaaaaatctgtcgccataattatagccgatccggaaaactaagttttgaatttcttttaagtccatgctttaaaataagagtaaattgcatccgcggtacacgaacttgtcgagtgggtgtaatctagtgtatgatcttataaaatgcttgttttgttacataaacttatcttgcgcgtgcgaactaaggttaaaaggacattacacgactagttttgttgatttaggtactgattaggatactacgtaaacatacaaatgagaatgatatatatagtgatggtagagaaagatataaaataccgagcaatgatacatgggttagaaatatacaaaattcaagataaagtagagaaaaaaatttataaatatagcatgttttatacatactcatacgtatgcacgtcacatcctaatcaacatcagctaggtaaattaaccttgccaagccatttagatacaattatcagataatactaggttttatacaatttttgcaggtacaccaatgctctcgtacaaaatcaaggcgtagggtaggggcacagtaattgatatacacactaaatactctgcttaattacacactaattgcaaattaagtggtaattaatcactcaaagctaaggcagtgagcatgtaatcgcttcagctggacgagctctggagcttggacacgaagctggaggcggcgaaggcggtggagccaccgacgacgcaagcgagcgcgaccacggcctggacggcgacctcccatgggtactcctccgggacgaggtagacgacggcggggccggcggcgagcagcagcagcgcgacgccgagcagcgcgccgggggtgcccgggtcggtcgccgccgacagcacctccagctcctccgccttggacaacaggcccagccgctccaccgccgacagcgacagcccggcgcgctccgccgccgacaggagccccgccttctccgccttcgtcagcagccgcagcttctccacgttcgtcagcagcttcaccggcggcgccgccgccttcccgctcgtcgtctggctcggccccggctcccccaccgggaagtacaccgtcgtcccctgcaccgccgccgctcgccgccgttagcccgatcgatcgatcgatcgatctacaagctcacacgccatggggaagaggaagaagacttaagacttacccttcttgtgccggaggtgggcttctgggtggccatggcggcgaccttgtgaaggcggcggctgctcggcctcgccgcgacggtggccggcgacagcgacggcatcgccaccgctctagctgcgtccatcaccatggatggattccctctcctaccaccacacgtacacctctcgttcttctcgacttctcgtgcagcctagctcaccactagcttcgagatgatgatgtggtggcctatctgatccgcccagggacacgtgcccctcccctacaggctggaaatcccacgtcagacacgcatggattaatcctaattgaaagattaaggaataataaagtaattataattagagaaggtgaatgacaagatgattccatggcccaatggataaggcgctggtctacggaaccagagattctgggttcgatccccagtggaatcgcacagtttttctatttttgggtctttttagctatttggcccatttaaggcccatcgaatgggccttttattcggcctataataggttattgtgtttgggccaaatgtagcgtaaatgggccgacgatgaagcccaatagacccataaagtgggcccacgctccactgctgggttaatacccagccgccgcaaggcccagggcgaagcaaccaaacccttcgcgagatcagaagcgaaaccctagcggcgaatccccacacgacgcgccggagcggggagaggggccatggcggcggcggcggcggcggtggagaaggtcaaggcgctctgggactcgcaggtcaacgacgaggaggcttgggcgttcaactacgtacgtcaatccaatccaatccatccatcctctctcgcgtatctacagctttcttttctgttttttttttaattaatctaggcgtgatgctgctaattgcaaggatgaatttatctaggaggcatcagcggtggcttgtttaggtggatttagggacggatggatgtggattggtgttgtttagtctgctgctgcgttgttgagcaaacatgagggcatatgttgttttttccctttttgcagtgcgtgtttctatggacgaaagggttggactgttagagttgggttgggatggttgcgtttcttgagcaaacatgaaggcatataaatttttcctcttttttatttctgaaatgtatgttaccatgggcggtttaggggttagaactgggttgggatggttgggtactactgttgcttcattttttttattttgttatttacttcggttagtggtcgcactaacttgctagaatatgtagggttgaagtgaactgctgtgcttgactagtccttgtgtaaattgattctgctgtttgatgcttgggtgttatgagcttaatcatgttatggagaatgccaatgagtttaacaaacatgacatgctccttgctcttcttactgaatctttgttgtttgagtcaatcggtcttaactcataaatgctgttctagttattcgtaaggcggtttttgtgtgcattgtccactggctgaaaatgcatgatgtgagttaaagatgatcggcctaatcttttcacttatgtttatgcttatcatccaaaatttgaattttcaaccataaatttgaaactgattttgggggttttttcatcgaagttttatttttcagccttcgcttttagattgctaagaacacggatataaaagttttattcacaaattacttttcgtttactaatatgctgcgaataagccaaatgacggggccggatgttttcctgtgttgacttgtaataactcgtaatagcttctctaatttatgggtaagggtggcaactagagtgtttaacatatcacatagatggatggttagggctagtatactaggtacaaacagttgtatagcagaacagagcagagcagttgggttcactgtatttctgtgataggattggcatcctggcatgttccctgcattctgctactgcttgatgtgttaattgcttgagattaataaatcaaggaaatattgatggattgctggttgaggtgatcacttggctggctctgtccagtgcttcatactttggctagctgttatcatcatcttcctttgttctgtattcgtgtgtctgaattaggcatcctctagttgaaaaaaactcttctgtactcaccaggtagtgtgtgtctgcatatgtggtgctctttctgcagctcatggtgtatatattcactatatttaccactattttcttccaatgatgaattgcattaatttactatcagaaaagaattgatgtataggctatgtatggcgttgagccaattatccttgggatctcacttttgggttatgcctggcactgaatttctttttgctagttatcctaactgtgagttatatttagtgtagtatcttcactcattgatgctaacttcaacatttttgttgggcagttgaatctttaagtttttgttgtgtactttttctctccccattttttcagttgtccagaaagcatttgaagaagtagttattccttcttttcttcaaccacatattttgggcttagaaaattttgtacgcgagtcttttgactatgtggaacttttgattccgttgaagttattttttataataactatctggttgggcacagttaacctgactctttcttgtcgttagaaattctattgatgctaattaaactactgtcttgttttttcttgttctggtttacagaagctgatgaaggctggtggtctgtttgttgcatccatcttcgtgatgcgcaactttggtgacctgatggccatctaaagaggagctgatgcgacagtaacgtggatccaccagagctgtgtgtcttgttagctgttagttttcacttttatgtcagcaacgcaaccagacttgttcttaggatcatgaatt

SEQ ID NO: 29786 - DNA, 13696 bp, Oryza sativa
ggcccatcgaacccgggggaggcaaaatagacttttgcggaggcattgatttgggaaggatttgaattcgggattgaactggacgatagatcggggattgagatccgagatggcacggacactagacaatcaaacaaagaaacaaatttcgcaattagggtttttaagagataattttcccgctaggcgccacgacggaacgggcgctacagaccaacccccctaacaagaatctcgaccccgagatttagcacctaagggagcagctccgggaactcggcacggagaagatcttctcgctcccaggttgcctcatcttcagaatggttgctccattggaccttgtagaacttgatggtcttccttcgtgtctgacgttctgcctcttcaagaaccttgatcggtctttccttgtaggttagattcttttccagctcgatattacccaggggaacttgttcttctggaactcgaagacatttctttaactgggatacgtggaacacgttgtgcacatctgcgagaccttcaggtaactcaagctgataagccacttcgccacgtctggcggttatgaggtaggggccgatgtagcggggtgctaacttgccggacattccaaacctcctcataccacggaggggcgatacccgcaggtacacatgatctcctttttcgaactcaaggtcatgcctccgattgtcagcgtaattcttctgacggttctgcgctgtctttaaacgttctcggattagcttaacttgttcttctgctgccttgagtatgtcaggaccgaataccagtgcttcgcccacctcattccagcacaagggagtgcggcactttcttccgaacattgcctcattcggcaacatctggatgctggcctgataactgttattgtatgagaactcagcatacggcaaacaacgatcccaagtgccttcgaaatccagtgcacacgcacgtagcatgtcttctaggatttggtttaccctttctgtctaaccatcggtctgcggatggtaggccgtactaaaatttagatcggttccgagggcttcatgcaactgcttccagaaccttgaggtgaactgagtgcctcggtctgacacaatcttcttgggacagccaaatctacatacgacatgggtcatgtagagttctgctagtttctttctatcaaaggtggtttttactggcacgaaatgagctgatttcgtgagtcggtccacgattacccagatggagtcgtacccgctaggggttcttggcgaaccggtgatgaaatccattccgatctcttcccatttccactcgggaatcggtaggggttgcaacagaccagctggcctctgatgttctgccttgactctttggcaaatgtcacacagggctacgtattctgcgacatctcgcttcattccagcccaccagaagtatgccttgatatcttggtacatcttcgtacttcctggatgaatggagtaggctgactcatgagcttcctttagcatgagatctcttaattccttcttggccggtacacagatgcgtggaccgcaccaaactgtgccttgatcgtctatggagaaattggtgtctttcttctcttgtattctttttattaactcttttatcccttcgtcgtctttctgagcctcccggatttgcgattctagggtgggctgcactgtcaagctggcagggacacctgactgtaccacggtcagccttaacttctccaattctctgcacaggcgatcttggccaggccgtatttgagctacattgcaataggccttgcgacttagcgcatcagcgaccacattagctttaccggggtgataatgaattccaagatcgtaatccttaattagttccaaccatcttctctgcctcatatttaactcgatctgagtgaagatgtacttaagacttttgtgatcggtgtatacttcacatctgttcccgattaaatagtgcctccagatcttaagagcatgaaccacggctgccaactcgagatcatgggtgggataattgacttcatgaggcctgagctgcctggatgcataggccacaacctttcgttcttgcattaggacacatcctaagccttgtcttgatgcatcacagaagatctcgaaatcttttctgatatctggcaaggtgagaactggggcagtggtcaaccttttcttcatttcttgaaagctgtcttcacaggctacagaccattgaaatttcttttccttctttaacagctcggtcataggtctggctagcttagagaatccttcaatgaatcttcgataatatccagctaggccaaggaagctgcgaatctctgacacattcttgggcgggttccaagcaagtacagcttcaaccttgctgggatctacttcgacaccgttggaggagatcacgtgtccaagaaatgctactcggtctaaccaaaattcgcatttcgagaattttgcgaatagttgatgatctctgagcttttccattatcagcctcaggtgttcaacatgttcttccttattcttggagtatatcaggatgtcatcgatgaacaccacgacaaactggtccaggaattccatgaagattttgttcattaagttcatgaagaacgctggagcattggtgagtccgaaggacatcactgtgaactcatatagaccataacgcgttgagaaagcggtcttcgggatatcttcagatctgattttcagttggtggtaacctgatctcaagtcaattttagagaaaactcttgctcctttaagttgatcgaacaaatcgtcaatccgtggcaacgggtacttgttctttatagttacttcattcagggctctatagtcgattaccattctctcatagccatcctttttcttaaccagaagcactggggctccccaaggggatgagctaggtcgcacataacctttactctccaattcttcgatttgtcttttaacttctgctaactcattagctgccattcggtagggtctttttgtaattggtgcggtgcctggtgccagttctatggcgaactcaatctctcggtctggtggcatactcgttcttgtcgttagaaattctattgatgctaattaaactactgtcttgttttttcttgttctggtttacagaagctgatgaaggctggtggtctgtttgttgcatccatcttcgtgatgcgcaactttggtgacctgatggccatctaaagaggagctgatgcgacagtaacgtggatccaccagagctgtgtgtcttgttagctgttagttttcacttttatgtcagcaacgcaaccagacttgttcttaggatcatgaattacaaactgctcactcgagaattgagatagttttcatgatataatggaagccagagtgctactggttttgtgaatcagcaggcgaatctgcgaaaactcaattgggatatcctttagttgagactggccaagttctctacactccaatccatgatgtagtgcattgtactagttgttgcattgtgttgatgacttgctgtgaaatctttatctcactgatatcgattatgcatgttattctttcgtggaagacttcctttttttttatacgaggtatcatggaaaagaatttttgcaaaaaaaaaaaaaaacttctactggtgagggaaccgacctcttctggctgagttcgcttgctgaggttctcaacctttaactctctcaaaactcaataggtcggccaaatcactcaccgatttggcttgttgattttttttaatttttttataattttctaagtgatatataaacaacgataggatatcaccttaagacacatcatgtaggagactcatcgcctcgatcacacacatatactgacatagtacatcgtactatacgtacttatttaagctaacatccaggccagctggtacatgcagagttttcagatcacatataggctgtgtttagttgccggcgtcctccgatccgttacttgaaagcgccaacgtcttcctcgtctcccttccggctggccctgaagtactccttcgggttaccctcgaacttgtcgcgggagatcatcaccttgccgtcaaagcccggcgccttcattgtccgggtcgtcggcggatcatcatctgccgtcttgtccgggtctccactgctctccccaatcgccgacagcaggaacaaggtgccggcggcggcggcggcgatgaaggcggtgacgccgaggatgcggcggcgggtcgaaggcttgtccgtcttctccttctcctttacctcgttcctcttcatctcgcggcaagagagagagagagacagagagagagtgggggggggggacagtgggtaactggctacggagattggagaggcctcagagcatcagggcagcttttgtagtgagctcgcgatgggacccacatggccacagccatcatcactactccatctgtcatgcactcttccgtagtctttaagtaaagagggatcttaatctttaaaaattagtgtagagagattttaccgtaccggaggaagtacatgtaaatactaatgggctcatcttttggtttatacttatatttatcagctaaaatttaaatttttaaccttaaatttggagctgattttgaggtttttttatcgaagtttattttttagtttttatttttagatcgctaagaacatgtatataaaagttttaaccacaaattactttccgtttgcaaatatgccgtttcgcttattccgcgaataagcgaaatgatggctccgtaaaattttgatatctcgagatatctaatatttgtaggtatcaaattttataatagaaaatatcgtattgcctgatattttcttaagaatgataaaattactgcatcgctcacatttcaagaaaattttacttggaaaagaataaagttaaagtgtcccatactattacttttataaagaaagtaaataagaggataaagataaacttactttagaacaacctttagaattactaacttatttcagggtgtcgggatgggaattcttttagaaataatactcccccatccatctgagttgctcgtattattttttgcattatgaccaaaaagagcactaacttctctatgattcatttaatctcacttgtgatttcagccaatcgatctcttttttacaagtttttattaaaataatattatttctaaaaacttttctggggaaggagatggaaggccaaagggttaaaggtgaaagcttttagtctttcgctggacccagcttgactcctctctccactatgtggtttcttcgtggaagatgaaaaagcttttcgtacgtggctgactcagctagactcctctccacgatgacccattagactgtgttcttgagggcaagttttataataaaggtgatggccgcctttaattttatccacgtcatttatccataaaattaaaactaacttatataaatgcattgcatttaatacactagtcccaatacacttaccactaacaccattctcaacccaatgactaggatagtatccatagcattaaataagctgccacctaggatgaaaaatgatatgacaagtgaataaataagaaaagagaaaaaaatcatggtttttacacaacatttaagacatcatgtgagataagtagcattaaatctaagtatggaatagtgatgtttgcattggaagagtagtgtctagtattagtttcttgatgatgtggagtttgtgaaaactatgtatagtgttttgggttaggaatgtcctaatcaacccctttctttttctcttgtttcttaaagtttgtgtggaggttgccccttatacgagagcaaggtcaatagtgcagctagtggcaagctccaaaattttatcatgtcaaggtaggtagaggtggctccttctttctctcttttctcttctcttctctcctctcctccacatcatcatttaagtatacatgacactttggagtttgtgcttaaaaccttatagtacgttggaaactaactcccccaacacgcaaaacataacgataaattaacgcgtaatttattaattattagttaaaaaacttgaaaaataaattaatatgattttaagtaatttttttaatattttttaaatcaaatcatttaatagtttgagaagcgtgtgtatgaaaaatgagagaacacaaaagccttcttcctaatagccaactaatgccgcatcaataaaatgcagaaaatagtcgctttgtgcaatttctttcgaaagagccgatactaggactgatcaatcctccgcctaacaaggttagggtagggccgtataggatttgttcagtagtcccaatattttattcccaaaactatgtttttttaactcctaaactaaatatagaaagtaagaaaactaatctttttaagagatgtcctaaatttgattccctataatgaaaagtgggctctccctttaactaccaacagagaattagttttttctgctcctcccctacgtgcgcaccgcgtggctagcttaattttttctccctacgcgcgcgaaagagcgattgggaaaaaattcgctccttaaagtaggaaacgagatatccggagttgggaacttggattattaggagacaggttagggattctgttggatacgatttttaaccaaattttcctaaatctgaggatagggaataaaataataataaagctgttggtcatgctctaacttctccttaatcattttcttcacatatgtttcccaaactgctaaattgtatattttttataaaaagttatatagaaaatttgttttaaaaaatcatattaattcatttttaaagcttttttaagctaatacttaattaatcatacattaaacatccacttcgtttagagtgtaacggggaaagagggttcctaatagcaagtctaataagcaggcgattagcctatataagagggaaattattttttttagtgctaatacgatcgtttgatgtattatcagcagttggcaaaccgatggcagcctgagcttcttcacggctgttctatatatgaaccgagctgttgacgtataagctgaaatagtgatcgggttagggacgttttaactttcagtcacaaattgacaaattatgattggcaatttggcattgtaccccttgtggagacactgttgtaggatagaaattcgcaagctaagtctgctgttgttgttattcacataattgtgattggtgggttatctaaaaagtattcgacacaaaacggagccaagcacagtcagatttttctcaatctctaatccttacccataatgacaagaatagagggcctccacgtacagactttcacgattaattataaactagtacatactttacactggtggagaaaccctttgtagtcccggttcgtaacccccctttagtcccggtttccaaaccgggagtaccaatccgggactaaagatcgctatctttagtcccgggtgaaataaccgggagtaaagatcgatctttagtcccggttggtaacaccaaccgggactaaagatggctcagccacgtggccggctgagccaaccaaccgggactaaagatcgagctgaacttttttttttttttgcatggtcctgttgctgcatggtttatatatatatatatatatatatatatatatatatatatatatatatatatatatatatatatatatatatagtaaatttgtttggtgctccatggtgcccgggcaccattgttgaaattgagtatatacccaattcaaatgagtatgaaacttttttaattatttaggtattaatattaactactttactaactagttgaaagcaagtttgaactgaatttgaacttgtttttgttagattttgattataggtatatagcatccatacatataattagttaggtatgtaatcatggattgtaaaataaagttaaatttgagttgttttgttgataggtataggtatgaatcgaattcttataactaggtatatactcacaatttgaaaattttgaaaaatttgagtgattttgtgcatttgaaaccatggtgcccgggcaccatggtgccccatatgagtgtcctatatatatatatatatatatatatatatatatatatatatatatatatatatatatatatatatatatatataaaccatgtatatatatgtttcaatacatatatatgcatacatatatatatgtatatatatatattatattatattatatgtatatacatgcataatatatatgtatttatacatataaatgttatgcaaatgcatatgtatatagatatatatatgaccaaaatatatttacattatagaaaatgtgtacacatgcatatagaaacatatgtagtcatgtattaattacaatccattatatgtcctagctagctacgatttcgacgtagtagtagtcgctgctagctcagaagctacggaccggtgaattgtgtttccgtcgtagtagaattcacccttgggatcaaggatttcttcgttgatgaatcccatgagttgttcttgaaccgctgcgataaattccttgtgtgtggtcaggttatccctcatgcgaataaactatatgaatgtatgaaattgattagtaattaaacaagaaatcgttacgtaatgaaattttgaatttatttgtacgtacatcgagctctcttgtggtgatgatttggtctgcaaggcagtggcaatactcacacacgtagtagccgcacaagttagttccctgcttttgctttgtgcactacaaataaatgacaaattaacggcgtgagatctaattaatatacagttgtatgtattaatttgaatcggagaaatataaatgtagagcatgtgtactcacaggaaatttgaacttccgcctaagtctttctctccatttaccgcggaccaaatgacggaaccgataccaagccctacatggagtttaaagctatgattcgtagtagcaattaacataacaagattttcttaattaacagaggaacttatgacggtacctgtctataagttcgaaaaccttgtcaaacgtagactcttttttatccattgagtcatatacgttgacggtgcaggccgacaggtcgaagagtaaaagcacccagtggaatctgcaatgtgcgtgggatgcattacatatgaaacacttagcaagttcgtacgggaatgaaatttggtatgtaggaagacagtaaaattgaactaactctgtgttgtacggcaacagtatgaacgtcttgtaatgctgcgccttcaggagatggacgagattgtcctctgtttcttgtggatattggtcgagcattgcgacgtttactctccgagggtcgatgaatccagtatcgaaaaccctccgccgtcgggccctttgaatctccattctataacgataaaagggagtattttattttatatagtctacttatatacaaggacctaattaattaaaggagacgtatagtaagaagtctaactgaacgatatacttacaaaatccagcaactcataatagagacgtcgagggcgtccagctggtatagttcgtagattcccctgaaattgatccagagaatgtcatctccttgcaagaagtccgtgtccctgatcctcgctccgatcatctctctaccggtggcgctcatctccatgtacagctgatggaacttgtacatttgtgtgggtagggactgcagcagctcaggcttgacaagcggtttaccgagttcgtacatgtatttcacttccgccttttcgattggtgcgactcctagcaattgatccgtagttagaccggtgtcagtaataaattgttctatcgtcatttctttaccggtcaccaatggctcgatctcctggtttggttgctctccaagctgagggactggtttggactttccagaagatgctttcttcagcgttcgctcatagtccgatagcttgatggcctccttgacagatgcagacatacccctgaagaagttcctgacactggggtctataggaatcttcttttctggacttcgaggcttgaattgtctcttgacttctgatgcaacgtaagcgtcaagctcctcttgcgtgcaatcgtaccccgggtcattgttcttggcggcgtcaactttcgccttcttcgttgcccttgtgtgggcaggcgatggagctgggggggcccttgactttgaaggtgccggaagaggagcttgcggaggagtaggtgtaggagcccgaggaggagtcggtgcaggatcctgaggaggagtcggtgctggagcctgaggtggagacggtgctggcggagcatgaggaggagacggtgcaggatcctgaggaggagatggcggagccggaggagatggtgcacgagacgccgcttgtcgcccagggaggatgatgtaccgcctgcgccatagaataatggcatggcttgtgtctcgtagatgcgtctcaccgtctcctccagggtaatccagctcgaggtcctcgtacgcgccttcgaccaactcaacttcgaccttcgagtatcctgctggaatcggcctgcagtggtaagtacctgaagggtccgttgggatggccatgcccgacgccaccttcatgttgtgagagattatttattagtaatcaacatatataagcagcaactagcggaatggctaaatcttacctttattgataagttcttgaaaggaatatgcagctcacatgatgtccgctgagtgatgtcatcaacgggacaggtcgattcgtcctgtgtttgcatggcgtccatgctctgtgatcctacctgccccgttgaggcgcagctgctacggtttcctgacgggctcaccattgcaggaggaatggtcggctggggatcatgggaccgatgtgcggccatgcgttcatcaaccttccttgccacctcctcttgcatgttgagttcgtagctcgatacccggaactctaggtctgcaatcttcgcctcggtatctctcttgctcctcatccgactcctgtacgtgtggatgtcctccttgaaaccaatcttccaaggaatcacccctttccctcgtgttcgtcctggatgctctggagtctgcagggcgagtgtcagatcgtccctatctctgtctggtcggaacgtgccctgagaggaggcttccactgcatctgttagtcgtcgcgcagcctctcgtatctgatcgccgaagaccagtgagccatcagctgggttgagcgttccaccgtgagcatagtaccagaacttcaatcgttccggccaattggctgttgccggttcgatacccctctcaatcaagctagcctccatctcctcccacttcggcatcgcgacgctatagcctcctgaccccaagtggtgatggtacttcttcttggcggcattttctttgtttctttccatcatcgcctgcccttgttcacctgtcttatatgcaacgaactcgtcccagtgatcccttagctttgggaatgtgtcgaagttcggtgtctgccccttcagtatatacttctggtacagatctcccttgaagctctgaaactgttctgccattttcttcagagtccaccttttcactttgtcctctgtacccgcaggaagggtgaatgtctcgagcattgtggtccacagcatctctttctccgaatctgggacaaagctctcatgatctccgcgtgcccttgttcttcgccagtacaccgtactgacaggcacgttatcccgcacaacccaaccgctgtgacgtacatagttcttggcggcttcggccggggcactaggacgtccatcttcttccacttccgttatgatgtgccgaccctcaagcttcttcgctgcacctcgttgcccgcgtgccctcttctgtccaacggagggttgactaccactagcctcctcctcctggttcccctccacatccctttccacgtgcccctgctggttcccctccgcatccctctccacgttcccttcctcgttcaagtactggtttggatcctcgttcccctcttcttcattccagtactagctgcttccctccgcgattgtatcgtacaatatctgttcctcatcgtggtcagccatctgttgatacaagaaacatctgctaagtcacgagacatttatgttttaacaatctaagtcatgtatgctaagtgtaaatgtcgtacattagaaccctacacaaccttacgtgctaagtctaattacaaatcgtgatataagctaagtctaggtgacgtatattatacaaccctagctagtaaataattatatactaagtctaattacaaataaaataatcttatattaaaactcaaataatattacatgctaagactaaaatagtcatgtatgctaagtgtttcgtgcgtatatgctaagtctaattaagactacaatagtcaattgctacttgtcgcaccacttccgtagtcaataattacatactaagtctaattacaaataaagtaatcttatattaaaactcaaataatattacatgctaagactaaaatagtcatgtatgctaagtgtttcgtgcgtatatgctaagtctaattaagactacaatagtcaattgctaggagtcgcaccaattccgtagtcaataatgtcatactaagtctaatttgcaataaaataatcttatattaaaactcaaataatattagaacactacacaatcttatatgataagtctaattacaggtctaataatcttaattaattgcattacaaatataacaatcatttatattattacgtcacttgcgtgctccaattccttctagggctagctcttccactcaggcttgacggacgactccgacaacacgtcttttctgcaagatacaaaaagatgtattaggataaatgcgaagtataacatatatatatatatatatatatatatatatatatatatatatatatatatatatatatatatatagtaaatttgtttggtgctccatggtgtccgggcaccattgttgaaattgagtatatacccaattcaaatgagtatgaaactttttcaattacttaggtattaacattaactactttactaactagtttaaagcaagtttgaactgaatttgaacttgtttttgttagattttgattctaggtatatagcatccatacatataattagttaggtatgtaatcatggattgtgaaataaagttaaatttgagttgttttgttgataagtataggtatgaatcaaattattataactaggtatatactcacaatttgaaaattttgaaaaatttgagtaattttgtgcattagataccatggtgcccgggcaccatggtgccccatatgagtgtcctatatatatatatatatatattgcatttcacgttaacgttcgtcctcgttcgttcgctcgttctcgttcacgttcgttcgcttgttctcattcacgttcgttccctcgttctcgcttgtcttcgttcgatcgttctcgttctcgctctcgttcgttcgatcgttctcgttctcgttcacgttctcgtggcaacgtacgttgacatgttcgttctcgctctcgttcgttcgatcg

SEQ ID NO: 29787 - DNA, 2457 bp, Oryza sativa
ttttaaacccggttagggttaataaccgggactaaagattatagcactgcatatgattttctcttacatatgtgtctataaaagagaagttaatgcattaacattatttaaagtacaaagattaatgacaattacttcgaaaaattatttttgtctgtaataaattaagtggataaatcgtaataagcaaatatatgacttataattaataaaaattccaatatatatatatacttagcatatatatgaatgatattattatattggtaaaaactctaattaagatatgtatgtacatactgcatgatttaaaattaataaaaattgtaatcatcatatatacttagcgtaggaattatattctttgttagctcctaggttaaactcctcctgtttgtcctcgtcccacacggggacaccttccttcttccacaactgtttaagatcttcgaccagtggtcttaggtacacgtcgatgtcgttaccaggttgcttggggccttgaataataatcggcatcattatgtacttcctcttcatgcatagccagggggggaggttgtagatacacatcgtaacgggccaagtgctatggccgctgctcatctctccaaaaggattcgtgccatccgtactcaaaccaaaccgtatgtttcgtgcgtcctttccaaattctttaaattttctgtcgatgtttcgccactgcgaaccatcggcggggtgtctcagcatcccgtcctgttgacgctcttcagcgtgccatcgcaacattctagcattccccttgttcctgaacaaacgccttagccgtggtattatagggaaataccacatcaccttagcaggaattctcttctttgttagctgcccgtcaacttctcctggatcgtcccgtctaatcttgtatcgtagtgctttgcaaacagggcatgcttctaggttctcatactcctcaccgcgatataggatacaatcgttcggacatgcgtgaatcttatgaacttccagtcctaacgggcagactatcttcttagcctcgtacgttgtctcgggcaatttgtttccccccggaagaatgttcttgacgagtttcaataaatcgccaaatgccttggcactaaccccattttttgctttccattgcaactactccagagtggtatccaactttttatgcccctgctcgcaacctgggtacaacgaagttctgtggtcctccaacatcttgtccaatttatgggcctccttttcactttcgcagtcctccctggcgtcctgcaacatctgactaagatcatccgcaacgtcgttaccatcagcagctatttcctcctcgcccgtttgatttccttcaaatccaacatactgagcaaagtccggaatattgtcgtcttccacttcatcttcttccatttcaacaccttgctctccgtgggatgtccaacaattatagcttggcatgaaccccgactcaaacaagtggaaatgaatagtcctggatgcagaatactccttctgattcttacacttattgcatggacaacaaataaaacccctttgcctgttagcttcggccactctcaaaaaatagtgcacgccgtcaataaactctttggaccgccggtcagcgtacatccattgccgatccatctacatgagtcaaaaaaaccgtacacaaataattattcttacaataatgacagtcatacaataattataagatatctttattcatacaaaaatcataaaatattacaccaaataattcttaaaaactatttgtaaagttttaaactaattttaatgtgttttacttattttaattttcattttagtttgttttctattatttaagattaactttcactagagttttccttctcaactattttataaaaccttgtttagcaaatgaactaaatttctatatattctttcttccccacacacattttctctctcatcaacttacaactaaattttggagacaaaaaaagtgtgcaaaacataggtgcaaatgtagtatgacaaaaaaaaaacattggaggatgaagttgcaaaccttttaggcacctccgatttgtatgtaatcaccaaaataaattcaatagaaattttggcatgacctcccctcttttttgaagaaattttgaagcttgctcgggcagctggaggaggaagaagacatatatatataggggtgggactttagtcccggttggtagcaccaaccggggctaaagatcaccgggatctttagccccggttggtgctaccaaccgggactaaagtcccacccctatatatatatgtcttcttcctcctccagctgcccgagcaagcttcaaaatttcttcaaaaaagaggggaggtcatgccaaaatttctattgaatttattttggtgattacatacaaatcggaggtgcctaaaaggtttgcaacttcatcctccaat

SEQ ID NO: 29788 - DNA, 12478 bp, Oryza sativa
ctaaagatcccggggggggcctgacatgacctgacagcattcgaaccgggactaaagatgatctttagtcccggttggtaacacaaaccgggactaaagatcaaatatgcccgttacccttttgaaccgggactaaagatcatctttagccccggtttttattgcatccgggactattgtggaaatcggccgaccgacgaaagatggtttctccaccagtgttatttctcaaaccatataattaacactacataacactccacacatatagtaaaaattgcaatataaataccaagtaactacaatgtaattgatacgcaagtataatgcaactgagatgtaagtacagcgtgtaattggtatgtaggtacaacggaactaggatgtaattactttgtaatgaatattaatataattttggctatggagacatggagtcagcacaactactgtgctcttttttttttaaacttaaacatccaataatataaaacgacagagttcatatgaataaatcccagtacattgccaaaaggataaagagaaagcataagaccatccgtttcgaaagaacggaaaactgcactaaggccacaatcttcatatagaaaccacacagcagagaaggtgcacatcgacagggagctgcagtgatgaaactgcactaaggcaatgccgcgacgattgcgaccttgggcctccttcagcgtgcacaacgcttgacaatccggtaatccccatccggttgcctccacgaaacgacacaaaacggaggtctgctactgagccgtagattttggagtaagcatccccgggctcagcaagagatgtccacggagtccgtcgtcaaatctgaggagcgagagctcaacccgaacaacaaaccctgcatggaacaagccgataggaaacacataggaagaaagagcctaaatccaaatccccatatccactaaagaactcgaatggtggcaaacgaattgctgtcttcgtggattgacgtacgtggatggggaagtgaaaatctgcaaagcatgactgatagaaccatggcattggaagcacatgttcaggcaccagagaaaccgccgccacaacgctgacgggctgtcgcccgcaccacgagcggcgagctccgggcgacaacagaaccagccagcaagggacacaggaagccgccgcagccgacgcaagaagcagggcggcggcctcccagctgaagacggcgacgcagccgacgccaccacaagaagccagctccatccatcaaatcgcccactgatcttcggatctcgcacttccaccgccaccaaccaacacctccgccgaccactccggcacctgtcacgccccgaactagtaccggtcggtactagcccgtgacgctccaaattaacctgttaatcgataccagtcccaggaaacagtgctggtatcacaggaagatagattatcacagcaacagaggtctctttattatagagtagaggtacagtcatgttgggctgcggacagatcccgagctcacaactgcattacaaaagggaagcggaagccaagacttggaccaaacatcacaggcgcgacttgggaactaggccgaaaccctaaaactcatcgtagccggcttgctcctggaagaactcctcatcagtaggatccgcctcatcttcttcagcaactgggggggattatttatatagagcaagggtgagtacgggagtactcagcaagccatgggaaataagtgtttaatgcaggcttcaaggaaggctgttgtttttgcaattgattttatttgaactcttttctgaaaacaactaagtgagtgcttctcaaacgacacggatgagacagtgcgtctcgtccggtcggagtatgtgcaatgtatcagtctttagaattgatcaagattggcacccagccagcgactttcaaacggccacccgggccaaccactttcaaacggccacccgggcctagctgatcccatcagctgcagattttccaaacatcgatcccctttccacaacagcaatttcacaagacaatagtcaaacaaagctacgctaggaatcacctcacatccgcccatgaccgtgggcacggctgttctaacagtttgttaacctctgcagagggggtacactttacccacacgacattactaacccggatcacccagccgtggggatcagccacgttgggagacctccaagctttcatgacaaggcatttccaaagccgacacaggtttaccatatgccgacgagaggggtcccagaccaacaacaggttaggtcccagaccatactgtgccagtgtcacaccctgaaaattcaaaatatataaattgttgtttaaatggaatttttagaatttattttaaaatcctagaagagaagatctaatttttaattaataaattccaatataaaatggggccatataaaatttcattaaatactttgcttaattctataattcctagatttttctgggatttatttgagctaaggaagtatttttaataaatggaattgcatttcatgaatgattttaattgaaaaaggttttaaaaagtctcttttggctttgggccgaaagtcggcccaaaaccgctctctctctcctcggcccagtccggcccagtccgccgccgcgcgcgcgcgcgtccgcccgctgacaggtggggcccacctgtcagggtcgtcgtcaacctccggccgccgccgcccgaaaccctagtttcgcgccgccgccgttcccttccaaattcgatcgatcctttccgtttccggccgaattgatagaggggaaacaatctccgggatctcctctaccttttctcttttggaaacatcggctaattcgttttggaagttcgtggaatcaggttcgattcggattcgtctctctcctccgaaccctaaaccttccttctcgtcgccagccgccgtgggccttcgccgtcgcctccgagcccctttaaaaggttccccggtgtctcctctacccgtcgccaccttcgtcttcgcctctcgtcgcccgtagcgccctagcgccgtgtgccctagcgccgccgttgccgccgccgctccagccgtgcgccgccgccgtttcagccgtcgccgtcactcgggaagaccaccgtcgtgatcgccaagtcgccgccgttctcgtccgctccttcgccgccgccgaagaccgccggagcaccgctgccgccgtcgacccgaagtttgccgccgcttcctcctcgtcgccgtcaccgtccgttgatcttccgccgctcttttggtcaccggtgagttcgccgcgtcgcgctctacccgttggtgccttccgttcgcgccgccgtgccgtcgttcgccggcgagcatgcaagcccgagccgccgagccgccgccgccggtggtgacgtcatcgccgacgtcatcggggccgttcgctgtgagccggtcgtggaccgttcgatctcggccgtccgttttggatcaagtcgatctcggccgtccgttcgcgtgagccgtcgcctgtgcgcccggtccaccgaaaccctagcccgctgacgcaataatcctccttttccttttcaaaaataattcattattgcgtcataattcaattaaaatcaatttaagtgttttaatccgatttaatcttcaaaaattcataactaattcatcttagctccgatttagttggttcaagtctctaaatttttctaaaattgagatctacatgttaaaaatatccacatgtactgttcaagcttgtttatgtgttgttttggtatttttgctcttttctgtttagattccgtcgtttccggagagtccgttttcgccggagaagagtttgaagagttccaaggccagcaaggcaagtcacacagatcccaaacaaccctttgagcatattgatcctatttaaagctattgtttctattcaaatattgcatttattttcgaatgtcattgggtggaattaacctaaggtttgttatagcccttttgttcttgattaccttattccttgataccttgggttattataacttgactggttgagctctatatgttggttcaactagatgtattagatataattgcttagccctgcttagaaacattagcacactattgggataacttatgaatcactataatttaatgatggcttaatgatagttcacgatggccaatcgtgatttgttaattaattatttgccaactaaaacctgataatggtgggttgtgagcacatggttttgatggtcgtgctcatgacaattaaggaccggttcacgagtttcggttgtgaaacattaaccgtgccaaccacaagccagcgtgggcaacggctttatcttttgtatagcatggttcattgcggggcaccagactgagaagtggcggagataagcccacgggggtcgctggggagtccatgccttgtttataagggggtgattatgatccaggaatggtgcgctgcggtggattgtgttatacaaggggtattgtcacaactcctttccgaggtaccgtggtagtattgaggcacatggtgacatgatgtggggttgtgtcttgtgggtacagtggtacacctctgatcagagtaaaactattcgaatagccgtgcccgcggttatgggcgggtctaacaatgtctttcgtgattagtctcacccttctcatcataataataggtgctttaattggtaataatttgattagctcctggtttggaatggtatattcctggtttggagatagaactgtgcagccgggatggttgttcagaatggttgagcctatacaacagggtatgttgtatagcgttggattaatattgtttaattacttaactgttttattaaattctcaaatgtttgctaaatgctgcttttgcaaatgaaaccctactatgccatcctttgttatcctgtgcacttgcatatttgctgcgtggcttgctgagtatgtcatatactcaccttgcaatcattcatcagtggaagagttctacagtgaagctgatggtgtggaggattaggtgtagccttagtcaagctgcctgtggagtggagccgtccgcgccgtttatcttattttccgctgcttagatctttattgattgagaggaactatctacctctgtaatgacattttatacgcttattaattagagtaataattgtactctattatcaatttgttattgtgtgcctcggctgattcctggacgagggttcacacacatgtaagcgtttggaattttggatagaaattccgggcgtgacagccaggaagcccaggggtcctccccgacaccaccccggcgaatccacatgtctctcggcatcaaggctcccctgataagctagttactcagccaggggtgtcccattccacccatgtggtcgtacttgtcttatctttggatgaaattccaaggaaacggtccttaagtgcaagagtggaaaaccgtacacccggtacgttccccggtccgcggttttgggaatttcatttagttcgcaagcaccgacccaggtgtcgggttttccaagtcttttgtaaaacccaagttttatccaagttgtttttcagatttttaagtttgaaggcgaccgtcgatactcgcacagggtgcacgaatatcgaggcacaactagatggttacaaggggacatgatatatcaattaacaaaggaaggatcaaatgcaacaaactaggtaggtccgccaatctgccttgcagacgggacaaacagattaagtgcgatcctatcaatgcataatattttgcaagcaacataattaaattcaaatataggctcaagatgttcaaaggtggcttgcctttctcgagatctggagcttgatcctcgaaatcctcgcactgcgggtcttcgggcttcgaaactacacgcaaaacgggatgactcaacaaacggtgaaaataaagccctattaatgacctataagcttgccattagatagatctcgagatttgaggaattttggaagttgaacggagtcaaacggatttacggttgggaagatattgaatttttaagattattggatttttggtctaaaggaaaaaggatttaattaaatccttttttggaaaagaaaagaaaagaaaagaaaagaaaagagggagggaaatcagacttttcctcgggcggctagggcgcggcccgagagaaatggagcggtccggccgagctcaatgggccggccggcccaaggcggcccaaggcgcgcgcgcgcgggagggaggagagagagagccggtggaccgggctcaccacgcgtggtcccgggtgggacccgcttgttggtgacacggttcaccgtgcggagcgagcacgcggcgcacgcgcgcgggcgggggagggacgcggtgcacgcgcgcggttcgcggtggaacggatgcggcgggcccacgcgcagcctcacggcttgcggtggaacgcgcgcacgggaggggctgaccggggtcggcccgacccgatctcggccgagctggcgccgacgtggcgcctacgtggctgccacgcgggctggcgggaggtagacgacgacgccggccggaacggacggcggacgacagcgacgagcggcggagcgaaccacggcgatacaggcgaaagcgagcacaccgggtggttgctcaggacgaggggagacgagccaatggctcggattcgccggagggagcttgacggcggcgaattgaggcggcggcaaccggcggcgggagaagggggaaacggcgacgaggtcacgaggggccgattcccggcggcgagagcatctacgcggctacgggaatccgttgctagcgtcggattgggcggagctacgccgagcgaggccggcgacgagcggcgcttccgagctcgggcggcgacggcggcgagcacacggcgagcggcggcaacggtcggggcggcgccggctagctacggggaggctactcgtgctactacctgagtctaaggggaggagatggaacgaggaggaagaacggagggaggcactaccgtgcgggggtgatggggcgcagtgacgagaggccgatggcgcgggagtaatctctccggccttgggccggggaagaggaaggagagggcgcgcccgaagtcccctttcgcgtcctcgctcgtgccggctcctccgacacgcgcaacgacgaacggcgacggcgaaacagaggggcggcaacaatggagtggaggcgatgggacagcgagagaagaagagagggagggcgcctgggctttaaagggcggtaatgtcggtttggaaaccgactttgggcggtcaaggcgcgagctggcgctccggctagcggccaaaacggcgacagggaggagggaggaggatgacgccggcgggaggaaaaaggggaaaagagggagagaaaaggggggctttgtcacagcctgaatttcatttcaggatttataaattatttaataaattattaatagaatttatattaaatgttcattaatttacaagtgaagttaaatgtgggaaataaaatttcctaaatataaagcatggttggatttaatttttattaaattctccatgattaattacactctctggaattttctcggatttttcggagctcaattcctaattttaatcatacaaagagcatttcagtaattacccacatattaaattaatcattaaatggtctaattataattttgttaagtactttgagtgtccaagtatgttcaagatttttcttggaattatttgagcattggaagtatttttaacaattgaaagatcatctcattggttaatttatttggaaaagtaataaaaatcctcctcctcagcttgggccgaatccagcccattccctcctttcccctctcccttcctctcagcccagataaagtctgtttgacctccctggcgctacagtactccatcttcctcctccagacagagccgagccagccgtgctcgtgcacagtgccgcctcctcccaccaatccgacctccccgttgctcctctttccaaattagttgcgggaatggaatcctctcaatctcctcttccttttccccaagaaatccccaaatgtttctatggaaatcctttccaatttcgcggttcaacctttcctttttccggcgaaccctacctaatccgtcgccgattccatccgttcccgagtcgatctctccctcttctggctataaatagcatcccctcggcctcctcttccgtttgcctcaagtcccaagccgagccgtcgcttgtagcgccgccgccgccttgccctagccgccgccgacgccggtgaccctccagccgcgtcgcgccgcctcctcggtcgaccccaacctgcgccgtcgcctccctcggcttcgcaagggtgagagctaccccggccacccgttcccttgcgccgaatctcgccggaatcgctctccccgcgctcgccttctctctccacctccggccgccgctccagcagccccgcgccgtcgctgtggtcgtcgccttcggtcgccgctgccgccattgggttcgcgaggaggagaagaagaccggcctccacttccccgtcgtcgaagaccctgggaagcccgtcgtcaccgtgaagccgatccgttccatcttcagccgcgccgttcgtcgccgtccatcgccgccttcattcaccgtcaccaccctcgggatcgcaggagcgaggtgaagaccgtccgcccctcggttgttgcctctcgtcgccggaaagccgtcgccatcgtcaacccaaggtcgccgcctttggaactcgtcgcctgccatctccctcgccgtctgtcgtcgtgtaagtggtggtaagggtcgccttgatctcctctctctcccggtgccctccgtttgcatctttgtaccgtggttcgctggtaactgccgttcccgtgcttgcggtcgtcgatcctgcgtggcagccatgtcatcgctgatatcgacgccatcttggccatccaaaattaatataaatttgtcatctcttttcaatgacatattattcatttttaatatatgtcatctaccaaatatgatctaatctttttccggaggatgttttaatcttctgtctcagttataaatcttttgtaaattgtttaatcaatttggaatagtcttttctttaataggtttaattggaattaaatcttgtaaaattcatatttaattcatttgaagtcagaatgaggccgttcaagtctcataattcatctaaaattatgacctacatgtttgtttactttttatgtattatttatttggtttttattagtctttttcttcgttttgcgtgttagcttgtcgtttccgtcgttgtgaaggttcgcgagtgcgccggaagtattcaagaagattatttgaagaccgattattgcaaggcaagtcacacagatcctaaacacaatcctttgagcatgttgatcctatatttaaattctctatttatttcaactgtgcatttattttcgaatgtcactgggtggtgtgaatctattcctttgttatggcctatttgcattgattactttattccttgataccttgggttattataacttgactagttgagctatatatattggttcagctagatattagatatgattgcttagccatgcttagaaacattagcacactattgggataacttatgactcactattatttaatgatggcttaatgatagttcacgatggtcaatcgtgattggttaattaattatttgccaactaaaacttgataatggtgggttgtgagcacatggttttgagagtcgtgctcatgacaattaaggaccggttcgcgagctactattgtgaaacattaaccgtgccaaccacaagccagcgtgggcaacggctttactgtcacgcccagaaattcccgaatagaattccaagcagaatgtgcataaaaatccccgtccaggaccagccggggtacacaagcgacaatgttgacatacagatccacgtcttacaaacatcataaaagtcttacaaaaatgcagcggaaaacaaaagataactggagctaagccttgactaaactttgactaaactgcagcgggaacaccactccacaggcatcctcgacggcacggacgaagcctactcctcggggaaaccttcatctgacacatacccgtcctctggggttgggaaaagtagagcaagactgagtactacccactgtactcagcaagtcataccggaataggggtatgatgcagggaattaacaaagaagagctagagtggctcatttgcataaagcgagcatttataaacggaaattgaaagatttaaacagttgtaacaattaattaatattaaacatccgctgtccaacgctaacccacgttgcgacaggcccaaccatccacctaaactatccaaattcaaaagattacactagggtgagactaatcacggtgaatctggttgaccgcccataaccgcgggcacggctattcgaatagttttactctgatcagaggtgtacaactgtacccacaagacacagccccacgacacgtttccgtgcgccgacatgccaccacgacataccggaaagaggccgtgacaggaccattcgcataaccccctctaaccaagcacaccacacctcaggtttcacccccactcctcgcaaggcagcgggcagtcccctctcgtgcctaggtgaatccggaagccgcataggccgtcgcagggcccatccaaactccatcacgcccacccttgcctggatgcgtcggctagaggaaagctacactacaagcccagccgttgcccacgctggcttgtggtaagtacgataaattcttccagggcatcccgcgaaccggtccttaactgccatgggtgcgaccagcaaaaccatgcacccacagcccaccatgtgattcattttatttaaccaacaccagagcggtggtactaatccaacattaccattagaaccaacagtctaaacattaatatgattttccccattgtgaactagttgaactaagcatggctaagcaattcctagtccaaactctaatcatgttataacccaagctaacaaaggagcatggtatcaaaatagcatggctgtaacaataggtaaacaacccatagtaatattataaaacaatgcagtatttgaaagaaaacaatagagcatttgcaatttaggatcaacatgttcaagtgacaagcatgacttgccttgctcttctgctgggggaacctcggcgactatctcgaagtacaccggagcgtcggagttatcggaatctagcgacatacaaagcaaacattgcaaacaggctataacactactgaaacagagaacaaaaccatttttaatggattctacacatttttcttgatttactgagacttgaatgggcttaaacggagctcggatgaattagttatgaattttagaagattcactgtgtttattactatacaagaaaaaccttaaattatttattgcgcaatatattccagggctgacgtcagcacggaggggatgcggcgccgacatgcggggcccgcatgtcagcggcgcacggatggccggtctaccgtggaccgggaccacgcgggtgatccaccgccggtccacgggatcgacggcccggatcggcccggaaccgatcggacggtgcggcggcggccaggctaggctcggctcggcacaaagccggccgaccggtctcggcgacggcgcgcgcacgcgcacgcgcgttgccgacgacggcaaccgccggcggagacggcagcgcaaggcggcgccgaagggcggtgaggctaaagcgacgactaacgggcggcgacgctaaagcggcggctaggagggagagggaggggaatagaagggagagggcgcctcaccgagggtggccggcgcggaggaagacgacgatgaacggcgacggcaagccacgggaggacgacgtcggcgggcggacgagcttcggggtgccctaaggaaggagaagagagggattagagagagggagatggaccacggcgaccggaaaccatggccgaacgcggcggtggaggtggtgctcacccgagtgcgagggaacgagggctccggcgacgaacctcgacggaggaggggtggacggggtggatctcggccacgcgaacccgacggcggcgacggcgcggtgcggcggcgagcctagcggcggctagcggcggccggagcagcgaaaatggcggcggcaaagggttgcacggcgcgggagcgatgggaggctcgagagagtgcggcgaaatggggaaaaagcgagagggagcgacggcgatgcttaaatagggggagagggaaccggacgtggccgggagaggcgggaatcgccggccgacttggggagtgggggaggagagaaa

SEQ ID NO: 29789 - DNA, 1924 bp, Oryza sativa
gcggcgcgagcgcgagatcggcgggaggagggagacgggcccgacaggtgggccccacctgtcggcgaccccgagagaggaggcggcagggcggcctggctgggcctcggcctgcggccggcccagtaaggggggggggggaaggaaggagggaatgggccggcggcccattcggaaaaaggaggaaaaagggagggaaaagaaaaagaaaaaggaaaaaggattttccccggaattaaaatattgcttgctcaattttaattggttaaaattatttctagagctctgaaaattccactaaaaatcctgttaatgagtttcgacatgtagaactaaagaaatttccacatgtcaaatccgattattatttgcattactttcttagggttttctcctgatttcaccagcattttcttagggtcatttatcaaaattacaattttggcttgggaggaaaacttcggggtgtgacatttaccttttgtataacatggttcattgcggagcaccagactgagaagtggcggagataagcccacgggggtcgctggggagtccatgccttgttttataagggggtgattatgatccaggaaaggtgcgctgtagtggattgtgttgtgcaaggggtattgtcacagctcctttccgaggtaccgtggtggtattgaggcacatggtgacatgttgtggggctgtgtcttgtgggtacagtggtacacctctggccagagtaaaaactattcgaatagccgtgcccgcggttatgggcgggttgagcaatgtttttcgtgattagtctcacacctctcacaataattatggatgttatacctggtaataatttgcttagctcctggtttggagttagatctatacagccgggtatggttgttcggaatggttgggcctgtgcagcatgggtgtgctgttcagtgttgattaaaattcctgattaattactccactgttttacttctcttaaatgttttgctaaatgctgcttttgcaaatgagcctatattatgccatcctttggtatccttgtgcacttgcatatttgctgtgtggcttgttgagtatgtcatatgctcattcttgcaataatcaatcaacctcagttgaagaaaaaggatccagaaggggaagacgtttggcttataccccagttgagctgcctgtgggagtggagccggagcttcgctagattttattttccgctgctgttttcttttcttttgtaagtgtgtaacgttattattatgatggatttgtatattaaattgtcagtttgtgtacctcggctgattcctggacgaggattttatgcacaaataagttcggaaattactagtgaatttccgggcgtgacaggcttgccccttgcctctttgggaaaaggaagaggggagcgggggcgacgcggcagagggaggagggggctctgcctccgccccttggaggctagcaagcggagtggcgggggccgggcgatgacgacggcgatgacggcggggctgtgtggagcggagcggcgacacgggcgacaggcgcgggcaggcgcggcagagggtgacggcggcggcgaccaggcggtcggccaccacggcacgcgcgcgggcgggttgcaacgggaggcgcggcggtttgagcggcgcggctcgggcacgcgcgctggcttgcggggccgagcggatgcgcggctgcaggcgcggcagggcagcggggccgggtgacgcagacggcgcaggcgcggcacgggcggcaaccacgcgggcgcgcgcgcaaacaacgccgcgcggggccgatttcgcgggcggggagctcgccagggatggaggcggggagaaggagagcgaggggaagggagggcgctcggcgcgagcggctcacgcgcacgcgcgcgcggcgcgcgggcggagca

SEQ ID NO: 29790 - DNA, 43089 bp, Oryza sativa
  unsure (1)..(43089): unsure at all n locations
agagtcgacctgcaggcatgcaagcttctcgggtttttggtctctgcccgaggcatcgaggccaaccccgagaagatacgagctatagagcggatgcgcccccccagcaagcttagggatgtgcaatgcgtcaccggttgcatggccgccctaagtcggttcatatcaaggctgggagagaaggcgctacccttatttaagcttctcaaaagctccgggccgtttacttggacagaggaagctgaacgtgccctcactcagttgaaggcgtatctcagctctcccccagttctggtcgccccagagccaaatgaatccttgctactctacttagcggcgaccccgcaagtggttagtgcggcgttggttgtggagcgcgatgaggacaatcctcattccgcgcacccccaccctgtgctggcttggcccgggagagagcagcgaggagaggcccccgagccgaacggtggcccaaggcccccgacgaccggagcaggccctctgcccgcttgtcagacggtgccaggtgcccccgacccccaggatggcccgagggccactgcgggaaggccgcacctatcgccctctaaccccgaggctaaccctgtgccgactcgacccgggagagagcagggagaagaggcccccgagccgaacggtggcctaaggcccctgacgaccggagttggccctttgcccgcttgtccgacgacgccaggagcccccgacccccaggacgggcccgaggccactgtgggaaggccgcccctgtcgtcctccgaccccgaggtcgtcggcacagaagacaagtgcaccccgcgaggccgcttggacaaagagcgccccaaggatgtggcccctagcgaagaggatcggccccaccgaaaggtgcagcggcccatctactttgttagtgaggccctccgggacgccaagacccgataccctcaggcccagaagatgctttacgctattctgatggcttcgaggaaactgcgccattatttccaagcgcatcgggtcacggtggttacgtcttaccccctcggccaaatcttgcataatcgagagggtactggacgggtggtgaaatgggcaatcgaactttctgagtttgatttgcactttgaaccacgccacgctatcaagagccaggccctcgccgattttgtggcagagtggaccccagctcccgagcccgtctcagtccccgaggccagctcgggcccctcgcagctgcctcacaccgcccactgggtgatgcagttcgacggctccctgtctcttcagggcgccggtgcgggggtcacgttgacctcgccgagcggagacgtcctcagatatttggttcgccttgactttcgggcgaccaataatatggcagagtacgagggactccttgcgggactcagggtggcagctggactggggatccgccgcctcctggtgttaggcgactcccagctggtcgttaaccaggtttgtaaggagtaccggtgctctgacccgcagatggacgcttacgtgtgccaagtacggcgtatggagcgccattttgacgggatagagcttcggcacgtgcccagacgggataacacggttgccgacgaactctcacggctcgcttcctcgcgagcccagaccccaccgggcgcctttgaagaaaggcttgcccagccgtcggcgcgacccgaccccttaggggagacggacgcgcctgacaggcccccgatgcccgtcggagtccaggcctcgggacccgaggggagcgctcccagctcccttagattgattgcttggatcgctgagatctaagcatacctcacagataagactctacccgaggaccgcgaagggagtgaacgcgtccagcgcatctccaaacgctacgtgctggtagaagggaccctctatcggcgcgcggctaacggaatcctcctgaagtgcattcctcgggaacaaggcgtcgagcttcttgccgatatccatgaaggcgaatgcggagcccactccgcctcgcgcaccttggttggcaaagcctttcgacaaggtttctattggccgacagctctcaatgatgcggttgacctggtccggcgatgcagagcgtgtcaattccacgccaagcaaatccatcagccggcccagaccctgcagatcataccactttcatggccatttgctgtctgggggctcgatatcctgggaccgtttaggcgggccccgggcgggtttgagtatctgtatgtcgcaatcgacaagttcactaagtggcccgaggcttatccggtcgtcaagatcgataagcactccgcacttaaattcattaagggcatcacagcccggtttggagtgcctaaccgtattattacggataacggcacccaattcactagtgaacttttcggcgattactgcgaagacatgggcatcaagctctgcttcgcctcacctgcccaccccagaagcaacggccaagtggagcgcgccaatgcggaaatcctcagaggccttaaaaccaagaccttcaacatcctcaagaagcacggcgattcgtggatcgaggagttgccagcggtgctctgggcgaaccgaaccacaccaagccgagcaaccggggaaacgcctttcttcctcgtctatggcgcggaagcggttctcccatccgagctcaccctgaggtcccctcgggccaccatgtactgtgaggctgattaagatcagcttcgcagagatgacctcgactacctggaggagcgaaggcggcgcgcggccctccgagccgcgcgctaccagcagagcctgcggcgctaccatcagcgccacgtccgggctcgatcactctgcgtcgacgacctcgtcctacgccgcgtccaaacgcgtgctggattgagcaagctctcaccaatgtgggagggtccgtatcgagtgatcggtgtcccccggccgggctccgttcggctggccacgagcgacggcacagagctgcctaacccgtggaacatcgaacaccttcgtcgcttctacccctaagggggatcgggtgtcaggtttcgggctcgggccaacctcgcacccccctcgggcgtgcagggttggccgggggctaccacacatgcatattcttatttctcttatatctgtatctcaataaaagcatttttcgatttcttaaaggctgtatctgttctgttatttccttttgaagaatcttgacttgaaataggtcactcgtgctcaatcctgccctcgggggctcgggtcggctaaaatcgccaaacggggcccagaaccgagccgtgccccggggcgtggtgaactccgggggggaatcggcaaaaacccacaatcgggtcacccataaccctcggtcaccacgctcccggcctggccagtctcgacatgtggatctccccaggcactagccccgacccgagccatttgaggactaggacctgggcacgagcccttgttcaagtcaagacacaaaaggaccgcggcacagacatcctcgtctcatacacacaacaaatataattgacacaaaaaatttcctctttatttgattgcagattaaattagtctatacaagaagggggcccgaaggcctcggaagaagaaaagaaaaaactatttaaagattggcgggggcctgggggctcactccgatgcacccgggtcgccagcctcgtcgccactgtcgcccacaccgccgtcatcgccctcctcgtcggagctgagggcgaacgcgagccgaggggccgaaccctcgaagctgtggacgatatggtcggcggcatcccggacctgcgcgcgcgcgccgtcctcggtcccgggagggaactcgtccagcgccgtccatggggagaagtcggggtccctggcctggtaactcgccagtacgagctccaccgctcctcgggcgaggtccctcgaggatgacttaatcgtcccctcgagctcctcggggagccgctggagagtcctggccatctccgagaggcgctgggcgaggcccccctggttggcggcgtacttcacagtccgcccgccccagagacccgcctgccgcccagcgcggtctaaacgggacacggcgtcgcgaagcatgctgggccctatctcgcctgccaggcgaagggcctcgacctccccggtggacgaatccagcgcgccctgcagatccgcgatggtgtgttcggtagctgcgaggcgggcggctaagtcgctgtcgcccgtggccgccccgccgctacgcgcccttgcatccagctcccttgcctgcgcctcgagttcagcggcccgctggttcagtgcggccctctcggcgcgggcactttccagattgcgacgcgcttgttcctcttgcacagcctcgcggagggataggttgtccgccagccgttgcgccgcggcctcggcctcctcgagagcttgctcccgctcggtgagcgcgtcctcgcggaggcggagcgcggactcttcttcggcacaggcggcttcgtgcaccgcagcgtgacctcccgaatagcaatggcggcctcgcggtctgccaggtccctctccacggcgcaggcacgctcttccagcgccatggcacgggcctcaagggcttcttcgcgccgccgggatgccacctcggtctccgccgcccgccgttctcgggcagcggcagcgtcaaggaccccccgggcggcgtcgagctttttccctagctccgcctcccagctcccatattgaaggcggagggtgtcctgcgcctcgttcatcatggtgatggcgatgagggcagccccccgctcctcctccacctccttggcgatctcccccagcaccttccgacgggcttcgagctctgtgacgtgccggcggtgtgccttgcggcccacctccaccatggcctccaccgagcgtcgcccctcttcgacacgcgcccatgcggcgtcaagctccgcccgctctgcttgcagggcctccacctgggcacttaacccgtccaacaccgtggtgtttgcgacggccaaggcctgcagaaggggttctgcgctcagtggagcaacggaaggcgtggggaagagccgcctcggtgaggatgccgcgcggctcggcccgccgatggacgtgccggactcagggatgtcccccggacctggcttgtcctgagcgtcgcccgagggagtgggcccaagcgatgcgcccgcggcctcgtcgcgagctgcctcagaagttgtcgccgcctcggcctggcgaagtctggcctcctcctgagcggcttcttcagcttggcgagctcgggcggccacctgggcggcctcctcggcttcccgtaggcgatccgcggcttctcgccggtcagattcccgcctccgagcctctgtggtcgccgggtcctcggcctcagactggccggacttggaatggcgggagggacgcgacgggatctcgctgaaacagaagaaagaccagaagacaaacaagatggatgagtgaaaactcgcgttgagggaatgaatacggccacgatgggcgtgggacgaacctgcgagggggtcggttaaacgaccaccttggaggggaaataaggtttccccgggatggttctgtcccccccatcttgcggagccgtttcttcttccgctccccctcgggctgcgacgtcggcgtggccccctccgggcgcctgctgctggcacgcgccgccccgccccctcggggaggagatgggggaggggttccttcctgcttcctcttcccccgggcgtcggcagggcggccgctccccgggcccccgtcgcggggcccataagcacgaccccctcccggggtagattgttcccccctgcggctcccgcccgcgccatcgtggcctcgaggagcccgctcctccgacgccccgaccgcctgcatgatggtcaggatggaggcgcggtctggatcgctgcagagggggaggactccttgaggaatgagggatgcctccatggagctgagattcagcacccgttggaccactatcttgaagtcctcaggagcccagtcccatctgaccccctggtgggtcctcatacagtcctcggacccggtgtactcccaggcgccccgggcgcgccgctggagtggcgcgatccggcgacgaagatagtcgccgaacaccatggcccctgtgagcccctgggatcgcaggcccgccaggcggtcgaggacggcgtcgtagccatctcccagatctaccggcgcccgccagttggaggcctgcgctggaggctggctcggaagtcggaggcgcgcttcgtcggcgaggggggtgtagaaccagtcgctcttccagtcatcccacttcttgcggaggacgcagggaatgtagcggttcagcaccggcccccgcggctggaagtagcaaccaccaaccaccgacggcggcgacaccggctgtacggtgaagaaccaccggaacagccgaagggatgggcgcaccccgatgaacatctcgcacaggtgcgcgaagatggccaatgtcattaccgcgttgggggtgaggtgcgccatctggagatcgtaaaattccagaacatccatgaagaaagaagaaaatggcggaaccagccctgccatagcaaaagggaggaagaagacagaccgccccgggtagcgtggcgccgggcatccctcgcccagcgagactatctcccggccggtggcagattccggcatgaagcggcgcggcagcccggcctgtctctcgctcacgatgcgggaaggcggcagcacgctaccgtcaagcggagcggagccccgtgccatgacgccggaagaagagatgtttgagagcgagcgcgtgtggcgaaggtagggcacaggaaacaaggagttagggcgcaagcggcgaagacaaggggaataatggcgagaggaaggaagcaaatctcttcctcggcgactttatacccttgccaacgctgtgtccggctcctcgtttctcgcgcccactatcttgccccctcgtttctcgcgcccacgcttccactaatcccattcgcccgtttgcggtgcatgaggtggatatgcggctgtggcagtcgagatggaacatctcgtgcgcgcgttaattacgctcgccgaccgaagcgccatcaccatatctccaggaaaaacgaaccggcttgtcccgatttttagaccggccccacctgtcaccaggccttaggaagtggcgtcacgcccgaccgcttccctcgaggagggcgatcgccctggcatgacgccgggggctactgtcggtgacatgggaccgggagtatcgtgacttagagacttgaggcagaaacgatcacccacgtggcctagcctcctcgggggggatcgggcccgagggtgatacggccgcccttctctttgtctccccgaggggtcggaccgctcccgtctcggccccgagggccgaggcgccccgaccccttgtgggttttgcgccgcgtatatggggtaggtgagcatagcggggctcacctaaccacatttattgcggtttggacgagcgcgtcacgccgcatgtaacgcagtgcagcgcgctcgtttatccggtcagtgaccagtcacagaccgatcagatcgtgggttaggtggcgacaggcggtctgacgcacgcctcgccccatcccgtcaggacgagagcctccaagcactcgtccctagccggagccggcgtgttagctcctggagatggcacgttggttccggtcagatatatgctaggcttcatcctaaccattacaggcaagatattgtatgaagaagggcgaacatgtagattgttaaactgacacgtggtggacaagaatgaccgatttgtgaccggtctgacaatggtcatgtcgtcagcagacagccatgttcccacgtcgcgcctgcttccggcggaagtggaggtaggtatgggccgtcccatcagaaggtcattcggacggcaaccatacaagtctccgtctgtttatgaataaaataggataagtccccacaaaaaagagagagatggtgcatgtggtatccccttgaggtataaaaggaggaccttgcccacttagaaaagggggatttgaaaaaagaaaggaaaaaacgatcccagaacgatcgggggctggctcgcactttgtagcttcttcatacacagatccaccaaaacacaggagtagggtattacgcttctcagtggcccgaacctatatacgtcgcccgtgtcttgtgtgtttccactcttgcgaactttccataggctaggagcttagaacctcacccagggcccccggccgaaccggcaaagggaggcctgcgcggtctcccggtgaggagccccaagctccgtcaaggcctatctcggaagtgtctccctccatctccacgaattagcacttaaccctagctttattttcctctataaatagctttgtacatcctcaaaaatatttgggttttgtttagttgaattttgccaagtgccattcaccttgtctctagtcctcgctcgattagtcggcgactattgattcagagcccccaatagttggtgtgttgatttgccgggtcgattagatctaccattttaatcgcaactattcctctgtgcttaatcacccattcgcaatatttagattgtatcttatcttgttcttgcagtgttctctcgtttgcattgcaggaatcatcaaccgcgcgtcacggttggtacgacatcgtttgtggagtagcgattgcatggcgtcctggacttgttctggttggtagccacgtcgcaaacgtcgcactcgatcaaagcgagagttattccctcaccagaagatcgggccacgagagagagcgtcatcagttggtatcagatcctcaattgcctggtgaggattttagttttatagatttatttttcctacctatccatctacaaacttgccgcaccacttttccctttaccaaactataggtttgtgctttgcaaatttctttcagctttgtgtcgttgaattctagtccgtggtcgctctgaatcaacacaaatcggagttggcatgaaggcgctagatccgtttgaagtcagtgctgtctccggaggctgaactagacttggacttggaattatcattggagcgtgtgaagttatgagcgtatccgacaaagtgatgtcctcatcacacagagagcaatacatcataagatgactgacaacatatatgcacgtacaactctgtcatatatatatatgcagtagaagacactgactgacgaatacagcacataactgaataatgaacctgcatgccaggctaatggaggactaaacacacgaatacaacactggctagatcagtgctttgcttatgttattgctaggacaaggcgagacacaagatctgtttctattcttttttgaacgagagtacatctgctactactgaactggagtatatatacacgatacgagcagcaataatacaatacgagtcactgaactagaacactcagacttgtagataaataagattaagagattagctcaaagctcaaagcttatagtgggattgcagcgtaccgtccaacctcgagcgagcaatacaccctcgatcgatcgatcgatccatcggtgttagttatatagactgaacctgagaaggggcttgtttgggtttgggtggttggcaagctgctcctccacgtctttcacaaagtcgtccctgtactgcctctgcctaccactcagcatgaattccctgagattttcgagctcttctagccccgacgaaaatccaacgcgtgagccaatgaaatgactaaactgcagcagctcaagcttgggggttgcgcctcctccaaactgcactgattcgaggcggtcatgactacatatcctacttacctccaacaccctcaggctcgggaacaatactactgcggtggcctcctgctgctcctggcggaagttgagacagaccacatgatcgttgaacgaatgctcccacaggcgcaggatggccagccttggcagtgtcccgaggactttgatggcggcatcggcatcctccagttcggtccacatcagtctcagcttcacgagattctggagctttccgatccactgtggcagtttgcctagcgcaccctgcagcttgaggctctgcaagttctccggaggaggcgaggttgacgacgacgacgacgtgccatgtaggccttgacaccaacctgcacacaccgacaatgactctagctggctgagcttggagatggctgaatagaaggatggaccattcttcttgttgatgcccaccacgcctaacttacgcagctgggtgagtctctctatctcttgtataacagtgtttccccacgccaagtgcacgtgtcggagtgtatgcaggctttttagtttcctgctccctcgtggtagcatagggaaatcattatctaagtccatcatgagaacacggggctggatgcagcaattgtagttgcaagcatcacgcctgttgaagtctcccacgagacgaggtacgtagcatgcgcagcatgctccagtacaaagctctagacttctctctgctatactttgctgacccacaattccgattttaccagcgtggagatattttagcttccgaagcttcacgatggttttcggcagcatcgctataaacgtgcttctaatgtctagtgtctcaagttgcctcaagtcacacaacaaatctggcaggtgacaaatgttgtgacattctcttagagaaaggtaccttaggtgaacaagctttccaatgtgctcaaggtggtgatcaactagaccttcagtgtcttccaagtcgagcactcgtagcatcctcatcttttcagaaacgaaaaaaggtttccattttccaaacaccgttaatgaccttacacgggacaggtccactgtgttctcaaactcatgtttgtctccttcccaattactgcttatggcaagatgacgggctgtgccctgtgtctttgagctgcaacctttctccagcctaagtacaaggttttcctccattgactttgtgatgctgatttcacgcatgagatcatgtagctggcaatagtctattcctccctcaggtctacttgcgttttgagcaaccggtagtgtcatgctcctacttatgagctcaatgaagttgtcatgagctatttcgattggagatttgccacgtgcctccgttgtgtaaccctcagcagtccatcgctgcatcaaacgttttcggctaaccttgtggtcttcggggaagatggacagatacaagaaacatgacttgagtttgtatggtaaaccatcgtagcttttcagcaggactgtgctaatggtcttgagttctggattcatctcaagctcagcactaatatgctcatttatcttcctccacgccaaagcagtctttggttggtttgccaagaaaccacctatggtgactattgcaaggggaagtccattacacttcttcaagatcagattcgcttgttcaactaagtaaggatattgttcatccaaatttgtcttttccttgaatacctgaaagtgagacagtttgaagtcctttagtactgcatgccaaataaattaaattaattacttatgcacatatgcgtgtactaagttaatgaattcaaacgttttgacgaggacaattgccatttattttgtaaatgcacatatgttagctagagaatgaaaggctgcttctggaacagtgcatgacggggcaggattcttcaaacagaatctggacttttaatgaaaatacctccttaccttgcttgctttggagatggtggtattttcgaaataaaatcaatgcaggggaaataatgctatcaattgatggaatttttcaagatgtcaggttccatcttgctgaacaagagaggatgagaaagaagaagggaggtgatagacaggaaagagcgcaaagatggaacttgccaccagtcggattctacaaggtaaatgtggaggtggatgggtttttgttgctaggaatgacacaggggaattcctagaggcggggggctggtaatcttgaacatgctgctagcgcattagggcagtcccaaccctccatctaggatggtgtctatggcattaactacattgccatgtaggatttttagcttatgtggcactatattaattaagagagagagtgaagagagaaagaaactgggtctcatgcaagacacagcttcaacacaagaacctatgcactagacactatcaagttttgcattgggagagaataatgccttcataatagatgaagaataaatatgattggtagagaagagagatgatgtatttattaatggcccactttaagaaaccatgggttgtagagtgtagtttctattgtgatgtcttattgacatggcaccatagacactacttatggacaccatgggttgggacttcccttacaggggaagctatggcgatgatgaatagtttggactttggagaaagtggcgcaactcggtatggcaagaatcattgttgaaacagatgcgaccaacctgggacgagcaattacattgcatgcgttggactgcagcccctatggagctctgttcaagaagattagggcttttttaagtatttctttgatcagttcattgcatttgtttgccctagaacttgtaataaggcggctgattgtctggcctccttcatcgctgttgccgtggactctgtctcaccatgtttttggagccaaagccccggagtttgtagctggtttactctttggtgatttttctagagctactggttaattgaaggtgaactccttcgtgtaaaaaaagttagttaatgaattctctacacctcttccatgttttgtttccgttttgtggtgatctcttccaccttgttaacaaccgagggctgttgacatcacgtttggcttcgagacacatgactttcgatctcttaggtgttttttcttttcatcaatcaagttgtctaattaatttccattttctttagttaggttctctatcatatctatctatcatattacgaagatagctcgaaaaggagacacatgtttgctacagagactaaaaattctaaagaaaatgaaaaggattgagtctcctagtttttattacttaagttcttataatgggatctgatagaccttctcatataataaatagcctttggtgaagatcaataataaggcaaattcattataagtaagtctcctacaaattttgtctgatgcataacatcgatctttctgtccaacaagtcaacattcgaggaagatatatcaataaattaaggagatgggtattataaataaatatcatatggttccctttcttcgagaaattgcagctttgccacgtaattggatggtatccttcttcaactatgtcaaggatatcgccttttctcttttgacatatagttggagggataatctcatttgctaattttaccgaactgcccctttcttcctcagccagttgttcgcacaaccttgtgtgcattgctccctgctacttgcatggcaccattgctgctcgagctacatgagccaatgccacttcctgtttgttgtcactgattattattactacccatcatctctgcccccgctctctcgtaggtggggctaacaaggtcatcagaactagccttgagagagagagagagagagagagagagagagagagtcggaggaagaagagggtgaatatgtaactaactaaggtccataccctttgaaaataagtcaacattcttgaaatttacttatgactttgtcctaacaatgtgcccgtcaaatatggatatggtcttcatgttaggaggcacacatcggtatgggcgatacgtgatgtgcacaatcgatttaattttgtagtgtcacttttggattagataaaatcctatgattaagcgaaatcacttacttaaaatcaacaaaaggagaatctttcgagaatttaaaacaaccaaacttaagatttatgaagtaagaatgtgttcactttgttgcaatgttcaacttcagcattaacaacactgaaaaaggcaacatacaaaacacactattactaacacaagcctatcagatttatgggtctatttagttttgttgccatttttcaactttatcaaactttggtaatgccaaattatggtatcactaaattttggtagggtaaaagaaggttgggtagtgttttttggtagaattttgatggtataaagttgtggagttactaagatttggtagaattttgttggtaatagtgtgtttaatttgttggctttgtaatttcagaactttccaaactcaatattctaccaaaatttggtaaggccctaattataccaaacactacataattttaccaaattttttccaacaaagtgaacacaccctaaatattccattggcaaacgatcgaatggtcttcctgttaaaaataatcctcgaatagtctcaagtatcactttaactttctgattggtgttcatagttttgttcacatttgttttcgctaaccttggatacagtagatggtatatatatttgatttccatctttaatcccaaaacttgtggattacgggctttactaaaacttgtgcgtgtgtgtgcatattgccttttcaaccttatcaattttgacattactaatatttgcaaggaaacgaaccaacacaccattgtcatcgctaccctactggtaattttggaaccttttactctagaaaactctttacgaaaattttgtaaagcctcaaatcaaactccacctaatctttctatatcctaccaaaatttgggcattaccaaagttagaaaaggttgaaagtagcaaaaaaatgaaatacatggcctacaaacatttattatatgatatggttgcatcactatattatttgattatttccatagaaaaaggttctgcttacaaaatgtgcatgatgatatttaccaaagcaaagcatgctcagtaattgtgattaaaatgcagtaatatcaagcgaaacaattagcagcgcatggcataccatttcagtacctctttcgtgagtagatcatgtgcttgattattgtctagcccaccgagctcgtatatattatttatttcttttggatatgtaataacaactgaaattgttaatagcgcattgtagtagtgctatttcattcgtacctttttagtgaagagttggagtgcttgatcattttctattccgctgagcttgtatatatgtgcattagttgtttcttttgaacaatgcttagcaatattctcttcccttgtggtgactatgatgcagcttccagctttgttgggaaattgtgccaccatatcatcccattccttggtatcccatagatcatcgagaacaaccaaatagctctttctttctaagagttcggacaaatctctcttttcctcatttccaaactgcttagctaagctgtgaatgagttgcccagagttaaaagggcgcaatactgtaacacaagcacgtgcatcaaaataactgctaacatcttgacttcgatatatatcttggactagagcgggttttccaaggccacccattccccaaatagagatcacttgagattgttgactcacttggtttttaattagcttgataatgtcagatttttcttttgcacgaccgatgagctgagattcctccaaggttgataccatcgtctcagtgcgaccaagctttttattagctgtgagattgttgttaccattactcgtggttatgtttgagctagaacttggctccactaagagtgttccgtcttgagaaccctacacacaagtgagttgttaggtatatatatacccttcctttaccaaaaacaatatttttcttgtgtttaaagcttgtaaatttatttataaggccttttttggcaggccacaaatcttggcccatccctcatggaatcctggcccacccatggagaatgggatgggaatgaggcctgccaaataaggcctaaaatattttgactatgaaaaactaaataaataatgtttgtatggtttggatctcagaggaattacatatctggtgacaatattgctggatcaatgaaagaaatagctttaggtaggccagggatatgaacaaagccacaaaatttgcacactcaatgcattaaaaaaaacttccatagttgaagttattttgcaacatgatgataaatttcataattttttccatgatgcatatagtgacaacaagtttgtttagggtttttatctatctactctttccatcttaaaatatagctatatttaggatttttttagggattaactattaaggaaaagtggaaaatcgaatcggataatgttgtgaccagttgatatgagaaaacatgtggagaaagtagtcatattttaagataaattttgaatgctaaatgcattatatgttgggggccaagaagtatttatcaagacacatttatcaacatctaacaactctcaagtctataattttatttttgtatgacacaagtaatactctaaatctctaacttgaaaaataaaaggaataaatttcatagaaccacatatactttggttaaattatcacaaaactgcagatttaagataatgtataaaaaaactacagatttaacacaaaatttattggataactacaaatttaacatgaaatttatcacagaactataagtggagtatttatgtttatcaagtacgggattaccggtttgtctccttaataaagaattgaggaatatgaggtgaatcccctaggaaacaactagagtttttcagattcactggacagagaatagtatcctctcacactaggtcatatttttcttcctcgttaagcaagaaagaaaggagagttttcacaagaaagaactacgatcagttttggagggctatcttaccgaccatcacttctcctttgtatgtgctgaagacgcaagtagcccaatgacaggcatgtgttggaggacaacatgcataggtcttttggcaaaattgggggcttgttgatctgaccgtcaatggtggcgagaattttgcatttggcctcaactattatgcagtatgccccaaatcgacttccaccactccctaatcggattagggatggagcgatgattagggcagcggcgcagtgcaatttgaaagtggtggagtcgatatgagataatgtagcggaggagtctaaatgcaatattctcgctatagtggatggccactttagcgcccgagccatatcatgtgcactttgaactttgggtggtacattaaaccaagattttatatctaaatgtgtattttataagtttatgaaattagatgacaccttgatacaagtttaagagccaatcatacattttttttaaagaaaagatgatagaacatgggtaccagcatgtcaactatagtatgttgggccggatgaaagtggcgccgacgtgtgagacgacttctatgagactacgacggtaattgtagttaactgggaccaactaagtaatcagtatatcttgtatatttgctagtattctaggtttgaatgaaatttaactacattagaagttgagctagatgaataactagctaggttgtactgactaactagatgattttagtagtttaaaatttacctccccatttagtttcaaaaagaaaaaaaaggttaccttctcatagaaagcatagataatctgatcatcgagcaatttcttgtgctctgggggtacactgtcttgcggtacacatagtctggcaacttcaacatgctctgtgcacaatatgattcggctccctctatcattgcttgggaagcatatttttatcttattccactcttccagagaggataagtcagtaagcacaatcaagtaactcttctcattcagatatccctcaaatgcactcaccaaatcatcttcctccatgtttcccatcttctgtagaattcggtccactaaatcagttgcttccattttaaattccctagtctcttgaagagaattctcgtacaattgcctgctaatgctctgcagcaaccatgtttgattgcaaagactttttagcctgatccaagcgtagcactcaaacttcctcatcttgagatcatcataggcccttctgataatagatttatcatcgagaagaccattttttctccataccccgatcactctaagctccttgtcattggtgttgatcagtccaacaagatccattttagctttgtcctgttgccgccttgtttcttccaattcagacatggtcgttgcaccggcaatcctagactgcatgccatcagttgccttggaggcagaaccatcgatgaggcggtagcggttgttcctctggctgacatcctcaaccttggctcttagctccttcatcttctgagccacacgacgccgctcaagcagcattcttgggctgcacttgcgccaccaagatggcttcccgacacggacggccatgtcctggaggcagtcctcgacatcgtaggcgacatcacggacctgctgcacccaggccttgacaaccttgtgcttgtcacgctcctcgtccgcggccatgaggaaggcctgcatcatatggagctcgtccctgataaaggcatggtcccgcttgatgccgagctgcaggcccacctcctccgcgacagcggattgggcgtagccaagcgctccactcagcacggacttgccaaggctcagcaccgtcgactccatcaccaccctggctctctctccctctccacacactgtacacacccaactcttggttgatttgtgcagattctgtggttgaggaagttgcagcaggcagctagcgcaatgagagaccaacagagtgatgaacgactataaacatatgttgcagggaaagtaaaggcctttaatttagaagatgcccaccttgcttgctgcttttacgttgtgttcatccaggcaaagcaagagatcgtatgatactttagctagatatctttgcgtgctctcattctccaaggatagattctgattaaggacaacatacatgatgcattccctccccaagtaagatcatgaccctcctctgtactgtacattacttgcccccaaggtttgggattttttttgtccgagtatttcttcaagtttcttatacatgttacgatacggcaggcagacaaaattgcaggatcaagctgctttgttcttgcaattcgtcaggctttcagagaagttcattatctcacaaaagagaaggagctagtccgatcgatacatcggaggacgaataaagatagagcaaaaagctcaaggcacattctaattagatgccatctttccgaactattttaattatttgtcatctggatccgatccactggtttgttgctattttgccatttttgctatctacgcagcaaaccgtgtacaaaagacctcattgcctctgatctcgttcctcctatctgtcttcttccctggagctccatgtctccatgattcagcacaaataaacatgcaaagctcaagctcatggcatcaacagaggaaagaaacaagaaatgaaatacgggcaggcatattatctatacaaccaaatagtaccagcgtacgtaggctgcgtagaacaggatggatgatggatcatcataatcaaagctcaagctccagctctttttcttcttcatcatctctaattacatttgtgcagaaaccaaacttgattgttaggcggtaaactgctactccccctgttttatattataagtcgtttgactttttttcttagttaaaatattttcggtttgatcaaatttataaaaaaaatttagcaacatcattaaatttaatattgaatatattttaataatatgtttattttgtattaaaaatgttagtatattcttttacaaatttgatcaaacttagaaaagtttgaccaagaggtcaaacaactaaattggtgtgttcttacccaagtttccaacacatctcactcgttttccgcgcgcacgttttcaaactactaaacggtgcgtttttagcaaaaattttctatgcgaaagttgcttaaaaattatattgatctatgtttgaaaaaaatagctaatatttaattaatcacgtgctaatggaccatttcgttttccgtgctcactgtgctcgatgagaactagaaccagcgaacacacccttagagtagtctactactgctattagtagcacagagacagagacaaagtcacattacaaacgttacagctaagacaagaacaagaacagctactacaccacaagacaatattattagcttcggtgattcgatttccctgccatagcgccaggagaaaaaaaggggaaggaattgctgccccatcattgcctgattaatcttttcgttcttgatttgaaaccattagcacggggcgacggtgacagaggataccattagcacgatgcagtgcaaaggacatagatgatttgcattcattcggaactctgttgggagaggaaggcgttacacggttctagctcagattagagtactgcctcgaagcaaatcttaaccccatgactacaacctaacagaagagatgacactacattaagttccaacaatgtcttcatcacatgaggatcagaaaactgccatgttgggttctgacccggcaggttgtgaacactgtcatattctgaatgtgtgccgggggatgatgaacagaggacttgctgagaatacccaaggtggatgtctcctcctgactgtgtgccgaagcaagaggaggaggtaggaagtctttcccccatgaaggatggctggtatgcctagaaacacaggcaatgactaattatatatgatgaactcaaacaatcattttatttgaacggttcagttttatttttcaatatagaattgaatggctaattagttgcttgtggaacttttggacttcttagttaaataattttaaagtggtgaacatgatcaattagcttttaaacaagtatggttcacaaaacccccggtaaacagtgaaaaactcattcaaaaaccatactttgatgcaaatttcggtttccattttttttttggcaaaaaccagagcttatcacataaactgccaaaacaggggtagcgtattcagggagccatcgtttttttgtaaaccatgagtatggatgtgcagaacaagtggcaaaattactagtaagaacacataaattgcacaagtaatttcggtaaggtgatcggctacctgtttttatcatagaagttgcaagcgagacgctaggtagtacaccagtggacccaagggtcaagtaggcgtgtatggtcactgcaaattaaggcacattctaatttatctttctatatgacgatgagaaaatgcacacatgggtaagccaaatggaatactacaacatacctcaggacactatcgaggaacatcaagttacccagtagtatgtctaggacaggattgaagcatctctctgtggaggccaatagccttcgatattctcagtttagcctaaaaaacaagaagtctcattaaaaatatcaaaagtcaattaactagagaacaggtttgtgcatataccattcttaatatcaggtacagttacttatactttgatcgttttctccaatcatctggaggcaataagcatgtcgagaaagctttcaaagaaaaaggatcatgcttttcaaaggaatacggtccaattgccttcactttcttccttctaagatcaatagctaccatctttcccttacccaagctagccttagatctcatgtacacaacatcaccatcatccacacccagggttggagaagctaaattctctgcaagatttggacttaaccctgatatgtcaacagcatcaacctcacaacctttttcccaacagttggacgaaacatgccgactccatgacacaatcctccaaccatcctttctctgcagctgctggggtttcttgttcaaatctttgaggttatatgacactatcaggtcagtgtcgtaaagaacttgcattttgctgggatcacttggcttctcagttgttacgatcacacggtgttccatctcgacgaagctcatcacaccgtcgacgcacacgagatcacggaacgacttagccaaagttcctgggagaaactccttcaatctgtaccagttctgaggcagcggcgcgggtagaggaacgtagcgtaaaccggggacatcttcacgcaggtcgcaaaccatcacgccgtgatcgagatcaacccatcccagcacaccttccgcgatcgtgatcaccttggttgcaataaccttcctaacctccgggtacggatcgaccatcggaatgactctccagttagtgtccttggatgaatagatgtgcatcgaatacgaacacttcatcggtgaccgataatcgacgacgagagcagctagatcgaaatgtttaccaccatttgggacgataccgaactcctcgattaccggtagaggataaacatgaggaagtggaacctgctccagcgacgacgaccacgactcgccattgtcaccatagccatgtagcttatacatcaaatagtcgtatctctcgctgccgcgagggcttgcgagagcagtgaggaggatgaacgagccttctgctccgacaattttggcatcgagttcgtcgaagttgttgtacctagggtgggaggagtagtggcagtggaacgataggtaggagattgccggaggttgggagatccaggaagataccttgatggtgtggcctctgctggatgtgagggtggcgacggtgtcgtcgttcatggcgtcggtgatgaggacgttcgtgtccaggagaatcggctggcggcggtggccgttgatgtcgatcgattgacgggacgtcgacatcaagtcgccggccggagcgtcgtcggagtcgatggcgcggcgtcgactcgccggagaggaactcggtggatttgggatttagagttgggacttgtaattcagagcctactgtttttttttaaatctagtttttctggtaaatatataaggaaaatttcgttctacgtatacgtatcgcgaatcctgacatgcaattttttagggaattagggatgtgccgtgtccaacttccaaacagaataaagatccgtctccttttgtacgacggcctccaaaatattcgcgggccttttgccttcggcccggcccatatatcgcctcaaattcccccagccgatcgatcgccgactcgactcctcctcctcctcctcctcgtcggcggtgctgcggcgctgatctccacgatggcggagcggtcttcttcttcgtcggagtcgactggtaatggtaatgtcaatgtgaatctctctctctgtctctcgtaggttttgtagtgtgcccaagatgcgatggatcgtgctctcgttgattgttcgggatgcgtgattactggttcggttgttggtttatagggtttttgtttatgtgatctaggtgtaataaacccgcgaattagtgaaacgaaataagcccttcggtgtttgtttgattcggtttatttatgtttatgtagatctagccataaaaaaaaagaacttgtcagggcagatcataccatcatcacccacagctccttgtaaaggagtaaagaaactgaaattggaagtttatcatatcatgttagttttttttggttcatatcctcatcctgataagaaaaatatcaaccttgatttggtgttatagtagtagtttcttatgaccgacattatttttgtattttagaatttgtttatgtgattgtcagctgatgagctgataaaatcgaattgggaattatttggtgcgttggtcaaatccatcttcattcatagtagttgcgttctaatccactttgcaacctcaatttttcgcggaaaagatttattgcattgcagcttccctcatatattgtaagaagaaaaggtagaaaagaagcaaggaatcagttcttttattcagcttctttactagccagttttatgctttgttgtcaaagctggctacggtaccatgcgatgcatgtttctgatttgatcaattctcttgcagatgagaaaaaaagttcaaaaccacaaggatcatccaatgatcatcaagggtttctgccaggaggctctcctgcaaatacttttgattttgcttctttgcacagcttgctcaatgtatgaccccccctccaccaccattataataagtttgcactacatgctggattcccaattggtttctgttcacttgaactctaaatacattttgtggtttctgttcacttgaactcttcatacattttgtttgttacagttattttacatgatcctgccagctgcatacttgcgctttagattttatgaaccttcggtactcccttttcaattgcttcaagtctccaccaatgtttttcaggatccatctgtaaaggagatagcagatcagattgcaaaggaccctgcgttcacccagatggcggagcaggcactggaaggcgaaggagaacagggcatgcctgcaatagacccttacattgaaacaatgcaaaagttcatggaaagcccccatttttttacaatggcagagcgtcttggggatgctcttgtgaaggtaccatgtttgtttcctagtttgtccaaatatctcccgtgtgctcattttccttgtttaatttggctattgttgtcctaaatgctccacaattcaattgcatggtttaggatcctgcaatgtccagtctgctggaaaacttgactagtccaatgcataatgcaaagatagaagagcgtgtttctcgtatgaaggaagatccagccgtgaaatcaattatggatgagttagagactggtgatcctgctgcactgataaagtaggtcatgtttactactgatgatatgcgaatatgaccatatgtttatcacttattgatgtatcctgcttttgctcataataggtactggaatgacccagaaacatttcgaaagatcagccaggcaatggggcctttaggcggccctgattttgctgaaccttctggaactgaaggaactgaggaagaaggtgaatatgaagatgaatccattgtccatcacactgccagtgttggtgatgatgaggtaagggggccagagtgctaagtagtacagctaaggattttaaatttcaaatccctcaactaacggcaagaataatggacgaaatacatacatggtcagcatgtggggcaaaaaatcttgcgagaatagcgccttaacctctcatcctttgttgtaattttccttttttctgctctcctccccctgtctttccccttgtcaccattggtggtatttgtatagtgcttatcttctgaaatataaaaccagctaagctggctaaggtttcaaaaaaaaggattttaaattattattaatattactatttagtcttgagcttgagaagtgcatatgtttctatgtcttgttggtgtgtaatgtataatttacttgagaagtgtccattcgtgtgtgtgtgtggttatataatatcttcaattacagtaatctgcctctccgttttggttttgctctgaacaacatgtctaggttttcgcacaaattgtgatctcgatggccttttctgtttcattatcaattcagcttgcctttctttacaagtttaagtcatctaatagggtctgaagaaggctttagatggtggagcagacaaagacgaagaagattcagagggcagaagggccttacactttgcatgtgggtatggggaggtatgcaagtctgcttaactaaacccaatgacaattgaaacctgtgcaagtagaaaatgccgaataaatactactattatctactagtacctatttgttgttattgcaaatgactaggttagcaatgataaaaacatctcgttgcgaatcctgtgcaaaacggattgcatgtatgccttactagtcttcagaaaattgcatgtatgcaatgtgacagttcattgtgcaaacgagtgtatattgttgccatcagtatccccgatactaattgaagttcccctaatgtttttttttggtagcgagctatcgttgaattcagcttatttgggggctagttgtctttttgcattctatgatgagttttgacaaatttattgatttatcttttttttttgcttttaacacacgtttcaagatttttttggtactccctccatcccagaatataagcattttggacatatgcaatgaatctggacatatgtacatctagattcatagctagaagttgttatattttgggacggaggtagtagatggaaaggtgcagagcttgctgttttactttgttagttttttgggggcagttcattgatgataatccagacctcacaggtcaatccacagtaacctgtccattgaacattgcacaaacttgccagatcaatgtgcacctctcacctagctataatagtatcgaactatgagtttccataaccctgctgtttgtataattgcatttggtgtgcaatgctagagcacaaaagttaatgaatgacaaactaccttttgattcattgtcttgtggatctagaatgtggtgtgagactttttttggggaactgcatctgctccttacttgttcactgactaatcaggatttggggtcaaacttttattttttcagttgaagtgtgcccaagtacttcttgaggcgggtgctgcagtggatgctttggacaagaacaagaacactccgctgcattacgccgctggctatggtatgaaggggtgcgtggatcttctgctgaagaacggagccgctgtgtaagttaaacctgctcgctttgctagctgcgatcacatcttttttttttttttgcattctttgactgtctcgaattgcatatcgcagcaccctcgaaaacatggatggcaagacggccattgacgttgcgaagctcaacaaccaggacgaggttctcaggttgctggaaaaggatgccttcctgtagatcgcctttgttattctcatgggcgcatgaacagtttggctccaggatcatcattctttaatttctttggtgccgccattcatatttctttgcaacccagtggcagttcataagatacggtgaaggggctgccacacaactgctgtggttcacgatgacttgcgtaccccagctttgtttctcttgttttcattagtgcaatcgagattgtgtatccacattttttttttcaatattgcgcatatattaaagatgatatatatgtcttttccttttatgtgaaatcatttatggtttatgtttatgttatttctcaaagagacggcacggctaaaccagtcagtatttttggaaggatatttagacccaaatataggttggatcttaatcgtatcccttaaccgtaaaaccgatataatcattccttcaactattaaaactgtgtaaaatgacagtgttgactagtggttgtcattgacatgacacacacttggtactctattcatcacaaaaatttaaaaagcgtttaaaaaaaatacagtgagaccccgcggcagcagggtggcacttgggccttgccgtgtcgccgtcgctggagcttcccagaagaatatggaatttggctggatcggctagctagatttttttttaataatggattaaaccggtttctacatttaaacggatatacacggcccctaatgcagagcccctgcgttgtgattgtccggtgcgcgagcaagcgttatccgccgtgcgcgctcgccggtgtgtgctctgaagaagttacctgtcgttgtgcaaattgcaacttgccgtcgatgcttccattcctcgcttgagtcgcaacacactgggatgatgatcgctatttaccacactctcttgacatgtacaggtttatctggactctggaaagctcgggctggaaaaaaaaatgaaatgggtggatgctgaccttctctcgatgaatgcggaaaagatcaatctcttccagccttatatttttcacttatacttataagccgaaatctgaatttttaacttcaaatttagagttgattttgaggttttttttaatcatagtttattttagatggctaagaacacacatataaaaattttattcacaaattaattttcgtttgcaactatatcgtttggtggccccattctttttttttaccgattcatacattgcatccagctactttccacctcccggtcgattgttgggttgttcaccatgtgcgtcgctaacacggccacctctcgatcgttgttaccaacaaagaagagcgtcgccaccctggtgccaccgagaaggcaatagagacatatagaggagatagggaagaaagatgagggagaggataacaagtaggtctcactttttttttataattcggtgatactgaagctaccacatcagcaaaaagacacattcaacaccacatcagtaaaaagacacattcaacacaatcgtggttggaagttcgcaccaaattgtcacctttgttctgaggatggagagtcctaccaacacattttccaggcttgcaccttctcgcaacaggtttgggtgcaggttcaggctcgtttgagcctctccttcttgccgccgtcctcggattttgccagttggtggctcgctgcccggcaatctattgcgaagatcgatcacaagacgttcgacaccggagtcattctcgttacgtggttgatttggaaatggcgcaacgcacgggttttcgagggaacggcctcgtcagtcacgcaactgtgtgcggccatgtgtgatgaatgggaaacttggaaatcagcagggctagttagctcgttgagtgttgccgtagcgccagctttagagagattacaacctttgtaatttgcttattgttgtaaaggcggtgttctgacgcacacattagtgccccttcccagagggtttgtgcagttttctcctttttttaatatatacatcggtcggtattcttcgccatcccggccaaaaaaaaaaattcatacttttttttttccttttggaagcgcttcgatcacaggtacacagcccattcattgttccatggcccaacaaacgtacacacacacctgtggcgacagaatggagagaaagcaagatcggttggggaacggcgggcgtgcggcggcgcggcggcgtggcgggcgcccgccgcccgttcgagagtgcagcattgccacgatgggcggaaaagggtgtgggggcaggcgccggcgccggcggcggtgggttcagcggcagtgcctgcgggtgaccggtttctttccgccgtttcgcctccaaactgtcaccaaatctttcgtctgcgcatgaacttcttctgaaattttgctggtatttccttttgaactctgctgaggcccccaaatagtttcagcagttgtcaaatttaagattcacatgatgtgtcctcagttaggtttatcagtttttgacctctagctcttaatttgtgtactaaatctccttatgggaggggatcgttttaaatctagagaaacgtccagcgatcttccggctagctccacaaggtggtgggctagtcggcctggtttcgaagcctcaccctctctatttatttgatattaggtttttccctagtattctcattttttgataatgatacctaaatgtggttgcatccgcgatcctatcactagctatcaactatgtatcttgaagagccccagatgttcgttcaattccagttccagcggtccagccattcccagcgcaatttggtgaagcaatttggttatggtggatgtaagtgaggtgtatttagtggtgaagctagcaattttgattgggcgaggagctcgatttgagggaaactgacgcatcagatttggagactagcaatggagtatgtgaaacaggtgggaagaatccaagtacaccacaaatggtgaatatgagggctgggctgatggagatgtagcgtgtagagcttgctttggcgccgatggcttcgccgtcaaccctgctctcctgcagctggtattgcaaatagctagcaaagtgacaacgaagaaatgagaagctgcagctgcatgatgattcaaatggctaataagctcaattttggatcaatggataagaaccaggtggcccccaccatcttggcatgtttgtccctgagctgaagctcctcattttaataccccgttggtttctgctcaagtcccctgcattggtggcagaagcagacccatccacacaatcaaagaagaagagtcagaagaagagaggtgagctggccagcaatggaggcgacggcggtgagcgtgggcaagtcggtgctcggtggagcacttagctatgcccaaaccgcgatcgcggaagagggagctttgaagctgggcgtccagcgcgaccaaagtttcatcagggatgagcttgagatgatgcagtctttcctgctggctgcggacaaagagcatgatggacatcatcacgaggtcatcaggacctgggtgaagcaagtacgtgacgtggcctacgacgtggaagactgcctccaagactacgctgcccggttgaagaaaccaccctggtggagcctcccttgcacagtacaccgggagaggcgtcgcatcgggaacgagatgaaggagctgagagccaaggttgaggatgtcagccagagaaacatgcgttaccatggtgtgtctgcagctgccccacagtcttcttctgttactgctgctgagctgctgcaatccactgccgccatcgacgacattgatgaggctagacgtgccgccaagcaacaagaaaaggtggacctcgtgaagctcatcaccaacgacggacaaggtggacttagagtgattgctgtgctggaaacaagaagtggacctgctgggacagtgcccgttgttcgagctgcctaccaaaagctcaaaggagagtttgaatgccacgcctgggtaaggctgatgcactcctttgatgcaaaccaattcattgggagcttggtgaggcagttcaaagcgaactctcgcgagggtactggcaagacaccacaaggaacaccttctggggtgtctgttctgaatgagatggaagcacaagattataatctgcttcatgactttactggatatgtgaccaacaagaaatacttggttgtgcttaatggcctgtctacaatagaagagtgggactggataaaaacttatcttccaaacaatcataacgggagccgagtcctagtgtgcacacagcaagctgaagttgcaagctgttgtacttgtaccgatgataagtacaaggtgtctgagattcaacacgaagggtcattttccaaacctctttatgtcttctacaaggaggtaatggttatatatccaacccggcacgttgatgcagaaaaattgcatgataaaatagtatacataattttccttttatttcaggtagggatacaagaattttttgatgaaactacgaataccatcactcattcacattgtttgtataggaaacaaaattcttaaatgcagtaacaacataattcaccgtgtcccaaacattacatttcaatatgactctgataaatgacttgatattcaggagtaagttcatcctattaaggcacctttctttagataatgatattaaagccacctactagcataagaggtcttttccttatcagataaagcatgtttgttgtcattgattgaccaatcttcactgaatagttggagtacaatcaaacaaccattttttgtttctcagttatagtgcattcaccaactaaagaaaaaaaaactttgaacaaacaattatccaggtcaatcaatgtaatgcttcaaaatccattcaactaaatgtacttaattttggaggtagttaactattgtctaatggcattttcttttttaggtggtctctcagccagttaattcagattccactaagatgaaatcagagaccaggtccagcatggagggtgcctctactactagtgacagcaaaacagtaccttctgatggcgtgatacaggaggatggcccgaaggacctgcctgaaagcagtttaccccctcacctcaacagagattccaacactgtgtctgtgaaggaactttctcgcagcacgacacagctcattggtagaggaaaagaaaaggatgacgtcatcaaactgctttctgattgtaatccgatccgtcaagtgatttcggtgtggggaatgggtggcattgggaaaaccactctcgtcaaaagcatctatcagagctccgagcttgagaagcttgggtttgagaggcgtgcttgggtaactgtattgcgtcctttccagcttactgagctccttaggagcttagctcagcggttggttaaagattcccctggaaagaaggtagaatctataccaggacttgcaaggagtggtttaagcacgatgggatctgaagaattaattgacaagttgaagcaagatttaactgggaagaagtacctcattgtccttgatgacctatcgactactactgagtgggattcaataataagaaacttgcctataaccaacaatggtagccggatcatactgactacaagatttaaacttgttgcgcaacattgttccaagaaagaaatgaacatgcacaatattgaaggtctaacagacggagatgctcttgagctattcttaactaaggtaaatgctcccacatttttttttgactaaatcactgttgtgtgtgtgtggggggggggggggggaagagcttccccacctgaattttgtcattgccataaattaggaggtttacacatagagttacaatgaatttagatttcgaagggggaagagaatatttccttccacatggagattacagttttatcttcagtttttaagatttcagaccatattgccgcttcactgacgcaccgtcttaagcacaattgtatcgacggtgcactccttctgaaaaccacatcgtgtctatggttccacaaagcccagaaacataggaggtagaaaactctgaaatgaggcatcggaattttctgcactggctttagttcgtgcaatcttgccacctcctgaactgtaggtgtaacctgaatcttttcccaaaaactttgagcgaaagggcagaggataaatgctcccacatacatagtactagcttgtttttgcccactatgctatatccttcatagatgttagtttcaaatttttatatttgaaatatatccttcgggctcgatgtagtcgtacaaaccgtctcctcctggcgcggagatttcactcgctccgactacaggaccaacgtcggcgttttctatttatgctacaatcattaccacaataaataacagaaaaacaaagataaccaaaacaaatagtatcataacgtgcaacaatggatgaaaaggattaaagaaataattttagagatttttcgaattttgacaaatggcgaaccctaggccaaaattagggtttcgtcaacgggtgctcagattgcaatgaaactggcacatatgggtttggaataaatctaggagtttggagtaggtctcggattttgatggccaacttgataggaaaagaaaaagggaattttctgatttatttttcaattggaaaatccggtttttctcttcttctctctctctacacagaagccggccgaaatcctcacgacgccggcggtggaggactcggttttggacaagggggcgccggttttgtgatctaggggtcaaggtgattctgttcccgcggtcggcggcgaggctggcggcagcggccagagacaggaggcggaggcagccatggcagcggcggttccagtgatctccagcgagggcgacgggcttggtgagcatcagtgaggcgaggagagtccaaggggggcggcagctcgagctagcgcggctgggagcggtggcgcgccatgcggccggcggcagccgaatagagtagcagcgtcggtggcgttccggcgacagattggattggaaaagagaggggaaagggactactcggcatggagaatttgttttaccttcaatttcagaggattagcaatgtgtgcgacgaattttagagctctgtgaatgacgccgaagtaggggttttggggatttttccctccggaggttggggcggatttgagagggtggaagaggtcgaagttgcggttcttttgcctccggtattgagatttctagtggaaggacgaaagagatatgatggcgggaagctggagatgttgcggcggcatttgtccgtcggtcgtcctcgtgcaagcgtgtgtgagcgtttggcgtgcttggtgcaagcatgagcaagcgtggtgcgaggcagcacggctggctcggccaggtcgagtagagaaaagaaaagaaaccagagaaagggaaggagaaagaagaaaatagaaaaggaaaaaaaataaatagatggaaaaagagaattaaggtaaaagtagagaaggaaaatatggagaaaaattaaaatggataggatttgaattagtgtgaaatttaggtggttcgactttcgggataaaattaaattggatcaaaggaattatttgaaggatgatatgaactttgtgacaattaaacaagaaagaaacatcgaaaataaacattgaaaataataatttaaataaactactaactcgacggttatatttttagagaatcaaagcaaactaaatcggttttaaaaaattatcaaattttagggctgttacataaattctagaagtagaagttaatttggtatacaactcttagtttttgtttccataaatataattatattatttttgtggttgagatataattatattatgtatgcagctatatcaatcaatctacactgctatgatctaatattaccatgatctaacaatcaatatctttttcttcaattattgtaagaatctgcaaacctccaaaacaactttcaggttttttaagctatatttataaaaaaggtagttaaattgtcttctcttgttgtaatgcatgagcatcttgctagttaataatataatcaatagtcctagacacatacaaattccaacttcctccattccaaaatataaggcacaaccactcttaacccaaaaaccaagaaacaattattatcacctcctagttttgatcaccataataaatataatgcatgcacccaatagaattagagatcttgaagggggaggatttaaatgataataatttagtggagaggaggtgctagttaattacatgcatgcatgccttgcattgtattatgaaacatctaaaaaaaactagttatgccttatattatggaattgagggagtattagttaaacctaaattttgtaattgttaaatcttgaagaaattaaaattgagatcgcaaacagagtactactttatattggagtgcacaccagctgcaacttgctaattattaaattataattttaataattggtaaattgagaaaacaatatattaggattctataacaagtacaattcattacttattaattgcaaatgtcagagattttaaatcataaaaaaaactataattgagactcctaaccatgtataactttgtatatacttattaatctcgtatctcaaaaatgttgaattgagacattccaataaatagaataaagtattagagtgaatccttgatacaattctgtaagtactaatgcaaggtttttgaagtattaataaaagagaattagtttacctgcatacaaactatgtaatataaatagtccatgtgaatgcacatgttaccgactagttttaaataactgattgccatgtctatgtcatccatgtgtatacatccttgtgaggtagattgatttgttatgtatcatgtcgattttcgccttttacatttttttcccttttaaaattaatgaaacaaaattttcagacaactaagattttcaaattttccattgggattttattattagaaaaaactagagcacacttccttgtgagtgagacagaaatctttagatatttcaagtatttagcttgttaagtgacatttgctgtaggtacgcatggatggtgatgaatcagaattgaaacctgacttgaaggaggaagcaaaaattatcatcaagaagtgtggccgacttccccttgcagtcgctacagtgggtgggtccttgtctgccaaacctcgaaatatcatagaatggagggagtttagtgatcgcatcagtgaagaatttgataacaacccacgtcttgagatgataaagaaaatacttgcatcaagctatgagggtttaacttaccacttgaaatcttgctttctatatatgtcgattgttccctgaagactctgacatcagatatagacgattattgaagcgatggactgcatagggttactcaagagcaacgagaaacagggggcacgagaaagtggcagaagaacagttcacagctcttctcaacaagagtatgatccaacaatcaaaaacgattgccagtgggaagacaggtttctgccaagtctataatctcatgcatgaaatcatcatttcaaagtctgaagaagaaaaccttgttcttgttctagatgaccacatcacctcgcgctctaaagataaagtacgccaccttgttgtgagcaagagctggagcagagaaaagaacgatatgcaaaatatagtggatgtgtcccacatacgatctctgacagtctttggggagtggaaatcatttttcctttctaagaagatgaggatgcttcgagtgcttgatttagaagatgcagaaggtcttcaggatcctgaccttgtgccaattggaaagcttcatcatttaaagtacttgtctctacgaggatcttttggagtcttcaatcttccaaattcctttggtaacctgttgaacctggagacactagatatcaggggaacatgggttacaaagttgccagcaaccattggtaggctccaaaacctgaaatacgtccatgccggatctttagatgatgaggatgatcagccgataattaaactactgcatcagttcagatcaatccgagaagagatgggaaccaggttcgctgtatcatatatcatgttgttcatcaccgcttggttaagaaacctggatgtatgtggtgttaaagtgccaagagggattggacggttgaggtccattcacacactgagcatcgtgaacattgcacggggaaaggccttgctcaaaaacctcaaaaagctaacccaactgtgtaaactaggtgtgactggcatcaacaagaataactgcaaagagctctgttctgccattgccgaccatggccgcttgcagtccttattactgcgggcagagggtaatgctgggttagaaggttgtttggataacatgtcccagcctcctaaagaccttaagagcctccagttgtacggcaatctggtgactttaccagaatggattaaggatcttaaaattctacaaaagctgagccttcgcaacaccaatctgaaggcagatactaccatggaagtgcttggaaacctaccaatgctagccattcttcgtctccaggacaatgcgtgtgaggaggaagaactctgtttcggtcccgagcgtttcacaggtctgacgtcattggagcttctcaattgggagagcctcaagtcggtgaaatttgaacgaggagctactcctaaactgaaggtgctactgctgcactactgttggcaaatacacaatggtgggttttctggcatagaaactctctcgaccctaaaggaagtttcaatcttgggctataattatgaccagacctacaccgaattcaaggaacaattacagaagcaacttgacatgaacaagaacaaaccaaatctaagtattctgtagtccaaaactgccactggctttcatagaattgctccctccacactcaaatatgtggcattgggtcattcaggtagtgtttcaaatttcaaaatcatgtataattatgacaatttcaacattaagttttactcccttttttctcctcatgtaccatacgctttaagtaattaagtgtataagtttagtttagtttcatggtgaaaattgtagtacctttaccatttacttccagtggcaaagacaacagaaaacacaaagtggttcatctatttatcgtaaaattatcagtgtttatattgtataaaataatactccctctgttttttaatatataacgacattgactttttaataaacatttgatcatttgtcttatttaatttttctttttttgcaaacatgaaaaaaatacaaatcatgcttaaaaaactttcaatgataaatcaaatcacaagaaaaaaaatgataattatataaatttttttaataagataaatgatcaaacgtataaaaaaaatcaacggcatcatatattaaaaaacggagatagtaaaaggtaaggaaagcttgagggcctgtttggttctcagttcggctccttcagtccatcgtttgatctcttctactacccatctgctcaatcaatggctgcctgtccaccctcactcttcgccctaaacctgatgttaatttcattaacaactacatacttcgtacttccctgtagcctgtaagtacgtgtactcgcgcacacggttaaccacgatcccttgttagagatcgaaccgctgccgagtttcacgccggattctgcattccggcctcttcatcacctgctttgccctgctcgtcactagctcctctgcctccttgtagctcctgcgtgcatcagagctctctcagtttcaagcgaaatggcaaaagattacagaaccatgtacgcatgtcaggatgcagcaattgacagcttaaaggcagcatatatacttgtatgagtatatgaggaggccaggccgccgtgccggcgaagccgacgaagtagatccagtccacctggccaagagcaaaaaatgacggctttgatcagtgcagttcagtccaagaatcgatcagcttgtgtagtgaaaggaatgtgcagagtgcagaccttctcatggtacggaaagatggggatgagaactgcccacatgtctgaagtgagtagtaggggggaaaggttcagcatggttgcccccacatagctgcaacaggcaacgaaatgataagcaattgaacaaaaagcgtgttcattgacatcatttttggatcatgcacttacgaagttccgatctctgaagttagaaatttcataagtaaaaagcagaacaaatgtgtcggcgttgtcagtgcgtgatttgtgtgttttcttcttcttccttttttttttctgattatagcttttatgaagcatctgaaatattacaaataggcatgccatgaaaattaatggtccaaatcatttcgatacttgttgaagttttcttcttgtgtcttttctttttttacaagagatacttgatgaagttcgatgctattttttttcatgcaagaaagtgaagaagagggccttggcttcaacttacaaagcattttatgaaaacactctgtgtgatcacccaactgaaccattccacctcatttcctctccctctgaccagatctggccctgccgccgccagagctggccggtggtctacgcggcggctaggatggcggcgacgggaggttggaggtagcggccagaggaagccaggcacacgtctggccacgcggcttggttacggcaggaggtggtcaggagggtggtgggtattggcgaggcgttggtgacggagctccttcggacgacagtggggccggcagaggacggtggcggcctgagcgtcgatggccgctctgcggcaagaagaagttggttcaggcggtgtagcgcccgttctgtcgtggcgcctagtgggaaaaatcctaaatgcgaaaattatttctttgtttattgtccagtgtccgtgccattccagatctcaaatccccaatccatcgtcgaatccaaaccctaatctcaatctgtcccgaatcaaatcgtctcgtaaaagtctattttgcctccctcgaactcatgggacgatctcttctcccccggccctttccctctcagcctatctctccctcctcctccatccttgcccgcacgtgcgaggcacgtgcgcagctcgggcgctgagcaagagagagagctcgctctctctttctcttctccctccctctctgctctcgctactgcttcccgccgacgccgctcaaatcgccgcgccacccgttgcttcttgcgcgcgcgtgccgccgtcagcgcctgccgcgcctgaccccgcgcctgccgccctgtagccgtgcccttccaaaccgcccccgccgtcatcgccgtcgtcacgacccggccccgccaccaccgcgcatgcttccaagggttggaggcagagctcctcctcccactgcctcatcgccctctctccccttcattcttttcccaaagagccaagaggcaagtctcctttccctctttcttgtcttctttttctccnccgcgggcatcatcctccctgtcgccgttttggccgctagccggagcgccagctcgctggcttgaccgcccaatgtcggttcctccctcccaaactgacattgtcgcccctataaatccgagcccctttcctcattccaaactcccttgttttcgccttccgcctccaccgcgccatagtcgctccgccctgcttgcacatctgtcgttcgtcgccaaagcaccgggagagccggtgcgtccgaagcacgcgtgaaggggactccgggcgctcgtcttttcctcttccccggcccgaggccggagagatcactcccgtgctgtcggcctctcgtcacagcgccccgcctcgtctcggtagagcatgccccgttctccctcctcgctctctctcctcctcttagatttgtcggtagcgatcttagcactccctgtagccgccgcccgagtccggtaaccgccgctcgtcgccagccgctctcggggtagctccgcccaatccagtgctaggaatgcaatcccgtagccgcgtagatgctctcgctgccaagaatcggcccctcgtggtctcgtcgcccttcccctcttttgccgccgccggtgtgcgccgccgcgattcatcgccgtcgagccatctccggtgcatccgagccgaaggctcgatccctctcgttcttgtaatcacaccggtgcatctccccttggccgaagatgtcccgacgagctccggtgagcaccgccgtcgcccgccgtccgttcccggccggcctcccttcgtcctcctccagccggcccacgtggcagccacgaaggcgccacgtcggcgccagctcggccgcgggctaggactgtttgacctcggagaagccgctcctccgatctgtctcccgtgcgcgcgtggtccacggagagccagctggctgcgcgtgggcccgccgtctcccagtccacccggtgcaccatctgtgagccgcatccgcaaaccctagctcccccgcgccgcataaaccctctctcccgtgcaccgagtcactgactcgtgggcctaccccgggaccccgcacgatggatccggctcatccggatctctctctctccctctctctctcccccgcctccctctgttgcgccaccttctgaggccgcgccggcccaaccaattggccgagccgcgccaactcctcttgggccacgctctagccacccatgaagtctaaatcccctccttctttcgttgctaattcaaaaaggatgttaataaatcctttttctttagtccaataaatcctctaatcttagaaattccatatctcatcaaccatgtatccttttgactccgttcaacttccaaaatctctcaaatctcgagatctatctaatggcacgcttagaggtcaataataggactttaatttcgccgtttgttgagtcgtctcgttcgcgtgtagcttcggagcccgaagacccggagtgcgcggatttcgaggatcaagctcaagaactcgagcaaggcaagtcacctttgatcatcttgcacctatactttaaacctaagtatttcttttccgcaaataatgcatggataggattaacacaagtaatttggccgcggcttgcgagatagcctaccggccccaatcctaattgttgcaattaccctccttgaattattgtacacttaaacctcctttgtcaactattgtacttcgatgtacgggccttcgggcacgcacgtcggagtcctcccctcaaatttcaaatatccaacgatgggtaaaacctgggttttacaaaggtcttggaaaaacccgacacctgggtcggttcttacgaactaaatgaatttctaaaaatcgcagaccgggggacgtgccgggagcacggtttcccgctcttgcacttaaggaccgattcctttggaatttcatccgtacatataacaagtacgaccacatgggtggaatgggacacccctggctgagtaattagctaatcaggggagccttgatgccaggagacaagtggattcgccagggtggtgtcggggaggacccctgggcttcctggcacagtatggtctgggacctaacctgttgttggtctgggacccctctcgtcggcatatggtaaatgtagcgcccgttccgtcgtggcgcctagcgggaaaattatctcttaaaaaccctaattgcgaaatttgtttctttgcttgttgtctagtgcccgtgccatctcaagatctcaatccgcgatcgatcgtcgagaacaattccgaatccaattccttccaaatcgaatcccaccacaaaagtctagtttgcctcccccgggttcgatgggccgaattccgctcgacccatctcttccccggcccccctctcttccgggcgctctctccctctctctctctctctctctctctctcgc

SEQ ID NO: 29791 - DNA, 16857 bp, Oryza sativa
  unsure (1)..(16857): unsure at all n locations
ccgttgcttcccgcgcgcgcgtgccgagtgaccgaccgcctggtcgccgccgccgtcaccctctgccgcgccagcccgcgcctgtcgcccgtgtcgacgcgccgctccaaaccatcccaccgtcatcgccgtcgtcatcccccggcccccgccactccgcgcgcaagccgccaagaggcggaggccgagctctcccttccctctgccgcgtcgccccgctccctcctccttttcccgattcggcaaaggggcaagcccctttctctccttccttttcccctttccttcctttttcccctctcgccggtgtcacctcctgtcgccgctttggacgctagccggagcgccagctcgctggcttgaccgcccatgtcggttcccctctctcaaaccgacattgccgcccatttaaacccgtcttccccctcccttcctttcctctcccattcgcctcctcaccgttgccgccgctcccgtgctctgcctcgcctccgccgtccatcgccaagcgccgggagagccggtgcgttcgtggacgtggaaggggactccgggcgcgccctcttcttcctcttcctcagcccgaggccagagagattactcccgcgccgctggccttgcgtcacagcgcccctcctcttctcggtgatgtctctctccgttcttcctcctcgctccatctcctccccctagccttcggtagtagcttgagtagcctccccgtagttagccggcgccggcctgaccggtgccgtcgctcgccgtgtgttcgccaccgtcgccgcccgagctccgtagcacccgctcgtcgccggcctcgctcggcgtagttccgcccaatccgacgctagcgtcgagttcccgaagccgagtagatgctctcaccgncgggaatcgacctctcgtgacctcgtcgccgtttccttcttctnccgccgncggttgccaccgncgcaatccgncgncgtcgagcaacctncgcgaatccgagccgtggcntcgttncccctgtcacgtgcaaccgggggtgtgcacgcttttgcctgtatcgccgtggttcgctccgccgctgggggcgttgtcccgcgttcattcgaggccgggtcgtcgtctacctcccgccggcccgcgtggcagccacgtaggcgccacgtcggcgccagctcagccagaccgggtcgggccgaccccggtcggtccctccgcgtgcgcgtgatccaccgcgagccgtgaggctgcacgtgggcccgccgcacctgcgtccaccgcggaccacgcgcatgcaccgcgtcccgaccccgcccgcgcgcgtgcgtcgcatgctccctccgcacggtgagccgagccgctgacaagcgggtcccacccgggaccgcgcgtggtgagcccggtccaccggctctctctctcctccctcccgcacgcgcgcgagtttgggccgtcttgggccggccggcccacttagctcggccggaccgctccatttctcttgggctgcgccctaaccgtccgagaaaagtctatattccctccctcccttcttttctttttccttttcaaaaaggatttaaataaatctttttttcctttagaccaaaaatccaataatcttagaaattcaatatcttcccaaccgtaaatccgattgactccgttcaacttccaaaattcctcaaatctcgagatctatctaatggcacgcttagaggtcattaatagggctttattctcgccgtttgttgagttgtcccgtttcgcgtgtagtttcggagcccgaagacccgcagtgcgaggatttcgaggatcaagctccggatctcgagcaaggcaagccacctttgaacatcttgagcctatatttgaaatttaattatattgcttgcgaaatgttatgcattgataggatcacacttaatctgttgtcccgcctgcaaggcagattggcagacctacctgattcgttgcatttgatccttcctttgttaattgttataccatgtccccttgtaaccacccagttgcacctcgatattcgtgcactctgtgcgagtatcgacggtcgccttcaaatttaaaatctgagtaacaacttgggtaaaactggagttttacaaaagacttggaaaaaaaccgacatctgggtcggtgcttgcgaactaaatgaatttccaaaaccgcggaccggggaacgtaccgggtgtacggtttcccgctctcgcacttaaggaccgattccttggaatttcatccaaacataagacaagtacgaccacatgggtggaatgggacacccctggctgagtaactagcttatcaggggagccttgatgccgagagacatgtggattcgccggggtggtgtcggggaggacccctgggcttcctggcacagtatggtctgggacctaacctgttgttggtctgggacccctctcgtcggcatatggtaaacctgtatcggctttcgaaatgccttgtcatgaaagcttggaggtctcccgacgtggctgatccccacgggctgggtgacccgggttggtaatgtcgtgtgggtaaagtgtaccccctctgcagaggtcattgaactgttcgaacagccgtgcccacggtcaagggcggatgtgaggtgattcctagcgtagttttgtttgactactgtttgtgaaattgctgttgtgaaactgggttcgatgtttgaaaaatcagcagctgacgggatcagctaggccgggtggccgtttgaaaagttgttggcccgggtggccgtttgaaaagctgttggccgggtgccaaccctgtttcaagatctaaagactgatacattgcacatactccgaccggacgagacgcactgtcccatccgtgtcgtttgagaagcactcacttagactttttagaaaagagttcaaacaaaatcaattacggaaacaacagcctttccctgaagcctgcattaaacacttattttcccctggcttgctgagtactcccgtactcacccttgctctatataaataattccccccccccagttgctgaagaagatgaagtggatcctgctgacgaggagttcttccaggagcaagtcggctacgatgagttttagggtttcggcctagttcccaagtcgcgcctgtgatgattggtccaagtcctggcttccgctttccttttgtaatgcagttgtgagctcgggatctgtccgcagcccaacatgactgtacttctactctataataaagagacctctgttgctgtgatactctgtctccctgtgataccagcactgtttcctgggactggtatcgattaacaggttaatttggagcgtcacgggctagttccggtcgggactagttcggggcgtgacagtaaacctgtgtcggctctcgaaatgccttgtcatgaaagcctcaaggtcaccagacgtggctgttctgcacgggctgggtgatccgggttagtaatgtcgtgtgggtaaagtgtaccccctctgcagaggttatcaaactgttcgaacagccgtgcccacggtcatgggcggatgtgaggtgattccttagcgtagttttgtttgactactgctttgtgaaattgctgttgtggaattgggttcgatgtttggaacatctgtggctgacgggatcagctaggcccgggtggccgtttgaaagttgtggtcgggtgccaatcttgaatcaatcaaagactgatacaatgcacatactccgaccggacgagatgcactgtctcatccgtgtcgtttgagaagcactcacttagttgttttaaaaaggagtttaactaaaaatcaattgtaaaaacaatagccttccctttgaagccttcattaaacacgtaattcccatgacttgctgagtactcctgtactcacccttgctctatataaataatcccccctcagttgctgaagaagatgagatggatcccgctgacgaggagttcttccaggagcaagtcggttatgaagagttttagggtttcgatctagtttccatgtcgcgcctgtgatgaatggtccaagtcttggcttccgctttcctcttttgtaatgcagttgtgagctcggggtctgtccgcagcccaacatgactgtaatcctactctataataaagagacctctgttgctgtgatattctgtcttcctatgataccagcactgtttcctgggactggtatcggttaacaggttaatttggagcgtcacgggttggatccgttcggagctagttcagggcgtgataggcggtgacccagtaggtggtggcggcggcggccctaggggttgcgttgacccgggacagcatcagctcctgtcggcgccgacaaccctatgggcagcggcacctcgggacggtggcggtctgagcacctacgcaaggctctcagcgagtaggcagaggtcaacaccggtggcggcaacggctcagacgaagacaacctgagcacaagcacacaaggccctcagtgaggtgcaggaggaggtcgaccccattggtggtggcagccctagggatgacagcgggctgggtccgaaaggcagaagagcatcccccgacgacgacagcatcactatgggcgtggagacctaggatccagcaaagtggaaagcgatcccgtcggctagtgtccggtcggctagttctgactaaacgatgagcgacgatggatgaaagtaggctaattaactggcggcgcactaggggcggcagcgactagacgaattccactagtcaaatctagctgtttcaagagagtatgtcaggaaatagagaagcacgggtgtgccgaggtcgttttgcttttcttttcttttttggttgtgtgttctcctccttgttgaggtgtgcgtctaagtgctcttgtaattttttagctgtgtatatccttcgtggatatagaggccggattaatgaaaatctattatcaaaaaaatgtgttatcatttggtaataaccattaaataggtgtgcctgaatgctctactaagaaaaaactgcacatatcttaatgaagatgagaagcctgcattaaatgatgattaacaacctaaacactagtactccctccattccataatataaggcataaccacttttttttagatgttccataatataaggcatgcatgcatataggccattaactatgacctcttctccattaaactatttctttttaaatcctccactcttatgttctctaattctattggatgcatacattgtatttattaggatgatcctaactataagatgataataattattttcttggtcttcgggttatgggtggttatgtcttatattttggaatggagggagtactccgaaagggcaatttcgtccttgacttaacgaagttttttttttatgaggacttaagagagttaattatcctgtccatttacagagcccgctggtgcgcagttcttcctactcacagtcaatgagacttagtaactgttttatttggttaaaggatatgagattttaggaattaaggagggaggaactccctgttttttaatgcctggattgaggtgggagttgggaggaagttccccccttatattatattatttagacagatatcaaccatcaattttcactcaaggtcaagactatcagacagtgtacgatggcccaaaccttacagaatcaaaagcggatatcagatatagaggagctctcgctgtccaagtcattagggaatatctcttgatttgggacttagtggatgcatgggttgatattacaagatggcattccagatcaacataagatagaagcttacagggtcaggatcatacactaccaaatcaatctatgatacttctttgttagaataatcaaatctgccttgttgtgaaggattttaagagctgggcacaattgaagtgcaagttttttatttggcttgcggtcaataatcgataatcgatattggactgccgatcgccttgcaaaacgaggacgtccacatcctgcagtttgtcccaactgtgattaagccaaagaaacaacccaacacatccttgccatgtgtgttatcccctggcaagtttggtccttagcccttcaaagattgggcatgtcttccatcgtgccaagccaagacgcaagtcgcttttctagcttactttcttaagtaaatttggtccgcctatcttagaccggcctggctagagactatggaagtgaaaacgatgttgccacagcggcaacttcctaaaaggaaaattgggctacagaaggttgttactctcctaaaacattgaaaaccccagcttctttccagttcaccacttcgtctttaattgagccaaaaaggaaccccgttgtttagctctgattctagaatatttgcgcgtttctctccttccaaatcatccaacagacccagcaacactaaggtgtcaaatgcgcttttgtggctggttcgaaaaacttgccgccattccagccaccaatgtccaatgtccaatccggactccgccggaagctataacctggcgtcgatccatcccttgatccttctccagacaaagaggtgcttgcaatcttcgtcgttcgtcatgcagagcgggcaagattgttggtgtggccacccccgcttgctgagattatcggccatgagacacctccctttatcagccaaccacttaaagaatttcactttggaaggcagtctagtgtgccaaatcagactgcagcatctcgcttctgtattcaccatgaagaacaggtcgtaagccgaagcaggggtgaacctcccatttacagcccacttctacattgtctcatcctcctctcccccttgcagctgcacctcctggaccgcatcccaaatctgaaaatactctcccgaagagtttcaattcacttgtcataacgatgacttcggaaatcaggaagcattcgtgttgggtggagtttaaggctagagcttgatttgcatagtaggtcgctattccttatactgcgtaaggtggtttcttttggtagggggtccttacaatatgtaattgcaagactggtttgagtttaggattggggtttctttcccttcatgatgtttttctctttgcttcatgaaataataataagcagttctcttgcccattcatgaaaaaaaaatatttatctacaattcccactaactatacgaaataagagattaaggctaaacatcaaatttccatactaatctcatcatcaatttctctcaactaaactctcgttatttttctcccaagtggccaagcacgtgaacaggattattactgcggatgcacgatgacacaaacgaacgatctttttagaaaaaaaaaggcaaaatcacaagttcacaccaccgtgtttagcactttgaccatccgtcttatttgaaaattttatgaaaaatattttaaaaaatagtcacacataaagtactatttatgttttatcatctaataacaataaaaatactaatcataatctttttttaaatagaacgaacggtcaaacgttgcacatgaacagtgctaaaactgtacttattttgggacggagggagtatgagagacggctcatttatcaacataaaacctacctaacatctgagacatcgtgcacgagcacgagatgcgaagcaaaccaaccattgcgactctagatctgacattaacatacatatataaacaacccgaatggccatatgagagcacctcgtttgactaccagaagcgcactgaccaaaacccctccaatatgaaaccccgtacatgatgaaacgcaaccggagcagcagatggagtcgattcagatcccagcgaaaccaaaaattgagaatcaggaataccaggctgaggcgaggggacggggacggggcatctggtggggcggccagccagggagcgtgtacctacgtacgcacgcacggcaagaccgggacgggcggccgccgccaagcacgggccgttccccacggccacggctggctagtttattactttgcctgtgttcttctgggaaactattttaaaagtttgagtggatgtccacccgtttattacatgtcatctaaatggttataaaaaaatttaaaaaatataaataagatagaatcaatatgtaatgtatcaatccacaaatatgtaagttaaaattcaacgtctacatgctgtaaaaaaataactcaaattactatatgtatatttacagataaatttgttatttttgttacaacttgtagaagttgaattttaacttgcatgtttgtggaatgatatattacatattgatctatcctgtcaatttttttgaaaatttttcgcaaccatctagttgacatgcaataaacgggtggacgtccactcgagctattagaatccatctccctgttcttcacccttcttttctaactcacttccctctttttttcaagggcacattttttaaacagttaaacggtgtgtattttataaaaaaattataggaaaattgttttaaaagatcatattaatctattttttaattttttagctaatacttaattgatcacgcgttaataggtaacaccgtttttcatgcagaactcaacctttgtcaccaaatttggctaaaacaacaaaactaaatactctcaccatccctaaaaaggattatattctatgcacataagtttttcatgtatacttcatgcacatcaactaatcttaccatcttaagtaatttatttactgtgggaaattgaattaaattgaaaatgtatggtaaattgaaaatgaattaaattaccgaccaatgttttgtgtatgagcgtcttctctcttaccgacttcgatcagtcagtttgtagagtcatacactctccctagcccccagccttgtcgtcggagaatcgttctcagagaataaggctcttggacccttgacctgccttggttgaataagcactgatcctagcccccagccgtgaagttggaaagtccatttctgattacacggcttggttaatacgcacggcgagaactcttacacgaccagatcttacatggtcttttgtctctgaaggatccgacaaggccttatcggctctgggcgtccccagccgaagatcccttaggttcctcagaggccttgtcaagacggcgtaaagggacagtaggataggtttcaacgctaggtgtcgtcgtggtaagggatctctggtaaaacacttggcgatattgtgtacctgctatcaactttgttgaaatagaggtattaggagagtcgctataccgctggtcgaagaccaggcagtagtcgtaactcgaccatttaaagtggaaatagtggaagaaacgctacatcgctggtcgaggaccaggcagtagtcgtaactcaaccacttaaagtggaagcagtgggagaaacgctacatcgctggtcgaggaccaggcagtagtcgtaactcaaccacttaaagtggaagcggtgggagagacgctacatcgctggtcgaggaccaggcagtagtcgtaactcgaccacttaaagtggaagcggtgggagaaatgctacatcgctggtcgaggatcaggcagtagtcgtaactcgaccacttaaagtgaaagtagtgggcgaaacgctacattgctggttgaggactaggtagtagtcgtaactcgaccactagaagcaaatgtacgggagatcactatgatcaactggttgagaaccggtgagtaggtgtctctcgatcatttggagtcgtggtacaaggaccgctacgctgtcggtcgaagaccagtcgcagctgttcgtcaaccatctgaagtcatggtgcaaggactgctacgctgccgtagtcgtacctcgaccatctgaagttaaggtgcgagagattgctacgtactagtgcgagaactagtgagcgagtagaattatctctcgaacaccaatggaagttgcggtgcgagagattactacgtcctggtgcgagaaccagcgagtgagtagaattatctctcggacaccaatggaagttgtggtgcgagagattactgcgtcctggtgcgagaaccagcgagcgagtagaattatctctcggacaccaatggaggtgctagagttagtttattacatgtgcgtctcatgtggccagcatgacttacacacccaacttgtagcatattcggatatccgatcacaatcatgtcgggtgatcaagccgacggcgttcgcgaggaattatctgttaacaaccttttctcgagtagtccagccatggccggtgctatgagataggtcgtcggtcttcgttggtaggttgggtacgataactctgcatttgtcgagaatgttttcgataatggagtgtactcgaccacaacctactcgagtgctcaattgttcctaaaagatattttctagaaggcaagacatatagcagagaatatcgagtatgtaatcaaaaaactgcatgtagcttctagtattatcaggatataacgagcagatgtaattatcaggcattatgtaaaccgtaaacaagcatgatttatacagaagaaaatagagcgagcccccagcgttagaccgtagtcgatttaacatcggggacactcgtgcaaaagatattgtataaaaaacatgctctaggtaaacataataaatcatggatctgacaatgctgtatgatctgaatgataggtacggtaaattgtatataaaatattgtgtacctgtgtagatatatgccggatatatctacggaattagtagattaattgaattaattaatctactaattaccttgattagccttggtagctggtctggattgttttttctggacgcataatacaggcacgtacaggtggcccactgacatacgtacatatgtacctaaggtaaaatagccttcggtacattgtaagtgttactgtatgtgcatgggtcccacggtatgcatgtataatatacatgtagatggcaatgcagtcggccggctgcttggttggcaggtctgacgacgggtaattgactccgatctgatgtaggccgatgtatctgaatctgatgaggacacctcgtcgattctcagaataggctaatcgtcagactgatctcggatgtcgtcaatgcccgatgatgataattcgtctaactttttggcggcggatgtcggttcaaaggtagttgattcgggcaaggcctcacggttgacaactttgaaccgataccctccacggcgatgacgtcttgaaggttggtcgatctcgagagatcgaattgttgacgacgatggtcccgatctcgtcgggggacgtactctggcggggttggagctcccgggtccgaagtcgtcaagtagcttgttattggagaatccatcttttgaaacccatctcgtcgaaattctggtatttgcatagtatggggaccgtcggtgctaggatatacgcgagactgaggtaaaagagatggggacgaggatttttatacaggttcgggcccctgagttgtcaggtaataaccctacatcctgttggccggagctggagttgcttttattcaccataatcacaccagtacaatatgtggggtagcctatctaactgttgtcgacatgacggtctgaaggtctgactcgtagtcgacaacagggtagccttgctcctcgaatccgtgtccggcgagatcagaaatagcgctttcgtctctcctgacggcatccggagaaaccgtaggggaatagccatgcctatccctgaagtcgatatccggcggcttgtcttggcgtatgttggcttgtatgttgtcccatatattgtgttggttgttgattgaggtggtcgtcgattgtctcgtgtcaatcgtgttgatcatgttgatcgtctctggattcccccctctcctcctagggggtcttgtatttatacccataggtgtccccttgtccaagtagaactagggaaaccaatatagatacaatccgagtagtccttgtcgtttccatgtagaactctgattgtctttccttatccggaactccctccatattcgaagtcagtttccgtataagacatggtatgtggtgggtcctgccgagatgtagtcgactatcattagatatgtggtatccataaccctgacagtattatcctaataaagtagtaatttatttactaaaagaagggctaagaacaacgtaagagtaattcatttcactacaagagaattgaactatcgccaccaatttattacaacaaaaaataattcgtggcaatatattatactatcacaatgatattttttctgtggcaaataactatactttgttgcaacgatttacaatcattgttttgttcagtatttttgttgcaataggaaatgagctatcgccacaaaaaaacattactattgcaaaaaaacatgttctatcgccacacatttaatttttgtggcaatttgcacagtacatggtacttttcactattttctattgccatgatcaataaattcgttgcaataaaaaatttatcatctcataatttgacttattcttttcatatggacacggattaggacaaattttatatgaaatttatagctctcgatgagatctacaacttaaatttttcatttgaaatattttaaatactcaaatacatgattcaaatctcagttaggtagtctcaaatgaaattgtatgtatttttaaacaaaattgatgcgtatgtgagttggtcatggagagcgtgcatgagggagagatcttgggtttgaatcctggacatgacaagatatcaaaagaagacaagatatcaaaagaaaataattaggatgataagttaatatgaaaacatttagtttgctacgtataactaatgccacacatggaatggtagcaatagttatttattgcaaccatgtgaagtgttgcaatatatattttttgccacatccattttatggcaatatcaaattttattacaactaaataaaaatcgttgcaataacctattaccacgctatttattaccacagctagcaacgattttaagattgtggcaacattgatctattgccacaattttagtattgatgctactatttttttcgtggcgataaattatttttctagtagtgtttattgcgagaacgaacatgggagtaatatttttacttatagtgtactatgtcacatataaatagttagtaatcattttactggacatttattttgaaaaggtgcgggatgagtacaagatccgatttctacgcatagtaattttattacttatagtgttctgtgtcatataaaaaggcttagtaatcattttgctagatgattattttgtaaattgccccattttggaggcatttgtaaatttgccactggtttttttaatattgcaagaataccactcgaataaaagttctagtggtatttttacaatattctagtgatagttttgcaataacgattcaaagtagtggtaaattttgtaattgccccattttgaaaaggtgtggaggtggggggagggagcgtgggtggggggtggggatggactgtatgtgaggggagcgttttagttatagtgcatcctggttgcggtttaacgcattcctatatatagagagatatattagcctcacccttaaatcctttcttttttattcttttttttttttgctttggttacgtatagtatcttcgggttataagctgttgctgtaaagttatctttcaagcaggccccaaaggatagcccttttttagtaaatttataatgccacttcaataaagtaattttagaaaattaattaaaagaaagacatgaaaaaatccttttttttctttttcatcattgcttgaatggttgattagagactgtatatctcatcgaccaatgtgaaatagagtatatttttatcacgattggaatctggatgaagttggggcggttaaaataatattaggtcttctactatgcaacttaggtatctgttccacactgttttgaaagatcgacagaaaagaattagttatgttaggactgagcacatgtcgacccactagtttaaatgactgatcaagtcttctttcaaaaccaatttgttaggacttgggtacatatttatgtacatccctgtcaagtcttgataaagattgtcagcttgctttgtcttgcagctgagctcctccttttaatccctcgttggcttccggatcagcaccagctattcattgtagcacacccacaaacccaggagaggtagcaatggaagcaacggtggtgagcgtggggaagtcggtgctggacggagcgctaagctatgccaaatccgccatcgcggaggaggtaactctgcagctcggcgtccagcaagaccagggcttcatcaaggacgagcttgagatgatgctgtctttcctgcgtgctgcagacaaagagcagggacacaatgaggtgttccagacttgggtgaagcaggtccgtgacgtcgcctacgacgtcgaggactgcctccaagactacgttgtccggttggagaaaccgtcctggtggcgaaggcgcctctcctgcacgacactgcgggagaggcatcgcatcgccaccgtgatgaaggagatgagaggcaaggttgaggatgtcagcctgagaaactcgcggtacaaactgcttggtggccctgcagctgcctcagagccttctccccttacggctgctgagctgcagtccaccaccttcgatgacattgaggctacgcgtgtcgccaagcagcaagaaaaggtggacctcgtggatctcattactaaggacggcgatggccttcaagaaattgcagtgtggggaacaagtggtgctactggagtggcttccgtcgtatgggtggcttatcaaaaggtgaaggacagatttccggaatgccatgcttgggtaaaagtgatgcatcccttcgatgccaaggagttcattgggagcttggtgaggcagtttaaagcaaactcccatgaggggactagcaacacaccacaaggaacaccttctggggtgtcggctctgaacgagatggaagcaaaagattataacttgcttgacgacttctgtaaatatgtggctaacaagaaatatttgattgcccttaatggcctgtgtaacatagaagagtgggactggataaaaacctatcttccaaacaaacataatggcagccgaatcctggtgtgcacgccgcaagctgaagttgcaatctgttggaaaaacaaggatgggtacaaggtgtctgaaattcgacaggaagggtcattcgtcacacctctttacgtcttctacgaggaagtaaaggttagtattactatctatatttatattgtcatgtatagttttcactataaaatgttattttttagaaaccagctgctagttcactgtattacccaacgaggtttttttttttcaaaatgactacgaatcagatgctcaaattttccccaaaaatcggtcattgtttcaccccttatagaagaatgtttcaacgcttagtaaaagaatgtttcaactcttaaaaggagtgaaacacaattgaattaccaaatgaaacaatttgcttcagcataagaaacaaatgatattaagccaaagcatttccgggttttttttcttgtgctttccccgtgaccgtgcccgaggcactccctcgaacgagcctacatgtggcttatcccacacaaagagtctgctaacagggccacacactagctggcgtggctaggccacacacttgctaatcagtttgggctagtgtaatgtccttgaaaacggttttaggcccaactcgtttagttagaccacacctagactttaactctcccccgcatcacgcaaaaagttcgaattgagagttaggaccagatggaggtagatatgtactaagggcaggtacaatagcacaaacatattttaaagagataaataaggagagagaagagcagcgggctacatatttgtagccatctgtagcacggactccaagacacagtgtttgtgtgacaggtgggaccaggtattaatagtgtagtatgcaactattgtatgaattagctattagattggctatagattaattggagctagtagttggctatactattaaacttgctctgattggatgcatatctataatatttcatattttctaacatgtatatcatttgaacacgcccgctggcaaacctgttaatttccttttgtgtctctggctctgtgctaattgtatctgttcatcatggttatacacaattacacattagaacatggtactaatgctcatcactgcaaattaagataaatgcattgttcacagaaacaacagttttacctaattgttgcttgtatatattcaggactctccaaccgaacaaactgacaagacaaagtccagctcaaacgccactgctagtacagagggtcgaaaaagcccacctgtgcctaacgaacgcaaggatccagagtcccaagttattgatctaatatccaaaggtgggcaggtgatcgctgtttggggaatggaaaatgatggtgtcagaaggactgctcttgtgaggaaagtgtatgagcgctctgttgacagatttctgaggcatgcttggtttggcatgacgtctcaattcaatcatgatgagctcgttatggagttggctcgccagttgaatccagataactgcgaagacacttgcctcaaaaaaaaagaagacagtcaagacacagaaggctctactcatcgtaagcagcaagaagatggacagaacagttgttataaatcaaaaaggggaaccaccgagtcgacaag

SEQ ID NO: 29792 - DNA, 9218 bp, Oryza sativa
gtaccctccatgtctccaacccaactaggagtaccatttcttatttctgaataggagtgcactcaactataaaagaatcttaattttgaaacaataatccagatctataggtgctatacagtagtaaataaagtcattaaacttcatttacctttggaagtacccccttagtctcataatatcgcagcttttagcttttaaaatttgttccagaatataataatttcttcaccaacactctatgcttaaccaataacaatattcgctcatttaattttcccacctactttattttttcagtcaatcacaatattttcatatttaatttcacatacttttctcaacaattgtgtctaatcctaaatattttagggacggtggtagtatatcgctaaccttattgcctgttgaccctttttttttcccaggtgggctctgagtgggttggtctagattccaatgagataaattcagagaccaagcctagcatggccagttcctctactggcggtgacaaccaccctgagggcctgcgtgaaagcagttcaccctctctcaacaaagatcctaatgcggccgtgaagaaactcacacgctgcacggcaatggtacccaaacgcagcaggacagtggtagccgctgaggaagctcagctcatgattggtagaagaaatgaaaaggataaacttatcaaaatgcttgattctggttgtgatgcgaaacatcgagtgatttcggtgatttcggtgtggggaatgggtggaattggcaaaaccactctcgtcaaaagcatctatcagagctccgagcttgagaagcttgggtttgagaggcgtgcttgggtacctgtatcgcgtccattccgacgtatcgagctccttaggatcttggctcagcggttggttaaagattcccccggaaagaaggtagaatctacaccaggacttgcaaggagtggtttaagcatgatgggatctaaagaattaattgacaagttgaagcaagatttaacagggaagaagtacctcattgtccttgatgacctatcgactactactgagtgggatttcataaaaacaatttttcctgaaaacagttctagccgcatcattgtcaccacaagacctaaattggttgcccaacattgctccgaggaagaagagtacatgcacagaatcggagatctaaaagataaagatgctcttgatctattcttagataaggtacatgttcccacctgtataatgacttatttttatcttttgagttcatgctctgtacaacttatatatgcatctcacaacatactgtcgagttgaaaagattgtgcttgtgcatcaatggtaataataagtgagtaaccatatacgccactacattttcttcccttccaatcacaaataagtgatgctttgaaacacgtgaaatcaaatgttttcaaaatttgaccattaatattgctatgaatatttgctgtgatcaacttttgaaaaacttatctttaaaatagtttaaaaatattaccactttgctatattattttatactccatcccaaagagaatgcaactctagcattcaaattttgtcaaaaatatatatattctggagtaatactttccccttcaatcaccactcattcagatttctccccattttatctctgaccaaccgcccaccaccgatcatctctaatttaatgagggcatcttaggtcatggtccttttcttttaatttatcttctgaatgttatatttttgggacgggagtagattttatataagtaattactaataacatgcttgtactaatgaccatgtcattgtctaaaaaatcacttatttgtgactggaaggagtagtttgattgtacatcaatgataactgaataatcatatatatgtccttacgttttgcagtttgtccaggcaattttttttttattttttaaaaacaatattttaaaattagacatggcatacattcagtgtacagtaaaatttcacataataatttggttgaatttttatgtattttgtaagtaaatttttttgttaagagatgataataatttagtctacacatgcaaatctcaaatatatttttgcactgccctaaaaaatatatatatatatatattttgaactcaattaattaacatttttccaatctaccactaaatgaataccatgttgaagttcaactacaaatcatttatgcatgcatgtatgtatgtctgtttacatatttcaataaagcaattgttgatgctgatcttcatattaatgtgtagcacctagtttaacatagatatgattcgctaaatctgaactatgattttagttcttaatatatttatttggtaattacaaggtaattacaacaatattatatactctttatgaatttaacttttttttcaaatttatcttaacatttatgtttaaaccaacatccacgattacttgctagtactaaattaattgtaccaacaaatagttatctaacatggaagttagttttgttttttctcaaaactttggtcatagttctaacaaatatatgttttttccaagtttgtatttaaactacctattattgatgttttgtgtaattccagttctactttttttaaaaaaaataaatactttgtcttcctatgagagcggatacaattctatcagccaaaaattggtgtgtgcctaaaggatttatctgtgggtttagtaagaaatgtatgtgtaacggaaatatgattaacatggcttgtatccatatcatatttatatctatgctaattgggtacaccgaaaaaattcttgtgttaattggataatattcaataaatctgccacctatcaaagtaggaccaaactatagaatatataaaaagaaaagccagcatcgattacatccagggtttgcaatttcaacaattttcgtgaaatttctagattttgagctggttcagaaggagattttgaattgaaattcaaatggttatgaaaacaagtgaattgaaaatactaaaaaaaatcctataaattatatggtattattaacaaatattgaatcacttgtctatttgaacctaagaatgagctatatagttttaaaaaaaggcacaaaggaccaaagagcccataaaggatcagccatttaactgaaattgaggggatatactcctccatccgttataatatgttggtattatcaatttttctaaaacaatattgaatttacatatattgaacctcaatcatacaaccaatattgtataaaaaaggcacaataggccgaaattccataaatgttgggcccgtttaaccaacacagagggatatatatttatccacacctttcatacattttatcggatatttttgcactatttttataaattctgaacatttttctctatttcccatttccaaataatcgagagacttttgcatacaactgatatgcttccgaactttttcaatcaattttccctttcatttttgctaggaaaaaaaactaaatttcaatttggccaatcaaaattcaacgcttttcaatcaaattcgatcatcttccaacaaatttcaccctccaacttcaatcttctgtttttgaaattctctcgattttttttattttcactatttcgatgatactcacccttcggtgttcaattgaaagtgtaacctctggttacaactttctaattatcaattttaagtttcggaactaaattaataagttacgaaattgtgagtccaagagaggtaaaacctcatagttatttattctagattcttgaattattaaatcttgaaaactttgcatcgtcattcctaatatataaactaggttaaactatacgcgttgcttcagaagtttaatatgataataacaagtaaaaataatgtgtaaaatagctagacgacataaacttatataagttgatgtgctttatgataatttaaatagtatatagaatgatgatccaaatataaaagtaaggtgatgtggctttatgagagaagaaaaagaggaagataatttagacaatatattaatcatctaagagctagaaacaattgaggtgatatggcttgatgagagaagaaaaagagggagataatttgtaccatagattaatcatctaaggtctagaaacaattgaggtgatatggcttaatcagagaagagagaaatgatattaggtaaatgaggatgaactatataggtacatagcatattataaaaataatggagatatatatattaaaatattatgtgaattatgtgggatgatgatttaacatgctggtattttaaagctctaaaattcaataaattatagataatatagcatggttgcgtgaatttaagatataataattgttagtagatgatgatattgcatatttgcaaattgagttatggatatggtgggttgtaactttatagaaaggtaggattaatttatcaacaaacaataattaatgcttcaaaccaaggacaacttcaaatttatatttattgattatgatccctcattagatagaaattactaagtatttattttgaatttcaagaattattaaagtaagaaaatactaaaactcagatttcatgatgagtgaaaatttgtgcttattactttagtacttaattagtcatgaaaaactacaagtaagactccaaaacaggtacaactttctaatatactccttcctcgcataaatatttattgtttagtacactatttggtcaaactttcgaacaaaattttgaaagtttgaccatcattaacatcacaaatgcttagtttataaggataaaataaatgtacgcatagatttgtctttaaacataccgtcattatatggtaatcttatttgatttcatcagcttgatctaattaaaattgatggtcaatatttgaccaaatcttgttctaaagaacaaatatatatgactagagggagtatgttagtgatttttgaaactatttaatcaaggaaaaactacaaattaggattcatgacaagtttagcttttatttattaattattagttatatattttggaattattagattgagaaaaataataaataaaatgttctggttaattatatataataatataataattattgagtttaaatatcatctttttggcctacgttgtttgagttcaagcaattggacaacaaaatttggcttcttccatcgagttagggtgcccaatactgcttggttaacctctttatacgaatccttggtttattaatggccgatggctctcttaaatatgatccttggttttaatccttgagcatcatccgtagtttagaattcttatattttcccctttaaagattacaataaaatcttctggtagttaactaagatttcagattttcaactggggctttattaaaaaaaagatgaaccagtaaaagtttcttgtgcgagaaagagagatcttcatatattgtgtttaacttgttaagtgacattaatggcaggtatgtaagaaaggggatgaatctgaattgaagcctgacatgatggacatcctcaagaaaaaccctgacatgatagcagaagcagaactcattgtaaagaagtgtggccggcttccccttgccattgtggcggtgggtggttttctgtccacaagacccccaaacattagggaatggagaaaattcagtgaccatatcagtacagaattggatgagaacccaagtctcgagatgataaagaaaatacttatctcaagctatgagggtttatcataccaccttaagtcttgctttttgtatctgtcgattttccctgaagaccatgacatcaggtatggacggttattgaggcggtggattgcagagggttactcaagagcaaagagaaacaataatgctgagaaagaagcggaggaacagtttacagcccttctcaacaagagcatgatccaacagtcaagaacagttaccaccgggaagacaggtttctgccaagtccacgatctgatgcgtgaaatcagcattgcaaagtctgaagaagaaaatcttgttcttgttctagatgaacacagcatctcgagctctaaagataaagtacgacaccttgttataagccagagttggagcagagaacagaagaagaacaatgatatgcaaaatatagtggatgtctcgcatatacgatctctgacagtctttggggagtggaaatcatttttcctttctaagaagatgaggatgcttcgggtacttgatttagaagacacagatggtcttgaggatcatgacattgtgccaattggaaagcttcatcatttaaagtacttgtctctaagaggatctgcaacaatcctcaatcttccaagttcctttggtaatctgttgaacctggagacactagatatcaggggaacatgggttacaaagttgccagcaaccattggtaggttacaaaacttgaaatacctccatgctggcatgccaccagatgatgaggatgacaccagaagctgggttccgactccgccatcggcaattttagaggcatttcgtgagtactggacaaaccaagaagaggttgggatgggaatcaagttatttgtatcagtactcatgtttttgatcagtggttggttgagaaatatggatctgtttggtgttaaagtgccaagacgaattggacgattgaggtccattcacacactgagcgtcgtcaacatttcacggggaaaggccatgctgaagaacctcaaaaagcttacccaattgcgaaagctaggcgtaactggcattaacaagaataactgcgaagaactctgttctgtcatcgtcaaacatggatgcttacaatccttattacttcgggcggagggtaaggatgggttagaaggttgtttggatggcttgtccccccctccaaaagaccttgagagcctccagttgtatggaaatctggtgaaattacccgaatgggttaaggagcttgaaaatctacaaaaattgagccttcggagcacgaatctggaggcggatgctaccatgcaagtgctcggaggcctaccaatgctcgacattctacgtctccaggacaaggcgtgcaaggagaatgaactacgtttccatcccgattgtttcacaaatctgagggcactggagcttatttcgtggggtagcctcaaatcagtgatatttgaagaaggagcgacccctaaacttgaggtgctactggtggaccattgttcgtccatagacgaagctgggtttgctgggatagaaaatcttgcaacactgaaggaagtttcgctccagggttactactacactgaattcaagaaaaaactacagcagcaacttaacatgatcgagcccagaccaaatctaaggattgtgttatacaaaactgtactcccccttacaatctattcacactatgtaatgaaccttgtccgttccctttgaccctttcaatgcaatgacaaaattcaggtggggaatccccccccccccccgggtgatttgggctgtgtttagttggatccaaagtttggattttggttgaaattggagatgatgtgactgaaaagttgtgtgtgtatgacaggttgatgtgatggaaaaggactgaagtttggatccaaactttggatctaaacacagccttggtaaaaaaaaaaaactgtactggttatgcatagaagtcgctccctccatactcaaatatgtggcattgtatcattcaagtagcgtttcataattatctataattctgaaaatttcagcattaagttttactcccttttgtctcctcatgtaccactcgctttaagtgtataagttttagtttcctcgtgaaactttgtaataccattgccatttcactgccagttgcaaagacaaaaacaaaagaaattggcacatctatttattgtaaaattattgatgtatatattttataaaataataaaaggtgaggaaagcttcctgcccagtttttctggtcctcagttcggctccttcagtccatcgtttgatctcttctacccatctgctcaatcaattactgcctgtcctccctcactccacccgcactaaacctgatgttaattcatcaacaactaacatatttccctgtaagtacgtgtactcgcacgcagttaacgatgatcccttgttagagagagatcgtgccgatgccgatgcagatgcaggcaccggagcttcaattcacgaggagttctgcattccggcctcttcatcgcccgctttgccctgcttgtcactagctccggcgacctgcgccgtctcctctgcctccttggagctcctgcgtgtatcagagctctcagtatcaagcgaaatggtaaaagattacagagctatgcaggcatgtcaggatgcagcaattgacagcttaaagcatacttgtatgagtagatgaggaggccagccgctgtgccggcgaaggcaacgaagtagatccagtcaacctggccatgagcaaagaacaccgttcagttcaagaaccgaccagcatgtctagtgaaaggaatgtgcagagtgcagaccttctcatggtaagcaaagatgcggatcagaacagcccacatatctgaagtcagcagtgagaggttcagcatcgttgccccacatatctgcaacagacaactcaacgataagcaatggaacatagatgatagatgcgagttcattgacaccatttttatcatgtaattgcgaggtcgtcatctctgaaatttagtcagtaatttctatatcagtaaaaagcacagcaatgtgcaataccttcagtactgtaggtacagttgagtagaacaggaacatcgctaatgcgaatccaagaaaaggaagcacctgagaaaaatagtagaaatggtcatgccaggaaaattaatgtttaccaattgccagcagacattgttcactttgttgtcaattttaacattaccaaattttggatagttttggcattgccaaattttggtagcgttagatgtatttagtttgatgcctttcaaatatttggtagtgttctgtgagaggaaagtttcggaactaccaaattttggtacagtggcattggtaaagaaatgtttagttggttgaaaatggcaataaagtgaacatgcttgaaaggagatcaaagctggatttgcaattttggttcgaaatttatg

SEQ ID NO: 29793 - DNA, 2067 bp, Oryza sativa
accattttgttgtttgttcatatcaaacagagttgaagggcttagataaaagtgtctgaagttccatcatggctactacagctcaaaaaaagtgtcatgtgcaaatcgggaggatggagacttactgcgccagcattccatttgattgaatgaagttcttttcgctcaagtatacttctgtagccatgtcaaggaaaaactacagggtgtactgtacagcagttacaaagaaaaaaaaagtagagaattatgcgaatgtgatcaatctatcaggaacgatgagatgatatactaaagtaacaaagatgctgattactgaattgcttccaatgtaagtaaaaagagggagtgctttaacagaaaatatcaaattaaatagatggattaagtccaaggatacatttgtattccactgataatagctccaaaaagtcccaacattgccatcaactcaattctgttgcttttcttgaccaggtactcctgaaatattagagagaaaaaatgataaatatattcatgccctgttgactctagatcatgccaatatgcaatcagatagttgccacatgcaaatgaggaaaggtgaaatgaaatactttgtgacttgtgaatgataagagttgctacttacctctgtaacattgctgcaagcataaagcatggaaccaaagattacgagcaaatctcccttcaaagggttgggtccttctgcaatacatttcagaaactgtacttatattctgatcactgatcagaatttgtgaaaagaaaaacataaaaagtatatattgctgtaactagtacaaattgcatcatgagaagttatgtccttactagctcgatcagaggcatggacatctgaaaatactactaatataagtccagccacgcaaactccaacaccgatgaacttcctgagcccatacttggtcttcaaaaatatccatgtaagaataatcacacaaggaattgaccagcaatccaagagcatcacgcttgtcaaagatgtgtactgataagacttcacaactgtttaaacaacaagagattcgcatgttttccaaaaacaaaaaacatgccattttattaaatagaatttacattaacacataagtgataaaagtagtctattattttttgcttctttttgctacatacctatataattcgcttccacgtcaataatcccaaggatcaaatagtagtaccattttatctgcacggaagaaatggaaaacttccaatcattatcctagataatttcacatggctgtgccagccaaaaaccaaaatactagtctacaaagtacaaactctaaagagcagaatcagaataagcatcagtctcatcgaacatgtagataaaggcagcaatcacaggtcctgtctataaagataagatatgccaatcttgcagcctacaatcatcaacggtgcagaaggaaaacaatgcaaaccaaactgctatcaactagtaaaaaagaataaactaaaggctgcccatgtgctgaactctacatttatagctaagagcaacagtccaggactccagattctgtacgtttctgaacaatttcatgtctgaaaaatgctcatccaacatttcactatgacaactatatacaaaattttgctggagatcgagggtgtatttagttcatgccaaaatttgaaacgatgtgatggaaaagttgaaagtttgtgtgtaggaaagttttgatgtgatggaaaagttggaagtttgaagaaaaagttgagagcttaaccagagtacaaaattttgctggagattgatgacagaggatgtggaacgtaccgtgaggggctgtctccggtagatgagtatacctccatagataaggaagagaaggatgtagttcaacagagactgagatgtcggtgcattgatacctgaaaaaaaaatcatttcagcaatgagatattatgttgaaaatttggcccgtgtgtttactaaattaaaattgatgctccatggcaccttctgaactgacatggcaacatccaaactaactgacactaattaaaaacactcatctttttccc

SEQ ID NO: 29794 - DNA, 5842 bp, Oryza sativa
tgcaccactcgagaagtcaaaagggtaatcttttttttttcctcctagaactaattacctcatcaaaaaaagtgaaaaaaagaaatccgaaactttttatcacggaaagaacgagatgtctccaccgtccaacagagagccaatcgtaacaaactactgctaccccaattaaacagaacaaagaaaaaaattaaaaaaacaggagaggtatgataggaaattcgctgtttcgtagggcagtgatacgatcatccaaaccaacagataagattgtcatcatcacctcggcgggcgagctcggaggaggagaagccggtggaggtgatgagcagcgacacgaactgccccagcgccagccccagcagcacatccctccgcatccacctcgccacgcaaccaccgtcttcctcagccgccggcagcagcggcggcgccattctcccctcccaccccgcaactgcaagggcgcaaacctctcggctctcgcgtggcgcgagcgcgtgcaatgtatggttgggttttggagggattcgcgggagatttggatatggcgttgaggagtgagggagtcgtggatgatagggagggagtaggagattaggttggcgcggggggaaattattggggaggatcggagggttggtgatggaggttgacgtctcgtgaatcgtgcgggggccatctgggccgtcggatccttctttccttcctgacttgacgccgcttttgtgttgagctgtttggactttggaggttggttttggatgcgttgcaggcgacaaaaacggtttacgccacttgacttcaaacttccaaactttcccatcagatcaaaactttcctacacacataaactttcaacttttccatcacatcgttccaatttcaactaaacttctaattttagcgtgaactaaacacaccctctggatatgcgattgccacatgtaaactttaaaccttcagctttagataaacaaaaaagatttgaaataaaagaggatttcaagcaaatttaatttgtagtaataagatgacagatcagggtggtgatgtggccagaggtgactatagggatatatggggcctgttcactttgatgacattttcaaccttaccaaattttagtaaagttactaaaaaaaagggctatatttagtttgctgtcaaatttttgtaactatataagaaatcctgccaaaattttgataaatttggtaaggttgaaaatgatataaagtgaacaaggccatggtttggaaaatacattttttttactaaacatggtacaaatgtaggtgctcacaacgcgtgcgcctttatctctattaacatgcatcctacctttataaatgcctccaaaaacttgaatcggtatattttaaaattgatgaagttatcataggtgtcttgttgttgatacggttgaagtctccccagaattcaaatggaaccttaaaattatctgagtgatgcacatagatagccccaaccctcaacgaaaacacagttacaaagttaaagcaagcaaccaattagtcaaaaaacctctgcgaaacatccaccagcatgtctgacttacctctcagtaagagagtcacacgagtaaattcctgtggcaaaaaaccaaaccaaaccgttcgacctttttcttgatgtgaaaccattagcacacccgacagtgacagatgctactagcaccattagcatgatactacaatgaaaaggccatagatgcatacacattcatgaactctgcctgttgggggagaagaaaggatgaactttcagagtttcagatagacagtgaactgacggagagacggacggacggtgaggcctatatagctttcatcatttgaacagagacatttcgccgggaatctgctctcccctcttgacccacccccaaccccaaagctgtactcgtattgtgctgtgcaatctttcatgccaaaaagcgtttggagcgttccatcgccacaaagatccaccacgccgtgtctctctctcgtggtttctccttcttcgggtgtgtttagttcctgaaaaaagttaaaagtttgaagaaagttgagaattaaaaaaaaaaaaagttaaaagtttatgtgtgtagaaaagtttttgatgtgatatgatgtgatggaaagttaggaataggaggaaaactaaacatggccttcttctttttttcatgttgctctgtgaactgaaaactgataagataacagtgctccaatatctctacttttacactgaaaaacactgcttcttgtgtctgttggttttcggttttctgaatctgaagaaactcgctgtctgccttcctgtttctaccaaccgcgcttacccaccgcttaccctctatctgatgggccttgctccagctccacctgcgttgttggtgacgtgtcacggtccagcccgttagtgagatgggccgcttggttgttggttcgaacagatcgcaccacgggcctaacacacgtacgttttcagggcatatgggcctagcttcagagtctctcagactcacagtaagcctactgcttccgtcttcgtcagaaattcatctcaactgctccttccgtttccatttcaaaatatagtaatataagattggaatggataaattctaatacgaagtactatgatgtattcctatcaattctaagttactatattttaggtgaagtaacactgtaaaagtaacaacccaaataattttgaccatcaatcgtggtagatcgacctagcaactgcgaagccggcaccatggtagctcaactacacacttcagacactcagatgtccctttccccttcatcaactcacgtctccgtctcctcgtagtatctgacttttaaggtttaatcgcagtcggttttaacccacagaaataaaatgattttgactcattttcacttgttcattgatgatttagactgtgtttgatagagggggcaaagagggaaaaaaatctcttgtatttcacgtgcacatttgtcgagctgttaaatgatatttttttaaaaaaatgtatagaaagattgttttaaatattatattgatctattctttaaattctaaataatcaatactcaattgagtattaaaaagtcataggctaatggtttacatttttttacgtacttctaaatcttttccatttccttccctttggaaaagcttaccagagtatactaacatgtcttctagattataataattcatcataacaatataaagatttgtttcagattagtcctaataatttaggttataataaccttaagccgaatccttaatcacgttttgaaatgaaatccgccgattaccccatgtggtctcttctcagcagcaaagccaaagcctgagctctcacaagtctcaagtaggagtagaaaactcctcggccgtatcgcctaactacaccaccccatcttctactgctcgctccccgccatgatgctgctcgcccgcgccgtcctccgctcccgcctccgctgcccgccgctgtctgctgcggcggcgtcgacggcggcgttctcgtcggccccgtcgccggcggcggcggaggcggagcgcgcggtacgggacgggcccaggaacgactggagccggcccgagatccaggccgtctacgactcccctctcctcgacctcctcttccacggggtacccatcccaatctctcctctctcttttttttttttttgttctgtctgtgtatgtgtgctcgcttgattggtaatctttttttattatttacggccttcgacttcaatctgtagttattccttgccgttagggaagtttattattaggagtgtgagagagtagatgaggagcaacgaatgcgatgcctttctttgtttctagatgtgcttgagaaatgctccctttttgctagtgaaaaagaatgggagaagaatgaattggtgggcttcctgtagtagcagccgggggaatagtgatgccaagataaacttttttactttgtggatcctggttcacggtggatgtagttctcgataaacatcctttttttggtggcatctgggatgatgagtagtggatacttctcttctttttttttttttttttacttttagtcaaatatctaatattatggctatagcatcaggtagactcgcgtccatgtccagctagcactgcctggaattagtagtaagatgatactaatctgtcaccgaagttctgatacatgatagtgattagcatcttatgacatactagagccttttagtagtgggactaccaattattcacaccaaacttagtgcggattttgtacttggtgttgggtgagatttgccacttaggatcgctgaactgtgggaagtgatgattgacgcaaagcataatgctaagcaccaactggaaaggctttaacattcaggggatattatttgtttactgttgttatagcaggtgctagctttttcgttatgtacaatcactagtgcttaaatttgtgtgtttgttccggaaaaaacttgaaatgatgtgtactatccctatgctatcaagaaattacaatgtgctcatatggatttgaggctaagcttttgcttggtcaagctctagtattaataggaagtaatgccctcaagggcatttataatctggaaattggtgctaaggatttcccatataggggcttcagacaattcggacttgatattgcaaatttagcttgagtaatgaatggcccatatcaaacatgtttggtcacaacaatctgcaacgatctgactggcttgatgcacgatagcttgtcagcattcattcaaatgcatatcttagtcgcattattagcttagtgcatctctgttggttatatgttgaacatatttcccaagcttttcgttgatcattttagtcaaagcctcaaaggggaaggaaaactattgtccagccttcacattagtcaatagggaaatagctctcaattgcaatgtattttcatttaaccagataatgcttgcattttctataggctcaagtccatagaagtgtccataaattcagagaagtgcaacagtgcactcttctttcaataaagacaggtgggtgcagcgaagattgttcatactgcccccagtcctcaagatacagtacaggattgaaggcacaaaaattaatgaataaagatgctgtcttagaagcagcaaaaaaggtactgtttttgtaactttatctcaaggtgaccaagttcatttatgttgttgtttttaaaaatcttgcgaagtggtaacatgagttcttacagactgaggacttcagctttagttcagaaaattatgggttgtaatatcatttcacattatttcttctgatctatttccgctcaggcaaaggaggctgggagcacccgcttttgcatgggagcagcatggagagaaaccattgggaggaaaacaaattttaatcagatccttgaatatgtcaaggacattaggtattatttttgaaagatagcacaatagaattattgtgtgcaagtatttggcagagtcttgcataaccatgcactgatgcgcatgctctcttccatgccattgctatgtcatcattagtttattcgtctgtttttttgtatttccaaacatattagtattgtcaatcttgaatgtaaaaattaaactattctttgcctgttcacttacaaacagacgtaatcttgagccatataggacactgacttaagcctctgcatacattacgatagaatatttgcatgaaggtagttttcttgctttatcactatcttgacttcgatttaccattctgtggataaatctctgcagaggtatgg

SEQ ID NO: 29795 - DNA, 4740 bp, Oryza sativa
aggcattcctctcgtactacaaattcagggtaaatgcatgtttatctttgtcgtgtgtatgtaacgggcataattggactgagggacattagtccttgttgaggtttcctggacctagccatggtggcaccagggagggagagaataaggactactccttacaaacttttctccaagatccagcaaatagctaccaaatcgatataatcttatctccaatctgaacaaccactatggatagtaaccatgcgggtactgttgatgtgcaatttcactggccctagggaggctgactgctgcttgtatatgggccctaatgggcacttaatgacttcaatgtataacctgaagcgccatgctctgtgtgcaggtggaattattggtcttggagaggcagaggaggaccgtgtaggattgttgcatacactggctactttgcttgcacacccagagagtgttcctattaatgcattggttgctgtcaaaggcacgccccttcaagatcagaaggtattccgcgctgctgattagttgttctaggttggatatttgcatctagcatcaggatatataaactgtgcagactataataagctttggtataagattatatgttgtgatttctgtatccattatctctaattaacattcaacttcagcctgtagagatctgggaaatgatccgcatgattgccacagctcgaattgtgatgccgaaggcaatggtgaggctttcagcaggacgagtacgtttctccatgccagagcaagcgctctgcttcctagctggggccaactccatcttcgctggtgagaaacttctaacaaccacaaacaacgactttgatgcagaccaggcgatgttcaagatccttggtctgattcccaaggctccaagctttggtgatgaagcaccagctgcagacactgagagatgtgaggaagctgcatcaatgtagaacaccaatagaaactcttgagaacacgttcggtgcaaaagtagcaccattatttccggttagcgcattgtattgtagagattacaatatcttgtagtaagttagaaaaagatcgacccaaataaatagggaattttctgtatcattgttcttgttgtgccattttgtgacatttcaatcagcttcaatctcagttttcctttttcctctttgatgctacactgaagtactgatcattatcaaatgaacctacattgtgaaactgtgaccattgtttgaagaacaagtagccactgatgttgtcactagataataaccagtttacccgacctgattgtgatagcctgatagtctgatggcttgcttcacacctgatgttggtgcatgcataagcatgacagtgacaggcaatctgaaattggtgtcagatcctgcaatcttatgaatcgtgaaactcatggcatgatgtaatctcatacgattggtccaaataaacaccgaccattgttgccttttcaagggacctgtagattgccattgcatgtacttgaggccatgatcatcagtacaagcttctaccaaaaggtgaaggcatcaacttttccttttccatctcaaaagatttgaaaataaaaaggcatcgtttttgcatggaaaaccttaacgtagacgttgattaataaaaagtttggccacatgtcgttatgcagtatgttcaaacttgcaatgacggataaatttacaacaaaggattgcgaggacctacgcaacaattccagttccatgatgattccatcgtacgtgtgtcatgagtgaaattggggctgaaattagcacttaaaacttctcttggaagaacactttgcacgtggaggcaactcagcatcaggctttcgaagaaaagagaagaacatccaacgaatatagaacatggtatctcagtataaaatcaatactttggtccaaaaagaacatgcatgtcttgaccgtactatagaaaaagaaataacgatggagcacaaatcttcagtatttatgctaaggccttgttctaaactctgcattgtttcacctttcctttttcacaaaattatattgttccatatgattgtacaaaatttaaattttcatgtctcagccaactgcttaccaaacaagccgcttatctcgagtaacacgtagggcagtggtatgttatgagtttaggtcccaagaaagttgtttccgagtttgatgacctcactctaaatgtaaatgctactattccaaactaccataaatgctaaaaccaaataaagcatatcttccaaagttttggtttcaccataaattttcttttctgaatagcggtcaactaatacattgttattagtggcggagaggaatttaaatctgtggggtcaattactagtggtttgtatttaagtgggaacatttctctaaattcttttggatttatacatgaaaatcaaggtttataggatgtttttcaaaaagttgtggggtcagccgaccccacagaaatggcctaaatccgccactatttgttaataaaacttcactaaactaatcacaatagaggggtctagaacaacaaaataaaaccatttcaagaaaagaaagaaactatatatatgcacgccgacacattttcttctccaaattagtcgaaacttgtgcatagaacgaaccctaagcctcccttcctctctaacatccattcatcccacccctcccccctctttttgccgcaatctccctacctccaccttgcccctattgaatccacggcctccctaaccttttctactgacttcacatatgtggtgctttccttcccatgtccaacgatcgccatcagatacatactccagcaccacctgatgctcctagccgctacttccttttcaccccacctaccactgcccactgtagtggacccccgtttttataacaggaatcaaccgtgtaaacagtaccatttccctggatcaagtagtctggtacacacgaattcatagctgaaataccaagtgcacatacacgagtgtctagtacgaattattacatcataagcccacaggcatagtcttaaatcatcgaactgagcggtccggaatacattccaaaaacagaagtaggtaaggcagcggagtcaaggcagcggcacgccattgccacaggcaacgaccgtaactaagacctactgagcgccatcgtcttcatcaccctcctgatagtaagcgtagggatcctccgaagcttcatctccgacctctgattaagtttgtatattgcaagggtgagtaccaaccgtactcagcaaaccaccacagcaacaatgcatatgacaggggtattcaaaggatggctatggttcttttgcgcaaagcaagttttgtaattcttttcacaagcctaagacctagcacagactgatcaaattttagtaccagtgttcatattaaacaatgacggttctatccaccatccattgtgatcccaaggatagcttcccgccattgagtcgtcatggttttctgaggacgcccacattcccgcctctcaggaagtggctccatcagtgtagaaatcatcatgcaatatcccatcccacacaggttaagaatttagagtctagccaagtgtaatacatgtcccggtgctcaataaccgcgagcacggttattcgaatagatttggtttactcacactgcagtggatgtacactttacccgcactccgcgactgcccaacatatgagcctcgtcccaacacatgagacgcgtcacggcaaagcttttcgataacctcgcattggcagtacccgctccatgaactttagccctcatgcactctaggcgtcatacgtttctagcagtgagaagagttctggcgctcccgggaagggaaaaacacacacattcctacgttgtttcttgtcgttgaacccagtccatcatgattgttctcttatgggtatcctcacgtagtattgccaagccaacctctgaccatccggaatgggcatctgccatccacctggccatccgaaccgggcatccgccagcagactgcttgccgcatcacacacctaaaagaagaccactacgcatggatactgcctctgctcagctatctactccgctaggtctatacccatacgagaagtgcggttgtacgggggtcgtttcatgcttaacttcatggctcggtccttaattgactggggacggtactagcattttccggataccacccaaatcctccgtccgccccagtcgaaaacagttgtttagttttatttctcctttcacaaatcatgtcatcaacattatggcaatgtggcgctcatatctccacataccgcatctcaattaccttcccaaaggtaattgcccaagcatatagcatttgataaatatgagtatgcataaatctagagtagcatttctaagcatttgtcatagttgactagggacttattcgtaaatcatagttacaaggatttaagggtaaacaataatcaaggcatggcatactcacaagtaggatgttcatcattgcatgcgattttatttgtaacaaaataatttcgcaattgggatcaacatgttcaaagaatagtgatgacttgcctgctcaaagtcttgcaggtcttagccttcacttggatccgcaactccttttgtttctatagctacgtgcgaaaattgagtggaatccggttagaattcaaataaagatccacatgcatccaaatgaaagtcgcatgcgaaag

SEQ ID NO: 29796 - DNA, 1741 bp, Oryza sativa
tatgagttctctgttcaggaacatcagcaagttaagcgatgaatggtttgcggatgaagaaaaagttcgtgatattgatggattacttttaaatggaattgatcttactaactctagaaagggttgtattatttattcaaatgccagtatattgttatcacttggttggtgtgctggccacatgtcatatctgatcaaacctttggcttgggctacatatacacttgttcttacatctgacagctgttttggttgcagctaacttgtggaatatgttttgaaaggtattcttctgatgtgatgagttctgctgattgtgatcatttttattgccatgaatgcttggaagggctctctctctctctctctctctgggcatgcttttgtgcataacttcctttttgcaattccaacactagcttagatagtttcaccatcagtgctcatgtatagactatcttgtagacttgtagttgttgtttttggtaaccatgatcaagatctgttcctgtgttgcagttattttatttttccctcagaataatgaaaatttatgataatataaattcaacctttcaggtatattagtgctgcaataagtgatggtccaggatgtttgtcattgcgatgccctgatccatcttgtggtgctatggttcttcagaacatgattaataagtttgctaaagatgatgataaagtgagatatgcacgatttatcttacgtgcatatgttgaagatagcaagaaggtaatatgtttgaacaagctaactaattactccacttgatagttctttgtggagtacctattttttattgtttatttttctaacgatttgaaatgatgagctgtgctctttctgttaaccttttgtataacctatggcatttcctgcagactaaatggtgtccagctcctgactgaacatgtgcagtggaatttgtcagcgatgggaactatgatgtctcatgcaattgcaaattcagtttttgttggaacgtaagtatttctggctccattttcctgacgatttaattctacttttttttattgctagtgatgaaaagtgtggagcttcatcaatgctttggtgatgtttgcagtgcacggaggaagctcatcgaccagtgaactgggagactggttctaggtggatattaaagaatagcgcagaatctgaaaatatgaactggtatggttcaggctcaaaactttattaagccatagtgtacggatagtgtatagataaggaattcattaatttttgtggagataaatctatgttcaaacatttgtgttgtatatttacttctttttttaacctatccttgatgccaatattgcagctatcttctaactttcctcatggttatgagtaaaaactgaggtggtgaaaaaaattgtgcatttaatttacgtacgtatattcagatgttatgtattcagaaacatcaaactttgtggacatcctcatgtgtgactggtggtctggaagcagaagatttgaggatgcaaggaactgtgaacactattaactctttgctgagtcagggctgcaagggctgatgcattgttttttaacaatatattatgacggaaaacatgtattatatgtggcactgtggcttaaacctcataataaacacctcttaatttatgttaaatacttggcattgactccatttttatcaattgatgacttctttttatggaaaaacttgtggaggctctagtgaga

SEQ ID NO: 29797 - DNA, 1745 bp, Oryza sativa
atatttatgtccatattactagtgtatgtacctctcatttgttttctttgaacatttcaggttatgtctgggttcatgggctgaacatggggagagaactggtggattttacgcttgtaatcgctatgaatcagcaaagaaggagggagttgtatgttttatcttgagactatccaattgcatttagtagaaggaatcagtttctagatgtcttgtgtattttgttattgcttctgtagaattaaatgtttcaatcccacaagtcaatgtcgagtccaaattgacagtttgttcaattagttcattcattcatagaatcataagggttactttttcctaacttaattacctctaatgcagtatgatgagactgaagcaaggagggaaagagccaaaaattcacttgagagatacatgcattactatgagcgctgggcatctaatcagacggtatgttcaacatgctcaagtttgatgtctctttgagtttttttttctttctacaacaactatacgtgcagctttagtcattcttgtgctcataacttactctgtgtttttgaaccttctggtttacttggcaagtgttgtgttggccatatgcttgggcagatactaattttgacttaaattcttacctaccgagtgtagcccaactagctgcagctttatttgaagattacttgccaagtttatctcttactccctccgtcctagaatgtagcaacctaggataggatgagacccatcctaggacaacgaatttggacattcctcatgtccagattcgttgttctaagatgggtcatcctatcaacattatgggatgaaggtagtaagtgctaataaatgctcttttttaatttttatgttggattaccttatcagttcatgatataaaaaaatacagttccagatgtttttctatacctgatgggtatatagtttctaatctactgtacatgcttgggatgaatgttctgcattgttctattctgaacttggaattttttctgctgtagtatgcaagtttctgtactgacatattcacttatattgccagtcgaggcagaaggcacaagcagatctgcaaaaggcagaaaaggaacaagtaagcattcgcatcatgttaggttgggggcgttgcatttagggcaagacataattgtttatcttcgccattcattcgtattttatatttgatagctgctaactctatttcttctctatgtgctacagcttgcaaaattaacagatgtttttggaataccggagacccaactgaagttcataattgaagcttggtcacaggtttgatatcataaatatgtcatgacccaaatgacactccatactatacaattcacctgcgtctgatgcatgcaccattccactatgtctatttcagattattgaatgcaggcgggtactcaaatggacatatgcttatggctattatctggacgacaaggtcaagagcgaatttttcgagtacctgcaaggtagttgtttgttgcattccaaaataaaatcctaagttctaccacgtgcttgccaaaaatcatgtggtatgtatattatatcttttataggtgaagctgagtctggtctggagcgtcttcaccaatgtgctgagaaagacctgcaatcatttttgactgtgagatctgataatactgaacctgcaccatcaattgctgaattcggtgacttccgggtgaagcttgagtattctatagtgtcac

SEQ ID NO: 29798 - DNA, 38575 bp, Oryza sativa
  unsure (1)..(38575): unsure at all n locations
ctaacaaactctaagatactataagtctttgcggcagacttttgcccacatttatctataaggaatttacataacatatcctaattaatagatacaattgccttcccaggactctatccgtgcgtggcaatcatcttgaaatacactaacttgaacccgatgtcgcatacaagttgtattgtcggaatcggctatatcggcttatttagcccgactcagacccaaccgatcctaaccgtagccgatctggattccagccgatccctgctctgcttccgaactcgatctccgcctccaactccgctttgatcaagtcctctttcctgacatagatgttaccaaatttggttgttaacaaggtgcccaatcgatgagagcatacagattaacagggcatgtcagttggttacatgatgatgtgccatttagtcaacacaaacacaccaatttatttaattattttttctttctaaaatgttcctaatgcttatgaaatgattggtaatttggtattttgtcagtttgatggtcttgacatgttcatagagatggaaaatttagtttgaatttgtaatttggttagggcagcacatatttgctttcattctatttatatattaatttaaattaggttgcctaaaaaaataaatttgtttagcaaatgaccggcatacacatattttcatgttgctaggccttttaaggcaatgttggatggtaccggttagtaactaatccttcacgcacgtaaaatatagcaacccattagcacatgattaattaggtattaggttaaaacccttaaaaaatgaattaatatgattttttaaagcaaattttctatagattttttttaaaaaaacgcatcatttacaatttggggaacatgcacggttgtgcgcggaacgagagagtaaaagttgggacaagatagtatttaacttagcttaaactggcttacatggagcaccctctcaacttttatcctagattcgccactgcttatgcattatactaggacgtttggcgtgccttgccgcgccgtaatggcagtgaagagtaatgttaagtttggaagagtgtaagcaaacattgaagatcagttgaaagcaaaatagagtgtcgcgagaacagacgtaaaatgatatgttacatagtgcatgcgatggaattgtatattcgaaccaggagaattacgtatgactctaatggagtagccaaaaaaagatcacataggagatctatagcataagtggtttggctatgtggttggtgagaacatatatagaaggaactattctgctatggagctggatgatatgggtggcgcctacgaaattcaagaggaagacgccgtggtggccttgccggcgacccgccttcaacaggtccgctatctgtgtctgtttgccgagatacccactggaatgtctttataactggcagtcgacggttgtctttctcatattgctttaaaacttctccatcgatctcattgtcgctgtcttcatcagtgtagtcaaaaagcttttcaatgtgaattaatatgacaaataaatctgcattgcgtttccagccttggtcagatgattgttcctctccttgaacctcctcaatattccaatccattagtttggggatgagattgcggtcagttgtccatgcagacaatctgaaaatcgacaggttttgtatatgatgctcttcataaagctcttcaaccatacaactaccgtctagtaattctttcatggcctgcttgttccataattctggtggtattccttcgagtgcaagtatgactctttggcgcagtgggtttgggacactatgaaggttcatcttgaaaggttcatcttgaaaggctcaaaatgcagctgagttgtttggaatgtgtaggatttctgggcaaacgccttttgagatctctcatattgcttgtctgagtccatgaatagcacaatgtacattttgtgcctgaacggcagtaaggcaaaatcatcaatctggcagtcacacacgaagcctatcatagctgatattttcgttgtgtttggattgccagctccaagaacggtgacaaccacagcgtcctggtaaatgacatcggcaaatagctgtgaaatttctccgcggcttgaaaattttgtcgctaacagtggacggctactgccataggacaatggtcgtggttgtctctggctagggtggttatcttgatgggcctccatagtgttctaggaaagaaatagaagacctgttggttaacgcgtgcccattgcagagatcaaaaaaatgtttagtttgtttgctctaatactttcctatattgttctattacagatgtttggatctgacccacttctgtatagggagaggagggataggaatgaacatatggagattactgaagataataagctgcagttgttacctggggagggaggctgaagagcttgtgaaagctgttcttgctgacgggaaggcgaagagcagcagatatgtggtggggaggtgcaagtagcggcgaagaggagaagataagtgtggtagagatagaaataataggatgtgctgtatggcatctcgctgcaaatatgtcatgtctcttcaaaggcagcatgtacgggcaagcgatggtgtggatggagtgtgtaaagaatgcgtaggctgttgtttcagtatggagttggttgatgggtgaatttccctagcattcaataccatatatatatatatatatatatatgtatgtctgtatgtgtgtgtgtgtgtgttttggttctttgtactatacagcggtgtggtatggtctatagatgttttgtatggaagaaacatatattcaggtttagtatctggatggtgattaacttttatttcctgaaagcaggccgatagtggtcagtaagcgcacaaatatcctgggtcgatgaatgtgaactaaactggatgcttgaataaacctggtaatgctcagtcagacgaagtagttttagatagctatcagcattcagtattttcacggtggaggcatgataatatagaatcctggttacatgcataaagagcaattcatacaaagttttttcgcaaaagaattgctgctacagacagtcgggcaatttaatagcagcacagtttgcagaagcacgacagaacgggatatattgttctccttcgatgaagctgattgaggctgcaattgtggaacccaaaagtaagaggtctcttgcataacatattaggcctagttgatggcactggaaggacagaaagaaagcgcaaatttaggacaaagatgtggactgtaaatctgaagcgtttgaccatagggcccaaaaaatattttggagcttgctatacctgccaccagcgccatcgtcaccatcgtctttgaacaacttcttagcagcgcctatgccaggagatggtctagtcctgttatttgtgatttgttattagcctgatgcagaattttctatctagcaatatttagaaggagcaaaatagagcttaccttttttttagcttttggaagcgctttgtttagtgccagatggaggagatttctgtggcaggctggcatgatcagcgccctagtccatagaaaaagaagttcagtactcagttttgaaagatgtttgattaaaagaaaactgagaagcaaaataacctcatcctctacgtcctcttcatcctgaacatctgcatgggtctttgaaacacattctatgtccaactccttctttttcgatacagcagttgatgggctggttggtccagtctgtgcatcactaaggccaactgatggagttggtgatagagccatggaagctgggagagaagatgcttgagatgcagatggcgactgaagcaagggaaggccgtgggaagaagcacctccaaggatcctgttcacctggaacgcaacattgccagtaaaggcagtgttctctatgatactaacattcgaagaaaattctttctcaagtagatcagtgatctcctttggtatgaaatcagtggtagctggattctgctgcaacagcgtctccactgaacgaccaatgagccgctgtgccaaacgaccaaagataatgaacgaagtatcagctgtgtcgtcgcctgctaacacactcagcttgaacctgcgaaaagcataatcagtatagatatagcacactaatatatattcaatatgttacatattgaagcccgtggtaactgacccaggcgaagctgaaataactggtgggcatgttggatctccacatctgtatccactaccaaatcgctttgctgtcttgttgcatatgtcacaagcagtgtaccaccaggaactatccatattgatttttctaatgacaacagtgaccaagaactgatgtttctgtttgccagaagtagggtggtgattagcacactattttgcaaaatggcaaacacaataatgagtactgatattagtaaagatttaccttgaacttaaaagggtgcaggtccttgatctcaataattttcttttgttctgcattgtttggagcatcagatgaggctgggaggtcgatatattttatcggttcataatttcctttgatgctgcacagaaccaataagtgtgagtttaaactggtggtaggaatagaaactaacaagatataaatggcaaagaaaggacaaataaggaacctgttttttaaggcagccacctctggtttgtcaaggtttatgtaccacttgcaagcagagttaccagataaagaaacattccctgtacacatattataagaatctcagagaatttgtggaaagctactaataacgatagcaaacgtttctaatgtacttactgccaaatcccctgacaagtgtcccaacaaagattactacttgtgactcttttggccagcctcaagaatgtcatttgcagggaagcttgtagctcggtctccccacagcgcaacatttattgtcacattactattaaaaggtatagtataatggcagaaaaagtatatggatggtaagtgtttgttatgttattagtaaaacagaacaatatacaaaaagcacatattgaaaggaaggagaatattaggcagcggttagctggcgttactggaacagtggcaacaaagttgttagggaagcagagtaaatatcttttggcagatatgaaaaactgagatggaggactaactcggcatcacggatgtagatgctcctcttgaggctttcaccgtctctgatgcatgtctggataggagctactgacgttatctcagtaatgattccaatagcatctgctatgatgacaataggaaggaatagtctcttaggaatgcaatgagaacagtagtaatttataagaacttaactgcaactataatacctgtgaaaaagtctttcctgttcacccggctccttagctaatcatatggcgttaaagagtaaacatacttagggaaatcttctagcacatcattgcattcttccagtgtggaccactttgtgaaagaaattgactgcatattgctcactggcctatactggctggtgcactgccttacacgatagaatgtcagatcatacaccttcccttcagtgatctgaggctggaaaagctcatctaatggtgggaaaatctgggctgcaatactggctccctgtttacacagtagtacaaagggaaaatatgtgtatgaactgtaagcaaagattccaaagaactaaccgtgcgatcaagcagaaccagcccaagatggtgcaaattactttcatcattttggtcacgaaaagcccagaaccttgacacacgaacacgaattgttgggttcccaagactaggttcaagcctattaattagcgtagcctccatttgtacagaaagtttgaaacggatagttcataacggaaattcctaggatatcataggtacggcaaatagtaaaggcatagataagagggatgtaagataggcaacattacatacacaatacaaacaaggcacacctaaaagtgaaaaaaaataggtatacaacagctgcaaaaaaggcgatatagctggtagctaggtgccaacatcctgcagtatagaaagcacaatatattaaagtgtatttggatatagcgtcaatttcatagggatgtcgatggagctaaactatctaaaatataccatcgatctcactacgtccaatacttcttggtaaaccacattcctggtttttgaaccacagacctcatcctcatcctctataaggattctaaggcctactcttgaggttgacctagaagcagcgacttatagttggccatgtgtaaagacaggtttttttagataaaccccaacccgtgaaagagtctgcccctggctcttgttaatcgtcattgcatagcatatgcgcacagggaactgtctcctttgaagtgtaaaaggccacttagaacttgtagttgtaagcgcgattcgagatatgaaagccttctcaccaatgttagaaccagtcaatattacacactctataagtcgatggcctagagaaacaaccaatagtcttgtgccattataaagacccatagattgatttaaatttcgcaacaacataactgtgacaccctttttaagagtaagacgatgtgatgggaaattgttaacattaatagaatctaagaactcagttgggtagagtatatcaaagtcaggcatatggtcacatgcttttgaaattgtatcacagctaagatattctttagcttcggtaggtatcatcttaacaacacaatcatttatttcatcgactgttgagttatttgggcaaacaatagcacgacatgctagataggaatgatctgtgtagctggaggggaaatctggaaagacctcatctataattgcctttactttgtcgccgggtgtctttattagtaaatcattaggaatatctatccatgttggttcagattcatcgttttttttggttgtaggtagcatgccatcaccgagatctaggatccaattaccaaattcttcaaggtctcgtcgggtgcgttcattaagcccattttgaagaagtctcatattaattttcagtcttaaaagagtaacatgccgccagaggggggagttagttatggatgcatcgactatggaagcacgcgagccctttcttatcacttctagtatgtgtcgaaaatcacctccaagcacaactaccttaccgccaaatggcagcctgccattagaaggtttttgctcggatagtaaatcacgcaaagttcgatctaataagtgatgtttcctatgagtcattggagcctcatcccatataataagtgatgttttttgaatcagctcagcaagcatagtacctcttttaatagcgcagatactggtttcatcaatctcaattggtattttaaatcttgaaggagcagtgcgtcctcgaggcagaagcagtgaagcaacacctgaggaagcaacagcaaggacaattttcttttcagatcgtatttttgtaatcaacgcgttccatagaaatgtcttgcttgtacaccgtggccatatacaaaaaagaatccaggtttggaatcgctaacatttcataatcgtcttaaaaatagttttctgatcgacgtttaattatggaattattgatctagcgatggtatctagtgtggcgctgtcaagagctaactcttcctcaatcattctattacctaccacatcatctgaataaatcgctgggcgcggtaaatcgtagtcgtctatggtaccaccactgttggaaaaagcagtctgcacttctttcattaacagtgacatcagcctttcatgggggaccaaataagaagggttcaacagagctattctaagacgtcgttgtatatcgtcggtaaagtacaaccaatatttttcaaacagggatctcacatttccaacagagcagaacatcacaatagtaacaaataactgtcttaattggctagatgatgcagatattatagccttgtcaaatagcaagtaccactcattatcactctcgagtaaccctcttgcttcgcacgcctctctgaacgttgtataaacaacaccgtcgtatgttctaacatcagcatatgacatcgcacctttcactatcatcaatagcattcataggtagtacaattctccgctcgctgggctcacatagtacatcctacctatcttttcgcatggtgttctaggatgccagctacatgagctgttatcccatgtccattcctttgggaaatcgcagtatgtcagtgttcttgcagcactatgttttttattggcctcaaaccattctgtcagcatcattttttgggctgcaggacttgtaagcagcgaattcaggtcagcaccttttttgtatcgaacaaagttctggtatggaagatgcacagttaggcgctcaaccgaaggcaccctatagtggatatcaaactcaaaagcatgccaaagggactcacaagtagaaaggaaccttgcatcaatgtactcttgtatctcattccgtggtgtgctgttactgtttggtgttttctttgatgtgtcattttgtggtgcactattattttcagataactgactcggtaacttactattaacctcatagtacgctttagatctgtcggttccttttgtgacatacttaaagaggtacttaatcatgttagatttattgcaccattcgacatttatatgtgcttggtattttttaagaagttccatgttgtaaggcacaacccattgattatcgatcttcactccatttttaagaacatatcggtcgttatctctacgtttgtaaatagtaaaaccaaactcgtccattattgtctcgtcctgaaaagacttagggaagtgcttagaacactccccttttttcatgcatgggcatgatttgttctggttgccacaagggccatgcatcatgaactcatcaaccaaagcataccccaatggatcagtgaaaatgtcagggatttcagcagaaatgaacccatcaacaataggagcactgaagtcaatagtggatgcagcaagccaaataaggcaatgtatatgagggggcccacgcttctgaaattctactgtgtagagcactatatgataagcacaaaatatcagaaccaaccaaggaagcacagaacaaactaaatagagcaaaaacaaaaagcctaccagcaaggactgggccaaatgtctttccttccttaatgtccgagataaactcgtctactttcatgttgaaaactctaacaatcatatcagaacggtcgcttggtacctggcctggttcaaacaacaatgcatcgtatatttcttgccacttagaattgcaagtaaaagtcacaaataggtcaggtgctccaaatacacggcatatggccattgcatcttggtaattctgtaccatataacgtctgccaccagtaaaactggtgggcagtacatacttctttcctacagaatccccagatgcaagaccatgatcaatggcatcacttatcccttgtacagattctgagcggagttcatgttggttgtcagcaatgtattttagtctagacccttctacagttgagtatgagtcaacacatattgcatcatttagatgaccacatcaagtatagggatttagtttattcaaccggtaatggagtcggtagcggtagtaatcaagcattgtaacatagcgtcgtgaattaccagaaatgctagggaagtcagtgtactttatacctaaatggaacgaaactcctaatgcgcgatcaatcgttgggcgacaggagcagcgatcgatttccctttccgccacttgccgccaccacttgccttttctggcttttctcagcctctttcctattgggcttggcccacgagagcccatccacagcacggaaccgtttttggcttttttttatcgcccttaccagaagcggaagcggatgccgttgcaattttgaacagtaccctcttcttcctctcctggcgatttcgatttctcctgtgattctccgacgatttttctccaacgcaacgtggttcgtctcctgatctcctcgagcatccttggaatcgattcctcctgctatttctcggttattgtagttagggtttaatttttggaagtgattttctgttcccccgagctagcttgatttgattggtgattttttttgttttagttccttgggtttttgggtttagatccatggcgttttgggtttgtccgtcacaaaatcatgccgtgaaaccacatgcaccacgctgtagacgccgccgtagacgtcgtcgccgccgtagacgtcgtcgctgccgcggttgacgtcgtcgccgccgcggttgacgctgccgccgccgccgccgccgtagacaccgtcaccgccgcccgtcgctgctagggttagggcctaaccctagcaaaatcatggatctaaacccaaaacgccattgcttgaatctctgtaagctggagtattgcaatgaactactgtaagcaggagtattgcaaatgggaatatttgtggctgcatatttgctggatattttccatgtgtatcctggagtgagtggacaatttgggtagattgctgcatattgctgaatcaatgcattgatatagctggaatatttgggcagattgctgtaaatgaatgctatttttgactgcatattgctgcacaactgatgactgcatttttttgcaatgtgattttcaatccagagcaatatccagctgcaatcttggagcatatttggctcctgaaatactacatatctcaagttattttgccagcatgattcaagttattcacagagaaatttttctatctccatgccctgcttgacctggtattatcatgaggctttcacatgatgcatggattgctgcaatctgattttgtaggtgtcatcatatagttgttgctttctaataacattcatacttgagtgagattttcagagaaaaaactacagaggatttaataggagcaaaaacatctttgtgcattaacttggtgtactgagttttttgtcagaaatgtactattttgcgttcctccatatgcagttagttttttcccctgaaacgattgtgcgcagatttgctttgttctagacaaatttttgggagaacccaataggggctggttttgaattttgttttctgactcgattttttcagttgattctaggtgtcctcatcaactgattttgtttttgtatttgtaggattagatattcagtaaagtttcagtgtttcgctctgttttttatagtgcaatgggtgcacttttttgtctaaactgtgtgctggtaaatataaacgattaaaccatccagaactgagaaaacctagcagccgcttgtgttgtgtttgattacatactgcagatttatacacctctgcatttctaagtttgtattcctgcagtcatcaactcattatcctcttatactgagttaagttcagtctggttgcaggtagtcacgaagttttgatgatttttgtaaaaattttcatgagcatatattgttgtgattgactggcccatctgcactttttggcatttttgaccactagcactgaatggtgatctttttgccttattgtcatatatgccctcactatttgccatttgtgggttcatgttagcttaactcttttttttgttactgtggatatgcatatgtttgccacctcatcagcactcataagcaatcaacttagacagattttgctttgttctagataatttttgggggaaccagtagtgactgctagtgaattttatttttctgattcgatttcagttgattctgggatcaactgatttttgattctcacatttcagttgattctcatattttatgactagtagtgactagtgtcctcgtcaactaattttgctctcatattcataggattagatgttcaattaagttcaggattttgctctgttttttattggacaatgggtgatttggctaaactatgtgcttgtaaatataaagtattaaagtatatgtgatgggtggtaagtacataacagggggtgcttgacatggtgactaacaggactagtccatacatataaacaattttttgatccagtgttttgctactatgtcctgataatgtacaacatataaaaaattctcactacaccaagtcaccaaaaatgctcatacatgtgtctgaaaaccaaggggtagagagagagagagagagagagagagagagagagagagtaccttcagcatatagagaacgaacagcttggacggaataaaatctcctggatgaatagtatctttttttggcgcttttctgaattccattgtttcatgttttttgcataacctttttgatttccttgccgctatctgcttgtatcaatgatttctaataaatcagttggtcaggagctcaaggtgtctatgtaactgttgcgcagataacaaattccattacgtgactcaggcagtatggatgattttgaggaacatggtattagttatcgtgaagactcggactgtagcgaggcaaattgtgcaatttcagattatgttccaagcaaggatgccactggtgagcactctgcaagcaaagataacagctcggcagaatctgaaagtaacagagttgaaataaagcagtcttcagattctgcaataaaaaaaatggagatatactatttttatgataatgattttactagtctatttccctgtttctctttaaccgctataatgtcccataccatggatcaattaaaccaagcaaagtgtataaacttactaatcgcccgataggtttttttttaattcacatgtttttgtttctatcccctgccaatttcttgtgtttataatgtttcgaagtataaagtgtttaaagtagaatgtttgtaagtataaagtttctgcaactataaatttttggatgttgaaacttttattagtgtaaattttacaagtataaagttcctatataaaaaaatattggaatccgaattgtaatttgaatcgggtatataaacttttgacttataaactttaggtctacaaactttaggtatataaacttcagatgtgtaaactcgaggtgtacaaactttaggtgtataaacttactatttgcccgatagggttttttttaatacacgtctttgtttccatcccctgctaattccttgtgtttataatattttcgaagtataaagtgtttaaagcaaaatatttgtaagtataaagtttctgcaactataaacttttggatgttgaaacttttattagtgtaaagtttacaagtataaagtttctatataaaaaatatttgaatccgaattgtaatttgaatcgggtatataaacttttgacttataaactttaggtctacaaacattaggtgtataaacttcagatgtgtaaactcgaggtgtataaactttaggtgtataaacttactattcgcccgagagggttttattttaatacacatgtctttgtttccatcccccgctaatttcttgtgtttataatattttcaaagtataaagtgtttaaagcagaatgctcgtaagtataaagtttctgccactataaacttttggatgtttaattttttattagtgtaaagtttacatgtataaagtttctatataaaaatttttttgaatccgaattgtaatttgaatcgggtatacaaacttttgacttataaactttaggtctacaaactttaggtgtataaacttcagatgtgtaaactcgaggtatacaaactttaggtgtataaacttactaatcgccggatagggtttttttagaatacacatgttttttttcatcccccgctaatttcttgtgtttataatgttttcgaagtataaagtgtttaaagcggaatgctcataagtatgaagtttctgcaactataaactttcggatgtttaattttttattagtgtaaagtttacaagtataaagtttctatataaaaaaatattttgaatccgaattgtaatttgaatcgggtatataaacttttgacttataaactttaggtctacaaactttaggtttataaacttcacatgtgtaaactcgaggtatacaaactttaggtgtttaaacttattatcgcccgatagagttttttttagaatacacatgttttgtttacatcccccgctaatttcttgtggttataatgtttttgaagtataaagtgtttaaagcagaatactcgtaagtataaagtttctgcgactataaactttcggatgtttaattttttattagtgtaaagtttacaagtataaagtttctatacaaaattttttttgaatccgaattgtaatttgagtcgggtatataaacttttgacttataaactttacgtctacaaactttatgtgtacataaactgttcttcccttgtttgaacttctctatgtagtgtagtttccaatcactgagtcgcacattgtcatttctttagttgcatattccttttttttatgggatttttttgttatgttttgttcatcatggatttcatgtgacccaattttagcaaatttatgtacatcacaactgtcatatatttatgtgcaggaacggctctagtttaatttaaagctttgtttccacaaaactgtcagtagtataaaattgaatattttttcatctctattttctccgcacaacttatcatgttgcttgcccaacttttttctcccatttaagttgtaacaattttaaaaatattttttctcgtcacaggtttcagttcaaggccattttcaatgatcctaatgttctgctagcgaaagtgcaagttggcaatccccttttataaaacaaatacaatgttctctttttttcccacatcatgtttttattgtgcaattcaactatttttatcaacattttttcaacctgtcaattcgccatctacaaaaatgacgagctgatgaactccatagcgcaaacctgaaatctagcaagtgtgtcacattttactttaactttatggtttttttatcttgcattttttttaattcagtacaaatgagtgagaaagctacagcttttgtcatttcaaagttacttcaatttatctctccaccctccgcttatccgcttatccctacgtaccacatcccagaaagtcagtataattgatgaaaaaagctacagtttttgtcatttgaaagttattgatctccccaccctatacttatccctacttaccacatcctagaaaggtaatgccgaaaagaagagcaaatttggtacgtaccatcgcaaagttcctggtgttggaaaataccatcgcaatgagctcgagtagaaaagtaccatccaaattgcccagtttgttagaaatgcccctaccgtcgctttgtccgtttgaagacgtcgttgatgatgcgaaatggcgatgatgcccctgctgtggccacataggagtggtttttgggccgactttcggcccaaagccaaaaggaggatttttaaaactttttcaatttaaattattcatgaaatgcaattccatttattaaaaaatacttccttggctcaaataaatcccagaaaaatctagaaactatagaatcaagtaaagtatttaacaaaattttatctagcccacttttatattggaatttattatttaaaattagatcttctcttctaggcttttaaaattcatttctaatgattccaattaaacaacaatttatatatttaagatttttagggtgtgacaaacctacccccttaaacagaatctcgtcctcgagatttggaagaactagcgaaaagatgcggatgagctgactttaattcatcttctcgttcccaagtagattcttcctctgagtgattactccattgaaccttatagaaacggataactcgattcttggttcttctctcatctgtctctaagatacggattggtttctcaatatatgtcagatcctcttggaccactatctgttccagattagcttcttcggtgggtacccttaaacactttttcaactgtgacacatggaaaacattatggacacctgccaaggattgaggtaactccaactgataagcgacctctcctcttctactgacaatcttataaggtcccacaaaacgcggtgccaattttcctttagtgtgaaaacgatgaaccccttgaagaggcgtgacacgaaggtacacatgatctccttcctcaaaacttaaatctctgcggcgattgttggcataactcttatgacgagaatgagccacacgcaatctttcttgaatgatctttaccttctcttctgcttcccttaggatatcagtcccaaaaacctgacgttctcccatttgatcccacaaaagcggagtgcggcacttccgaccatacagtgcttcataaggagccatttgaagactagcttgataactgttgttgtacgagaattccgcgtaaagcagattcttatcccaacatccaccgaagtctaaagcacaagctctcaacatgtcttccaaaatctgatttaccctttcagtttgtccgtctgtctgcggatggtaagcggtactgaagttcaacttggaacccatctcttcctaaagtttcttccaaaactttgaagtaaactggctacttcgatcggatactattttcttaggaacaccatgcaaacacacaatccttgccatatacaattccgccaaacggcttccagaatatgttgtcctcaccaggatgaaatgagccattttggtaagtttgtcgactatcacccaaatagagtgatggcccgatgatgttctgggtagaccagtgatgaaatccatgccgatttcctcccacttccattctggtatcttcaaaggctgcaacaaacctacgggtttctgatgttctgcctcgactcactaacagacatcacacacagctacatactctgctatctcacgcttcatacttgcccaccaaaatctttccttgaggtcttggtacatcttagtactaccagggtgaatggagtataaagtatcatgagcttccttcagtattgcatctttcaaatctttgttgtctgggacacagattctctcacccaaccatacagttccttgctcatcttccaagaaaccgatagcttttcctcttctcatattcttcttgatctcatgaatatcaggatcattaatttgggcttctctaacttgatcaatgagagtgggcttcgcttctaacgctgcaacgaaacctctactgacaatttccaaatttaatctttcaaattccttgcataacttcaatggcaactgtcgtccttccgtagcattgcaatagcctttcctgctgagagcatctgctacaacattggcctttcctgggtgataatgaattcccatatcatagtccttaatcagttccaaccatctctgttgtctcatgtttagatccgactagataaaaatatacttcaaacttttgtgatcagtgtacacctccgtacgagtaccaaaaagatagtgacgccaaatcttcaacgcatgaaccactgcagctaactcaagatcatgagtagggtagttcttctcatgcggacgtaactaacgagatgcataggcaaccaccttcccatcttgcatcagaacacaacctaacccaagcttagatgcatcacaatacacttggaaacccttcttaggatcatgcaaaatcaaaatgggagctgatattaagcgacttttcaactcttgaaaactctgctcgcactcttctgaccacttgtacttcacatctttctgaagcagtcgtgtcatgggcttggcaatcttggaaaaattctctatgaacctccggtaataacctgcgagacccagaaaactacgaatctctgaaactgtcttcggttgtttccagttggttacggattccacattactaggatcaacggcaactcctccggctgagatgatgtgaccaaggaacttcacttcagacaaccaaaattcacatttgctaaatttggcatacaactgatgttctcgcagcttctctagtgcaagacgaagatgttcttcatgctcttcattggttcgggaatagatgagaatatcatcaataaagacgaccacgaacttgtctaggtattctataaacaccttgttcatcaagttcatgaagaaagcgggggcattggtaagtccaaaagacataacagtacattcaaacaacccatacttagtggtaaaagccgtcttaggtatatcctcctctttaatcctcaactgatgataccctgatcgaagatcgatcttggagaaaacggtggcacctttaagctgatcaaataaatcatcaattctgggcagcgggtacttattcttgatagtgacatcatttagtgcacgatagtccacacacatcctctgggtatgatctttcttttccacaaagatgactggagctccccatggagacgaactcggtctgatgtatcctttctgaagcaaatcatctacttgcctcttgacttctgctaattcattggctgccattctataaggtctcttatggatcggagttgttcctggtaccagatctattctgaattctatatcccttttaggcggcataccaggtaaatcatcagggaacacatcggggtactcccgtactataggaatctcttccaaagttatttggttcagactcgaccttaaaagttcagagggcaatgcatgaacagttacaacttgaccatcattgctggtgagagttacttttctattggcacaatctatcacacctttatatctggctaaccagtccattcctaggatgacatcaagatctttggattctaacagaataaggttggccagaaatggtactccttgaatctctgttctgacagaggggctacgttgtgatgagagtgcttggttactcggagtactaaccatcaaaggacgtctaagatcttctacttccatcccatgatttcccgcaaaactcaaagataaaaaggaatgcgtagcaccagaatcgaaaagcactgttgtaggaactgagttaacagggaatgtacccaaaatcacatctggagcaccttgagcttctgcagcagcaacatgattgacacgagcctttgtcgctggtgcggaggagttgttctgagcagggacaaccttcgcgcggcggggcttcggacacttgtcagcgtaatgtcctaggtcaccacaattgaagcacactccgggcttgctgccttgctccctcttggctagctgattctatgtcagagctgcaacaggacgtggagcttggttgcggttgttgttgccagcattgttgttgaagaactgacgctgcggacgaacaacagactaagaacctccctctagcattgactgaggtcccatagcaagacgctgtctctgactattcccctgctgagccttgaagtgagcaattcggcgtttcttctgctccatgcagttgtacttgtcctcctggcgaatagccttatccactaacttctggaaatcatgataatccccagtcattaatgggtaagaaagctcatcattcagaccttcgaagaacttctcctgacgctcttcatcagtgcgcacatcttctggagcacaacgggccagacgattgaattcatgcaagtattcggtgacagagcgagatccctgaatgagcgccctgaactccttcttcttgagagacaccactcccgatggtatgtgcgtcttccggaaagcagcggtgaactcaagccaagagataggttcagcagtagtcctgttgagacggaagtgatcccaccactcagaggcagggccatgcagctggtgtgaagcaaaagaaaccttctcttgatctgtgcactgaagcaggtccaacttcttctctatggcgtgcaggcaatcaccagcttcaacaggattggtggtgctagagaaagtaggcggcctcacgcgaagaaattctgccagcttattcgggggaggtgcatggttgtttccctggttctgctggttctggagttgctgcatcatcagattcataagctgtgcctgttgagccaggacttgagcaagcgtgggattctctgcattgttgttgttgttgttggggttggggccattcccgttgctgcgagtaagcaccatctggcatagataggagcacaagaagagaaacaggggaaaatctacttacgacagggaattaattttactaacttaacttttattgatcttaactaagttttattattacaaaactgaagacttcctaatactcgaaagcaaacaaaggcacgcatttacatccccccaatgatgtaaatcacatgcatgacccacacacacaaccaaacttaaacaaactaactaacacaacgatctaagacaacgacttgacaaggcgttcaaggtcttccggacatctgagttgattgaaggctctttcggcgcgtccccatcatcttgagttgctccccactcgaccttggaatgggtgcgcttggattcttcttcatcatcatcacttacgttgacgaccggaggatccactggggctggggtagcttctttttccaccacacgaacctttggcgccaactggtagcgagggacaaatagagctctcttccttgcggtaagacgaaccctggccttctgcggtggcgcttctccttttaatgcggctagctccttctccaaacgatccaccttgtcctccagcttgcaaatctttccgcgattccggtcttcacgatcttgagctgctatcacaattttagcgcgggtctcatccatggcccacagcatctcaaccaaatgccttgtggtagcatcattctcaatccctgcaggttcaaggtaactgccacggtcacttccctggggttgacgaggatggtagcggtactcggtgtcggccaaccgatcattgtagctttcgcggagctctcctatggcgatccttgccacctcctaacaagcatgattgtagcttccctctccagcctcgaacatcaccgatgggatatcttcacgattactgttcaaggtgactttgacacgacacttctcttcatcacgatcatgaggaatctgggcatacaaaggggcagtctcaaatcctatgaggaaggacatcgtacgcaactcctgaacaaatcaacatgctaagtttattccattgcagcaagattaaataaaacaatgtggtaacaacttttgttggtaaatgggccattagcacagtaatagatgtacagtactaacaacaccggaataataaataaattttgaattagaacaattaaagagatcatgaactgcatgtgccattagtttggtttaatttaaagagaaagagaggagaacagttctacttttccaatatttttagagggcttctaggggtaaccatttggcataacctagggtcaaggaggctctgataccaacttgtcacgcccggaatttctgtccaaaattccaaacgcttacatgtgtgtaaaccctcatccaagaatcagccgaggcacacaataacaaattgataatagagtacaattattactctaattaataagcgaataaaatgtcattacagaggtagatagttcctttcaatcaataaagttctaagcagcggaaaataaaggaaacagcgcagacgactccactccataggcagcttgaccagggctacgcctaatcatccacaccatcagcatcactgtaaactcctcctctgatgaatgattgtaaggtgagtatatgacatactcagcaagccacgcagcaaatatgcaagtgcacaggataacaaaggatggcatagtatagtctcatttgcataaacagcatttaataaatatttcagaatttaataaaacagtagaatattaattaaacagtattaatccaacgctatacaacataccctgttgcataggcccaaccattctgaacaaccaatcccggctgcacagttctatctccaaaccaggaatatactattccaaaccaggagctatcaagttattaacagcatcatttaatatggtgagaagtgtgaaactaaacatgaaagacattgttagacccgcccataaccgcgggcacagctattcgaatagtttgaactctggccagaggtgtaccactgtacccacaagacacaacctcaacatcatgtcaaccatgcgttgcgatacttgacaagtacctgaatagagattgtaacaataccctctatataatacaattcacagcagtgcaccgttcccggatcataatcacccccttgtaaacaaggtatggactccccagtgactcccgtgggcttatctccaccacttcacagtctggtgctctactaagaaccatactatacagaaagtaaagccgttgcccacgctggcttgtggttggcacggtaaatgtttcacaaccgaaaatcgtgaaccggtccttaattttcatgagcacaaccatcaaaaccatatgtcacaacccaccattatcaggttttagttggcaaattaattaattaaccaatcatgattaaccatcatgaggtatcattaagccatcattaaataatagtgaagcacaagttatcccagtagtgtgctaatgttactaagcatggctaagaaattatatctaatatccagctgaacccatatataaagctcaactagtcaagttataataaccctaggtatcaaggaatagagtaatcaagaacaaaagggctataacaaggcaataggttaattccacccaatgacattcgaaaataaatgcagtagttgaatagaaacaatagctttaaacgggatcaacatgcttaaagggttgtttgggatctgtgtgacttgccttgctggccttgaaattcctcaaaatattctcctgcaaattcggactctccgggaacgttggaatctaaagagaaaagaacaaaatcaccaaaacagcacataaacaagcatgaacaatacatgtggatatttttaacatgtagatctcaattttagaaaaatttagagacttgaaccaactaaatccgagctaagatgaattagttatgaatttttaaagattaaatcgcattaaatcatttatatagattttaatggaattatgacgcaataatgaattattttttaaaaggaaaaggagattattgcgtcagcgggctcggctcacggtggaccgggtgcacagcggcggttcacggaaacgaatggccgagatcgatctatccaaaacggacggccaagatctaacggtctacgaccggtctacggcggacggcgtcgatgacgtcagcggtgatgtcatcaccgacggcggctcggcctcgcgtgctcgccggcgaacgacggcgcggcggcgtgaacgaaggacacctacgggttgcgggcgacgcggtgaactcaccggtgaccaaaacggctgcggatggtcaacggacggcgacggcgacgaggaagaaacggcggcgaccttcggcttgacgacgacggcggggctccggcgatctacagcgacgacggaggggcggacgaggacggcgacgagatgacgatcaggacgacggccttcccgagcgacgacgatgaccggagcgactgtggcacatggctggacgaacagcggtgacggcggcgctaggctacacggcgctagggctctaccgacaatgagagacgaaagcgagggtggcggcgggtagaggagacaccgggggtccttttaaagcggctaaggggcggcggcgaaggcccacggcggccggcggcgcaaaggaaaggttagggttcagagagagagacgaatccgattcgagatcgaatccacgggtttccaaacgattttagccaatgattccaaaagagaaaaggtagaggggatctcggagatcatttcccctctatcaatttcaccggagaaggaaagggatgaacgaatttggaaggagacggcggcgcggctcggttagggttcggtcgggcgacggcgcgaggaagacgacgagtctgataggtggggctaggtgggccccacctgtcagcgagcgagggcgcgcgcgcgcgggcggcgctcggctgcgggccgacctgggccgggagagagagaggtttgggccgactttcggcccaaagccaaaagaagactttttaaaacttttccaatttaaattattcatgaaatgcaattccatttattaaaaatacttccttggctcaaataaatcctagaaaaatctaggaactatagaatcaagcaaagtatttaataaaattttatctggcccaattttatattggaatttattatttaaaattagatcttctcttctaggcttttaaaatcaattctaataattctaattaaacaacaatttatatatatgggaattttagggtgtgacaattactaagagtggctgacatcaaaaccacctttttggagaagacctcaaaaaaaaaactgaacacgtacatagtacaacacagcaaaaattactaattacttgtgggatcaagcatgatcatacctggagcagtgaagcaactgtgccaaaagaattccacaacagcagagccaggttttgaaacatctctcttttcagaaaaatagtttcaagaagcttcattattcataggtttttccttccatgatgttgtaatgtcaattgtagaatatgcgatttacaattacttattcaattaagaacaattacaaaaataatcaaccaggcaattagaaattaactaatatcttagggtaaggagatctatcaaccctttgagacctcaaggtgtgctttctcacatagattaggattggaaaggttgaggacaagtttctctgctaatgtcatgttttgatccttcgctcactactcgatgacacccaatgtcggagcaagaaagatttttgagcccaggcaaacatcactataactatcatttgctacagaaatttcatcatcaatttattcaataatattaaaatttaatggacttttcaccggtgagcccgagcggctgcctgggctagttgggcgggggctccgcccctgatgacaccaactttagtgcctacctcctcacacggggatgaatgtgagaccatgagagaggagtgtgctatggaggaaaataaagtgttctttttgtttcatatagatgtatgcttgtataaatttctaggtcttagtttcattggtaacatgtatcattatttcctaatagtcttgctctttaagggaaggcatgaagcttagcacgcttggtgggagatgtgtgtgcacacaccctcaacattcaatctctatgttatgttggaatcaacctatttgcttatttcttctctactagtttgatattgagatcctccttagtttggttcattctcttttggctcttccacgggaaagttcccctttccttatgcttttttttgtttagtttgtaccttttagaagtatgtatgcaatgcacatgcctttttatcgtagatagctttgtcttcatgtaagaacaagggacgttgcaatgtgaataaagtctgttccaataagattttggatgtattttggtttactttacataattgtctatattgcagttaagcctattccacgtagatcttctgagttgtgcacactttttctcaacctagcatcttttaaacgtgcaaatgccaaaacccaagaaaaacaacttttggtcggttttccaaaagccattccacctctacctgtatgtagaagcaactagagtaattccctacacctacccctctccctatttaatttcaagcgaccagtggaaacatgaatcatgtgaactttaaacactcacccttcttctccctcccctctcccccctctcctacacacccctcctgttcccttagacaatttatcgcctcaaccacaattcttgtagttagaatgcctgatactgtgtagtagtctaataatctttatgaaaaatatccaaacctaccaaaggggccttactattgtattgggtaggttaataggcatttgcggtaatattgtcacatcaatgcatgccatgccacatattgtccaaatatttacttaaatattgcatattatcgacaaatttaatttaattttatacatatttatttaaaaattgaggggaaaactaatagtatatatgtttagaatatatctcatatagcatcattagataattcctttcgtgcacaaatctgcaataagaaataatgaaatgcaaaaaggtgcatcatctgttttcaactgtcatttattcatgtatgtgtgttacacatatcacttttatttggtggaaaacaacacattagtatattagtaaatcaagttaattttacgcaacttacagcccagtccacttcttcaaataaaaggaatgatgtaatagacaattcccacaaaagatataaattactttgcgcagctcggaaagagcatgtccagatgtcctggatctagcagatcaagaataagacgctcaacaagttcagggtccctagggctaggaacctcactagtcaacatagcaaatatgtgaagactagctatatccaatgaaagaagtgatataaaactctaagtcaaactatctccaatgcttctacatgaataaaatagaaatctgtgatacataggggcactacagcctttaagtagtgtagatacagatgatgtgcatttacttggttcataagaaattagtagaagttgttccagataaatgcacattatcttgttggtttctttgtaaccttgggtgcatgtttcttttgctctaaaaagaatccaaagttaaaaactgcagctccacatctgcgatgagtcatgtaaaagataagtttagcggttcatacctttttatgtcattcctatcgtgtgaagcacatgacaaagtgtaagtttggttcctttatttttgttaatatatgaccagatcactaatctttcttgagggtgagacaaaactcacaggaaaataatgattcacctcataaatttttcccatcagaatgaaatcctcgaggtggtggttttttgtgggggggaagaagaggctaaggcttgtttagattataggataggaaaagtatagaaatttaagaaaggaatctaagtataaaacagagaaattaaaaataaagaaataaaaaagttaataacaagtttcaatcaatccagtgcatcggcccatattcaaagatcatataattgtttaattaatatcttataattatcaatcttatacttataatatctgtttgatccgatctattaagattagttttaatagagttagaagattcaaaattatatcacatccaaatcttggctaatgtattctttgctttatttttcataacttatatcccatcggttatagccgatcgatccaaaattccatccgcatcggctagacacatgattatatatagaccttttggccaatctgccccacgatctaatctttatatattgtcgacgtttgatatcgcgattatgatatttgcatagtatgtggatcgttggtaccagtgtatgtgcgagattgaggtaaaagagatggagacaacgatttttatacaggttcgggccccttatctgacaggtaatagccctactcctgttggccgaagccgttgttgttcttattcatctgaatctcacaagtacaataattatgataatctatctagctgtcatcgacttggcggctagataaccaactcgtagtcgacgacaacatagtcttccttcttgaatatgaactcgtcgggatcagagatgacgctagatccctcttgccagcctccgtagacaccggatagggtatgtctaggcttatctctaacatcgatctctggcggcgtattggcttgtgtgtatgttgtgtcttgtggcttcgtagactgtggtggatgtctctcctctcctctagagggacttgtatttatacccatagatgcccccttgtccaagtaaactagggagaccagtatggatataatctgattagttcttatcgtttccatatagaactttactcgtccttcattatccggaactccttcaatatacgaggattgtttccgtataagacttggtatgtggtgggccccgccgagtttagtcgattactattaggtatgtggtatccataaccctgacatatatatcttgttagttgtaggatcaaactaactaacatgccctgaaccctgattgacagaacatgtactacagctaaccaaatctctcaggcctctatgtgtacgataaattttgtgtcaataaatttgtatatgaatacagactgtttgagaaactgaaaattctgttgaaaaatacaactgctagctagaaacttcccccagcataaacttttattctgttccagttaatgcgcaacgtaatgccgatgctgacagccggacaccgaagcgctcatgtcgatcaccaacgcatatcgcagcacaccgaagcccgccgcctcgccgccggtgcccagccgccgcccagtcatcggcatgcatgaacaagctagctttggtcgtaaaccagctgtgccaaattgatcaatcaagcacgaacgctcaatgatcgatcgattgctcgatcttggacggactgtccctaatttttttttcacgaacgtataaaagaattgcaagttaatatatcaggaactgcccctaatttaatcatgctaatgaaattatttgatcccggtcaattaatctgtagttaatttccagatcgatcatccgtcattttacttctccttccgtgcagtcaaatcctacgggggtatttggtacttgtaactgtcaagctaaccaagtagagatggaattgaatttggtgatcattaaagttgatggagcaactaattgcatgtatgcttgtcggttaaactttccattcctcttgcgacgggagctttcgacgcgtgcatatgactggaaggatggcggcgccggcgccgccgctccccggcggctctcctgctataggctaggttgtaacgagttaattattgaggaactgtactttttccggattatctttttgattatataagaataaattagatactataataaataaagttaataaataatctaacagaagtggctaagcaatacaataggacttaacaagaaagtttattgggaaaatatattttctgaagcatatgaagcaataatctacctatctatctatctatctatctatctatctatctatctatctatctatctattatatattaaaagtccatgaaacatcctaaaaaagcttctacgtcgacacatgacacttctagaaacgttcccaagctatcaagtgatactctaataaattggataagcatgtaactattgattttcacttaattcggtggacccatcaattttgaccattagattaaattctcatctctccaccctaatatatgatggttaaatgctttggtcccaccaaaataattaactacgagtaaacatatgtagagaatcagttgttttctctcccgaaaaaaataccgcagaattaattcttggaaagaaaaccgacgttgtggatttatcatttaatgcaggagcctgggtgtgtgcttccatcatccaaaaataaataaaacaacgaacactttttaagtgaatatcacctttgcgtcaaaaaagtgaatatcactaactgttctaaactatttacagatttaggttccgattcatgaatattgccctcggtagttagtttctgaatttttcctgtatctgtttgattacaaaagtgaatatcactgactgttctaaactatttatacagatttagggtcagattcatgaatattgccctcagggcctgatgaatttctcactagattaaattatcttctctcctccctaatatatgatggttgcatgctttggtcccaccaaaataattaattaggagtaaacaaacgcagagaatcaattatttctctcccgaaaaaatcaacaagtaaattttcagatgcaaagccatagggaaaaaaaagcaatgcgcctctagctcactttttcgaccaatatcgacgacatacatctacatttttttaggaacaagaagcaacaaccaagggagaaataatcctaatcgtatcaaacaggagaatgatgcaagcaacttccacttctcggtttatttaagcatataatttcgctttttatactactccttggtgaagttgttcatcaacaaagtgatatatcaaagctcttgcctcttggacaatatattcactattgtcaggtatttgggtgctgtcggttgatttttgagtacttagtcgaggcgtcctgatagtgcgtgctttgccaccagaaatttgttaattgatattttatataattattttggaagggtaatgcatgccaacttcttttaagaaacatagtataaacacaagcgctcatatacacacgcgtacaattatccatagaaaacatattcgagagactgagctaatgatatatcttcaaattaacgaaatcaccataaacgcctcgctatcgatgggaacgtcgcctacttcaaaaataattagccgtaaatatgagacccatgtgaagtctaggtcttgaacctaggcgtgggcaattaagttccaccatacgtaactaaccagccacactcactaattgcagataatgtggaccccctcttccctcttcttaactcattttttccatatattggttgagataacatgtagtatataaataataaataaactattgtaacttttcaattatatatacaatttttttattcgaccacaattaaatcaatccatatttactatatttttatttagaaaaaaataaatattatttttatccatgatcgatttgaccctttgcgttatgtctaacagaaaaaaaaaacgaaaacaaaggttatagtgtcatagatcacgttataatcataaatactaaaactaactctaagacgtttgaaaataaagtttattagtatattatattatttaccattaacttaatttatgatctatattaaccatactttaatctgtaaagtaaaattatattttaggtcatattttcattctttttctgtagtccaaacggacatgaaaattataaaaaagatgacaatatagactatatatcactatatattctttatcggttataaaaatatgtaccactaaattagatttacaatatcaacaagaaacatgtcatatctttgcgttttacatggcatttgagaaaacaattcaatgatatgggtaaaatcatcacataaatatgcgactatgtagggtgcactatattcggcccatatcagttcacaaatatgcacgactaaattagatttacaatgcaacaagtagcaggtcacatccggggccttgcatggcaattgagaattatgacaaatcatgataaaaattaacaatatagattatatgatcatataaatatgagataatccaagaaatgccattaacaagcgtccaaatcccaaaaatgccatcgacaagtgtgagttataagaaatgccatcatacaaacgactttgtcccaaaaataccatcgccgttagggttccatctattctttgccgttaagttctataggatgaacagtgtatttaatagcacaaaatggacgaaatcctaatggcaatggtatttttgggacaaaatcgtttatacgatggcatttcttggaactcacacttgtcgatggcatttctgggacttgaacgcttgtcaatggcatttcttagattatctctataaatattgttatcatgtggattccaatctatccagactatacggggataatctaaaatgccaattctatttaccaaatcatgtgtaaattctacattttgtagactacaccctaaataagaagtaaaataacagatggagtacacgtcatgttcttccccccttgatttctattaaatacgtatggtgtgtgggtattttgtacatactaagtttggttaattagggaacataaaccatactaaagttatatatgagaattcatgcattaaaaatacaatctcatacaaattattgataaaaacatgttcataataaagtaaaaaatattttaagaaatactcatccatacataaatattcataattaaaatacaagcaacattaaataaggtgctcgcgcatgtgtgcaggttaccttcctaattattatatactaaaagtccattaaattttctataaacgctctcaagccaccacatgtgactcctacaaacactcctaagtcaccacgtggcattctaataaattagaggaattcctaataattctcaaaaaatctaaccattgattttactttaaatacagtggacccactattttccaccattggatttaccttaataagaaaaagctaacaaaacgaaaaggcccacaagttacatgcaccagtgcacgtatgtatgccatacctcctcccctactactcttcatgaaaatatattttgtgataataaattccaaacaattatacgatctaaatcatatagccaatgttttaccacgttcatcattagattatttacaacaaaatttataattcaacacccaaacgctatatttaataagtaaaagaactaaaacacatttatatgaaaaatcatatagatactttaatgatctatttaacaacacatagcttttaatagaacaatatgcaacacataaagtcaatttataatgttataataataagcaatttaattagaaaatagatatttaacaagtatgttactttgggtcattattattttataaatatagaaaactcaaattggtaaaaccattggatctatctcaaaggaaacaaaacttctcccctcctcatgttgtatgtacatatgcatgtcttctggaaacaagatcagaatacatacatctattatatctttattgatccatatgtagatacatataacaaattgcgttaatgtgaaccaattaaaaggagtgctagcttgatggtacattattaagaataatagtttttcgagatttgtaaaaaagaagccccaaaacattcaatttaaaacaaaaaaaacaccttacttttaatttgaacttaatttgttagacattttttttgtaaacaaaataagtctaccttatttttaaattatgaagcagaaagtaataattaattaattatatggatgaattaaatattgcgtagtataaagataacaaataccaaagaaaacttatttaagaaatgccgacaaataaatttatgaaataaaacgtacttctgaagcttggcaagtgctacatgtttaatattcaatccttataagtttctcaaatgcagcttatgatatacatgcccgcgtgaatgcacgggttacattctagttcgttttaacaatcaagtaaataatttgaaaagaactaagcctcaacacgtggagagaaagagtgacatgatataaatgtttggatttggattaaattacttttagtggctttttggtggcacagtgggtaaattttgaagttgtactagattacttaaagaattagctatagaactcccggtaaaaaaattataacaatttgtttgaacaatcaagtactaatttgaaaagagcttagcctcaacatgcgacgagaaaaagcgacacgacagaaatgtttggatttggattaaattattcttagtggcttttggtggcacagtgggcagattttgaagttactatattaggaattagctatagatctttcgataaagaaattataactatatatatactataattctagtgtaactaaattgaaattgcatgtaattattagaaagatgtgcttagattagattgttgaatgtgctacacagctactggctcacaaggtctcgggttaattagatccttcctcctatcctcttgtcaaaatcagtatagttaagtggtggtatcaatctatctatttattatatatagggattattatattatttaaaatatcttaaaaagaagccaccatattttctacggagactagaaattcccacatctatgtctatacctaattaaaaaatacgtaaggctttgcttccgtaacctttttcgtctgtcattgtctctcagccggtccagttctgtttttctctccctccctggccacaatctctctccctcttgatctttttccctttttctctccctcttgaatcttcttccgtattttttacaaggattccgtatatttttatgagtccgatccactgactgcgtgcttcacgcgccttcagccgccactcaggccgaacctagtgccaccgccacgttgatctacctccccgtgcgtttcctcttcaaattaattgcaaataacgattccacactcatccctcatcattttcccatgattttccctttcaattcagcttttatgggccagatttaatcttcatttataatggtcgtcaatgatggttagccagtgagcttccgtgggcccttttttctcgagttctatggattcgcatcaatttttggggaaatagaaagaggagattgaatggatcaaaagccctcaaacaatttttggagatcaaaagagatttagccggatttgatgtgcaggatcggttcaagcatcataggggcatgggactcttattcagaggttaaagacgctactgaaacgcgagggtgtggcttggcagcgagaggaggccaatgtttcaatttattgctcaattcctaatagctattgtatcacttagaaaacgtctgtacccattgcaatgcatgggcattttttatagttaattaaagaagaagaaaatatttaatccattaaaccgtgatgatcaaaattataacagtgtagattgatcgatataattgtacatatagtaacatgagctaggagttgtatatgatattcaaatttattttaaaaatatatatagtagaaaatacaattgtatcttaaaacagaatttaagtatatcgaatctaattctattcttagcaatttgcgtaggacaatcccacctaggtgtttcaatatgaaaaccaagaacttaactcagcacttgaaaatagaaaaaacagttttgttatacatttgtcgacaaactatctcctaaaaagttgacagatgtaaacagtgtaatcgtagtgtaattatattgtaacttgcatgtaactttataaaaatcttgtgataacatgctattttcacgaagcggaggtcatgataccaaaccctcttacttgtgtgtgcgttttgatttttgcttcttcacttgcacagatcttaaagcaaatctaatggtttcaaaatcacatgaaagttacatatcaattacgttgtaattacatgtaataagttataatgtaattacattactattgtactatatttacatttgacaaatttccaagagaaatgtatagatagtccctagtaaaaaaaaattacagtgtactccctccggttccatagttcttgatgttttggacaatgacacagtcttcaactatatgtttgactttgtttttatactataatatatacaataaataaatgtgtatgtctacttttttatatagtactttgaaagataaatctatatatgttattccagatcgtttagttcactaaacatttttaaagttactgatacttaaagttacaaaagtttaatcttaaccttgtccaaaacatcatgaattacggagggagtactaaagtaccagggctctatctagttattgaggccttgtttagatcaaaaaattatggccaaaaacatcacatcaaatgtttggacatatatatgcgtggggcactaaatgtgggaaaaacaaaccaattgcacagtttgtatgtaaattgcgagacgaatcttttgagcctaattacaccatgatttgacaatgtgatgctacagtaaatatttgttaatgacggattaattaggcttaataaatttgtttagcagtttacaggcggaatctgtaatttgttttgttattagtctacgattaattaggcttcaaatatgtgctcatatactttaaaaactttacacgtacccaaagaactaaacacaccctgattgcctttttggatatgcgtaacaagtatgggtaaactacactaattgtcggactgccttacatcttccaattaatattggcattatatctcccttggtgttttagttcctgagaaatatttttcctcaaatgtggaccaacaaatttgaccgctagtaaagaaaccttcagtgttgctgcaaagtccttatgcgatatatgtcgatcgattatgatcactaattcacgaccaggtcagtgttcatgaaatacaaaattctcaaagtgtccagaactcactaataaattaggcttgaaattaaaaccttgcagttattctgccgggatgtgtactagtacgatatagacgggagattgagttgcccatggtttgcccctttatgaatgaagctgatcgacttcgaatcactgtcgctattgcatttcggcatatcatcctggggccaactataggaagaagtagaataaattaagacatgtcatttggagtcaagtagagcttagggtgtgtttagatctataggtgtaaagttttgacgtgtcacattagatattatatagggtatcgcatggggtgttggggcactaataaaaaaactaattatagaatccgatagtaaaccgtgagacgaatttattaagcctaattaaaccgtcattagcgtatgtttactgtacaattagttatttttttagcctatatttaatacttcatacaggtgctcaaacgttcgatgtgacagggtataaaattttagggtagaatctaaacacccccttactatttaatattattgccaatgtctatttcgagcaaagttggagatagggactcataaggaacacacgcgcctactgccttctctataattgacttgattttgctggacaatgacatgcatggctactcatttgaatagcaaattctaacggggccatctatatcattgtagggcttagttgcatcatattttggtatcatctttgctcggcaattagatctataactatatgggctctagagtctagactagtagggcatggctcgtcagtaccgtataattgtaacggtcaaacaaacactaaactagtaaattctcaacggggccatctatgtcactcatatttttaaatgtgtatataatatggaataaactgcactagtattatctggatgtcctactttcaactcaccttgctgntatatttccttgtatcatatccctggggcggaagaatggaacaaggcagcttcagtgggacttttttttccgcatgtatcagtgggttatgcccctctggcgacgtaatttggagtaaagctaaagaaaatgtccctcctacaatatatacaacttgaattctttaacttctgaggaagtggcacactaatacataattatctttgcagacctaccctgtttatttttacaaacagactataagaaaacctgcatgcaaaaacatttcagggttgtctagtaagacccgcatgtgaaaatcaatttttataaacaggtctctaaacatagccgctagtgtaaatacgtttatttttacaagcgactatattaagatgccgcatgcaggtatacgcctcgattttcacccgcgttagaaaatcacatctcaattttctctcaccctcagcttaaaagtcaatgtccatcatcctctcatctactcccatctcttctcctccacacatccactccctctctgtcccctatctcttttcctaccggtcggtgacgaccagcgttagcaagggagcagcgccagtgacaagagtgcatgcgcattcctcggctcctccttctcctctctctcctctctccctccctctcactcctatccgaccaactcgggcttaggctggacagagggttgaggcgtatgtaatactgttgtttgataacaataagtcaagttggagataccttggtctcagaatatggtttctttgtttgattcatgtgtaggtgacttgatgcctcgggagagtattgccggtgatggatcgggagtcgacttggggataaggcgacgtccgtgacggtcagatatcatgcgggatacttaagctagagttcaatgcacgtggttggtgaagattacatatggcatacgatggaggtattgtgtgcatatgggatgcggaatcgaatttggaaggagtccgaatttggaatgattggagtttgtaaagtttgtttcttgtacaggacggtttcctaggtggat

SEQ ID NO: 29799 - DNA, 7267 bp, Oryza sativa
tttcataataaatttgtcttgggttgaaaatgttactacttttctccacaaacttgagcaaagttaaagcagtttgactttgactaaagtcaaaacgtcttataacctaaaacgaggggagtatttgatcttgaatgctacaagtgctccaaaaccatcaaaaggtaaaatttcttcattccaggccatacagagcacggcacacaagtactgtacatttttcttctcctttcggtaaattgctacatggtagatggtaggtagatggaataacaaatcatccaaaaaaaatatagctccggcctagttgattgcatgaaaaaattggcgttgagatgccatggccttaattacttggatttaaacttgagtatttagaatcgtttgcatagaatgtggtaacctccagtactagaaaaacattttcgccggtcgccgtccgcctgtagcccaacgactgcaaagatcgccgatcttcgcaggcgggttggcggtccgcctgggaagataattttcccaaacggagtgtagctagacccgtctgcaaaaatagataacggccgcctgcaaaaaataacaaattaccgcctgcgaaggtaggttaaaaattttaaaatttgatacaataataatttgcctataaattagttttcaattatttaattgaaattgatgcaggaataatattagtaaataacaagcttttgatacttagaaatctacatatattgcataagtgaaaagtgttgacaaaatattacaatattttttttttacattctcacttgaaatacgctatctaattatattttggcatagcattgctccactccagaagatgcttgtattcgttacttgtagctagggcaccctctgggtcgaagaactctcctttcacatgacaacactcacagtggatgaagtggcaaagatcgcgctagatatttatgatgcatgtatcatcaaagcttgttcgatgttctattcttggcaactgcatgcattgaagaaacacaatatattagtatcatctatatgtgaagttgtctagtccatagtgtagaaacttgcatcctctgcgttaaccatgtacctcccattaaccctgaggaattcgcacgcgtaatacccatagaggacagtgcctttaggttgcttgtgacacttcatgatatatcgtagaagaaaatagttaaattttgcaattagtgaaacaattggaatacattaagtgagtggagtattatcggccaatatgtatgtactagcagcttctcccttgttcgaatctgttctccacccttgaacttgtagtagctgtacgcactatatggatttcgtatcgtttcgcattaaggaggagatttaattataatacattcatagtatacatgcaagtgtcagaatcacttactattgtaagattgttagaaattctctgtatgactggtgacgataatcgagagggtccaagattgtcacggttccgtgcttcgggtagatgattaaacagatgtaatgatcgctacatattaacgacaatgcagttagtcgcggctaaaataaggcatatatgtagaagagaaatgtactggacttacttaaaattataagaggccaggacgactctcttattttgaaagtgcaagaagactcgtccaatgtactgtgcaatagtaatcattttttgcttctgcaagcccaacttgtattcagctatctcttcgggagtcttgtccttcagctactctgaccctagtgataacctcacggtatgttgtgtttgacagatcctaattggatccaggaatccgataagttcttttttctccttagcatccatgtattgcatcctacaaaagaagtttaaagaagtttgttagtaataatcacatggttttgtattgtacatatttttcatgtaattaatgtaaactcatactcacaggcacccagcagcgacatagttgacgtccatcttttcccgacgatatatggcgtggagatcttcaaaatctagccagaagtaaccgttgccgccgaaagcatctatcggtgatcgaactgttatattacttaggcctttcttgctagtgtccatataccatttatgtaaccttctcatctcccatggaccgtcctcaagtgcaaaatccggtcatatttctttcccatgttcgtatttttccgggcaatcatcaattgccaagtttttttttcccggctagtgcagcggccttcttggggtcatcttctctgaggttggcatgttccttaccccttctaaagacggataccatgaacttctccttttgatcatctttggacttggaattgtggctcctaagcactctaggcacttcagacttctcagtggccttgtcattgaccgggggttcttgcacctcagggtctttcgcaggattagggacttcaaagatttctagatctgtaccgtcccattccaaacctggtataacttctatatctgtaccgactattgccagaagttgcacatctagttgtggcactgaaatctccatgggcacatcttgcactgaaatatccatgggcacctccggcactgaaatttccttagacacctccggcactgaaatctccataggtatcttgggttcttccaccttatcagtcacctgcctcttctgaggaggtctcggaggtctcggaggtttttgcacccccggttttggcaccaccagttttcactgggcgccggtgcccaatccaaagaatatgtcattcttgtgccaaagaattataatatcgaccgcatccccaagtacggatacaccatcaggagtagggatgtcgatgtcgtacgactcaaacccttggtggaccacttgcgactgcactttggcatactcatcgggtatgaactctccgttatatgttctgccagggatagcaatggctgtagcggcctcaagagttcttccaaagcatctaattggaacgtgcaacttacagggtgtattctccttcaggtcatcaaaggggtaatctggctcaggttctttggttgcggggtcaggcaaaataagatgcctaatgcagaaatccatcatttgcctttcaaattccttagccccttcatcccttaggctatccttgtaggcgtcacatttcttgtaggggtcatgtttgaacccttccttccaactgagcttggacgatacacctcgaaccctaccctctgtgctcaggagtacccagtgtcatatttagcacatctttctccctctttggcttaaaaaatcatgtcttctatgcactggataaagactctattttattggcaaccccttgcagctcgaggtcttcaaacgaaaattcgccttcttgcgtgatcttaggagttctagcttttacccattttttcgatatttcgctccattcctccattggtacctgaagccccgccttcctcatttcttcctcctcttttgcccactgcgccacctttggtgcataccccccggagcctaagcgatgaggaaatctgttcttcttggccaactcagcaaacttcttgctcttggcaattctttcggggaggtcttcaacttaacatagtcgttccactgtgtcggtgttatattggcatatgtctcaaatggtgtccggcccgtcttcacgaattttgtgttcaatgtgtttttccaaccacgccacgacttgtccattgtttgcagtgcacaattcctcaccgctgcttctgatccatccgggaactggaacattttcttcagctcttttcataggacttccttatctccatcctatacatgatcacagtccttgatcatgattgtgatcctttcccttactattatgacacactgtgaactgaatctcgcacgtgcagtcagaggggcgagaggctctccttttggaccaacatgggtcacaacatagaacccttcgtcgtttttattgacgcttctctcgcccttcttttcttcgcctgtgctaacttatcggttttctttgagccggtggacttagctgggacctcgtcgtcttttgacttatctttcttcttggctaccgttttgatctccgtggccccgtttcctatgagtaggtatcaaagtttcgaattagttcgggctaatagttatcactcaaatagttcagatcttaattgtacttatcccttaatcacggggaatgtagtccttgtcgcctttttcaccctcgtcctttttccgtcatttcgggcttggacaaggatcacttagcgaggagtactcatcatcctcgtcagctacgtcgttgtcggaaccattggacggcggcaccgttggtttcggagcaaccacaatagcaagggatagctccactgtcggatgtgaagactccacctcccctacagataagttatcttcatttcctttagtactatcggccatcgtttcgtacttctaacataaaaaataaactatataattaatatcgagcccacatgtcatattaacaaatttaaattcgcccacattgccatatattaacagagtaattaatatccgccgcaaactattttctctgtcatttcacacacttttttcccggatgtaggttttagtggaggatcactctcttcagtgccatcgaattccgactacatcttgtggtacttgtgatttgtgcgtaggaaccgtcggtgccgcatgtatacaagcttatttgaacccgggagaggggcggagcccaatgggccaggggttcttaggcaccgggcccaatttttatatttagcggttacaaccccccccccggcgcggaaaggcacgtggcgcacgcagagggagccgcagcagcgcacgcttgcgggacggcaccacgtgtcgcacgattttttccccaccaatttttcctattcttttctggttttttctttctgttttttcttttggttttttccttgtagtttttttttccttttttatacgtacgggacgtaaagtttctgtatgcgtatacaaagtttgtgtacgcgtatacaaactttatatatgtggccgatttttgtttccgcctttttttctagttttttctttttgtttttttcggtttttttgcttgcaggtcttttggttttttgttttttatatgtatgggatacaaagtttctatatgcatatacaaagtttgtgtacgtgtatacaaacgttgtatcccgtacgtatagaaaatttgtacatgtgtacaaactttatatatgtgatgtattttctatatttttgattttttaatatatatatatatgtataaagtttgtatacgtcgtatataaactttgtatacatatgcaaaagtttatatacgtgtgtatatttttgtaagtagtagtagtatagtatagtagtactactactatcaccacctagctgcgcgtgtgggccccactagcagcagcagcagctagtaatccaagctgcgtgcacgggcccgctagtagtagcaacgctagtaacagtagtagtaagtagtacactacagcagtagtagtaggaggagcggactggtcgcgcgctcgcgcattaggggtctcccattttcaccacatgagaacccctcagcccaaattcgtgcaccacccctagcccatgagcgagtcgtggaaggctaggcccatcaacacggtgcgtcgtctgggccaccggcgggggagagagcgacgcctcgtcaatccaaccgcgccagcgccagcgccgcacatctccccgactcccttttttttcgttttttttttctttctttttacaaacgcgatacgacgtctgtgtgagtctgttcgtctcctctcgccatcactcgccgggacaccgtggcgtctactcctgccgctcagcgccttgtcgagatcgtcccgtcctggccagcaaactgccgctgctgttggtcgccctagctagccgccggcagcaccgcagcactgcaggtctgcaacggcacggcggcagcgcccagcgggcagccggagtactactactacagcctacaggcaaccagcaacctgcagccgagcaagcaaactgcattgcacaagcagtcaagcacaagcaagagactaaagagtaaaagataggtacttatttttcttttaactagttccagagaatttcaatttatcatctattctagttctagtcttatttttaatcctattatttgatttctaacttgttaatagcaccttttcaattatccagatttaatgatttatataagctagggaagaactgaaagtttctctggaagggacaaggacatctgttgtcctgtagtcatcagtccatcaaggcatcaaccatcacttagtaaaattgtaagcatactgtgacaccatcataattgctaaataatttgtcttttgggggtgtacattattctattgtgcagtgcacttatagtctaacataataaaactatttaattgacaggttatagacaagtaccttgaggaaagcgctcgatagttccaataatgcagctgtacggaattcttgtccagaacaagtcgatgatggtagttgggagaacgagattgaatatgatccaggcttgagaaaagagattgatgattaccatcctagtaagagggatatagtcagaaggaaatacttgcagaaagggccttgccaaccatgtctattcacttttccggttacaaagatctcaggtaaagacagaaagtttattgaggaatggtttgatgaatttggaagttggcttgaatataacaaggcaaaagacagagaatgttgttttagagatcgcaataagaaagaggatgggtataaagcctttgtggttgatggttggaatggttggcatagaaaaagtaggctaaaagagcatgttagtggtgttggtagcttacataatcaagccatgaaaaattgtgatgctttgttgcaaagagcccaacacatcgatatacatatgcaagtgcaaagcgaagctactaaaaatgcatattttgttcgattaaatggatcaattaatgttgctaggaggttgttaagctaggtttgccttttcggggccatgatgaatcaagtgattcatacaacaaaggcaatttcttagagtttcgtgatttcttagcagagcatgatgttgctttaggcaaggtagtggagaaaaaaatgcatcgaagaattgtcttatgatagctcctgagattcaaaaggatattgttgactgctttgccaaagaaatattacattccatt

SEQ ID NO: 29800 - DNA, 1657 bp, Oryza sativa
cttgagtcaagtaagagcccaaggatatgatggggctagtaatatgcgaggtgaatataatgggctacaatcactagtcatgagagagtacttcagcttattatgtccattgcttcgcccaccaacttcagttagtagttgtggctattgtgagtatgatttctaccttgttaaatgtggttggtggttcagctaagagacaggacatggttagagacatcaatgatgagcatgtgagcaaagcattaggttgtgggctacttcaaagtggaaaagggttgaaccaagagcaatgtcttcaaaggccatgagatactcgttggagttctccttacaaaactctcaaaattttggtagatatgttcccaacaattgttgaagtgttagaatttgtagaagaggatgatagggatagagcaaacagagatcaagcggcgggtcttttagtatatttctagtcttttgactttgtcttttatttgcatctcatgttgactgtcctaataatcacaaacaccttgtcattagcactacaatggaaggatcaagatattgtgaatgcggttaaatgtgtgagatctacaagaggtcatttggatgaccttagaagacatggatgggaaaaattagagagtgatgtgtataacttctgtgacaaatatgatcttaccaaactggagatgggagaagtatacattaatccaaagaagccaaggcaaaaaacaggaattacaaacaagcatcattatgaagtggattgttttaataatgttattgattggttacttcaagagctagacaatcgctttaatgagacaacatctgaattgcttgtttgctactagtactactacttttatactactactagcagtattactacactgctactagtagtactactactatactactaccagtactactactataaaaaaatattttatatgtatatattttttatgtataaaaaatatacaaatatacacgtataacaaagtttatatatgacgtatacaaactttatatatgatacaaactttatatcattcgtattaaaaaatcaaaaaaaggagaaaaaacatcacgtatacaaattttatatacgcatgtacaaagtttatataatgtatacagagtttatatacgcatatacaaactttgtatatagagtttgtatacagagttcgtatataaactttgtatacgtacgttcatattaaaaaataaaaaaaaagagacgtcacgtatataaagtttgtatacactatatacatacatatataaagtttgtatacgtatatatataaaaaaccagaaaaaaaaacagaaaaaacaaacaaagaaaaaaccgaagaaaaccgaaaccacaaaaaccggcgaaaaaggaacgtgggcccccactgcgcgtggacgccgcgccccctcccctcatacgcgcgccacgcgtccatccgcacggggggaggggtgcatgatcagtcgctaattagcaatttcacctctttctcatctgttcgctattttctcctacctccgagagcaaaatggaacggcgcgcttgccccgcatccatgcccccaccgatgtcgattttttcccatccatctgccgtccgcggcagcaaaaccaccggtgagctccatcaccagcagcg

SEQ ID NO: 29801 - DNA, 9236 bp, Oryza sativa
agtttatataatgtatacagagtttatatacgcatatacaaactttgtatatagagtttgtatacagagttcgtatataaactttgtatacgtacgttcatattaaaaaataaaaaaaaagagacgtcacgtatataaagtttgtatacactatatacatacatatataaagtttgtatacgtatatatataaaaaaccagaaaaaaaaacagaaaaaacaaacaaagaaaaaaccgaagaaaaccgaaaccacaaaaaccggcgaaaaaggaacgtgggcccccactgcgcgtggccgccgcgccccctcccctcctacgcgcgccacgcgtccatccgcacggggggaggggtgcatgatcagtcgctaattagcaatttcacctctttctcatctgttcgctattttctcctccctccgagagcagaaatggaacggcgcgcttgccccgcatccatgcccccaccgatgtcgattttttcccatccatctgccgtccgcggcagcaaaaccaccggtgagctccatcaccagcagcgccgccgcattcaggagcgacggtgtcgtggcattccgcgtcccctatgccccctcgacggctcaaggaattactaacttgctctgtgaaaaaaaaatttcagcaaagtagaagatgtatgagaattatgaagtgtttctttgcactggtagaagttgaacctagaatttgatcataattttaatgtttgatctcgatgtgtgggaagttgtattgttggacagaggattatatattgtttgccactatcatgctatgagacttatgaacgtgtgtcctgtacacactttgttgatgccctactgctgtatggtgtagttattttgtaatgaacaattcaatctgccatgtttcttgtaatgaatttgtgagaaaagcacaagcttttgctagggactttaatctttaaatggaagattttaggctaacctgctgtcttatttttgtctgctgtgaacagagcatatatctgaatggagcttgaatattgcaatcttgtcttgcaatccagatcctctgcagtacggtacagtactgctcactgacacttggcttgaacctctattcttttctgaaagctatttaatgggacctgcactgatataacactaagtttgcatattgctaagctttccaagttcgtctgatatatagacccagctgcgtattgtgaaatgtagagaattgtgacagatgggctggttaaggacattggtgtctgcaatttctcagttaccaagctcaacaggctgttgcaatcagctaatattccaccggcagtatgccaggttgcggactgtcagatttaagttccaacatactgatttccagtgagcctcccaaaatagtgtcgaagtgatggttccatatgaataattttctggaaaatttgtctcagtacacctgaacttgcaaccatccatccggtactcatcaacccaaatgaacaatgcacagctagaaaaatgagatgacaatcaacggcctgagaccccatttcttttactacaaatcagatgacaaactacgtctgttgccttaacatagctaatttacatgtagaaaatcaacaacggcaagcatagtacatattatcaaataatttcatgagaaggaacacaactacatctattgttcttatgaaccaatttctaatgtcatcagttttctgtttggacaacttcttctcgaatgaaatttccatatctgaaagacggtgagccatttccagctctagcttcattccctcttctgcctttgtttttttttcaacataacaggtccactcagagcgcctccgacctggattggtacgttctagcaagtgccaaagctgctcgaatgccttttgtacttttggatgccactctggatctacccaaatcaaagtgtcgcattgctcatcctcctaacaaaaaaatagtactattatttagacatgcatgactaaattaacagaaaatctaagtatcaatgaactagtaaaaagtacaacaaaccaaacctcaggaaggcaaccaagaaatctccttccggtgtcagttccttcccatgcagtcctcctttttggtcacatgccatgtctgcacttcgaatttgtgccatgttcctccctgcaatactcatcatcgatgtataaaggaacattcaacaataggccaaacctgtcctgctatatcggaaacaaaaggattaaaccaaatagcgggacttacccacctgagctataacccatactagaaaatacgcgcgccgtttggcgtgcttaatatctaaaccgttggttactttgtgtatgtataaaacatgatttataaatgttggtttttagtatgtgagcatgaagaataagtttaacataggcttatatatatcggaaaatagttatatataaaaaaatatcaaataagatcgaaacattacataaccaaatatgaatacctctcttcttcttttttttaacgactcggacgagacagtgcgaagttcaaattgataaagtagaaaaaattacaaaatcacaaccctagtaggccataaccaggaaaaggaaaaaaaaagataccaccacccacacaccgacagcgccaaccgcaaacccaagagaaggctagcaccggaccagccaccgctaagcgtgaccgaccgccgctagaccaacaaaggagctacaactgggatcgcccagaaaccaacccctacaaccgacacaaagcactactctatccacatctaagggatctagggagagggagtgagagagaagaatggaaccgctcccccctaaggccctccgatgtgtccaacttgtataaactagggcgccgatacaagacgacgtgactctagagcaagcatgcaacaaaagtttaggtggttccggcaagggtgctacctagacagcgtctccagggagagtgtcgaggggtgaccctctctagcgggaggccgtgagaccccccctttgtgagttcggccaggggaccgggtgcaagtctgaagagcgcgttctcgtgcccatgtcggtgggaattgtgcttgaagggtcaactgtgaggaaaagagagagggggattatacaggttcgggccgctatggagcgtaataccctactcctgtgtgtatgatgatctttttgaggttacaaagagttcggatcctgggagcgcaaactagggctttactagcctctacccagaattccgttcatccaaccgtcctccccttgctcgcaagatgaggtcctccttttataggtaaaggggataccacatgcagcgtccctgccctccctgttcgggagaaggacccacatggcctacattaaaaagtgtcccatgccttgggccggaagcgatccgaacggccgcccctgggtggcccccaccgaagtcctttatctgacatgggggacatcccccgtcattccctaataaattcttggcgacttcatgggctcacacgcgtgggaggcggtgacctgcacgtcctttccttgcacacgatgggacggggcataccagcccccacgccgtctgacacggagtgagacgtgggtgcgctgccgcctgtcccatccatccatcgccgggtcacagaccggtcaaaagccggtcgcctggcgcacatccatcagtgggcggcgcacgtcctgccacgttgcattaaatgcgacggggcggttggagcactgcccataaatgcgcctggcaaacggcgctcctccccgctcaagcccccatgtggcggccacgtggcggccgagcgagggcctcggggcggtttagcccctcgggcccgaggggcgcgacaaggtaccccgagcccccgggaggcgaaacgggcggtcgctcttcggccgaccgcacgaccccccgaggggggctgggtccaccgcgcacgttgcggaggaaaggcttctcttcctcctagcctaggtaccccccgggcccatattatcgatagagagaaacaacaaacatcgccgccgctgtccgcgaggtctcaagaaccctgactgcgctttcacccactagagggggtgagacagcatgacaacgccctcaggagggagtgacgctcgactgccatcgttgctggctcggccaaggacgggctgggttttcacccgccatccaccgcctgcctatccactgttgacacaccgatgctccactgccatctgaacctccgccagcgtgtgggcaccactacaccggtgccccgtgccgggcagcctccgcatgccaccactggctgcgccatgtcacctcgttgtgctggtcgctgcaccggaatggcacactcctctcgatagctgcaaccactgttgccgccgactgaacctcctcgcatcgcgactaaccccgtcgccgctacccgcgcctcgccggcctacacagccaccagctgtgccgcacctccgcgcctcctcgcgccgtgggcacctcaccggtcgccgccgttgccgggtgctgctgccgctggctggccacccgctatcgccgtcgtcgccacgagcctcgcgctgccgttgccgccgtgacgagcgctcctaccgcgagctcgccccacccgatctggccgcagggtggccagatccgcctccggtgcgtcgaatctggcccgccgtcgccatccccgccgcgcggcgcagctcgcccctaccatcgccgtctccatccctgccgccaaccgccaccccaccagatccagccggagcggcaaggatctggtggtcaccgccgccgccgccctgggcggctcccctggccccgggagcgagaccctatcggcgaaacgaggagcccgccgccactgtccttgcggccgcgcggctttgccggcagccgctcaggtggcggcgaggcggaggaggaagatgagtgggagggggcagccggagctcgtcgcctcccgagctgcccaggggagggcgacgcgagaatttagatggagtggttttgatcagaatacctctcttcaaatatttaaaaactcgtattcaccatatttcacttagcttctgaaatttgtttttgctcgattgaaatctcgaaatttttttctagcagggtgataattgcaaaactacataagatctgattgaaaaaaaaaacagcacacgcttcagtcacttttcacctctaccatcatcagaactgcacatacgattcagttatttttaccgctcccgtcaaacttgcacgtaatctaaaaaagcccaaaaagttcgcacgttttggcgtctcccacatataccagccaaaaaaaaaaagaaaaagaaaaaagaaaattcccctctgacctgattctatctctcgagcgggctcggctcctcctcgtcggcgttcctccgcctccgccgtcttctccgccatctcctctctcgagctctctccctccccgatccgctccggcatctccggcctccgctccgttcggccggcgcgccagtgtcctgtgtgtcccccacatcttctgccgcaacttgcaaccctagccgcggatggcggcgcagccttcttcgtcggcgtcgacgggtaatgcaattcgtctcttctcgtagattgcccctagatggagaagatcttcctctcgttgattggattattagtgtttcggatggtttatgcttgtggttgctatgtgtgttctaggtatgaaccggattagctagttaaccgaagtgatttagtttgggttgtttgattcgtttcagtagttgtatatagagatctagccacgaaatatgttgtcacttgaggagtggagcacaccatcaatcccaactcaaaatagcttctccttttacctttaaatgaaaggagtgtggagatgctgtaccattcagtactgattcccgggatctttgattgtctctggctctgtgcaggcgataccaagtttgatgcgtcgcagtatgctttctttggcaacaacgcggtggaagaagttgagctaggtggattggaggatgatgatggtatcgatgctggttttgttggtcctggtgatgaagaatacccttctgcttatggaagggatatgtttgaggtaacatagatgacagttcatttaattttgatgtgacaaacttccatccattatttattactttcaatttaaaaaactttcacaagaaatcaatgtttctttatgacacagtgtgcccagtatgtaattttgtaattcccacagcactcatgactttggtagcaaacacccttttgtgttcagaacatgagagagaggtgggaggtgctcctaggggttattttgatcattcttttttacttcttgtttgttttcattgttgttcaatccaacgggaattaatagttagtctatcatggttcagtaagaggtagcagggtccacctgaacactacggatttatgttgaatgaagagtaaatagtaagcatcggtgttatggtagcttcagaggatgcacatagtccatgagactgtggactcatcatgcggaagccttggaccatgctgtgttgaccattgaaaggagagagggacattagttgaggacgggaagatggagagctaagcttagacattgttgtttcttgccattgttattgctggaactttcctttggtgctgtcactaccatgatttctgctcgcccttgcaattccttttctagagtaacttcagggtagatagcacctttgttaggcattgactgctgtagcatccagcagagagaagcagccaatcaacagaagggtaaatttgggatgcactaggaaagtggcaaatgggatgtgtagcgtagggggtgtttcgcaactatcccgatccgcactggttaactcggttgatcagtatttgttatttagtgtttgataaaacatgttttgaaattttgctttttggggtaaaaactggctaggaactgaatatatcaacaataccgaataacatgaacctggccttttggtgtcttgtgtactgcgacatgtttctgtctttgcatgcccggcttgataatcttcttggctcagttgcccagttggccaactttccaacaattagcggccacttgttttgactggccaatactggctacacaaccaacataagcacctaatattgcttgctcatgttcatcagtaagctgcttgagtgattgtcactgttttattatcctgcgtgtggttgtgtgcatgcatggattaattcttcttgtctcatctgttaactgtcagctatcattcttagtttgtaattatgttaaaaaagagttgctgtaaactttggtaaaatatggtatttaccaaagtagaactgaaaaaacttgtatctaccaatagcacaacaatgatctgtatttttgtaagtataatgtatttactaaacaaatactccctccttcccaaattgatcatcatataatggaattcaaaatttctcaaattgatcatcatataaccgtatggatacggatttcatcagaatacaattaatgcagcaggggagaatgtgtgtatgctaaggtgtaattggcatggtgttttaatcgatgcatgcattgtgggagattgatgtgatttaaattatccttggtcttagtgtataaacttatatgatgatcaatttgggaaggagggagtaataccatatttaccacacagaatttaacgaaaatattgtggtaaaaggtaggtgtcgatgttctgtttcatcggtttagtcgggtcaattcttcggttttcataaaattcggtttctcgataatagccgctgagaattttttttttacaaatataaaccaagccgaaaaaaccaaataaaatcggttcggtagttacggggaatggtttttaccgaagaatctcacattaaggcgacaggtgttcgtgttactcatgttgcccgttgcccgcacgcctgcaccacccatcttctcctgctcgcagctcgcaccactcttgtctactaaagaatcgacagatgggagagatttgccgtgagatttgtggctgtggcatgtgactgccttatcagcttatatcctccaatgtgatatggctgggccatgggatgcatggatgagtcttgcattgactaagctcacattatacttcaaatgagctcactttgagccaagctggattccgagctagagaactggctcatgctggactcgactcaacgtcgagtgaatttcgagcctaattcagataaggaaacaactacaaaaagtctcatgaagaagggtatcatgatgcccagctattctaagtatcaccttacaacgacttaatgcatccattgtcaaataaaaaggcagtattttattcgaacaggcgaatccaccataaacaatttaagaattcattacttccatctattggaattaacatcagatatactataactcaagacatatagacaagtgcctcggttcaatctcaacttgtacacctgagctgcagaagagcgctcgcaagccttgagcttttcttgcatcccatgacttgatcatcccggaacttatgtcaccaaataggaaaccaacagcatcctttctctgcactagtaatatgcccgtgcgcagcaatggacattgattcatgggcttatgggcccatataattggggatgggctcggagtgtagggagggtgctacgctcacgggagggaggcgtacagggcgtgctccgcgcggtggggtgcggaggagagcggacggatgactccattttttagtagagaaaaaatcaaggttaaaaattttgtgatgggtacgcagcagttcacccacctagtagctatccaagaatcactgcttcagcaccaactgctgttccgtacatgatatgcatgtcatacaacatatcggaactgcatcaaatcgatttagaattacaagaaaacagatgcaatacggcagcggcatgggactggaacaatacacacagatacagcaggcccaaatacccagagaccagaggtactgctgctgttctcaacacctatcgccaccactgcacctttcccctgccatcagctcatggtaaggacgatcacctgggggagaagaaattgaagcagatttgctatctctgatagcgaggtcgaaaatttggggaattggaggaggggaaacagcagcaaacttggcatgtaatggtgggggagaggactgggtgaagtaggaagggaacataata

SEQ ID NO: 29802 - DNA, 1883 bp, Oryza sativa
tgtgttactggtcaagctttctttggcccatgcccataataattgcctagtagacctgttatagaaaactgctggattttatgcacactgctactcttgaaaactttgtagagttcaattaattttattttagcggaaataatatttcaccaaaaaagttgccttgcaatctgaggcagcttgtaatttctctgctgcagagttgttcaagtccacttctcattatattagaggttgttttatctcactatctgtacttctgagcaaatttagctcaggaaatagtgcagtaattatctggatcatatccaggttatcttattgttatagttttcttcgcttagtgttgcggcctaaataacagattaagctgtgatgtgcttctgattaccttaaaagattgcagtatcacactatcacttatttatgttgcaaattaaggaatcagcttcagctgctcacaccaatcaagcttttgcttttgcaggatgaaggtggaggttcatttactggcgttgatgatcttgctggagcattctcaaaggtttgttttttttttaaagcatagctttttaaccacataatatacacaaatgtgatctaacagaaacatggtgtattttatttttttttttggtagaaattgcagaatgtagattatagataaataaagttgcatattactgttgtatacctatttgtatgcttgcattgtgttgttcttttttaactgtgaacttatttgttgatttctccactttcagttgaccagaagcatcaatgaaccaacacaatcgggaataattagtcgtgggggttcaatttctagacaaagtgagtgggtatttgatttattccatttttcaaggatatatgtaagattcgttacatctggccaatgggatgaacatatccattaattttccattgttagaatgtgaatttcaatacatttttacagtctttgttctcttgtaggtttagggcccctttgatttgtaggaaaaatgtaggaattttggaggatttcaatcctatggaaaaaaaatcctatgaagggctttgaaacaaaggattgaatcatatccaatcctttaaaattcctatggaatgggtaatcctatgtatattttggaggaaagttagcaagaggtctaacctcttggaaaatttcctctgagtctatctctctcatctgattcctgcgtttttcctctggtccaatcaaatggtcattcctgtgtttttcctgtgtttcacaatcctctgttttacaattgtattcctgccagaatcctctgttttttcattcctacgattcaaaggggcccttatatatggtttctgatttattaacattgtattctaatgttaatgaattcaatttgtgtaggttctactctggactgggcacaagattcatattggcctacacagcctatatttggagctgaaccagggctgaataatgaaagccggtggtctcaaccacctcatttagcccgctttgctgattctagactgcacagaacatcctcatcgccgcagcaagatgctcaatacaatcctaatgaacatattcttggagcaatgccatctctgttgcatagaacttcatcatacccacaacaagagcctcaatacagtcacacagaaccaattccggtacctaaatcatcattcattccgtaccctccatctggtgcagtatcccattcttcgccaggtcaaccacataacatgaacatgccatctcctcccacttcattccaaatgcctgtatctgcacaaaatgagttacaccatccccagtttcctcgtggtggtatgcctccaaggccacttggtcggagcatgggtcatttggaatcagcaggtttatc

SEQ ID NO: 29803 - DNA, 3427 bp, Oryza sativa
ggcaatgtaaagaccatgttaattggtgccgctataacactcttcccttttgccaacctcttcacctcatcggctgcagcatcatcggctacaggaacctgattcttgacatgccactcctgtcttggttttggtttcctcagtcgatggttgatttcctcttcaacctcctgaaaacgctccctgctcctcaatctctggaccctccttttctgattctccgtgaaaataccagaaggacaccattgattcttcctgatcacctcatcctcttggccacgatcttgattcatcggacccaatctttgacgaacagggagtcttgcctgtctcagccgattatccctattacgtgatcggtttgagctctcgatgatatcactgcatccaaggcagttttcgatagatggcaacctcatcccttcattccagcagaatctgaagaactcgcaatcccaatgaggatcaaaaccatcgtcgtattcttcataatgcctctcctcctgcttatcatacttcctttgatacttgttgataatcttagccgaatttacttgaaaaccctttgcacgggccctatcggctgcttgaccaactgtatgcaccatattaacaggaaaaggattcccatcgaccttcatcggcttcttggaatcatcaaacctaatctttcccccttcaatggcaacctgtatttgctgtctaaaaaccttacaatcattagtagaatgagacccagaattatgccatttgcaatatctcttcttgcctaattcctcagcagataggatcatatgaccagcaggaaactgaatctgcttttctcggagtagcaaatcaaaaatcttgtcagctttcatgatatcaaagtcatacttttcctcttttccaggactttttacccattggcatggtatgacctttttgctcctcacctattcagctgcaactatctcagaatcatcttcttcgtcatccgacccatatatatatggacaaacgtgattaaccttcttagagcttttcctgacttccgccgacctatgctcatgcaaggtcacctactgtatcagatgcgataagctatcgaagtcttcggacgagaatttctccctgattgaggaatcataccctggaaggccaaatcggctaactgagcatcggtcaaactcaagctaaagcacttgttcctcatctctctgaacctctgaatatacttgtgcacgggttcatcatgccactgcttaatcgctgtcaagtcagacaacttcatctcatgaaccccactgtagaagtagctgtggaattgcttttccaaatcggcccagctgttgattgacccatatgggaaagaggaaaaccaagtaaaagctgatccagatagagataaccgaaacaacctaactttcagagtgtctatagccgatgcttcaccacactgagcaaggaatcggctgatgtgctcataagttgacacgccctcttgccctaaaaatttggagaaatttggaaccttaaactgattgggaagaggaactctttcaaaccactcagggtaaggttgccgatacaaacttccagtttcttttggtttgagtccaaattgttcctcattacatcagcaatcacatcggcccatggtcgttgctgagctgctcgttgcggctgttgctgcatgggctcgaattgaccaaactgagatgcgaactgggctgagccaatccccctggctgatattgggcttgtggggaaggaggctgatattgatagttcaagttacccccttgataattatggagattcggctggatgttgcgcaccaagtgctcaggaaccatctgaggcatcactatgccgtccggctgtgcatggtgaaccaaatgttctaggacgacttggtttacaaattgctgcgcaagttgcccaccaggtggtgcaaacccggccgatgcatttgccgaccccgggtgctgaattggctgaatgatctgctgtctcaccagagtctgttggatcggctgaagctgctgccttggtggcgtttgctgaattggttgcagaggctgctgccttggtggtgtttgctgagctggttgtacgacctgttgttggattggctgtacaactggctggattggtggtgtctgctgaatcggctgctgctgcactggatcaacaataggtggaggtggcaaaaacatggcagcaacttgatcttgggtcggctgattcgcaatctgcccaataggctatggatgctccctcattaacaaccgaaggttcattggctggcctggcgccatagctgatgtaccaggcaggggagttgatgctggcgccgtcggctgaattgtgggtgcaacggagcgaaccgcttgaacagatggctgaacatcggtgatcaaagatcgataattcgggaagacacctccttgcaagtaaactgggcctgtagcctgatgctcgactatcgaaccatcggctattgtcttcatcatgtttgacaatgtattgactaataccccggactgattgatcagagcatgatgcacagcgtaatcaacccgatcttggaagttattgaaaaaatcttgtgctagctcgttactctgattaagatttcctccttgcggcccttgagcaccaccaccttgagctccatgcactctatcaccttgtactccatggaccccttgagggttgtcgccttgatttcctagagaaccatcagtagcacctttgttgctcggctgagccgagccttctggagcttttttcacctctccatatttagaagaaccggtcccaagattatcagcaaccaattttattttatacttctgaacaagtgtccccttgcgggtttgcatgaacgagttcaggaactgatctcgtgcttgctgcagcgtcgcttcaaactcctgcttctgctcaggcgtgaatttctctggatcgattggcatgacgttgtcatcaatgatgtcagttaatcccggcttcgacgccttgcctttaacggaacctgggcttgatggtggtggtggttgtttctaagccatgaggaagaactgacgtctgacttctaatcaggtcccacagggcgtgccaaaagcgtgttgacagaaaacacatggcctgggagatctgcttaactccagtgcaggtccaaagctcgccttcggatgtattagcatgccagttgatttgatcctataatcaacaagaaatagaaacaaagaaaccgtagttaaatctataaatgatagccgatcggctagatgccgatgacatatcatttatctatgggccgatgtcatctgtgtatcgatcggcagtcacgaataagtaaagaagaactaatctactcgatcggctgtagatataaacgatatatactcctcatatcgatatatacttaaataaagtg

SEQ ID NO: 29804 - DNA, 13945 bp, Oryza sativa
catcatttgatcccctctttgggctgcttacagagtattgcatgagtaaattcgatagtgtgattcatgcattgcaaacacaacctgctgtggcagcagttataagcagggaaatgccagttgaattgttgcgtgccagccttcctcacacaaatgagtatcagcgaaaacagttgctcagtttttctcagcgcacggtgcctgttaacaaccatagttctcatgggtccaataatggacctatgacatcagaatctatcccaagttcagaaagccggaaaatataagttaaatcatagtgtttttgcttctttgggtaatcagtatacttgatacaatggctctttaagatggagactctttccccaatttcctagtaaagaaaagtctatatgaatccaggaaacaagatcgagagggttggagcatcgataaacagcggtaatataaggcaccgagtttactatcgtcgcgacatgtctggtttattatgtactgtagggatgcagtctgttttgcatgcattatgcagatggatgtgtttttgttactgggaagtttcttcctgagttttgttgctcatgaaacctgcctggtatctatctctggctgtagaaggtgcttcttgaagatgctgtttgattgttcttcaagacaagtgtcctggaatcatcaaggtggaatttcaatcaggccgcctttttttcccattttgttttgttcaagggttgaaatgtaactgtcgatcatgccctcatattgaaaaaaatcctagctgtactgaatgttgagcattggtttatggtactatgttttgttattattatttattaatttgtctcttttctgacttctttttttctattctagcggaaggtataattcgggattttagctgagtagagaatgacaatgtagtagtagaaacttgggtggctgtaatgatgtttgcaagtttaaatgcaacaagttagaagtgaccacctgaccatcagatggctcatgtcttggggtggtatttttggttgaaggttgtgttaagcgtggcattttctggcgccaattgttaatatggtgtagaagtattttgctgatgagttcaaaaagggaaaaggaaaaaatggtctactacatttcaattcatagaatgccttataaattcaactcgtcggatatatagctgccacttgatgtcgacaattcttgcctcttactgcatcttatatgcggtgctatacccgtatatgacatatcctagtaatacgatatctggataggcgtcaattcagcttttgtccagcttcgtagcgctaggatgtactaggatgtgtcacatcacgtagtaggtttgtttttatgagatggagggagtacttgctttccctcttctcaactctgcttatctacctatgggtacatggctctgatatgcttccatcattcatctccttccaccgtctatttcctagtgagtgcacttgtatgattatagatcttattattgtgtgttttggtttaaggtgcacgactggtaggacaagcaagtttaaatagcgagtgcctatgggtctctaggatcagtagctaggattaggccattcccaacccaaaacactagatataattttcatacactccacatcatcaataaattagtactagacactactctttcaatgcaaacactattattccatacttaaatttaatgctacttatctcacatgatgtcttggatgttgtgcagaaaccatgtctcatgcaagacatggttttcttctttttcctcatttattcacttgtcatatcatttttcatcataggtgacagtttatttaatgttatagacaccatcctagtcattgagttgggaatggccttaggggatcattcttttgcttggacatagatcatactcccttcgtcctaatgtatagcaaagactggacgagacatatcatagtacgaatttggagtcctctgtccagatttattgtactaggatatattctcacaaatcctagatttgttatattttgatacggagtgagtaagagcatcaccaatttaggaattcctaaacagaatttagggtcttaaaatatcttctccgacagattagaaaaacatgttaccatataatataagaagtgggaccaccaacaaaactaccgatgtttcctctccttgaataatgacccgaccaataggacccacatgttgttccctctttctttcctcttctcttcctcctctcgttcttctacctctcacgcagggccagaactagtgcacagcgagacaagttggcatcggtggcaggctccagcaagggtggctggaggagggtgcgagaggatcctggtggccggcagcacgaatcgagtctcagcggaggtactaatcaaggttgtgaatgactagttgtggagagctctaggtgtgacttggggcttgacggaggggagaatcaagcatgcgtgtactagctcgggggccagccgtgacgtgaatcgagtcgacgtcgggtgagcttgcgacaacagagacatttcagctgtgtgcgcgaattgcttgtgattggtagattggtaggcggtgatattccctacatgtggagaacgagaatagcggagaaggtatttctaattttttgggatgttgattggagatctgttggatctattttttgaaataaaaaactacgaaattttgagattgggaataggattgggcatgctctaactattaattattagtacacaggggatggagacaccacgcggatatcaaatcagggtatattgcacgggttatcagcagtatttctcatagtagaatctttcgctgacaactaatctagataatgttggtgcaggtttatctagtgacatggtgaagaatcatgtcaagaatgtggtgactaacccaacgtcgtcagtcgataacattccagcgccactgtgcgacctcccgtagacagagcgagaggaaattgtcaatgtaaatacccgattacttatcctctcttgatcttaactcattttgtaggagtagtgattctaatactttcaagaatcgcccttaacggatgtgattgggggcattgatcgaccactaggaatctgcctcgctccatgaggacgttgaggcacatccccactcagccattgccctcgcagcagtgaccgcaatatcctcaggcgttggctctagtggtgcaataggagtcaaaaggacactttggaccaaattcccagagccaaaggagcagggatgctcaggagggttagtgtctccgtggtaagtaaaacatcaacactactaggttctcttatggaatttgtcttagcgattgatgatttattaattggcagacttcttctgccaagaaagcctcctcgggcgaccgcggctagacctttgcttctgtcaaagcaaaaaagattctagtaagttgacctcttactttggttatcttcttgtttgattccttagaatctagttcgtcgagtttgattgatgtgtcttatagtaaagttgactctgccgttgtcggcgcaaagctcttagcctacctacacccaagctcttctccccaaacaaacaattgatggatcttgtgcacaatagttgcacctgaagctagagatggaggaattttggaggcaggtgggactaagggaggggttctcactttgaaggtgcggcaaaactagttgaggcattggggtcaaggattttcgtgggaaaaggggcgcagtatgcggcacaactaacatagctgaagtctatgtcagtatatggcatgggtatcacatgggtctcaatgggcaagaatagaagttggtagcaccgagtgaactgggctttatacttttggagtgggggagggggttgtttgctgtaatgtccaatagggcttgtgctctaaggatacatttagactaaatctaatggttgacataataattatgactaaatctaatggttgacttaacctagaggggatattgaataaggtaattagaaggggattatgagcgtcttgttcttgatctgctagatctagatccagaactcaaaggacatgcaagggtgaattcatcgttggggcttcagccccagctcccctcgatgaaccccaggtgcccctagctcctcagaggtagtagaggaaagggtgtgtagtagcagtagcaaccagaggaggaagactattatctgttggttgggttgtgacaatcctgcgtaataggtgtgttgacagaaaacacatggcctgggagatctgcttaactccagtgcaggtcgaaagctcgccttcggatgtattagcgtgccagttgatttgatcctgtaatcaacaagaaatagaagcaaagaaaccgtggttaaatctataaatgatagccgatcggctagatgccgatgacatatcacttatctttgggccgatgtcatctgtgtatcgatcggcagtcatgaataagtaaagaagaactaaatctactcgaccggctgtagatataaatgatatatactcctcatatcgatatatacttaaatcaagtgattgggatagatcggttatcatgccgagacagtataaatcacttagatcgaaacatatatcaataacaggactatatatgtttatagcatagccgatcagatagatctagcatgtatcggctaatactctgatactactccatatcaggatattaaagcaagaataatatatcaaacaaaggcctaacatgtttagatacggcaatatcttgatataaagggcagatttaacatatcagtatagcatatagaacaaatatagttaaatcagatacgatcggctgaaactccgatgctattctaatcggcaactagaaggcaggctagatatcgatattctaagcacgacttaatagatcaaactcaactgatatagtattaagtatgaaaagaagagtgatatctagacaatcaagctgctagaagtttcatagaatggtagatatcttatataatctagaccaacatcaagatctaacctaatcggctgccttctgcattcagatattggccgatagtagattagatgacgatgttgctagagattatgtaagatatatgataactcgacgaattatataaacaagattagagtgtcataaagatggaaacactaatcctaagaacgcaattcgtcataacgaattttacctcttgttgaagatcgaaatcgatgcagctcaacccgaaaacatgaactcgtcaaaacaaaactaaagcaaaaagggtggcgatgtgccaagattgtattgaacgtgtgtgttcaaaaattacataaagctcggggtctatttatacccgagaattacaagatatgcccataccggacacgaccattatctctaacaaactctaagatactataagtctttgcggcagacttttgcccacatttatctataaggaatttacataagatatcctaattaatagatacaattgccttcccaggactctatccgtgcgtggcaatcatcttgaaatacactaacttgaacccgatgtcgcatacaagttgtattgtcggaatcggctatatcggcttatttagcccgactcagacccagccgatcctaaccgtagccgatctggattccagccgattcctgctctgcttccgaactcgatctccgcctccaacttcgctttgatcaagtcctctttcccgacacagatgttaccaaatttggttgttaacacatgccccccaagtccgggatattcgataatgttccggatttgccgtatgccgactccgagcgagttttgcactccgccgcttttgaccgttattccagcgctttaaatactaaccgttacccccgagaaatctcacaccgtgacttccgttttcaccgctcaagcgaaaccttttctctctcttctccggcgattcctccggtgcaaaggtgattcctaggcgacctcctcttcgacgagatctccgcccgcggccatgtcgtcctccgccagcccatctggtgcaccaacagccgagtacgctgaggtaagttctcattggctaaatccccttctttagcagcagatcgatcttctcttatctcatattgcttttcctcttttggttgcttcaaatttgtagcatctttctcaccaagtcgcaattcccagtctgacgcatgaaaattactactttcttggcccaatcggcaatcctgaccccaccgagttcattgttggtgaaaccaatagaatcccctttagactaaccaacccagatctaggtcactggaagaatactttcaaatcttggccatctctagagaaagttctaccagaaaagagctggaccacatggttcaaacgtgtgttagccagcaagagggttcactgggatgaaattggaatcggccaagcacttgaccttactatagcaaactcagccaaggatgaacccctaatggcagctgcttcttacttctggtcaaacactactaatgccttcctgttcaatcaagggcctatgactccaaccctcatagatatcagtatgatcacaggtctggatgtcacctcatcagccaaccctatgagtttgaacacaaagaaccaatatgacttcaaaaccaaaagcgtaggaggttggtcaggctatgtggcagcatacatgggccagggttcggtcactcctcgagaacatgtggcctttctattaatgtggctagaaaaatttcttttctgtggatcaagttgcggccccacaaccaactggcaatttctggctgaagctctagaaacaaagagacaattccccttgggcaaaattctcctcggctatctataccatatgttgagcaatgcatcggctaagatagcagttggctcagtagttggagcaggtggaccctggtggctgctacaaacctggttaaacctgatagtcatgaaggttgtcaatcggccatccgtactagaagccgagttcccaagactagagccgattgtaggggatgatggagaagagcgtactcatcggagatgcacatcatacggagaatacgcttctacaccaactgatgccggggcaaaactatcggctgaactgctcaaggattggttttgtagcttctatgaaggctttcaaaaagatgctagaatctggttcctttatgaagactctgcacaacttgagcacccagtggatttcagattcgaagacatcaaccatgaagtataccaatcatccagggaaatcttctcggctgcaatcagtccatgcatccttcctgttggcattcatcaaggaagaaacatccaagcttcctatgaattctatcatccaatgagctcagctagacaactcggaatgggccaactcccaatcggcttattctttgctgacaagatccaatgccgaggagggatttcatcaaccctaatgatcgattggctacttagccttcaaggaccccctctgggcagtattgacaacatagaactggcaacattcagaagcaaaagctttgacaggtggtggggtaaatggaaactgcatttattccatcaaccagcttcaatgtatatgacatacctctttccagatgttgtccctcaagtaagtcttcaactttgctcaactctagttaaataactgttcagccaattaatctcaactaatcgtccttttgatttgcagacaacagagtcttcccctcctcatcaaagcaacagtggcaaagacatccgatatgccccaggtttaattcctaacggaggtaggctatctcctccagttattggctatgacgcccccaggacatcagctcttcttcaagggctcgtcaaagaaccagccgatgccggcaaaaagaggaaaaccagatcgtcggctgtaagcatcgtagccctaattaagaagaagaagaagacaaagaaaaccaagccagctaatgatctgcctaccctagatccatccgtcaaacaagctttggatgaagaggtaattgaagatgaggttgatcaggccgcagccgaggtaagtgatactgaaagaacaccatcggcttcgcctaagcaaacctctccgactccttctgctccggttcacttctcaagggtaagtgtttcttgttaatccctttcgttattattttgtcttatagccgatcattcccaagtcttataattgcagaaaaagaagactgcggtgaagaagaaatcggctgcaacaacatctaaaccaggtccactagtaagatagttttaacttttcattagttaattttttacccgattctatctggcacttgtttcctttctgccttcacctcctcctcctcctcctgttcaacaatcatcaagtgatcagaccccttcagcggcgggaagtcatcacgtcgaggaagaagaacaaccagctgctcctgctatcccagtaagtttcttttatcataacaagcattcaaatcggctataatcgtttaacctctaatctgcttctaaattgtcactgcaggtgttagctgatcttttctcttttgacatcagagactatcttgatgaaggagaagaagataccacaagcaaagccttggctcctttatctgatgatgtgaagaaaactctaggaagcattttagatcggctagaagcatcatcgctagacagcttggtggttgattgtggctcaattagggctcggctacacgagattcaggctttaatcccagatgagttagccgatatccttactccagccgtttaccttgagcaacaccaattcaaactggagaaagccaagttaagactagccgaacggcgagaacgtaaggacattgaggccactatccaagctagccgacaacttgtacatgaagagaagtccaagcttgatcaattatctgaaggcccaatcaagtctaacattgatcggcttgaggctcgcaagattgaactcttagcacaacttgaagaatgtaacgctgagctagatatggaacacaagaaactagccgatctccccaaattcattgaagaacagaaagtaagactcaaatcggctatcaagcatgttgttgagctgactaagtccctaaaagttatccctggaaccgatgctcaagatgcccaagccatagaagaagtagagtagattaggcaaaaggctatatcggctatccagcgatacttatctcaataatctttgtgtaataggacttagaattgaaatttgctaaaaaattttgcactgtatttaccgcattttgatatatatatgccccccctagttttacaatgtgaagagtattgataaaattataaaacaactaagggcgatataacaatatcggccattgtacatcggcaaaccacaaccgattacaccatgaaaaacaactaagggcgatataacaatattggccattgtacatcggcaaaccacaaccgattacaccatgaaaaacaactaagggcgacataacaatatcggccattgtacatcggcaaatcacaaccgattacaccatgaaaaacaactaagggcgatataacaatattggccattgtatatcggcaaaccacaaccgattacaccatgaaaaacaactaagggcgacataacaatatcggccattgtacatcggcaaaccacaaccgattacaccatgaaaaacaactaagggcgatataacaatattggccattgtacatcggcaaaccacaaccgattacaccatgaaaaacaactaagggcgacataacaatatcggccattgtacatcggcaaaccacaaccgattacaccatgaaaaacaactaagggcgatataacaatattggccattgtacatcggcaaaccacaaccgattacaccatgaaaaacaactaagggcgacataacaatgtcggccattgtacatcggcaaaccacaaccgattacaccatgaaaaacaactaaggacgatacaacagtatcggccatcttaaggtgatgtaaacacatcggctgtcatgcatcggcaatagtagccgatcatgcgttaacccaaacacttgggtaatatttcttcaaatatttgccattgagcgctcgctcataaacttcaccgtcatgtccttgcaacatatatgctcccttagacacaaccttatgaatttggaacggtccttcccaattcggcgaccacttgccgaatttactatcacgagtaccaatcggcaaaatcagcttccatacaagttctccttccgaaaaatctttaggtaccactttcttattataatgccgagcaacacgttccttatccctagtaaccttcgcaagggctcgcaatcgtgactgaaccaaatcctccctttcgtcagccataagattgtaatactcattggctgttaaatcgttttgcaactccgtttgtcgagagccgattctaacttcccatggcaaaacagcctcatgaccataaacaagtttgtaagggggaacttgaatctatccatgataagccatcctataagaccataatgcttcggccaatcgagtatgccattgccgaggataatcagaaattttccgctcgatcaacttaataaaactcttattagacgcctcggcttgcccattagcttgtgcataataaggtgaagaattcaacaacttgatacccactctatcagcaaactgaacaaactcatcggacacgaagattgaaccttgatctgtagtaatagtttgaggaagaccaaatcggtagattatgtgtttctgaacaaattgaatagcatccccagaatcaactttcttcaaaggaatcgcctctacccacttggtgaaataatcagttgccaccaatataaatttatgccctttactcgatgttgggtttatcattccgatcatatcaattccccaacctctgaacggccacggtttaataatatggttcatagctgacgccggtgctcgctgaattgctccgaacttctgacaatcttgacatcccttgcaatatctgaaacaatcctctagcattgtcggccaaaagtaccctgcacgccgaagcaaccacttcatcttgtgagccgattgatgagtaccatagatcccttcgtgaacttcgccgattgcaaccttagcctgatcggcactcaagcacttaagtaataccccatcaatcgtccgataataaagctcatcattcaatagtgtatactttaatgccttatatcttaatttcctagaagccgattgagatggattacttaaatactgatgcacatcatacctccaatcatcggctgacactgctgcaatttcaactttaacatctttgatcatcggcttataccccgatgccccttgggccaaatcattagcttcaagatattgttctcgagatacatgcttcaaagtaaccagtcgaaaccctttcattagttccaggcacttctcattataaaccatcaatgtatcgttcttgcattcatattcccctgccaattggctgattactagcaaggaatcccccatgatttcaatggtatcggctacaacttccttgagtaattgcaaccccttgagcactgcttcatactcagcctgattattggtcgcatatggtttaatagtataagcaaactcgaaacatgcccccctaggggaaattataactaagccgatgccacaaccatgagtgcataccgatccatcaaagaataaagtccatggtactatctcaaccgagccgattgaatcatcacgatgttctacaataaaatcggctatagcttgtcccttaatcgcttttggcgattcataccgaagatcaaactcagtcaaggaaaatatccactttccaactcgtccctttaatattggagccgacagcatgtacctgactacatcggctttgcatataacggtgcactcgttagataatagataatgccttaacctcgtacacgaaaaatacagacacaagcataacttctccacaggagaatatggagtctcagcatccaagagccgtcgagtgagataaaacacaactcgcaccttcccttccaattcttgaatcaaaactgagccgattgacttctcaccagccgataaatataacctaaacggtattcctttctgtggaggaatcaatacaggaagagagctgagatactccttgatattatccaaagccttttgctgctctgccccccaagtgaattgctgatcggcttttaatctcaataaggttgtaaaaggttccaaccttccggacaaattagaaataaaccttctcacaaaatttatcttgtcgatcatctcctatagttccgtcttattttccgagggctgaattttcttgatcgcattaacgctcctttgggtcacctcgatcccactttcatgaacaataaatcccaaaaactggccagccgacacaccaaaagcacattttgtcggattcatcttcaagccatattttctggttctctcaaaaaccttccttaaatcggctatgtggtcctctacttctttagatttaacaaccacatcgtcaatatagacttcaaccaaccagctgattaaatcatgatatatataattcatggccctttgatatgttgctccagcactcttcaagccgaaagtcatgacgacccattcaaacaagccgattgcaccgggacatctaaaagctgtcttatggatatcttcctcagccataaagatctgattatatcctgcgttcccatccataaaactcaaaattttgttccctgatgcgacatcaaccagctgatcggctactggcattggatattcgtcctttggtgtagctttatttagatctcgaaaatcaatgcataccctgaccttgccattctttttaataactggaactatgctagagacccattcggcatatcggcagggacgaatgaaaccagcatcatacaatcgtttaatctcggctttaacaggctcgagcatatcggctttacatctcctcggaggttgctggcgtggtctaacccctggcttgataggtagccgatgttcaacaatcgatcggctgagttcgggcatctcatagtattcccaagcgaagcaatctctaaactcttttaagagctctatcagcttggttctaaactctggagacaaatttttgctaataaatgtcggccttggccgatcgcctggacctatgtctatttcttccaaatcatcggccgacataaaaccctgaccttgcttgtcatcgagatcatctactgtatccttagcatagacattcgaaccctccacgacgctctcaaagtaatagcttgggttctccatcttcgattggctgtatatcagaatcggacacttttagaacatctccatcccagacttttccagataaacaatcaaggccatccatctcccaaagggctaaatcggcactagcaacattaactgacctgtcggctggcacaatctctatcttgtcgccttgccattgaatcaagcattgatgcatagtcgaagggatgcaacagttggcgtgaatccaatcccttccaagcaacaagctgtacgaacccttcccatcgatgacaaaaaacgtggtaggaatagtcttgctgctgactgtcagctccacatttagaacactcttggtctctgatggattaccaccaaagtctttgagcaccatatttgttttgatgagatcctcggcattcctacccagctttctgaatgtggcataaggcatcaaattcaccgcggccccaccatcgaccatcatcttagacatcggcttcccattgacgtagccatttatatacaatggcttaagatgccgattctctgtcccctcgggtttctcgaaaactgcatgttttggtgacaggaccca

SEQ ID NO: 29805 - DNA, 673 bp, Oryza sativa
ctgcagaaattgaagaagctatcaccacagattatgaatatcagctggttttccaaaacaagatcacaaggatttttatcagcaaatattacaaccaaagttatgaatacttcaagggagcagggcgcataattaaaccggattttggaaatgaatgctccaagaaaagttactacagaagcctggctcagtgatttcagaaatcagagccgtcagagattgacacggtgcaatcagcacccacgataatcaacgaagataatgaataaagatcttgtcatccccgacaaagatcactattcaagataaggaatctacactattccagataagataagtccatagtcaaaaagcgatattatgacatctttattaaaggtctaaagcgttatcaccaaagattctctccatgaagtctaaaggggtatcataaactctttaaggtcaagaagagatatcatgaagattctctaccgagcgctatataaggggctcaccatcacatttcacaggcatcgcatttcacacacaacacatctcactcaaccattcctctcacctctccaccagccatcacactccactccactccaactaagtgttagtactatagtagaacctaaataaaagactcatgagagtctaagtgtgagagtctatgtaagagtccttg

SEQ ID NO: 29806 - DNA, 5339 bp, Oryza sativa
gtgaaccgccgtgaggtggcctcacgctggctgggcgagcaactcgcgaaacgcgaggaggccattgccggcgtgaggctcggcatctggagagtgcccgcgctgagtgccggcgatggcagtgagggcttctgagctggaggcctgggagaaggacctggaggcgggcgtgcagcccggcggcgcagatttggtgagccagcttaccacggctcagagcactatcgccgacctagagcgcttggtgcaagaccaggctggggagattgcggccctccgccttacgaacgagatcggacccgggcagttctccgatgccgtcgatcggctggagcgcgcgaggcgccgagtcggcatctccgtgcgccgggatagtaagctcccgcccacacagccggcactcgcgctccggctggacaggctggcggcggatctggagaggctggaggaggaggtcggcgagatcgtgaaatcgtcgtcggcttccttggcgcgggtcgcggtggaactggtcctcgcgagccaccaagcctgcgaccctgacttcgtcccatggcgcgcactcgaggatttccccccggggaccgaggcaatggctcgggagcaagtccgggaggtggccgacgcgatcgtctctaacttcgaggggtcggccccccggttcaccttcgggcttgcctcggacgaggagagcgggagcggagacgatggtgacgacgtcggtggcgaggactgggacgacgtcgttagcggcgccggcctcgggggcctgggcactccgtgattatccgcacttttaatttccttttgttgtgtgcctgcagcggacacttgtctttaggctatcgtgcggtcttgtctgtaaataaagcttccttttcgcactttctacccctttgctttctccattgaatgcatacggcacggaaagaaaaaacaagagcaaaagtatataattgacctccctgtgatcgaaatgccgttcttaccccatccttcccccccctcgggctcgttctcgcgaaaaggtaaatccgcgctcggtccgtggtacctaagtggtgaggggccagaccgtcgccccgagggagcgcatcctctctatcgcgcgtattttcccgggattagcttctatgcctcgtgaggagaccagaaaactgagtttgcccgccggcacaccgaacacacacttgtcggggtttagtttcacgcgtgtggacctaagactgtcgaaagtctcggccaaatcctgcaacaacatgtcctggtggcgcgtctttaccaccaggtcatcgacatacgcctctatattgcgccctatctgactacttaaagtgatacgagtcatacgctgaaaagtagggcctgcattctttaatccaaaaggcatagttgtataacaaaaggtgcccacaggagtaatgaaggcagttttttcctcatcttccctagccatgcggatctggtgatacccagagtaggcatctagaaaacacaaaaggtcgcaccccgtagtggagtcgactatctgatctgtgtggtaaagggaagggatctttagggcatgccttgttgaggtctgtgtagttgatgcacatccagagcttgccgttggccttcgggacaaccaccgagttcgccagccactccggatggatatactcgcggatgaagtcggcctctaggagccgcgccacttcctctcggatgaaggcctgttgctccggggcttgacgccgcactttttgccggatgggtcgcgcatccggcctcacggcgaggcggtgctcgatcacctccctggggacctcgggcatgtccgacggcttccatgcgaagacgtcggaatttgcccacaggaaggagacgagcgcgctttcctatttggcgtccagggtcccgccaattttggcggtcttggatggatcatcgccaagggggatctccttgacaggcacctcatcagccgaggcgaggcgcttcttggaggcgcgggacgcggaggcctctcgggcctgtggttccgtggccaccgctaggttgtcggcgctttgctccgtgcaggcgagggcgattttgacatcgccaaagacggtgatgggaccactagggcccggcatcttcatctggaggtagacgtagtgggtggcggccatgaacttcaccaacgcaggtctgcccaggaccgcgttgtaggcaaattgaggtccgccacatcgaagtcgatccgctcggtacggaagttggtggagtcgccgaaggttaccgggagctcgacgtggccgaggggccacgtgtgtcccggagtcacgccgatgatcggcagcgacggctggagcttcatccccggggccttgagcgcgtcgaaggcggctggggagatgatgctcaggctggctccctcgtcaaccaggacgcgcttcatcctgacgttgtgaatggtcggggagaccacgagggccaacttctcacctcgagcgagcattgtcagatggtcgctctggtcaaaggggagcttaacctccgaccaccgcgcctttcgacccgttttgtgggttgaaacgggggcaaaaagctctcgcctcatggccttgaagcctcagcgagaggtgtgagcgcaagccctctcgtcgagcgtggcgacagttccctgaggtatctggaactccagatcctcactgtcatcgccatcatcggcgggggccttcttcttggcctcccctcgctggtcatcggctgaggtcgtgggggctttgccctctcgtcggccctgccgcttctcctcatcggctttccggaaccgctcggccaaattcttgaccgagcggcagtcagcgagactgtgccgataagtgttgtgcaccgagtaccacttgtctgccgaccggccctcgccggatggagcagtggagctcggcttgtcgccggtggtctttcccttgcgcggggcccgtgcgggcccatcagtcgcaaggacatggccctcgtcatcggagcgggccggtttccttttgcctctcctatctcacgcttagagcggggaacagactcgggggtagccgcagccgccgtgccggtgccgggggagttccaggcccacgcctcctccttccgagccaccttgtccgccagctcgaaaagctcggcggtggtcttgggctcctaggaagcgatcttctccaacatgcggttatgccgcacgccattccgaaacgcataaacgaccgcgtgggccggaatgcatggaatggtgttgcggacctggcagaagcgctgtatgtacgagcgaagggactcgtcgtccttccgccacacaacgtgcaggtccgactcttctcctgggcggggatatgtgccctggaagttcgtgatgaactgctggcacaggtcctcccaggagtagatggagtcggggggctgggtcatcaaccagccacgcgcctgacccttgagggccatggggaaataattcgccatgacccggtcatcgccccttgccgctacgatgatcgtggtgtagatctggaggaactcggagggattgatgctgccatcatacttctccgtaaggttggggcgaaacttcgggggccaccggacgttccgcagactcgccacgaaggccctacaacccgtccctccaggggtgagcgtggggggagggccgcctcgtgaggaggaacgtggcactccagatgaggaggcgccttcccccatgcgggcagctcagcgctcgtcccggcgtcgctcgatatggattcgagcatcctgctccctgtagagaccgtcgtgatgcctccggcttcccgaggcccccgacgatgttggagccgtggaccgcctcgagaccatggccgaccaacaggccctcctccttgctgacgaggagagggtaatgggggtatgcaacgtaccggtgacggcgggtcggccgcccgcggccaactgccgctgggcagtggtgaccaagttggccacgtcgtccaaccagcgctggacaggggtctctggctccgagttcacggggggatgccgcagaagggcacccgccgcctaaagcgcgcctcggggcgagccgccgtcaccgtaagtgaggcggcgccgtgccccgatgcgtcgtggcctcccttcacctgggggcggggagagggccaaaccacccgaacgggtggggtcctccctccgcgagggttcacggcgggggggagttggagagttgcggcggcggtgacgagggccccagctctcgctagcatcctcactcccagacggagtgggggtgaataccacctcctccttctccaggacctcgaccatgatcgtcgagggcccagggaaacttgggacggaaggaaacgacttctctttaaagcgcgtgccctccccctacctggcgcgccagctgtcgagggatgatcctctctagcgggaggtcgtgagacccccctttcgtgagttcggccgggggaagaagctcgcttctagaaaccacgtatccgtccctaaggcccctagctagctcgcacacaatcaaattatacaaattcgggccgctgagaagcgtaataccctactcctgtgtttgggatttagattgagagttacaaaggttcctaaactcgggagaacactcttctcctagagcccaagttagttgagaatcgtccctttgctcggtgggcaaggtcctccttttatatctcaaggggataccacatgcaccgcctctacctactcttctttcgggtggggtcccaccctatcttgaccggaactcgacccgtgccttcgcctggaacctgaaccacagcttgtccttgaatggggcccagtgccgtccctcgcctgacacgggagacagccctgtcattccctcattaatgggtgaagacttgtggtggccgccgtccgaatgaccctccgatgggacgggtcatacctacctccactccgccggaagcaaatgcgacgtgggagcacggtcggtgtcaggccggtcacagaccggtcattcttgactatggcacgtcagtttagcacgccgcacgtctgtctcactgcattaaatgcgacagggggtagttgaggcattgcgcgtattaaaggaggctcaacctagaccctcacctcgctcgctccccccgccaaatggtggctgggcgtgggcctcggggcaaagcggtgcaagggcccgaggggcatgacgtggcaccccgaggccccgacccccccggctgctccagcggttcgcagactgcgggggcaggacccaggctgtaaggacacatggcaggatgggaaggtagattccccacacttcgcataaccctgggcccata

SEQ ID NO: 29807 - DNA, 4710 bp, Oryza sativa
aaggccccgacccccccggttgttccagcggttcgcagactgcgggggcaggaccaggctgtagggacacatggcaggatgggaaggtagattccccacacttcgcataaccctgggcccatatctccaacagagatggagcagaaaaaggtagccttctctccagatgatcatttttctttttataaaagaaaccagatagccatcttcattactgtcaaatattaaaaaggaataggggatcaaactttcaattgagttggtccacaagacatatatttactagtgaaaaataaatctagtgatgatcctaggatgaaccacgtcatctatctatcttctattatatactaaaagtctattaaacttcctataaacattctcaagccaccacgtggcgctctacaaacgctcctaagtcgccacgtggagctctaataaattagaaaaaaatcctagaaattttaagaaaaaaagaaaaacatctcaccattggttttcacttaaatgagtggatccattatttttaatcattagatcaattttaaaggaatatatactcaatccaacctatgggcctattagatcgatctcacggaatatgtagccttcccttcccctgctgtacatgccaccgtacgtaagtacgtatatatgtgatacgtattccatatgccctccccttttctcctattttctaaaaactcattacaaaatagtttaaattttaaatagctaaataatcatgattctcaatttatatacaacattaaattcatttgtactatttttatttgtaattaaataaatacattaagatcgatattgcatatattttgcgaggtaaagaaaaaactgaaatacgtttggacatagaccctagcgtggcagtcattaaacaaataaaaaaattgacaacaactataccatcttaaatcattctatatataaatatgtacattaaattaaatatcatgtaggacgcaaaccatcaaccgtcacatcctaaaaattaagaaatatcgttgaaattctatgagaaaaacaaaagcaaaacatcctactatcattttacacttaaatcggcaaatttattattttcagccattagatatatcattctactctcataagccactacgtatcacatcttaaaaattaataaaaatcacataaaatctaaaacaatgaagcatctgacctcgataaaatcattatttcagccattagatctatatttaaagaaaaactataaaaaaataaagtaccatcccattccccctccccctcacctggattaacaaagctccatctttatattatgaaattataaatatatagtaaatgaataaagatatcgttggagtatataagtataaaaaaaaacagggagtagctaaagaaaagccctaagtgcggaaatgctaatgggcgggtgatcgctccctcacccgcccagcgatcagacgcccgccccctcccctatactactagatacactcctccctcctctcctgctacagtacaccacacaaaaatttaaaaaaaaaacaaaaagttagaaaaatttatgtatagaaatactatatataaaaaatttaaattcaaattcaaatttgaatcgggtatgtaaactttttgacttataaactttgggtctataaactttaggtgtataaactttagatgtatagaaatactatatatagaaaatatttgaattcaaatttaaatttgaatcggatataattcaaattcaaatttgaatcgggtatgtaaacttttgacttataaattttgggtctataaactttgggtctataaactttagttgtataaactttagatgcatagaaatactatatatagaaaatatttgaattcaaattcaaatttgaatcagatataattcaaattcaaatttgaatcgaatatataaacttttgacttataaacttttggtctataaactaactttaggtgtataaactttagatgtatagaaatactatatataaaaaaaatatttgaattcaaattcaaatttgaatcggatatataaacttttgacttataaactttgggtctctatactttagatgtgtaaacttgaggtgtataaatttactaaaataagaaagtaatgcggtggtaaaaaaggaaaccaggtggagggggggcgtggggcgatcgctacccccatctccaggcgatcgatcgcccattaggatcgcccccctaagtgcttcaatcctactgcatcattagtcaactgctcagtagttttgctccctccgtttaaattatactattgactttccacattcgttttaaaatgttatatataaatgttatttattttgttgtgacatattttattattattaaagaaactataagtatgacttataatttagaatatttacactaatattttaaatagaacgaataatcaaacattattttaaaaattaatggtattatctattaaagaaaatagcagaggtagtattactaggggtggaaacgagccgagccaagcctagctcggttcggcttgcaatggctcgtaacaagctaggcttggcttggctcggttcggttagggatacgagctaaaacatgagctcggctcggctcgtttcctggctcgagccagctcgcgctagcttgcgaaccttccgttgaagctatataatttataatcattaagaaaagcaataacaaattatcaacatgtaaaattaaaataactttatatattcaattcattaaaatctagacgataaattatatattgacaaataataactcaactgcaaaataaaatcatccatacaaatatatgatggcctaggctcacgagccaaatcaagtggctcgtgagccagctcgggcttagctcgtttcagaaacgagctaaaaaggaggcttgggcttggcttgtttggcattcaagccgaaccgagctaagtgagctcgagccaagcccgagctaagctcacgagcccaagctttttttccacccctaagtattactaattagattgatttagggtagaccgcgagaggtggcggcggtcattggggtcacgtacaatactcctatctgatttgatctccaagacttcaaaacttggaaaagaaatttggtgcagaactgcagaactgcagacctgctccagatgattgccatgtggacgacgtggtgatcagacggctatctcccctcggctcctatgcagcgcgatatatatggtgaggatcgatcgatcacccttctccatatggtttcctattttaacaccgcattacttttctattttagtacatttatatacctaaagtttgtacatcataaatttacacatctaaagtttatacactgtcgacgacctcaaatttacacatctaaagtttatatactgttgacgagtgatactcgcagacaggataagttgagtattggggtatgtttgaatgagggtctatgtagtacaacatcaagcaaacagaagacgaggattatactggttcaggccccttatcaggtaatagccctagtctagtttatatgagattgatgatgatgagaacagattacaaagagagtagatgaaacaaacgacaccgacgagatcatagtcaatagattcgacgggaccgacgagatcatagtcgatagattcgacgagatctcccggtgacttggctccgaatacttcggcttcgtaagctgtggtgggtgtgttggcgatgatatttgatgcccttcacctccctctaggggtccgttttataccgtggattatcttacccgaagtaagagttggagatatgtaaactagtacgatatagcagatattctatcccctccaagtaggactctgatagtttcttaactcgtagagatatttttcataattcgggacagattcctaacggtgtatacggaaacgacccgtgcacgtgaaggtataccttatcggtatatttcataagtcgtaggttagagggtatgccttatccataatcctaacatacacctcaagtttagagacccaaagtttacaagtcaaaagtttatatatccgattcaaatttgaatttgaattcaaatattttttatatatagtatttctatatatctaaagtttatacacctaaagtttatagacccaaagtttataaatcaaaagtttacatacccgattcaaatttgaatttgaattcaaatattagtttatagacccaaagtttacatacccgtttcaaatttaaatttaaattcaaatattttttatatatagtatttctatacataatttttttcaactttgttttttatttttttttaatttatggtgtagtaggaagaaaagaaggggaggaggaaggggggagagagcgtatagggaggatggggatcgataagcgatcgatcgcccattagccacacccgaggatggaggagccttgctcggctggattttttcacattttagtactttttaaaaacttatcctacaaatagacctataaaaaaacttattctagaaatgatccttgtcgcggcgccaatgtcgttggcgccatgtttcaacatgacggcgccaatgatattggcgccatcctctccgccctcgggtgaaagtttagtcacaaatgtgaagtgggacggcgccaacgacattggcaccgaggaccaat

SEQ ID NO: 29808 - DNA, 6569 bp, Oryza sativa
gggtgaaagtttagtcacaaatgtgaagtgggacggcgccaacgacattggcaccgaggaccaatttgtaaaaaaattgaaaaggacctatttgtaaataaaaaatatttacaaataggtccacaaataggtccttggtatcagcgtcattggaactaaggacctatttttaaataatttttatttgcatataggtcctttttcagaaaaaaataatttggtcctcggcgccaatgacattggcgtcgtcccgttcacatttgtaacttacctttttcacctggggctaggaggatggcgccgacgtcattgacaccgtcatgttggaccacggtgccaacgacattggtgccgtggaaaggatcatttattaaataagtttttttagagatttatttatagaataagttttctaaaaagatcaaaatgcgaaaaatccagcctcgctcggctcacctcaaatcgcataggtatcgactcattggcctcagatccgcttttctcatcttgccggcgccatctccgccgtaaccccaaatccgtcgcctcccgacgtgttcccctccaactccctccgcagtcccatccacctcccgcctgatcccttcccgcgccgccttgtctctcgttcgctgccgggacgcgtttgtgcgcgcatcggggacggggaggactaccatggtctgggacctcggtctcgcatgaaacacagcacctcgaccgacgaccatcgatcaaatggtgagcaaccagcccgaccttgtcctcctccgcgatgcccgctacaacaacctgtatctgtatctgactaacggtgaattgctcataacattattcagagtttgttcataatgcattattaagagttgagagctagatgattgttctgcatatcgcataacattattctgcctgatggattatttgttgatatgattcttattcctgattctggtgttcccgataacagcagaacttatgcatttctcatttcgatttatctttatgatggtggttctctatcttctctgcagaatatatacagaagagggaaaatcgctatacctgaaaggactgtaaatttggaaaaagaggatggtgttgaaaaaattgtagtccttcactcctttgtaatatgaaataatccctaaattgttgcaaggattgtagtccagtcgtccagattgtaacctgaacagccttttttttttgttcaaattgcaagaatactgagttatccctttgtaatctgtagactgtatttttctatctggaatacatatgagcgtttttggttgttctgaaatattcaatctgatggatgtgttacaaaaactgtgattgtttatctaattacgtgagtgaataaaatacggaatattgtataatctgaatttttgaagaaatttaataagaacaagtagcaactcacaaggtgagttcaggcaaggaaaagatgaggataattaagagcaactcaagaactggtcgccacaaagtcaagtttttacatgttaataagtcacaatctccgtattaacgtaactaataaatccatggtcgcaactaatatcatcaatgaaaattcagtaaatccattgctccttgtcgtcatgcgcagcgcaggtgaaaccagccggcacctgatgagacgaaggcagaagcccggcaggtcgatctgttcttctccaggcctcctcgtcctaccatcactatcgtcgacggcgtcggcgagaggtgattccggtccgattgaggtgagagggcgagggagcgatcgccgcagcgcgtccgcaaatcgtgctcgccgttcgatctcttttttatccacgcgtccaccatcggcgcccggggctgcagaggcttcgctttgcaccggtgtatgcaccaattttttttcaaatcaactcggactcggttagtcgctttgtactgccgcgcgcgcgcgtttcccatctccgactcggattacacgtaggcgcgccgcgcgcgcctatttatagccgctgtccgtctccttactccatgcattagcctgattgctagttgctgctagcgcgtggcacaagagcagcgagaccagcagtaagctaggcatggcggcgcgcgccggcgacaccggcctgagcaaggtcaggcgctactggcccgggagggcgccggactgggcgtgggcgggcgccgctgtcgctcacgacgaggacgacgcacgtctcgtctcgacgcttgacgagatcaagcacgtggaggaggaggtgctgaggtcgccgcccgccgccgtgtgcggcgggctcccgagatcgcgtcggcggcaccggcggtagatgactggcacgagcccgatccgatcgaggaggaacaagacgaagatgatgatgatgatgcccgggaggagcgcagagcgaggataagggagagggcgctgctcctgaggcggcatgaggaggagcagcttcttcttcttcacccgcagcatcaggaggaggaagatgaggaggcgtctgagtctgaagagacggcggaatcggactccgacgtcggcgagcagatggccgtcgtctacatggccgtgccactgtttataccaaagccgcggcgtgacaccatccggctcaaggaggaagaacggcagcgacttgaggacgagctgcaccggaagaggctcgaggacaggaaggctcagacgaggcagatcctgctccaagagatcatcaacgaagagctcctcgccgccaacacagcttcagatgaagccgccatcaacggcgtggacaccgacgacgaggtggaccaagccgaggagtacgagtcgtggcggcgccgggagatggcgaggatcaagaggatcagggaggagagcggcatcgacgacgacaagtcgatcatggaagacgagaacccggttgctgatcgtcccaagaagaagatgaagatcaagaagcagatgaggttcatgcaaagatactaccacaagggctgcttcttccaacaagacgccgacgatgcggcgcagacggcaggatcatgcgaaatctaccggcgagatttctccgggccgaccgggttggacaagatggacgtaagcgtcttgcccaaggtgttgcaggtgaagcactttgggcggcgtgggggaaggaagtggacgcatctagttaacgaggacaccacgtacaggacaccacgtacggtgagtgattttgtatctatccccacaattttgtaaaatttcaaaaaatgtgagcagcggcaagttatttttcacccccttgtgacgtactcatctgtattttaatgtatgacgccgtttactttttgaccaacgtttgatcatttgtcttattcaaaattattatgcaaatatataatcatgtgacaaaaaatttaattgtaataaataaagcggtataatcttatcttagatgaatagttttggagaaaaagtattcttacatggttgcataatgcatgctagtagatatcttcaaaactatagcccaatgcacaatatttggcaccatagatctttacttgaaatgatatctggaatggagacattagacattttcatagattgttcgggtgggactcagtcaaatccatatgtgacaaaacatttggaagatagtgttaacttacctctacctgctcaagccttagatgaatttcagcagctacaagttgaattgaatgagttacaacttcaaatacaaagggagatccttagtctgtcatatggaacagccgtgtttgttcctcagaattttcacgggctgaattttgtgaatcattctccccctagtcaccatttggctctggaaaactaaatgtgtcgtcaagaacaaagtatttatgtggctgatgttgtatgatcgattgaataccggagacacgttggacaaaatcacaaaaaactattgtgctctagaatgcagatctaccttgtgttctttgcttactggttctagggagacaacaatgcatcccttcttcgatcatgtgtcgagaccgtattagagtaagatggaatgctaatcttgagtttttccaaatggtggtcttggcacgaccgaggtttaggcaaaagagtttcttggatataatgttcatagcttgctggcatatattgaagcaatgaaatgaaataatctttcaaaaattgttaccagaagaagacaatttgttccattcttttaacaatgaaattctcttgcatatgtgcaagatgaataagccccttaatttagtcatttttgactgattacaacatttacaataattattttgatgtgatactcttgcgtttaaatattttactgttttaaatatataactattaggcaaagcttgttagaatttttcataaaaaaggatcaaataaaaaaatatatcatgttagatcaaatactcaaacgcaaaacaatatctctcatggtagatcaaatattcaaaaacaaaacaacctttaaatagtaccattactatttagactagagtcgaagcaaaatagaatatcaattgaatggatcaaatcgtaagtatatacataggtataagaatttgattcatacctatacctagcaacaaacaacttaaactcaactttatttcacaattcattattacatacctaactaattatatgtttgaatgttatatacctagaaccaaaatctaaccaaaaaaatgtccaaactcagttcaatcttatttgaacttgttagtaaagaagttaatgttcatatctaaacatttttttaaaaaatcatactcattaaaattgggtatatactcaattttaatcttcgagcccgagcaccatggagccccagttaattttaatacacatatgtatatatacatacacacacatgacggtgacactggctctatatcgagaaatagttatatgttaaaaaaaactaggaaggtagccagcgcatacgcgtgggtatgttgtttaatcttatttgaacttttattacgaatttttatgtgtggatgatatttttgaaatattttttgacactattttaaacgtatgtttgttaataactggtttgggcatattacttgaaattgtatatctattaggaaaaacgtgtcataataatagagttagttcatatctattttaattatgtgtgattcctttctaaaaatttttggactttccaaactttatataacatttttattttgtatgctatacatgaatttaagtaacattttaaaaataataaatttaatctaatggtgtaaaatgaaacaactaaattgtattgtttttattttttttataaatgtagatttaaattagtgttgtatatttgtcaagtgatatttgaaaccctaaaacaagatgtgaaataaaaaattatcatagcaataattattatatatatcatcctcgtatgctaagataggatgaataaagattattcatgggatatttcatatttataatataaatttagtttaactacgtatatttacataaatttgtagggtaatatatttatatttaaatagtagataatactattttaaaagaccatcgatctttttcgaatgatacacatttttttgttttattgtttttatagtaagggattttgaaaatactatttcaaaagaccattgtgcatagatttttcttttccaatggatagtaggtaagctccaatttttttccaagtcatatgtatgtacggacaacttatgtttttttttgtttttctatcctaatagttatatagttctccagtatacgtacacagagtaatatggtattagtttataaaataaaatactctaatggtctaaatattgggttcatcaatttaagtgaaaatcgagggtgatatttacttaaatttatagagtaatagattttatctttaaatagtagaaaactctattttaaagataattgatttttttaatggtactacgtatggttttttttcctttcgataaacagtagataagatacattgtattttagtcgtatgtacgtacctattgaatacttgtgttttttttccggtgaacagcaaggtattagtttctattttctttttcggtgaacaataggtattagtttctttttaaataaaatacatctaatctaatttaatggtctaaattatcgggtccaccgattaagtgaaaatcgacggtgagattaggcattgtcacgtggcggtccagaagcgtttgtaaaagtgccacgtggtggcttgagagtgtttatagtaagtttaatggacttttagtacttcctccgtttttaattataaggctttctagcattgcccatatttatatatatgttaatgactctaagcgcgcgcgcatatatatatgtatatatatatatatatatgtatatatatgtatatatgtatatatgtatatatatatatatatgtatatatgtatatatatatgtatatatgtatatatgtatatatatgtatatatgtatatatgtatatatgtatatatatatatatatatatatatatatatatatatatatatatatatatatatatgtatatatatag

SEQ ID NO: 29809 - DNA, 28622 bp, Oryza sativa
aatgcttcatctatatcttttgaggatattgagaaaagtatttccaattggaagattcctaaggttaatattaaggaaatatatcatgtaggtactttttcgttacttagtgactactatattaaaacaattgaaaaaactattccaattagttctttgcatgaaaccctgcatcttctttctgaaagagaaatcaattctataagagctaaacatcaatatcactaccttcactttggtcttatacaagttgctatcagatccttgactagaaagggtttgaacgtctctgttctggcttgtctaagagattgcagaaataaaaggttcaaagattccttatatctctaattttaatgaagataagattcccactaaagcaaggcccattcagatgaatagtcgactttaagaaatttgcaagcaagaaataaaaaacctgctagataaaagcttaataaggaaacgttcctctcctttgagttgtgcagccttctatgtagaaaatgctgctgaaaaagaacgaggagttcctcggctagttattaattacaaacccctcaataaagttctacaatggataaggtatccaataccttataagcatgacttaatacaaaggattcagggttcaaagatatattctaaatttgatatgaagtctgggttttggcaagtccaaataaaagaagaggatagatataaaactgcttttactactccttttggtcattatgagtggaacgtaatgccgtttggtttaaaaaatgctccttctgagttccaaaaaatcatgaatgagattttccttccctttacatcctttattatagtttatatagatgatgttttaatattttcccaagatgttgaccaacattggaaacaccctaatatattttataaaatcatagttcaaaacggtttagtagtctctgctaagaaaatgaaacttttccaaactaatgttcagtttctcggttataaaattcaatatgatcgagtccaaccagtagcaagagtaatagaatttgcagaaaaatttccagatgagataaaagataaaacacagttgcaaagatttctagggtgtttaaactatgtctccgatttttataaagatcttgcaaaagacagaaagattttaaccgagaggttgaagaaaaagcctccagcttggacagctaaacatactcaagctgttaagaagatcaaaggtaaggtcaaaaccttgcactgtctttatatcctagatcaagatgccttcaaaattatcgaatcagatgcctcagatcatggttatggaggaattcttaaacaaaaaaaggattccagagagcagctggtcaggttcacctcatatagatactgcattcctatcctcatatctggtgactagacccctagtcactgccctgggttagagctggtatcagagccaagtgctcgtaacctccccaagccatcttctccgaaaggggggggggaagaggggtcggatagcgtgctgaagtcgcggtgatcccgaacggtgtggtggtgttctgaagtcgcgaagttcccgaacctttgatcggttgcctgaagtcgcgttgccttgttgagccgcagaaggcgtttgtcggcgtaattcgttgactgggcacttatcaaaggcaaaggttgaacttaattgtgggaaatattccctgccgttgactggaacacatcatatccaaatagcttgatcataattgtgggagatttccccgccgttgtctggtaactacctacctatcttcctatctttcgtataagatgtcttggttggttagatcacgaagagccactgatcgatctgtagcctcgtgcagtagcgagaagtctattggcactatgtcgataaagaaagcttcatctatatcttttgagggatattgagaaaagtatttccactggaaagattcctaaggttaattttaaggaaatatttcatgtaggtcctttttcattacttagtgactactatattaaaacaattgaaaaaactattccaattagttctttgcatgaaatgctctaacccagggcagtgactaggggtctagtcaccagatatgaggataggaatgcagtatctatatgcaatcttggatgtgagattagtacgtgacaattggatggcaatccaggttgttaatttttttttttatttttttttttatattattatgcaaacatgaatgcagtacaggaaataaagataagctgtaaatacgaattatgtacaagatataaaattagatatttagaacataataggtttatatagaacggtccaggtgttcattcatataccttgataggttgaaggtagatccttctgaagattacaccaaggacttggtacaacacgttcgtaattatacaggtacaggactctcacaaggactcttacatagactctcacacttagactctcatgagtcttttatttaggttctactatagtactaacacttagttggagtggagtggagtgtgatggctggtggagaggtgagaggaatggttgagtgagatgtgttgtgtgtgaaatgcgatgcctgtgaaatgtgatggtgagccccttatatagcgctcggtagagaatattcatgatatctcttcttgaccttaaagagtttatgatacccctttagacttcatggagagaatctttggtgataacgctttagacctttaataaagatgtcataatatcgctttttgactatggacttatcttatctggaatagtgtagattccttatcttgaatagtgatctttgtcggggatgacaagatctttattcattatcttcgttgattatcgtgggtgctgattgcaccgtgtcaatctctgacggctctgatttctgaaatcactgagccaggcttctgtagtaacttttcttggagcattcatttccaaaatccggtttaattatgcgccctgctcccttgaagtattcataactttggttgtaatatttgctgataaaaatccttgtgatcttgttttggaaaaccagctgatattcataatctgtggtgatagcttcttcaatttctgcagcttcagaaaataatctccaattttcatgattagcaattgttgtatatatttcttcctcttcatccgatagtttgctaggaccgtcttcttgaaaattaaattgtccattcatgatatatatataatgaattgctggacgaacaggtggtgtgaattttggtggtatggaggagaagataatcctgtatcttccatttccaagtctcctgcagacatctttcacatcgcttccaaaatcagattgaaggatctgatcgagggttgcatagatggaattcacaagaccatgatctataatggtttggagagatatttcttcatggttgtatgtgggtaggttccggaatctttggagatttatctcagctttgagaaccaggaatctataggatgggtcagagattgcctgatcatctagccttaagagagggagcatatatatgattactcgtatggctgggtttctttctcttccttctaagagatcaaagaaataatcttggagtccaaggaatattttcatttgtctctctttaaacttttgccaaacaagatcgaggatgtcttgcccaaagcaagataaagtttgctccgtcttgaagcttaatctaggttggagattttcgtatgtggtactcatgggattttggcttttaagtttcttttggcaagaatctttgtaggcacaagatctacatggtgcttttggctgggtccggagtatatattgtggaaggaatgaattgggatgattatgcagtatgtatggtgtttggggaatggtatcatgcctttttgtggatgatgatggtttattatgtggaaaagattgcaataggttattgatatttatgtggaaagcaaccatgctcgaagcaggatctgttgagatcaaaatcttatctgagaataccttggtattcttatctgttgccatagattgttcaacttccatgggaagtttatcttggccatcacgggatttctcctcgcgataatctagtaatctctcctcatgatgagggatatcttgtagtttagcccttttttctgttatcttttgatctgagggcacgaaatttttgaaataatatgccaggccatttaaggcatgagctttttcttttttgttttttgcctgccacaagtggtttaataacccttgttgtagctctgttactctgaaattgtgattaaatcgttctccatggcctctaggcagttggggcagtctccatgaactcatattcgtgaaccattcagacttctgtgaagccatttccctgcatatatattcaaaatttttagtagcttttaataaatatctatcttcccatgatgtcttacatggcaagtccatagattttggaagatatgatgggaaagaattgtcatgcaaatatattgtattcacaacttgttctcttttggtctaaacaagctggtcaagaatctcatctgtgttagacgaaaatcttaggctcacctgtttgcccattatctcaaattgaatatcttcggttgtgacaaggaagggacgaatgagtgataaaaacggtgttcctaaaataacatcttgcttaagatttttaacgagtagaaaagatgttttaatgcaaacttcagatatgcaaatatagatttcagggatttgatattctactgttaaaagtcctccatctgcctcacgaattctgtgggcggctttacagaaatatttatgagggataataccttctcgaatgcaattgacatcagcaccagaatcaattaaagtgatatgctgaaagtaggatccgtctataaaacgatacataacttctgtgtaccatttttgcttcatatatttttgaatggttccaacaacctgatcatcttcttgaattggttcgtccttttcttccatatggaatccttcttttaattctaacatgtatagacgctttcttatttcttctaaatcttgtttcataattttttggtcttcgaataggctcatcaaatctggtttctcattcttctttttctgttcatctaatcttttgaacacttcatcaatagagaggaatttgctcttttgaatatccttttttagtttatccttatcagtcttgactcttgaaaggaatttttcgagaactcttcttttttcttctggatcttgaatggtttcaaaagtatcgagaacaaattcttctaaactggttaaaacgagtatattttcatcagactcttcttctgaattatctggctcataacaagagcaaccactgtcttggcaacaattaatctctgcatttttttcttcatctgaacatgagtcattgtctatattatttagtattgtttcaagtttttctttaacatcttctgattctgaatctaacaaggcttggatctcttttttaactttggatttgaaacatctgttagctatgtgtcctttcaagccacatttgtaacaaatggtttctttgctttcagtgtcttgtgttcttatattcttattgtaaattctttttggttttcttttggtagcttgaaagctcatcttgcttttatcatttggttttgtcctaggtttggaatgggtttttctttttctattgacataaggatcttgaaaaccaaactgatagcaaaaatctctcatttctcttttaccaagaatcctttgttttttaagttgatctttgatttttaggtcattgcaaagctcagcccctactaattgtatcttttgtgtgatttttccaatatctagatagtgataatttatactccctcccccttcttttctttgggaatttctaaccttttcagcaaataaaggaggtaaaccaaaaatatatttttctttccaaaagtcttgattaggttctggtagggtatatagttttgacaagaaaatatctttataccatctaaaatctgacattgttttacattttaaatttatcaattgctctctatttttttcatagatatcatgatagttttcggcaaagtaataaattatgttatagattaaagtggctaaggcatcagaaatgttaccggttggattcccattaccatctctatcgggcaatggccttccttgatcatcccttttaactgcgcaaagaatctcctgtctttgagtttcatttaaataattattccaccatccttttaattgaccagaaaacccaatgacaatcatattggcagcttttctttctttgtttccattagctatgcaggcattagcatacataatcatttgatgacataaagtaaagatttgatattcagtaaagccatctaagttccattctacaatttctttgccattgtagtaagtcatattttgaatctgaggaatttcctcaaactgtaggtctgcataagttggttgagggtaataattcctagttgtggaagtaagagtagaaggtttaaaaatcttgttgaccatatcatatttttcattatcagaaatctcattgatatttttatttacttttaaattatttagttttaaggctagctcactgactagttcttcagaaattgtgggtccaaaagccttttattttccaagtttgatgttaggatcaattgttgggacaaacataggactaacagactgagaactagaagactgagaattagagcgaatatttatctttacctcaggtcttcctgttttgtagccttccataaggattgtctctattcgatctgtttgttgaccaagagaacgtagagatatatttgcataattttgttgttctaccaaatatcctatgtgttcaacctttgttgtttctccatatgtatttttagaaatactttttagtggacaagcttttcctccattatgagataattgaatggattcaaatggaggatgaacagagtctaccttgtttccactggttgtctcccattctgtagaaaccttcttgataacagttaaatcttttgcttcggatttttgctcttttttcatcatgttttttcctttgaagaattcttcgaagtgtctgacttggctactttcataccaatcaaagaaaaagatgttcttcctttgttctctcatttctttgtgccaaagttctcttatttttagtctaaatggttcatcgaccctttcaaagtatcttttcatcttgggtcggttcttttgaagcctgagttcttttttaagcaaatctttatcaatttcaaactcatcttcttctatggcaataacaaagccaacatcaagctcgataacattgatatcgaagtctgagattgaaggttcgtcggagttgtcttcataggtagcatagacaacattttgaggttttgtcctaggcctagaatctagactgacagaaggtctagactggagaaaggctttttgttttgaagtaaatgttatctcaacatctccgtctggtgtttcaatcaaggattcgacttctgattgatccatagacttaggttcaacagcttgagataaaacccatttctcaggcagggtgatctcatcccatttcagggttttgggggtagtacatctgttattaggattggtttgaaggagagtggttaggccttttggtgtataatgtttggcacaaggtgctaaagttgtcatggctttgtagtaaactctgtaggtaacggagatgttttcactccctggttctagttcataaccagatgtttgtaagttgagagtgagaactttatggatatttgtgtctgagagggatacagaaaaatcaggaaagatgttaaaataaacaggaccattactgaggctagcttccaccatgccaagtaaggaatctttgaaccttttatttctgcaatctcttagacaaggcagaacagagacgttcaaaccctttctagttaaggatctgatagcaacttgtataagaccaaaatgaaggtagtgatattgatgtttagctcttatagaattgatttctctttctgaaagaagatgcagggtttcatgcaaagaactaattggaatagttttttcaattgttttaatatagtagtcactaagtaacgaaaaagtacctacatgatatatttccttaatattaaccttaggaatcttccagttggaaatacttttctcaatatcctcaaaagatatagatgaagcattctttaccgacatagtgccaacagacttctcgctactgcacgaggctacagatcgatcagtggctcttcgtgatctaaccaaccgagacatcttatacgaaagataggaagataggtaggtagttaccagacaacggcggggaaatctcccacaattatgatcaacctatttggatatgatgtgttccagtcaacggcagggaatatttcccataattaagttcaacctttgcctttgataagtgctcagtcaacgaattacgccgataaacaccttctgcggctcaacaaggcaacgcgacttcaggcaaccgatcaaaggttcgggaactacgcgacttcagaacaccaccacaccgttcgggatcaccgtgacttcagcacgctacccgacccctcttccccccctcctttcggagaagatggcttggggaggttacgagcaattggctctaataccagctctaacccagggcagtgactaggggtctagacaccagatatgaggataggaatgcagtatctatatacaatcttggaatatatatatatgggacagccatatgggacttcatggtgtataggctccaaacctagctgccgttggatctgatccatatctatttgatcgctctaggtgttgggtttaacgggtacacccgtttgtacattaaatatggaatgagttatatatggattaaaaactaccgcatgcaattgccctattattgtgggtagtaacgatatgcatgcatgtttagataaatagctatacttgccatctatgattagtaatttccttacggatgtacgtgtcatgtccaatttttaggcaacaaatatgataggaattaaccatataaaataaagagtgttgtgcagtattttttatatggaatgtgattgacacatggtatatagctggaaattcttggagagtatatggcaagaaattcttggagatttatttttgggtatgtggtaaaatgtatgtattacccatcactttttaattttgaggaacaaatttaaggaaaaaataattatatacccagatttggatttatacacgtattaagtatatacgcatttaaacaccgattaggtatatacacatttaaacatcgattaggtatatatacatttaaatatatacgcatttaaacatcgatttggtatatacccattcaaggcatatacccaacaaaatatgtatatttggtatatacacattaaaaaaattaggtatatttggtatatacacatttttaaataattaggtatatacccaacaaatcacgtgtattatttattcagtgtatgtgataaaaaaaattagggcacatgcaaaaaatcggtgcattatgtatatatttagtgtatgtatctagaaattcatgtgtattatgtatttagtgtagcgtatgtacacaaaaatcacgtgtattatttattcagggcatgtgccaaatattcaaggcatatacataaaaatcatgtgtcttattttatttagtgtatgtgcccaacagtcatgtcatatacccaaaaatcgtattataactagtgtctgtgccaaaaattcaaggtatgtaaagaaatagagagagactagacaacgggaaccgttactacagggtactttaagtgactcctaactgctatccggtacccaggtaccagctggtaccttataccctagtatcgagttggtagctagatatcagaacttggtacctgagtaccaggcgtgataccccaagagagagcaaacaagacgccaccgccgaccatcgtgtacctggatatatcccggcttcgcttgagacggagagacgccgccactggccgctgcggctgctgctcgcacggggcaagaccacggcggcgcgcacagcacgtggcagcgtggcacctgggccacaccttggagaagctcacgtctccgccgcaggaaattttgaggtgtacattaatcatataatacttatgtaaatacccatatacactaaattatcacgcctaaaaatattttttgacatataaatactcccgattccgatacgttcacacgtgcaaattagcaaaaccgattggatatacttatgtaaagaattcaatccggattatgttcatcctgtgcgtcgttgggtgtgtgtcccctttggacttaatcagtgatggttgagtatatgctgtcactaataacttaatcagtaatcacagtagagatttagagaaaacgatcgaatgacacacattgacaaatcaacattttaactgatttaatttctgggtatcctgttgataatgcagccatacaaacatattattcggattggatactgaaataacaaaaatgaggtgctaactaaagtataatacacactgtttcaagatagattacactgtaagtgtaacacgtaaatatcaaacaagtgatgcttagtactccgatggcttacatttcttccatatataccttccaagatgtggcttccggctttactgagttgctccggcctgtatacgcgcttcatatggttgctatgcagtagatatgttctcagcatgtgcagcaaccttcaatggcggcggtgaacttcgcagacgaccggcagcggcgatgacgaacctcacagacgaccgcagcggcgacgatgaacctcacagacgaccgcacgatcctcatggatgatcgatagtggccacgaaagattacagttgaccggcgacggcggccacgactaacctcgcggacgttcagcgacgtaacggcatggcgacgaagctcgcagcgacgacaagcggacaaggacgtatgtaccttgatcgagtgtatgtatctaatcttttcgaacgcatgtatatgtgtctaatctaaattctacaatttgcaataccgtcggaatcggatggtatatatatacacagaaaaaatgaacgtccaaatctgtatacatggaaagaaatcaattcaacggataacgtaattgacgggcataattttgtcataatcacgttcagaatccatatatactttatttggaactctggtggagagatggtttgtagtcccggttggtaacccctttgtagtcccggttttccaaccgggactacgaatccgggactaaaaatcactatctttagttccggtttaaataaccgggactaaaaatccatctttagtcccaccaaccgggactaaagatagcagcgcagtcctggttggtcaccatttttttctttttttttatttttattgtttctttccaaagagttgctccttcccaaatctccccaaatatcccaaaatcaaagtatcatcccaaatcaatgaatcattcacatcacaaattctcaaaaaaatacaactcaaattcttaaagaaatacatcacagatccacacatcaaatacatcacacatcatatacatcacagatccaaacatcacagatccaatgaatcacaagttcttatatccaaatgtatcacaaatttgggaaaaaaaagaaaattgtgcttcgctgccgcctcccccctccggtagaggagagggtgccgccggtcaccagctcccgccaccgccacgctccctgccgggccgcctgcggccacgctccctgccgcccgcggccagccgcccgccgccgcccacggcccgccgcccgccactgccccctcgaccggcgccagccgcccctatctcgccaccccgcgcccgacgcagctggccgccgccctcccgacctgcgtcggccgccgcctcccgcccgacacagccggtcgccgccgcctccatctcgtcgcctcgcgccaggccgccggcggcggcctccatcccgtcgccccgtccggggccgccatggccggcctccatcacgccgccccgccggaggggaagggaggggaggaggagatggggtgagagaagaaggaagagaaggatgggaggagaggaggagagaagaagataagatggagagaatggctggatgggagaggaggagataatgatggaattaataagagacttgcatgcgcgcgcgtggatagaggctttgttttaccggttgtttaacaaccgggactaaaaatcctaactttagtcccggttggtgttaccaaccgggagtaaagaaagttaggatttttagtcccggatggtgttaccaaccgggactagagatcacgggagggcctgacagcccctgacaacatacaaaccaggactaaagatgatctttaccaaccgggactaaagattaaatatgcccactgtagccactaactggaactaaagatgatttttagtcccggtttttagtggaaccgggactattgtggattttggtcgaccgaccaaatatggtttctccaccagtggaaatacatgcatgcaaataaaaaaaatggaatgtacgtatagatctttcttatcgggtaaaacccgctaatttttgtaacactgagtttttggtttgcacaaatcctaaagcagctggatggtggatgattttggagcccatactccatggagcatcaaataatttacctatatatatatataatagatagataatagataatagatatcaaataaaatccaaacgttgcataacaaaatatcttcaaatatttaaaaactcgtcaaaacatatttctacatattcaccaccttccacttagcttctgaaatttgcacctcaggcacttttcacctctaccatcatcagaacggcacatacgcttcagttatttttaccgctacaatcaaacttgcacgtaataataattccaaaaaaaccgaaaaagttcgcacgttttgcccgcaggccgcagctctctgacgaattggctgtctcggcgtgtccccacatataccagccaaaaaaaaaaaaaagaaagaaagaaaaaaaaagaaaattcccctctgccctgaatcctgattctatctctcgagcgggctctcctcctcgtcggcgttcctccgcctccgccgtcttctccgccatctcctctttcgagctcgctccctccccgatccgttccgctccggcgccccctgccgccgctccgttccgccggcgcgcccgtggtcctgtgtgtccccccacatcttctggcgcaaccggcaaccctagccgcggatggcggcgcagccttcttcgtcggcgtcgacgggtaatgcaactcgtctcttctcgtagattgcccctagatggagaagatctttcctctcgttgattggattattagtgtttgggacggtttatgcttgtggccggattagctagctaaccgaggtgacttagtttgggttgtttgattcgttttgttacttgtatatagagatctagccacgaaatatgttgtcacttgaggggtggagcacaccaacaaacaatcccaactcaaaatagcttctccttttacctttaaatgaaaggagtgtggagatgctgtaccattcagtactgattcccgggctctttgattgtctctggctctgtgcaggcgctaccaagtttgatgcatcgcagtatgctttctttgggaacaacgcggtggaagaggttgagctaggtggattggaggatgatgatggtgtcgatgctggttttgttggccctggtgatgaagaatacccttctgcttatggaagggatatgtttgaggtaatatatatgacagttcatttatgtttgatgcgacaaacttccatccattatttattactttccgtttaaaagaactttttcacaggaaatcagtgttttttttatgacacagtgtgtccagtatgtaattttgtgattcccacagcattcatgactttggtagtaaacgcccttttgtgttcagaacatgagagagagagaggtgggaggtgctcctaggggttattttgatcattccgttttacttcttgtttgttttcgttgttgttcaatccaacgggaattaatactttgtatatcatggttcagtaagaggtagcagggtccacccgaacactagagatttatgttgaatgaagagtaaatagtaagcatcggtgttatggtagcttcagaggatgcacatagtccctgagactgtggactcatgatgcggaagccttggaccatgctgtgtcaaccattgaaaggagagagggacatcagttgaggaagggaagagggagagctaagcttagacattgttgtttcttgccattgttattgctggaacttttctttggttctgtcactaccatgatttctgctcgcccttgcaattcattttctagagtcacttcaggttagatagcacctttgttaggcattgactgctgtagcatccagcagagagaagcagccaatcaacagaagggtaaatttgggatggactaggaaagtagcaaatggggtgtgttgagttggggtgtttcgtaactatcccaatctgcactggttaactgtgtttgatcagtatttgttacagtgtttgagaacacgttttgacattttgctttattgggtaaaaactggctagaaactgaatataccaacaatactgaataacatgaacctggccttttggtgtcttgtgtgctgcgacatgtttctgtctccgcaagcccagattgatagtcttcttggctcagttgcccagttgaccaactttccaacaattagcggccacttgttttgaccggccaatactggcagcaaaaccaacataagcacctactattgcttgttcatgttcatcagtaagctgcttgagtgattgtcactgttttattatcctgcatgtggttgtgtgcatgcatggatttatttctcgtctcatttgttaactgtcagctgtcattcttagtttgtaattatgttaaaaaagagttgaggatcagctttacagatcatgtaaagccgtaaacttttgtaaatatggtatttaccagtgtggaaccgaaacaatttgtatctaccaatagcacaataacgatctgtatttttgtaaatataatgtatttaccaaaaaaataataccatatttaccacacagaatttaacgaaaatactgtgttgaaaggtaggggtcgatgttctgtttcatcggtttagtcaggtcgatttcttctgttttcataaaatttggtttctcgataatagccaccgaggaatttctttttacgaatataaaccgagccgaaaaaaccaaataaaatcggttcggtagttacagcgaatggtttttaccgaagaatctcataataaggcgacaggcgcttgcgttgctgtcgagcctctgcgttgacatgctgaggtgcagctgtgggggttccagctctggagagctcctgccctgcgcacagcccccactctgatgggctacggagccagcgcccagtccatgatgctgcccgtgccgctagcctcactctccgcctgctcacgctggctgctcatgttgcctgctgcctgcacgcctgcgccaatgcaccacccgtcttctcctgctcgcagcttgcaccacgcttgtctactaaagaattgagagatgtgagagatttgccgtgagatttgtggctgtggcatgtgactgccttatcagcttatctccaccaatgtgatatggctgggttgtgggatgcatggatgagccttgcatcgactaagctcacattaaacttcaagtgagctcagtttgagccaagctggatcctgagctagagaactggcttcattttttagtagagaataaaatcaaggttcaaaattttatgataggtacgcagcagttcaccccccctagtagctatccaaggatcactgattcagcagaaactgctgttccctacacgatttgcatgtcatacaacatatcggaacctttcccctgccatcacctcatggtaagtacgatcacctgggggagaagaaatagaagcagatttgctatctctgatagcaaggtcgagaatttggggaattggaggaggggtaacagctggaaacttggcatgtaatggtgggggagaggactgggtgaagtaggaagggaacataatagtagaatgcgccttggaacatttggcaactgcagtcacgtggtacggagcacggcttcatgtctccaagtgtcaagttaatataggttactttattgagtgtactctcctttcatttttctttatttcaatataggtttgctgactggccaacagcatgcaggaagcagtgggccttatgtgcgtgtatttaggccttttatgtatacaattttgggaccctcagtagtttacctgttattttattgagtagctgagaatgatcacaaaatcgttttactggtatcctgcgttggtgttacataggtaatgattatatttcataacaggcaattatgcagcaataggcagggagtgttcattcctcgtatatgcctgagtgtggaccaaagggatctaggagttggctctggaaggcatatgttactggtcaagctttctttggcccgtgcccgtaaaaaatgtctagtagacctgttatagaaaactactggattttctgcacactgctactcttgaaaactttgtagagttcaattaattttattttagtggaaataatatttcaccaaaaaagttgccttgcaatctgaggtagcttgtaatttctcttctgcagagttgtttattaacacaagtccacctctcattatactagaggttgttttatctcattatctgtagttctgagcaaatttagctcaggaaatagtgcagttattatctggatcatttccaggttatgttattgtcatagttttcttcacttagtgttggggcctaaataacagattaagctgtgatttagaattatgtgcttctgtttaccttagaagattgcagtatcacgctattacttatttatgttgcaaattaagttatcagcttcagctgctcacactgatcaagctttgcttttgcaggatgaaggtggaggttcatttactggtgttgatgatcttgctggagcattctcaaaggtttgcttttttgaaaagcatagctttgtagccacatagtattaatacacaaatgtccaattattgggatttgatccaacagaaacatggtgtatttttttggtagaaattgcagaatgtagattatagttaaataaagttgcaaactcttgtatacctatttgtatgcttgcattgtggtattcttttttaactgtgaaaactgatttgttgatttctccactcagttgaccagaagcatcaatgaaccaacacaatcgggcataattagtcatgggggttcaatttctagacaaagtgagtaatgccctgttttgctcgattgcaattggaatcctttgctacttctttatgtgtttcttcaattcacgtgcatgggtatttgatttatttcatttttcaaggatatatgtaagattcgattcgttacatctggccaatgggatggacatatccattaatttttcattgttagaatgtgaatttcaatacatttttgcacagtctttgttctcttgttgggtactgcaggattatatatggtttctgttttattaacattgtattctaatgattcaatttgtctaggttctactccggattgggcacaagattcatattggcctacgcagcctatatttggagctgaacaagggctggataatgaaagccggtggtctcaaccaccccatttagcccgctttgctgattctagactgcacagaacatcctcatcgccgcagcaagatgctcaatacaatcctaatgaacatattcttggagcaatgccatatctgttgcatagaacttcatcatacccacaacaagagcctcaatacaatcacacagaaccaattccggtacctaaatcatcattcatttcgtaccctccatctggtgcagtatcccattcttcaccaggtcaaccacatcacatgaacatgccatctcctcccacttcattccaaatgcctgtatctgcacaaaatgagttacaccatccccagtttcctcgtggtggtatgcctccagggccacttggtcggagcatggctcatttggattcagcaggtttatcaactaataatttgcaacagaatgctctaaacagtgggccagttcgtccaaatggtgccatgcttacaccaggtttggtgcagcacaatctgcagcgtccaaatggattggtcccacctcaaatgctgtcacgccatccacaacatggaatggccccaattcaacactctccgccacaattctcacagttccatgctcagatgcttggtcctcggcatcctccaccaaaaggtcgtcagatgtacaatcctcagcattcatcacaaatgatgagtggatttgatgcaaatttggcaatgcctgacttgagtgatccgagagcaagagcaatgctgcaccatggagtgcatggccagcattatctcccccaaggttttgagcttgccggtatgaggatggataatgggtggccgcggttcagatccaagtacatgtccacgcctgaaattgagaacattgcaaggatgcagcaagctgctactcagatcaatgatccgtacattgatgattactatcatcaagcctgtttagctaaaaagtcagcaggaggtcaactcaagcaccacttctgtccgaccttgattagagatccatcatcctgtgcacggagtaaagatgagccacatgcatatctccaggttgatgctcttggaaggttaccattttcttccatccgcaggcctcgtccgctcctcgatgttgaacaaacctctgaatcaagtgatgacgttactgaaaaatctgcttcaaaaacacttgaccaagaaccaatgctggctgctagaatcacaattgaagatggcctctgcctactgcttgatgtagatgatattgatcgcttgctgcaatttagccagcagcaagatggtggcttgcaactgagaaacaggagacaggccctccttgagcagctggcagaatccctgcaactagttgatccacttacacctagtaacaatgcacctctctcaccaaatgatgatctggtgtttctccgaatagtctctcttccgaagggccgcaagctactttctcgttaccttgaacttgtgagttctggcagtgagcttgctagaattgcttgcatggcagtcttccggcatctaagatttatatttggaaatttgccatctgatagtagtgctgttgagacaacgacaaaacttgctactgctgtatcaacctgtgttgttcggttggagttgagtggactaagtgcttgccttgcagctattgtgtgttcttcgctgcaaccccctctgcgaccccttggacatgctgcaggtgatggggcttctttcatcataaagtctgtactggacacagcaacagagcttctcactgatcagcatgtggcctctacctacagcatgcaaaacagagctctatggcaagcatcatttgatgccttctttgggctgcttacagagtactgcatgagtaaattcgatagtgtgattcatgcattgcaaacacaacctgctgtggcagcagttataggcagggaaatgccagttgaattgttgcgtgctagccttccccacacaaatgagtatcagcggaagcagttgctcggttttgctcagcgcacggtgcctgttaacaaccatagttctcatgggtccagtaatggacccatgacatcagaatctatcccaagttcagaaagctggaaaatatgagtgaaagcatagtgtttttgcttctttgggtaatcagtatactagatacaatggctctttaaaatggagactcttccctcattttcccagtaaagaaaagtcaatagtaatatgaatccaggaaacaaagatcgagagggttggagcatcgataaacagtggtaatataaggcaccaagtttactattgttgcgacatgtctggtttattatgttttgtagggatgcaatctgttttgcatgtattatgcagatggatgtgtttttgttactgggaagtttcttcctgagttttgttgctcatgaaacctgcctggtatctatctctggctgtagaaggtgcttgttgaagacgctgtttgattgtgtacttgaagatgctgtttgattgttcttcaagacaagtgtcctggaaccatcaaggtggtatttcaatcaagactcaaagtgtcctggtgccatcaaggtggaatttcaatcaagccgccttctttttctcattttgttgtgttgaagggttgaaatgttactagttgatcatgccctcgtactgaaaaaatcctagctagcattggtatatggtactatgttttgttattattatttattaatttctctttcccgactttttctattctagcggaaggtataatttgggattttagctgagtagagatcgagaatgtagtagtagaaacttgggtggctgtaatgatgtttgcaagtttaaatgcaacaagtcagaagtgatggtagtgttaggcgtggcattttctggcgccaattgttaaacatttcaatttatatagaatgctttatagattcaacttgtttggtgccactcggtttcgtccagttttccctctcaatccatcttatatccgctactatttatgaatgaactactctttgtctcataaaaaataaatctagtacgaaatgtgacatttcctgttactacgaatctgaagaagaggtagctcttatctagattcatagtgttacgatgtactaggatgtgatacatcccgtaataggtacttttttttacgggacggatggagtacctgctttctctcttctcaactatgcttatctatctttgggtacatggctctgatatgcttccatcaatcatttgtttccaccgtcgatttcctagtgagtgcatttaatgatcatacatcttattgtgtgttttggtttaggacaagcaagtttaaagagtgggtgtctatgggtctctaggacaagtagctaggctcacgggatgactcttttgcttggtcatagatcatactccctccgtcccactgtatagcaacgtagaactggatttgacatatcctagtataacgaatttgggcatatccctgttcagattcgttgtactaaaatatatcccctcaaattctagatttgctatattttgagatgggggagtaagagcatcatcaagagatacccaaataaatctgctccctagatgagttttcaagaattcctaaccagaatttatggtcctaaaatatcttccctccaacagattagataaacatattatttataataaaaaaagtaggaccacttgcaaaactaccaatggttactctccctcttgaacaatgacctgaccgatatgaccacatgttggtccctctttctttcctcttctcttcttcctctcattcttctacctctcgcgcagggccgagactagagtacagcgagacaagttagcaccagcggtaggtgacagcaagggtggctagagaagggtgcgaaaggatcccgatggccggcagcacaaatcgaggctcagtggagacacgaattatggtcgtgaatggctagctgtggacgagctctagggtcggccgtggtgcaacttggggcttgatagaggagcgaatcgagcatggcgcggatgagctcgggggccggctgtggtgtgaattgaatcaacagcggatgagcttgtgacggctagtggtggcgcaaattgaagcagtgacgaacaagcttgcgacggcagagatatttcacccatgtgcgcaaattgcttgtgattggcagattgggaagcggtgctcttcactacacgtggagaacgagaatagcggaaaagggattttcaattctttgggatgttgattggagatctattggatctattttttttatacataactacaaaattttgagattgggaatagaattggacatctcttgggcatgctctaactattactcattagtctctcggtgcttagctaacgatggtgtaatgattgtttcatgcatgctatttatgcggagatagaaagtatgtgtttcaatgacagtaggtgacggagtgctcggttgtgcgactcagccaaacaaaaggattggcccagggcattgtttgttggtcgaaccaaacacacggctgattattgaatgaaatggattcatcatcacacttcattagtcaaaagcacatctagaaagagaccgaggaatgtagttatcatccataggccaacacatccggcaacaagttgtatttctttaaagtacaaattttattttggatagtcttttattaccgatgtttcgctttaaaccattttttaaccaatgtttttattctaaattgagtatttgtatctctatggttctttggatcttaactcttttatccatttacatccaacttgttatatcctaaagaaacaatctttcatatagttgtgaaacaatctttcatatagttgtgagagttctttgatgggtaggagccgacgtactcaagatctttcatatgcttgagagagtcaggtggttcaaaataaaacaaagccaagattaaccggtccaaagaaaaaatattagttaaagagtgattcaaaataaaacattggtaataaaatatgatcaaaagtgaaatttactccttttttttcatctcattggttttttaccagccaccgaaactatttatttaacacagttatgatccatattgatcacatttaattgtgtggatccactgaacttatgacattaacatattcttacatgaaaatttgttactccctccatttcatattataagtctattttacttctttttcctaagtcaaacttatttaggtttgattgagtttgtaaacaaattaacatctataatatcaaattagcttcattaaatataacattgtatatattttgataatatttaggagtattatgtttttctatacatttggtcaaacttaaaggaagtttgattaggaaaaaatgacaaagcaagttataatgttaaaaagtttgactaggaaaaaatgacaaagcaaagttataatgttaaaccgaggaagcatgtgattttgaacaaattaattactcccgtcattgtttcctaatttcatgtcaaatagaataattgcatatgaatttagaggagagaaaaaagtaatgagttcttaccttattattcttcattatatttagataattccgcgtatttactagtatttaaaaatcaaaatcatttgctccatggagttttttagggcttgtttgggagcatatatatccccatcaagaatccccgcctaccccacgtgccctttttttttatcattgttggtgggatataagacctctcaactgacctacttccttaataagacagcaaagccaaaaaggccaaagatatgaaggtgggtcaggcatatccacaaacataataatacagggcacaatgtagagtataattaagtaaatgtatgcgttcatttataagtttgattgaatctacaatgctacaattcaatatatgatcaaactcagcaagaaaagaataatccaatgtaggatctgatacccaaaaaaaatcacgcagcataggtttgttagtgtaatttacagaatacagacaaatttccagacaaccttatgctgtttatactattccaagtgtgggcataaaatgtcctaaaatatttcaaatgaaacatgctttagttctttaaatttggggtagtggcaatgacgatcatagatgttgcattacattaaagatgaccttttctccctaggttacccagttacaatctgttctgtgcttgatcaatcagcacttaaatcacaacacttgttaccataagcactaagaatgaagggaacagaaagacctttaaggtgcaatatagtatcgaaatatcttttcagcatgaattaagaaataaatgtgacaaacagtaagatggaatacatgagagatcgtgcatgaaacccagcaggtttccccacactatgtgctgcagagctttgttttactatggcgtcctccctgatggataggaaactaaaggaaagggaaggaaaaggggatttacaaatgccagtcatccatccattggttagcaagccatgttcatttgctgctgttcccgttgcactggtgtaccacaccattgctgggtgtattaccatttgcatagatcccattgctgctgccaacatccttgcgcttcagattggccttctttaaaccccatatacgaattgtgtgatcatcacttgcagatgcaagcatgtgcggattcgcaggattccagctcacacagttgaccgtgccggtgtgaccaggcagagtttcaataagatctccagtagctctatgccatatatagatctgaagtaggaaaattattccagattttgaggttacggaagttgcagaagacaggacaagatatatagatgcagatgataggaaaagatgcgtgacaatctagtggttagaccacgctagacagcacatagctccacactttgtttgccataacaattttgagacttaactagctccatccaaagtaatttgtagcatttcatctttcttcttttccatattaattttgtatatcagataatgggtgccattactggaatactaaatggttctatctggtagactactaattatcagtataaagacagtaaattctgacgaaatatcccaacataataatgcatatttatttggattaaactttaaactcatctgtcacctctattctaaaaataaaatcagcagcagccgttccaagtcattagacttgataaaacagcaatcaatatttatgcattcataacattttggagaaaatgaggtggtcgatgcctagataacaagaaaacacagtgtaaatctgaagaacaggcctaaacattaatacatttgcggtactgtgcaaggttccaaaagtgaactagatgtagtgatgtttttgtatacagtgtaataatccaatgtattgaggatgtttacgtatgctatgactatattttccttacatactgaggaaatctagaatgcagaatgccaatcattagcacaagtaatagaagaacactgtaacaacgaaatttaacaacatccatatcattattttatagtgataggtggccatcaagcaaaatcaccatacctgtgaatcttcactaccactagcaataaaggcctgctcggatccaccaaaacaagaccttatcacaaaccggctgcgcttatgaccagcataccggttaactcgaatggggcaattccttatgttccacaaatgaatcgcctcacttataaggtttacaagcaagaaatcaccatcttctgaaagagaaaatgatgtgattgtattgtcctcctcaatcaatctctcctgttttgtctcccgatcaaataaacgaatggtggactctctattcatgcttattataagcttgccatcgtttgatacggcaaaatcagatgttttagatgatctctggcctttccaacaatctacttctttaccatctaaatcccacaagcaaaagttatgatcagttagaccagacaatatatgctttccatctggaaaccaaccacatgagatcagaccaatgccagacttttcataaacatgaagacatttgccagattcaacatcccaacaccgaatgacttcttccattccacatgtgagaagctggcaatcatcagggctccatgcaaccatcatgactggcttgtcatgaccagtcaatgtgtgctttagcaatagctctccatcttcatcaacctagggaatgatagcatatgctttgcatcaagagaatatcaagaaaagaccctttacatcatgatcaataacaaaaacaaaacatataatgaagttctctgcaacagattatatacaacatactaatttccataagacaaagggaaaatcttgtagaggagattcagtcactaaaataaagcattgttgcaggggagaaactgtgagaccaagaaattaaaattttattttatgccaacctgctgcaaagagatctaatgaggattcgaattgtgaagaagacttgacgaaaaaaattgaagaataagtttcaaaaatttaatgtccttgggcatagatataccagatgactataagctcagctaattaaactgaaaatgacatgcataagaaccaacttagattaggtggaatgtaagacagactactgtgaccagatgagaaaatatgcactttcatggcaatagttacaagctaggaaaaaaggtgttatactacaagttcatagggcaaaattggcaaatatctatattagattccttgctgataaagctagctggagataactctcaagtagactgatgaaatgatcagataaatggcaatattttatcttaattttcagagatcgttttttttttcagaattcacttcagacagaagtaacagcagagacacaaaacctgagggtgtacagaagggattgttctaagaatgtctcggatttaattcaatgaaaggatccaaatcctcccacccaatcaggcctgaatgaacttgtgcaaaatcatgatttgacgaaaggtgcaaaatgggaagttcagggacaacaggctattggactgctaaacaaacagctccatgcaaataagccactatgttcatggatagattcgtaatttttaccttccatatgattgcggatttatcatttgatgctgaggctaaatactttccattgtttgaaaattgaagaaaccatacttcatcacggtgtgcacgcagaacctgcaacaagaattttaatgtgcgattagtaccagtgaattttgagatatggagctgccagcaaagagaagtcttggcgaataacttaacgggaaaaaaaaaagcagttgatcacccaacggtaaaaaaaatgagtatatgacaaagcatggttatagaaaaccacaaagcaaatccaccttgcacattagggcctgtttggtagagctctaactcctaaatttagctccagaagtttggtctggagtggagttgtggagcagcctaaacccagctaaacctctctagttcattttgtgtgagtgctccacccagctccgctcccattttaggtggagctgaaactgtttagctaggctccagctccagaagatgtggagctggagctggagctggagctgtgccaaaaaggccctatgtttacatttctccatgcaaatttcccacaaaaacacaccaaagcccagccacctagccacaacacggattcaacttacacctcatgtttagcgtttagacaggcaaatttcccatagcaaaaagctaggtttccatctaattttatagtaaaggcaatgttttccagaatgagagaagatgagtagcacatatttcttatttgctctatctgatataaaaattttaagccaaatcttttcttgatccaaatctgaattttgcatcaaactatgttactttatctaaatagtaaatatatatatttcaggaatatgcaagaaaaacttggtccatgcctactacaactgcaggctgaactttttaaagttgaagttttcctgcttccatgtaaactgttctgtaacttctgttttactatccaaaaacacagagcacttgagcactcacaatagtgcagtttacttgtttagtaggaggggagggaagggagagaactttgacacttgcatcagtaacaagttagcgctagggcccaagatagcattaaccagttggactacagagaagctcattactatataaagcgtattgcagagccattagaagtgatacacaacatattcatgctataataaatctattgtaggacctttcgtaacaagattcagtaataagctattggactgcttttaacaaaaatctcctctctagtctggtaacaacattatagtaacaacctactgagaattacttcatggtggccaaaggcagtatttgaggaatgttttaaataaaattgcccagtggtggatcaagaaaataatttaagtggttaaacagaacaacagagcagtaggccaagaaatcattcttatgtgggtgtataagcagtcaagacaagtatacaaccttcattcataacactataaactgaaataagcacttatataagttattacctgcaccgtgcaagatggtagctgatccttcccacagtgatgatcagtgtagagtgac

SEQ ID NO: 29810 - DNA, 675 bp, Oryza sativa
ataagatgtcttggttggttagatcacgaatagccactgatcgatctatagcctcgtgcagtagcgagaagtctgttggcactatgtcggtaaagaatgcttcatctatatcttttgaggatattgagaaaagtatttccaattggaagattcctaaggttaatattaaggaaatatatcatgtaggtactttttcgttacttagtgactactatattaaaacaattgaaaaaactattccaattagttctttgcatgaaaccctgcatcttctttctgaaagagaaatcaattctataagagctaaacatcaatatcactaccttcactttggtcttatacaagttgctatcagatccttgactagaaagggtttgaacgtctctgttctggcttgtctaagagattgcagaaataaaaggttcaaagattccttatatctctaattttaatgaagataagattcccactaaagcaaggcccattcagatgaatagtcgactttaagaaatttgcaagcaagaaataaaaaacctgctagataaaagcttaataaggaaacgttcctctcctttgagttgtgcagccctctatgtagaaaatgctgctgaaaaagaacgaggagttcctcggctagttattaattacaaacccctcaataaagttctacaatgg

SEQ ID NO: 29811 - DNA, 678 bp, Oryza sativa
gctcggtaccctggtgcttactcgcagcaacgggaatggccccaaccccaacaacaacaacaacaatgcagagaatcccacgcttgctcaagtcctggctcaacaggcacagcttatgaatctgatgatgcagcaactccagaaccagcagaaccagggaaacaaccatgcacctcccccgaataagctggcagaatttcttcgcgtgaggccgcctactttctctagcaccaccaatcctgttgaagctggtgattgcctgcacgccatagagaagaagttggacctgcttcagtgcacagatcaagagaaggtttcttttgcttcacaccagctgcatggccctgcctctgagtggtgggatcacttccgtctcaacaggactactgctgaacctatctcttggcttgagttcaccgctgctttccggaagacgcacataccatcgggagtggtgtctctcaagaagaaggagttcagggcgctcattcagggatctcgctctgtcaccgaatacttgcatgaattcaatcgtctggcccgttgtgctccagaagatgtgcgcactgatgaagagcgtcaggagaagttcttcgaaggtctgaatgatgagctttcttacccattaatgactggggattatcatgatttccagaagttagtggataaggctattcg

SEQ ID NO: 29812 - DNA, 7835 bp, Oryza sativa
tccttcgccttcttctccgcgcccttcccgcgctccccggccggcgtcggagcattagctggtggcggcgcggcggcgacctcgtcgggcttctgcttcgccgcggcggcgaccggcggcgacggccacaccgtggcgtgcttccctgacttgtgcagccgcctgacgagcacgtcggcgccgacgctgctcgtcaccgtcaccttgtgctgcgccgcgtcgattgtcaccttgtacacgcctgcgcatcaccggaaaaccaatcaatcaccaagaaatcgatcaaatctcaatcaaacctgcgaaaactacacataccttcgatgttctggagcaccttcttgaccttcttcttgcaaccctcgcagtggatcgacactcggagcacggtggtctgcaccaacaagaacagcaagacgtcagcaaaacaacaacaatggcgtcgtcgtcgtcttcgcaaagatcgagcattagagctaagctctagcctccaatggaggcattgatttcattcagatcaaggctcaccgtgtactgcagtggctctgcttctcctgacgccatggatgaaggcttagctagctagctacctcgagacggagtagcttcgagctaagctgagctctgtggcggcggcgcgtgcgagtgagaagggaagctaagccaggagggggtgtgttgcttagggaagctgagctttataatggccaacaagtgtagcactgtactagttgagggtgctatttgcaaagtgccagcgtgtcactgacctgtgggcccaggtctactggtaccctgtacacgtcaatccttgaaggacccaggatggtgacatcagaaccacataaatatatttgtacgcaatgatcatatccatgatgatggcagattgaagcttagtgctccctgatgatcagttctggctagtactagctttttttcctgattatcctggcctaaatgttttaggtgaagattatcatgtgatctttgataaggatctccattaatctgtgcaagtgtgtgcatgcaattctggcgatcgatctcttttgttttagtggtgcaatcaagacctcgtaattcaggggtttggtgaatgagtcagacagggccattacattcagcaacaacttaacagcagcagcattcaaaacaaaagggtgtctctcattatggagcaccacatgcacgtacgttgttttcagagcaggtaactatagctcctctagtggtgtcattttcacttgtgctgcagctgtagtacccgctaattacagagtatagttaagagtaattaagttgcttattattgtagcagcctcatctgatgaaatgtccattctgcgactgactccccgggtagaaaactagaattcagatattcaggttaatttcagagaacaaaatgtgacagatatgagtagtattcagataaaatgtccagaaccgatgatggttgcatgtttgcagtagtttcttcagacattatatattcaggtttcggaacactcgaaaactactgtaccccagtacatacgtactgggcgttactatacgattggcctacagttacttccacgtgacgtacgtacattatactacttaaatacgccgtagggtcgaccagaagatacgtatcagaattcagaatatcagtggtcgcatattagtactgtggttatagctgggtcaggacgtacaagtacagtatgtgtgtacgcaccaacgacgtatatacagttagctagacaggtgaaatgtactgcactgctgctgtcagacacgtctcccgttggagatacaattcattcatggcatatcaacagagcatccgtggcatgttcgtgcatgtgagtacatattagtatgcattcaagcaaaaaactctcggttcggtctttcggtgtttgagaaaattttgtcatctaatcgaacaattcgatcggttttgattagctctgtccggtcctgaaatactactatgcgacggtttcaagagacaaaaaatcaaataaattatagagcaagattttctcagccctttctagctcttttagctaggattctttgacaattgtagcacaagataacgaccaacgacgtataacataccaattcatcaagatagctagcatcaatcatagcagtgatctatcttccaacttaaccaagatagtagctacttgggcttctttcctaatttcggctaaattctatcatttcggtcaatcgagaatgataaccaacttaatttacctaattaattttagtaagtgaaaaaggcctgatcgaatttcggagtgaaaaaatggtctcggttattttttggctactgtaactaacgaggctaaagattattcatgcgacgtcgccgaaggcgcgaaatggaaaaaggataatgtactgcactacgtatttactgaatactgcgaccacgagtgtaatactgcaagctccttcactatctgcacggcgaaaattggtatagcagtatcagtgtagtaactgctgtacgtgctcgatccgggaccttcctaccatcaattgttggcaatgccaatcgttggcatttctcttgtcattcagtttggaaccaaaatgtattgtctgtactgctgcatacatctccattgaactactcctatataaggttcattacttaagtgcgtaaacggtagtttgagcaagtaaatgttggaggttgggtttaagttgatggagcaaagtgcagcaataaatctggagacctagctaccaacctccctgcagggttagtaaattgtgctcggccaaggctgtcaatctaacagcagggtaaggtacaattctccaatctccatcaaaggcgatggcccaccagatatgtttatgacaggtagagtcagatgcgagtactgcttttttctagtaataaaaataaagttaggacacgtaaaataaaagatttgttagcgtataaatttagaaaatggatttatttttatatttagcgtataaatttagaaaatggatttatttttatattttaaaacaacttttatatataaagtttttacacgaaacacactatttaacggtttaaaaaacgtgctaacaggaattgagataaaataagtatcttaatctgaaaataacatcatctagtactatatagccttgtttagagatataaggatttcgagaagtagttggttgatagcttttgataatctaaaataaaactaggttttagtttttcatcttctttatagtttattttgtaaatataatatgtgaagtcctgaaaattatgaaagaagttgtagctagaaactctgtaaacaaaagttggataaacttttggatactcgtggcacgtttttcaaactattaaactgtgtgttgcgtgcgaaaactttctatgtgaaagttgttctaaaatatcagattaatccattttcaagtttgtaataattaaaactcaattaatcacacgttattatcatctcgttttacgcgaaacacttaatctttatctttatcttcaggagattcaaacaccacctatagatttagtgtaatcaaggatgtgccgttggcttctgtatctttagagacatgtatcaagggacgtattgacgagagtgtaaatgtagtattgcgtgtgtaatggtgtgtgcattgtcatgtaataaaaaaaagaactccgcaaacaaggactaggccaagtttgaaactaagtttcaactagagttgttggcggctcgaaaaagaagttctagatgattaattaaatattagctattataattttttaaaataattttatttccttaatataaatattatatatatatgtatgtatatataattttttatacaaaacataatgtttaataatttaggaagggtgtaaacgaaaacgataaaattgtcattttaaattgtacttagaactcagcctctacttcactccgaagaagacccttgaagagagacaattggtctgtttgggagcttataactgctgtagcttcttccagaatcagaagctcctctaaacagtctagcttttaatatgaattatgagaagctatagttatagaatctagaaaataaactaaaaatcaaatgctgaaaaacctagctttttcagatggttttcagtcagatgctttttagaatgttaaattcgctaaacaagctcaatgaaagagctctgctcctaaaataaacatctctgtcagggttgtaattattccttgtccaaagaaaaagctgctggccgcgtccttgccgccgtataaacatattattacctcgccggcgtgggccccacccgccgtacgcccggctacatgtaccgccatgtggcccgcgcgcgggggagagacatagatgctctcgcgccgtaatttaacaccaccatggcattggggcgccatggatgttctccctctcgcggtgcagtccagctcgaggtgcagtttttgagcagttcgaggtacggacaggcacatggctcgcgtgtttattcgactcccggagtctttcacacaatgcttaatcaagcttagtattatagagcggtgtttgattagtttcctcgttaattgctcggtttttcttcctttttgttgttgttgttgttgttgtttaccttgcccgatgctagctgcaagcctgaaatagtgcgcattgttgcctagctcttatcttgtctactttgatcggctggaaaacctgacgttttagctgtaaacagttgggttttcgcaaatttaagctctctcctgtgtcctgcctaaaatatcatctgtcatgacgcagttatggttagatcatgctcgctgagcaagcagcaaccacatcatccactggccacttttgtgtttctgtcctgaatatactgatgttgcactcctaaatttgagtgtgtttgagataaggacaaagagtaaattacgaagatatgcaaaacgggattcgtcattagtgtaattaattattttaaactttaacatagtttgtttatggtttcttttaaaaaagaatattgtttagcggttttgcaagcgagcgagaaaagaacgcagatatatctaatgcttcactctcttgaagatgaagatggaacgaaaagcagcaacagtatagtatggtgaagatggaaaaacgaaaagcagttcgggattcactcattcaggggactgttcacagaccgtaatgggatcaaatcgatggatctgatgttccaaggacgacgaatatgcaattgcaagaaagggcaaaagttgcatcgccaggccacaccccgatgatcgatggcctgatcagatactcctccatatccttctttttcttctttcccttcttttctccatatcctcttcttgtgtgtgcatatactgtgtaagagtaatcagggtcaggttcataaaaccgatgaaattttgtgaaaccggccagtattagccagttaatatatggtgttgatcaaatttgtcggtttttattggttttcggtcggattttaataaaccggttagagcaattttttacttcgaaatcgaaaaaggtaaatcgtgatttattcagggtttatcaaaccgttttgggtggggttatcttaaatttaaatttttaaccttaaatttgaagccgattttaaggttttttttatcgaagttaatttttttagcctttgtttttagatcgctaataacacgtatataaaagtttatttacaaattatttttcatttacaaatataccgtttgatttattttacatacaagccaaatgatagggctaataaacgcgtggttttgttaaccctggcagtgatagaaaaacattgatcatcaggcagcctacccggctctatgtctatggagtagtagctgccgcggtaagtgtgctgagctttctccatcaaaagcagtgtctccgattataaattctgcctgcagaaaggcagctggccggcgccacaaccgtcctgcttgcttggcttggctccaagtttgttaacccccacacacagttgagtgacacaggtgtttcccttgcatgatcacacagtaacagtatcactactccaccgacgccgcaatccgccgttgtaatgcagacagaataccctcgccgccgcctagcatgcggccgccacactgtgctggtattaagctttcttaaaacgtttggaggaatgttattattggttaagaatgacaggtaaaaaaaatacttttactttgaaacaaattattatgtcggagttgactatgggctggattggtttgaggcctaaattagacttaccaatatttgataattttaatagtgtttagtgtctatttggtttgaagacaaattttgacatacctaagaaaataagaaaatatacaatttcaatagtgaacttaggctattttggcttcaatacaaacacaactttaccttacaaaaattagtcataccaaaacttgccaaaaaatggcattgacaaaatttagtaaggcctatttaagctacaaaccaaactaaccttatattttagaatggagataactaacactactacttctatagtatatcacatgtatagtaccaacacaaagctatcatctgttttaatttgcaaactttaatatatttatcgtcacttcctcgaattccaatatatctatacttttctatatagttggtactcactaacaattattagaagctaaagctcaacatacaagtatgccacatcatcacccactagcaattactattctagcctatttaaaatcccatacaagcataccacatcttcactcgctagcaataattactgttctagcctattttaaatcccatgcaaacatgacacatcatcaacaagcatgtgccaaatcattttcttcacattattttcttaacatttcaactctcagcatttcgacaatatttaacatatacccatccataaatcccgcagcaaagcgcggggtatcacctagttactacttcctccgttttacaatgtaagactttctagcattgtcatatagatgttaatgaatctaggcatatatatttttttagattcattaacttctaaatgaatatgaataatgttagaaagtgttagaatctgaatcggatggagtactaattgtgatggagtctttataggataagtgaaattatgccaaaaacaaataaagtttttattttttttggacgtaacgtaagtatagtactattacaagtcggtgtgttaagcgaataagcaaaatcggtatgtattgtgtgcacgtgtgtgtctgtggagcacgcatctagtcatgtagagggttcccgatatgggcaggcacgagggcgagcacgtacacgtactcctcctcctactacgtgatgagtagagccgagtagtgcgacgtggtcgtgtacaggcagaggcagcactgtgcacacatgcgtgtgttgttgttgttgctgctgcgttggtgtctcgtcgacgcgacagggccggacggcccgtggcccgtatgggcaagatacgagtacgtactacgccccccggcgccatgggccacaaccgcgtcgtaacctgtctcgccttttcggttcccaagccgctcgtgaacttctctcgactcaaccaccatgccccatgtcattcccttcgtcgttccgtctgccacgtacaccttccatctaaaaaagaactcaaccaactcaacagatcgattttttttttgacagaggaagtacgtgatgaatgaatatatggacggaggctatttaatatggtaattagctaatgctgtaaaaatcatataagctgatcaatttgg

SEQ ID NO: 29813 - DNA, 834 bp, Oryza sativa
gagctaaccgtatcccgcctcggggggcttgacccccgttccctcacctcctccctcctctcgctccggcgagcaggccacctcgacaccgccgccgacctcctcaaacaggctgccacttcttgtcctgactccgtcacgcctctctcggcgtctgtcgtcgtcgacggatactgcaagtctggccgcgtcgcccacgcccgccagctgctcgacgaaatgcctcgacacggcgtgaaggttaacgccttgtgctataactcgctgctagacgcatacacgcgcgaaaaagatgatgatcgggtggcagagatgctaaaggtaatggaaaatgaaggcattgagccaacagtcgggacatatacaatcctcgtcgatggtttatcggcagccagagatatcaccaaggttgaggctgtgtttgaagagatgaagagtaagaatctctcaggggatgtctacttctattcttcagtcatcaacgcatactgccgtgcagggaatgtgcggagggcatcggaggtgtttgatgaatgtgttgggaatggcattgagccaaacgagcatacgtatggagcattgatcaatgggttctgcaagattgggcagatggaggctgcagagatgttggtgacagatatgcaagttcgaggggtgggaattaaccaaattgttttcaatacaatgattgatgggtattgtcggaaaaatatggtggacaaggctcttgaaataaagatgatcatggagaagatgggcatcgagctggatgtgtatacatacaacacactagcatgtggcctccgcagggcgaatagaatggatgaggccaag

SEQ ID NO: 29814 - DNA, 2284 bp, Oryza sativa
aagggtgtcaggccaaaccatgtaagctacactacgttgatcagcatccattgcaatgaaggtgacatggtcgaggcaagaaggctgtttcgagagatggcaggaaatggggcagaacctagtctggtaacctacaatgttatgatggatgggtacatcaagaaggggagcatacgggaggctgagaggttcaaaaatgagatggaaaagaaagggcttgttccagacatatactcttatgcagcgttagtccatgggcactgtgtcaatgggaaggtggatgtggcattgaggctgtttgaagagatgaagcagagggggtctaaacccaacttggtggcatatactgctctgatatccggcctggccaaggaaggaagatcagaggaggcattccagttgtacgacaatatgctgggagatggattgaccccagatgatgctctgtattctgcacttgtagggagccttcacacggataaaaagcaaaatgttaaaccacgaacaaattaagctctttggggcggcagtgtaagtcgtgccagctgaactgaataccaggatgaagtactcagcttctcatacatgataatggtggatctgataagttgtctctcagcagaaacgcagctgtgtgcggaacgcacagtgattataaatggattgttcagctcagtttggcacttaaccatctagatctacatgattcagagcatgtgcgtgtgtacaacttggctatgcagagctcttttaataatagagagtacatggaattgttacaactcaagcaattctcactacggcaaatatatgtttttgtttgtacaacagtacttcagtttgctggtactgatatacaaacatgcagtaggaaacttgcaagtatgcattcgagtttggcacatgtattttccaaaactcaacttcatatagttacggagcattttcgtgcaatacattgaatggaaccaaccgtctgtatggagcaccaattcatgcttccattgcagtttgtttttccatatgagcatcggtatcaaactcctgtgctggttctcgaggctgcggggcttggtttgtgtcttcgttgctctacaacagaagccaagtcattgcagattcaggactggcagcaatagctcagtatagcacatcgcacaggtactatttctatgaaacaaacataaagatggcattaaccttctctatatctgcaaactgagtctgtaaagtgcccttttcctcctgaattgcatacctgatttccttcatttcctagaatcatatgccagaaccatgagcagtacgacctaagaatcagaacaaacaaagcaagaatatgaaagagaaagagagagaccgatttcagcagctccacttcagaatttagccccttcttcagctccaaaagttcctgcatgagttgccatcacctgctataagatggtcccgtacgttttgcttcaggaaagcaggagtctttcttcagttctgtacagagagatgatgaaacagtactcacattctggcttgtcttgacctgtgtctcgaggttggagcgccagttctgcacctcctgcaaaagcacttctgctgctcattctccatcattttgccatcaagacagagaaattctccaataatccaattctattcccaatcacagcagcaacagaggcaaagaatttcgcagtacaattcataccagtttgagcttctggatcctgtccagcaactccccctgcgacgaggtcagctcctgcaatcgaaacgagacacaggataaaatcagccgaaaatctcaacgccaagaaccaacgccgccgcccaggaattcaccacaccttgatgcgcgcgtccaactgctcgaaccccgccaatctctacagatcaacaagaacaagcatgcataattgcatatcagcagaaattgaactctgaacacaaaaacacccagggattctgaattcagctgtcaactgcatgtacttaccggaggagtcgccggcgccggcgccggtgccgttagaggtggtggctccgccatcgatcagcaggagacaggtagaattgggccagatcaagcgtgagttgtatggctttattctgtacaattgtactgtacctcacctagaagaggacatttttcagatgcaagcaaaccagtcgtcgatcgggttggtggatggatgcagaggggtaaatctctcgcctgcaaaatcgcaaatgcgacgtgagaaaacgccctgtcagctggtggttgcagaacacttgtctcccggct

SEQ ID NO: 29815 - DNA, 4617 bp, Oryza sativa
  unsure (1)..(4617): unsure at all n locations
caacttttattggagaaaaaaaaccataccttatatagggttggtatcaggttccatgaccatcaaattgatatcgtattcgccgtgtgtctgtccactacataaacagtatattcataaactaggttgtgtttagatccaaagtttggatccaaacttcagttcttttccatcacatcaacctgtcatatacacacaacttttcagtcacatcatctccaattttaaccaaaatctaaactttgcgctgaactaagccaatgtaagttcatcaaactctatccctgttcgtcatcagaatatttctcctggtggtgggcccatccggccgggagctaagctaacttgaccgggacatcactgcgagagtgaaaagatagatgctgcgttttattccagccttctcttagcgatagtggttccggacaaacatgcacgtaatacctctattcagattctttttctttttcttttttttaaaaagagctccttgttctatgttgacagatggatacaacgacgacaaacgggatactatattgagcgtttgatgagaacatgcagttacagtcgtacacatcagatcatgctagcttgcattattagggcatgttcaatgatagagacgggtatgacctcttaaacaatacaagattatttagagaccatgtctttacaatagttgagacgacaaaagctctaatcattaactcaaaaaatattccttttgttaatattcttttcatatttttatcctcatgcaatcatatttctatattatagtgactaaaagtcgttgttaagctgttgtcatgcataacaatccccgatgttttgtctctcctctttctctttccttcatgtcaacaagtattcctaattagcaacgctaagagaccactattaacaaccattgtacatgtccttacaagctgatcatttacatcaatcacagatacagattcctcctcctcttctactttgttttttaaggttccttgttactatacgttgacaggtactccatctgtccccaaaaatagcaattctgatacccgaggcaattttagctaccactattaaagacccaaatacccttgtataagtacaacatctattccatcattcaaataaaaaaacaaacttccgtgcacaagtactactctcgtacagagtgcatgtgtgaatgagagagggagtagacgagagaaacgagagagaatagagaagtttgcgtgaacaagtggatagactactatcctggttgctcagctgtgactgtactgctatctcattcaatgcatcactaatcgcttttttctgggacaaatgcttctctccagaaatcgattctttctaggaagaaaggagtacgatacaacaacattgtatatcggaaaagttagttggcgcgcgccctgcgaacacgcgtttttagggagtaataagcgtaactaataattgtattagttatagatagtgacaataattaaggtaagtcttcccttttctccggttgttttttttaactaatagattgaaaagaaatctatactaaaagaaactttcacgtaaaatttaaaactttctaactttcaacgcaaactgaaactattcttaaaattttcaacttgaaatttgaactttcaaggttttgacctaagatttaaactttgaagtcaaaatttaaaaactttcaactcgagatttgaaactttcaactcaagatttgaaattttcaactcaatatattttgaaaacacgtgtgctaacgatttttttaaaaaggaaaaaaacataaaaatatgcgataaaatacgaaaaaatgcatgcgccgccagctagcgtgtgcaccagttacggaactggcgtgcacgcgccaactagcaacccccattgtatatttttacacatacgggatatatatctctactattataaacattcaagatgtttttactagcactttggtacgtcattcgtgaatgagtcggtttttatgttcattcgcttttggaaataaagatccgtatttgagtcgagttttaagtttgttcgtttttagaaataaagatccgtatttgagtcgggttttaagtttgttcgcttttgaaaatacatatgaaatcatataagaaatctctttaaaaaacctgcatgtatttgagtcatgctttaagttcgttcgcttttaaacatacagaaggagccgtataaaaaatctatttaaaaaaactcgcatgctgatttgagatgattggactcctatcatgattttctaggaaaatatatattcaagcgaattctcatagtgaattttactttaactaaaccatataataataataacattaaaataagcttcacccattgtaacttacggatattttttttctagtatagatatatattgaacatttgattttacaatcatatacatatatatcaatcacacagtgcacattacacacttatatacattacattaccagtgatcgtacatgcatgcattacgccatctgcatgattatgtatgtatgcagagattaaaccaaaccaaaccaaaccacaccacaccaaattaagcaaagcaatatatatatatatatatatatatatatatatatatatatatatatatatatatatatatatatatatatatatatatatatatatatatatatatatatatatatatatatatatatatatatatatatatatatatatatatatatatatatatatatatggtttntgcantcatatgtaatcagtgataantctaggtgtgcaggtcgacgaccttgaagtggtcgcggttcttgacgacgacgtcgtacatgtgggtggagcgnaagctggagaagtcgcgggggatggagatgaggtcggcgctgccgtcgcgcctgtgnagctgcagggtggcgcggtcctcgtagtagcgctcccaccccagcgcccccagcctccgctccagcgcctccgtcgaccggatcacctcgctcgtcgccacatgcaccagcgccttcctgctcgtcgcctgctcctccagctccatcaccccgttgttcctgaacacccacacccctcctcccgccattatttctatctacctatctatcctcttcgatcgatctgctcgttgctgatatgatgctgctacctgcgtctgcatatcaccgtatatataggcagctagctatagctggatgcagtactgtacatactgccagtgtgtggtagtacacctggcttggctaagagatactgtatgtagagtggtgttgagatcagatgcgacgatggaatcgattaccacgtagtacagcgcgcgacgacgtcgactgatggggttttacccgtgaatgaatctattcttctccttctaattaacaccatggtggcgtatttggttaatgagaaatgcaaaaatcttcaggaaccaatcaccagacatcccgcagactataactgctataatggaagacattagagatcgggattttgttttcaaaccgcgctaatttattactagctctacttttctacctatcttttcttcccaagatgtattaatctttctaagaactatgctgtaagactttattctacctcctaatataatcggcaattctcttgccgctttttcttcaaaaaaaaaatgaatctattcttctcatccttctatatcgaccggtttcactttcatgccaaccatgataattgtgctttcttcacatgcatgacaacaatttctacggggacatttcaacagcgtgtacctcgtggtaatatatataggttccctaggatttttgtggcaacatgtattcatcttttctttttaaacaaagtgaagattcggcctctacatcaactaaggatgcatggcaatttttttacagcacctgaattaaaatatttaagaagagaaatgagatatgaaaaacatcatgctgctatatatatgtataacggctaatataggagaataaaacttgtcgatttacagaccaagaatagataagaggatatatataaatcaacttatttttggataatttttgtaaactgtaagaatcaacttgttttgaaacaaagtttgaattcttagaatcagcttagtctattttttttgaacgaatcgacgagcgccaatttcattgaatagagaaggagaactttacaaagcgaaaggaaaaaagaaaggagctaggacctttggtccgagctaactaaaagaaagcagctattaagacttctcgctcctgctaaggcccaagttttggcctcttccttgatcttggctaaaagggaggtagctgaaagctccttctgttggaaggttctgcgattcctttcgttccatatctccaaggcgaccaacaacatcaaagtgcggagtgccttcttaggtgtctcttgtatgtttgcggtagcctcccaccaatctagcaccgttgaagtttgcctccattggctaggatttagttgctcgcacgtcgcccactccgctagtgccgcccagactctccttgtgtatctacatgctgcgaggaggtgcagagttgtttcctgggtccgacgacataaggggcaaatggaaccgtt

SEQ ID NO: 29816 - DNA, 620 bp, Oryza sativa
accataataaatatgtagatgcagtggtaagttcacatacaggaaaacaaaataaaactacaaacccctgcactgcagatatttggaaatgtagtaactcgcaaatacatgtccttcaactgacatatgtcttgcccaggtctttacaggtacagggttggtgatgtgcttcaagtgacaggcttctacaaccgagctccgcagttcaaattcatttgccggagaaatgttatcctcagcatcgattctgacaagaccaacgaggaggatctccacaacagtgtcaccactgctaagaaaatcctggagaaccaaaattacctcctcctggagtacactagctacactgatatttccactgtccctggccactacgtgctgttctgggagatcaagtccacccacgatgaaaggccggcccctcttgacgctcaacctctcgagagctgctgtgctgctgtcgaggagtcactggactacgtctaccgtcggtgcagagcccatgacaggtccatagggcctctggagatacggcttgttgaagctggggcatttgatgctctgatggatctattggttagccatggcagcttcattaaacagtacaagacacccagatg

SEQ ID NO: 29817 - DNA, 697 bp, Oryza sativa
tgcaacgacggtagacgtagtccagtaactcctcgacaccagcacagcagctctcgagagctgagcgtcaagaggggccggcctttcatcgtgggtgaccttgatctcccagacaagcacgtagtggccaggaacagtgaaaatatcagtgtagctagtgtactccagaagaaggtaattttggttctccaggattttctaagcagtggtgacactgttgtggagatcctcctcgttggtcttgtcagaatcgatgctgaggataacatttctccggcaaatgaatttgaactgcggagctcggttgtagaagcctgtcacttgaagcacatcaccaaccctgtacctgtaaagacctgggcaagacatatgtcagttgaaggacatgtatttgcgagttactacatttccaaatatctgcagtgcaggggtttgtagttttattttgttttcctgtatgtgaacttaccactgcatctacatatttattatggtgacaagcactacttcagtgaacataaataatccgtttcacttgtctgatccctaaaaaaaattgaagcaaaaatacctgacagttgacacatatattgtattgtgaaaattgaagttttgacaaaatgatagtctatattaatgttatagataatttcatgtcaagaaaatttcttttgatcatatggagtaaaagctgatg

SEQ ID NO: 29818 - DNA, 10482 bp, Oryza sativa
ttatattgatagagtagaaaaaaaatacaagattacaaccttggaaggtcgtaaccaggaaaacgaagaaaaaaataaccccacccaagcattgacaactccaacacacaatcctactaggagaaagcgcactggaccgaccgccgctagaccaacaaagggacaatagttaggatcacccaaaacccaaccctaacaaacggatacaaatctgcactctatccacaactatttctcgtgttttcttgatcgggcatgtgtgtcgttaacattgtgattgcatgcagaagcttgcattcggcaagtgggaagggtacaaatggagcagcggcgagaggcaacgagacgctgccgccggtgcaggagcaggaggggcgtggttcacggtgacgcggccgtgcagcagcatcctgttccagcggaggcgccggccgtcgtcgacgtgcgagttccggagcggcggcggcggcggcgacgacggcgggcgcgccatgcggtacaagatggacgactgcagcggcggcggcggcggcggaggtaagcagcaggcgtggtgcaggatcgtcgacggcgccaccggcgccgtggtggcggaggtgaaggggaagacgacggcgggcggcgtggcgctgggagacgacgtgctgacgctgacggtggagcccaacgtcgaccacgcgctcatcatggggatggtgctcgtctacggcctcatgaaccacaccatgtgaaattgtgaatgcgatgtgatcgatcgagcttgatgaattgctgcggtgaagatcgaagcaaatgaaaattgaagcatagagagacgcgcgtgataggatttcttcctcttttgttctggtgtacatgtatgtgtacttcggttgaggaaattttggtgaaattaataatacaggtttagttttgggatttttgagctggtgctttctttaggagatcgtttgagggctgagggagtcgggaaccaacccaaccaaactgacatagaaccaagacaagttgttagcaagtgaagactgatctctgagtaatttcttagtcggaacaccgctctttgatcgatcacctattttctttcttttgtggaaggcttacggtctaacagcacatcaccgatctgcattcaaatttttctagtaatattcgggcacagaagtttctttagtaatcggccaagaattcggacaagatagttcgggcactattttatcgcttaagattggccggttatgattttctcatttaggagttgatcttcggacaagatagttcgtgcactattttatcgcttaagattggcaggttacaaccgattttctcatttaggagttgatcccttaaaaaaaaacaaatctagaattgaatgcctggatctagaattgaacctgcagcactgaagcattaattcattgaacaaagcaaatgcactattttgcacgctgccatgaaaaccaggtaccacggaatgaagaaaaagaaacatggataaacggtatataccaattgaactgcagagatacgagcatcaattgattaaatgaattgcactggctgtcgacataaatcaaccgatctgatggtcaggcttacaggcttgatagttcaagttccaaaccggtttttctacgctacacttcggcctaacgaacttacagttgacatgaatagagagatcaacgactaatttgactgggtatcacctatacatgaacaacaacagaagagctatttcttgtctatctcccggaccgctttacgctaatgcttatgttgtatgtacataggctagcgataggctacatgaagtagcttagagaagtcttcttcctggacccgccttctccatatagatcgttccactgaataagctcagtcatatttctcgaatcagatgttatacttgcacatacctatacataaagtagtttatgttagcatcatatttttatataagtaatttagagactacaaaacatctgatgaccatgtagacatgaacatatgagttctttcttttctcctgacacaccactagggctgtaggcagcaattatacgtaatgtttgagatggaaatgaaaaccatcgatacgtttattagaaattgcgagttttgagacatcagatcttgtagtagcctgagtctctttttgtttttcccttttcctcattttcttttcctgaaaaaggaaagaagtggcagtaacattacctgctcatgtgcatgtttgaaatcgttcattcttagggaacgaacatcactgctagaacgagggggaggtaatggtttattttctgcttctgctgatgctctctcctgcaggtagacaaaaaatggtgaactgagttcatcgtataacagtaacaataacaaccgacaactaattgttcatcatattaatatatcaatgatgttctgtagacagggcatgcaatgatattatacacagtttttcagtggataaaagagcagttccacagtattgactatattttcactaggatgaaatagaccagaaacattcactcagtagatttttttttcttcaataacttggtagaaattgagaaggcacaatctcgacaaatcaaactaaccttcttctctctttcaaggatctcccttatggggcaatgtgcagcagttacacacagattctgaaaagtagttgccatcatgaacaaaaggaaaataaaatcattgttttatttcaacaaaatgaaatcaaataagaataaagagtcttcacataaagcaaaaataccttcatatcactgcctgaataaccatcagtcaagttagccagagcttccagatctacatcatcagccaaatcttctttggccagtattacgctaagaatcttttttctattggatgcatctggcaaattcaccatcaacctaaattgatatgtgatcaggcaagcaaccattagcatttcattgtaaaaataaaaggaataccacagcgatgtaaaaaaagttacctcctggggagcctcctaacaacagcttcatcaagatcaaatggtctattggtggcagcaagtactaatacgcgttctttatcttttgttctcagaccatcccaatttaccataaactcatttttcatcttgcgcatagcttcatgttcccctgggttctcccttctacccagcatgccatcaacctacaaaaacgaatggatagaaagtaagaaactcaacaggataaaccaaaatcatgctagcctgctgaatcataggcaatataaaaaagagtgattcacagctttcactttggagtttggacaaccctttaaccaatcttttcactttggactaggtaactttgcctttgttgcaatttggttagagaagagagttggggtggtcaaaagtgcaacaaatgtaaaattaccagtccaaagtgagaagattaggtatatggtggtccaaactgaaacattggtaatataaaaggtgggccaaacgacaattcattccaaaaaaaatgaccataagaattttgttgactgacctcatccacaaaaatgacactaggagcaattttgcttgcaagtgaaaacacagctttgacatatttctcaccctcgccaaaccactgtcagaatcagatatcagcaaaaggagtattcaagatgtgaacaatctggaactctgcatagctctataaagggagtacctttgaagcaatactagacattgatatgttgataaaattggcgccagcctctgttgcaacagctttagcaagcatggtcttccccgtaccaggtgggccaaaaagcaatattcccttacatggctggtgaataaatggtgatcagaactatgtttgtgaaacaagtggaaaaaagaaacaagagaccaaataaaaaaaacagaccatgataattagcatgctacatttagtttgcagggttttttttaaagggttagggggcacatgaatcaataattgatgcgtggggagcctactaggctacatgatacaaaatactcccaacatgaaagctggaataaaaattagtgctaatggaaaaaatagttgaatctcaaaagcacagaacagtagagttaatgggcaaacaatagaatcacaaggcaacagagttaatggtcaaagcatagctggacagaaggccactgctctacattaagtacccactcagcaagcccgcatggatatataagcgaagcaggagatatttacttgaaaggggtaaacagaaaaatcagaacatcaaatttctacaagtgatacggaagactgaagaaagatcacacagagtgcagaggaactgaagggtactaaataaaagttatgaagcttgagctaccttcataagttgtcctttggagaacaattcgggcctttgcaacggaagcatcactagttccttcaaagtttccttgacattttctagtgctccaatgtcctcaaaggtaacacctatctcatctggagggatcacatcaccaagaagccgtttttcgaattcattctctgtcgttacatcctaaaaataacagtgggtgtatgtaagctgtaagcacagttaacatgaatagccccaaagcccaaaaatcatgtcattactgtttgcttgcaaaactctagaacagtcaggatacaaacaagaagttgggccaggctgccagttgccagtctagtcataacatatatttggcgatctaaacggttaaagaatagaagttaccttaagtgatttttttgtgctcttctttttagggtcactttgcatgctatccaacagctcaactccatgcttaaggctgcaaatatagaaattttcagtaaagcagacatgagatagaccagaagttaatctttcttacacaacaatgtaaaatattacagggttagagagcatacctttcaccagaaagggcaagtaatccatcattttcacgagttgggattgtgctatgtttaaattgatgactcaaagcataaccaacgactttatcgacgcctgaaaacaaaacagagcaaaataagaaaataagaagagcagatcaattatgccacagaacaaaattatgcaggattacaaatgtaggactgtactcacattcatttgtaaggattcgatctttaacacatgctgatgtctctatgtcagcacattccagaccattgcgggttaagaactacatccagttgcagaaatacatacaatggaatcagaaatattaagtaagaaacagcataaggagttggcaggtgtgaaattattttcactttttcagttatcaagtgaatctcgtgtcatagatatgcaacatgcatgattcttaaaccaagggggcttgtaaccaaacaattatctggaaattgaagggtacatacatggtagcacttttgaaaagcctttacggatcaaatataatttcagtattaaacacacctggacccgtaaggccataaacataacagaataacaataactaaacagacagctaattaaatatacatatatatgtacaaagttgtctacaccatcgatacttaccgactggatctttgacgtgttagcttttgccttcagaatttcaacatcacggtctaatagctgtttccactgtgagagttccaattcatcctgtatttctcagagttaaaacttgaaagaggcagtgcctgaaagtaaatgtcgccctataataacacaaatgacacacctgcggtgtttgtattgtcactttatttgggaagagtttagtcagatgcttcgctatcttcagagcctctttgtttttatcattcacccgaccaaagctatcctgcattaattcatcagattgtaacaagtggagttcaatcacaataattcagataagaaataacctgtacttcaacaatgaaaaggaagttgagaatgctgtgttactagtaactagtgaccattgcaataaggaacatcagacatcttctgcatactgttataactattatatcctaagttaaccatggggtaaccaaagaaattcacaagaatatgagcacaactgtagaagaacaggatttggcttaatgtacacaaacatcaattgcaagatacttcagtaaaactagaaaaacacacctggaaggtgaggtcgagtattgcttggctgtatgggaattttgaaaggaaaggagagccactgtttgactgtatgaaaaaaaaattgttagctagatggaaacaagtaaaattatactagttataatgattcttacaagcagcagtaccttgtctttccgactgtcagtatggatctgggacccaacaataaaaacaccagctgggaaactttcaatcttattctttaagccatgataggagtaactgtttccacacattttctcaacatccttcaaaaatagtatcagaggaccatgctgactttcttcggaagcaaactgtagaaagaaccagtaagtaaaaagagaagaattggaacaccaacaaacatagccaaaaaggactgcacacacctcgtatattacatcaaatggatgtttagctctatcttcccatcctgggccatcgaggcaaagagaatcaactggagatacaaggaaacataaacaagtgaatttcaaatttacattatatcaaatatagtaataaatgccaaattacagaatctatgtatgatataggtataaattatttaaggcataggagcacaagagcaaacaggctcacctggacaaaagaaaccacggtcaacctcgcaattgcctccaagatcaatgccaccaggaatctttttatcaaatctgactccaactttcgaggattcattttcctcaaaaggaagcctaacttcaccttgtgagccataatctggagctctgcagatcgtatcatttggcataaaccgatcagcggatgcagatgatgacaccaaaagattgtttacaggaaaaaaggccccgaggtgattgcaagtaaaagatgcaaatggtaacattaagatggcatttgtaaacaaagggagataacagataattcagggaaaaaaacacgtagttcacccctcacacaccatcattgatcacatgccggactgatgatccgaaactaaaaccaatcagggtcgtttgttaaaaaaaaaaagagcctgcggcatatcaataccaactatataacctaagaatatacagtaagttcattataatatcacatgcaatgttcacaaaaaaaatggagctagagattattgtcatgattactacgtaagatctgcttttctgggtacgtttggaacacaaaattgccacaagaactgaaataacagtgacgtcgcttgaatacttcagaaagcttatgtttatgcaagacataacctactgggaaccatttattgtagcaccctttaaaaatgtttccagattagcactacagtagtaacttgtctatctaaactcctcactcttttggtactgtcacatgacaaaatgtactttaggtgaacacagaaatggaaactgcttcccataatgaggcaccgatttcaacagagaacattagaaagccaataatctatcttaatatgcctcacctttgtccctcaaggataatccctgttgattgtactgaaccaatgtatctcaccctatctcctgaaaaaaccatcagaagcattgacgttgtggttttattatcatcataaatattctgaaaaaaggaactacaatctcctgcaaactttactgcacggacaaatttaaggtcaccatactcaactcaatgattttctacttaaactaggcatacatagcgaccaaagcagtcactactcagtgagtctgtgcatataactaatagtacatgcatagtcttaccttttttgtacgactcagattccttcgactttgaagactgtccctgaaaagaaaaatgaaatatatccaagaaccatattaattcaagcaatagtgtatgtccctacatgcttaggcaaacattttgtctataagtatttaagcaggcacagaattatactagaaaaattatatatgcaaaatccaatttacaaatcaacatttaaaaagttatctaaaagatcaacatttaaaaagacaggccataaggaaattcagttattgcgatattagcaaaagctagaacttctggatgtatttgcatacggtagtagcaaggttgataattttgctatgaagttgtggacattatctgaagaatcaagatttgaataaaaattaagcagtgtagcacaaaatactacagcagaatgtaagaggaaatacatcagtatgacttgggtgtgtgttcttgtcagaaaactgtgatggctcatttgaataacatcagcgcacattaaacagtacgcacactttctctagagaaagagaccatggttatggttaagaagcttacactcgccagcaacgaaggatctataatgagcagcttagcaccaaagtgtttggtaagagccttcactaatgattcttggtatatctcagatcctttaaaaatgccaattattttagtcaacaatccatgcatagcattttaaaaaattagtaaatgccagcaacaattttcttttagagtgaaaaatggactctcttaaaaattactaattgagcagttaatttacattcagcgataagcttaccagctggaccagacaataatacccgttggcaaagagaagatatatgttttgtccatttgatggattccttgcaacataagtttacatacgctgaagacaggagagcatttttggtattctcactgcaaaaggttaggtcccattaaaagatagttcttaaccacatgagactaagcactcaacattaactaagaaacaggccgattagtacttcagttataaggtcttattagaacttagaactactcagtgctattgcattatgaccagctatcccattcttcttgccatcacctgtctacttactggctcaaaaatgaatccagaaaagagaggtgcaaccggtgtccatagcaaaagaatacacatataattcaatgtcaagatagagaatgtcatcactgtgaagtaaataaacaacagaaacatacatggataacactatcctagtacttgatgtcattgagagctatagtgaagacataaccagataagactaatggaatgaagtcaaccatatctggtgtcctgctacaccttatgatgttacacaattaaacaaactagggcaaattatccgcatagagatcactcagaattttcagtgataaaagtggcatatacaagagaaaaataaagggcaatataatgcacaatgccaacgatattgaacttaggagattatcctataccttaccgaggctttgcataataaaagcaaaacattggtggatcaagatttatagggactaaatgcaccttttgtgtcatcaaaaaagcaacattcatttatcttacattagcttctctaaattaagttccaaattggcattcatttgcagaccaaattactgcaactttgtaggttaagcagctagcgcatacctcagataatatggaaaactatcaaatgaatctgatatatcacttgcattaacgaccaccttcttcagatcctctttcaacagttgatgttgagcaacctgtaaattttcttcagaagcaagctggctctgttcctccattgttttacataaactgctgactatctctgtatctattgaagttgaaaacaaaataatatgaggcatgtagtttttgtcaaaagtccaagctcatttcaaagtacatgtgcatgcaattcttgtaatcagactattgaactcattcaccttccctctatatgcatttattactaaaatcatgccacggactaagaacttatgtgcaaagcatcaacataggaacattatgttcccatctgcaatttttctgattttataatccctacatccatgtgcctggtccagatatgccttacaaataaatggatggaatacatatactatgagccctcaaaaagtttacagggttaagagggggaacaaaaactgttataaaatagcctcaccatgaggaaccaacggagggcggccatttccaaagttaaagggcattactgatagcttggctcctttagatgatacatccaatgtacctttggtaactggatattgcccttgctgaaaagcacatgtggccgaaaatgttgatgtgcttgatctttcctctggaagttgctgaaatatctgcgaacatgttaaggagcttcatatacaacattaatacttttctgaacaatcaattacattagtggaacagatgccagtacaagcaacacttatgcaagggtagttggtgatgaaaggatacataagcatgtctcccaagtgaactaaaaataacttcatcgcctccaaccaatgtgaccttagcagtcttatctaataccttcccatttacat

SEQ ID NO: 29819 - DNA, 28563 bp, Oryza sativa
ccaggaaatgactctgtcagcctcaaatcataatttccaccatggccaaccgtaaaatgagtagtataaataggtactgaaggagactggaaaggacaaagatgaacacaatcatgagcaaagacaaaaggactccatggtgcaaattaacactatagaagtaaatgaggctggtgttctctcaaattctcaagaggcaggcaccctttgccaatagagagaatccacttagtgccactgagtttttcccacttctacaatctaccactgactttgtcaagttgaataatatgccatcgtgttttcccaaacatctactaagtgccatcgccatccacaggccgttaggatgcatccgtttagtgtattgatttttttcttaatgactaaaatacccttaccttagcactttgactgaagaccctagccgtgcaatccccatttgatctgcccagtgtgtggcagcgccgactcccatcgatggaaggccagccgcccgagtctccgaatggtggcgtgatttttcgggttggaatggattcaatccatgggttaaggtctggatcgatccataaatcacgaccaacccactcgctcaggtcatgtgctactagctgtgctctcctcttgcaggtcatgtgcttgctttctgcctcccccattatccatggcggcatggcatctctgctgctggcagctgccacgccggcggcagcggctatgcctactccacggaaacgagacgaggtgcccggtgccccaagggaagcccggactgctgcgtcgtcggcaagcgctacccgcggttcatgtggctcacagacggtatcggacatgcgccggcgatcccgacgctgcatatgtgcttccgccggaacatggagctggtcgtcgagctgtactccgggtctgggtggctgtgcctcgacgacggcggtggtggcgcacgctgccgccgctgcaacgggaggatccgcgtcgtcgtcgccgccgccgtgaatggacggtctgtcgttgtcagggtggtggacgagtgtgactacgtgaacgggtgctgcaacgaggacggcttcgcgcccccgtgccaggacaacgttggcggcgagtcactgactgtgtggaagaagcttggctcaaagagaacaggggcaaataggtctttttacagctctaacagatgtctaactaacggcttatggacagcgatggcactcagtagacgttcgggaaaacacgatggcatattattcaacttgacaaagtcagtggtaaattgtagaagtggggaaaactcagtggcactgagtggattctctcttgccaataaccctccatcagcatccattcaaacctttgaaataatgaaatgctgaacatacacaacctaatcccaattcccaaatgctcttgtatattttcaccccaacctatgtaaacttgttaacttttgtttcgtcttggtccaagatcagataaaatatacaaaatgtataccactaagaactaaggacagaagttatgccactcggaattgaggggtttgtacttcttttttctgcagaatgcgtgatttagtccttagtccttaaagaccacaacacaaatccaggttctacaaaaaaaccttcgaaacaaaaaattactctgtttcctgaaatctgctattactgtagcacctcattgtctatcaatggaatgatcttagtgaacacaataggaaatttcagaacatattgtttcaaccgattggaagttgatcaccgaacctcggaagattgagaaatcagtcttccccaagcctcagcacgcccgttcgccaccgcctgccttgccttccagagtgagagttcttccgctgatggaacatttatatactttgtccttttcttcttcactgaagaatcgaaacaagcccaaatcaatcagaaacatatctcccctgaactaaatcaatcctaatacaccccaaaagccggaaaacccaacctccagagttggacaccgttgacgacgccggtacggcgcccgtgggcctcgccacaccgtgcaggttttccaccgagctatcgatcacatctatcgccgccgccgccgtcgcgtctgctccccccgccttcgccgcgggagtccctaccgtcggcttccgctaccgtacacaccaaaaccaacacaaaaaaaatcagataaaacccctcaaattccaccccgcgtgaacacatgcaacggaccttcgcccgcttccccgaccgccttcgaggcgtggaactccccggcgaccccggccccggcgaagccccatccgtcgccggcgatgccggcttcttcgacgacgcccgccgcttcggcgcggcgctccgccgcgtatccaccatcgctcccccggatcggcgacgcgcgcacgcaaagggaagaggaggaaggaaggcggccgccgcgagggaccgaaccgtaatttcgcgcgccgagccgagacgataccacggagagaagaagaggcttggggttctcccctcttttccgtttaaggaacgccaggtaggtggtgcgggggaggagggaggcccgcgcttatatataggcccccgacccgcgccgaaccggcaagcggcccgacgagaaaaaaaccggtttattttaaagccgcagacattttgccgacttggttgtggtgcggtgcggtgcgttgagacacacaggcggggggacgttgacctgttgttgcggcggcgttgggtgatgcgtgcggctaccggcttgaccggtccgaccggtcgggtggtggggtttaggtgcggtgtacaaagggaggcgttaataattgggcgagattaggattcggattaggataaaacacacgcttatgggttctgggtttgatgttgctttcgggccgttcaatttgtactgtcttttctttttcctttttcccaatctttttcgttgatagactgtgtttgtctcgtttggacaaatgcccgccaagatggatatccctcgtcatgggattttctcacgatttatcgatcctgacctcgacttaccaagtacggcggacgctaccaagggtagttgccaatttttgccgacaatatcattttgtttttcagaaggtccaccttatattaaactttaaaacgtgaagaaagtgtttttttaacccctttacaaaataacaatttttagctatatgtatctggactaatattcgtccaaatgcatagttagaattgttattctgaagcgtaattataaacttgctctctatggagttaaccccgattcaaccaacgtgacgttgtggctatactcggtgctgagttattttggctttcggtggctagcgatgttgctacggatacagtttagtgatattttcaattttaaaaatggtaggtagatagcttctggacgtattcacatgtattcaacaccttgcgtcagtgtatcccttagctcatatgcaataagtaacgtgccgtatatatatactgctacaaagaaaaacattttatatatgttgagatattggtaccactttttcggtggaaagcaagaaacgtatactggatttcctacgaaggacaactgcaccttatggatgtatcacgtttgtcgacccacgatactttggaagtattaaatgtcatgtatatcatctttgttcacctattttactgtttcaatttatgatgaattgctaaaacaaggcatttattaagatatcatggcgttaatattcgccttctttttcgctataaaggaagaaacggctacgggttttcctacaacatgtagctttacactttgcgtgaatataaattcgcaatactctagaatcacgtcttagaagtaaatattccctaggtttaaagttttaatttgtgatgaaacgttaaaacttgacatttttttaagatatcatggtgttgatccgccttctttctggttggaaaggaagaaacgtataagagattcttgataacctgtagctatacacctagcacgtcacattggcaaatactacttaacacttaaattattttgtgccatatatatagtcttagataagttggttttccctagttgaacgtttcatttttgttatgaaaagtttaaacaatacaaattatattggtgtagcttctttttttaaaaaaaaaggtagaaacatctactatatttaatccagcttgcagctgaaattaatcacgtgaaacgtatgtgttgaaaaaaccttgtgctgatgcaccatgttggcatgtctgcagcacttcaagtatttcatgacagtagagcggaattttctcttcttctattgtattccttacaagaatgagagtttttttttcataggtggatccaggagtggtcccaagaccacccaaaataatcctagcccaatacatatatatatacatatgtgaaaataaacttaaaaaaaagaaaagaagctcctttattaatatattatgatgcacatttaatcaatttatacttctaattaacttggttatatttagagtatttaaaaagttataagtgttggatcacctatataaaatttcatcatacgcactgttgttgtgagagaaaaacacaaggtgttggtccgttggatgatctatctgagattataaatataaacgtggagctttttgcaaaaagcaaacctcacatagcattttccaagaagagaaaaagttccgaaaaacgctgaaaaaattgctccccaaagggttttaattgcggatgatgtatatcgtcttgaggggccggaaaagtgtgttggttggatttcgacttctataattaaccatacctttcattgcattaggatagcgctttaagtttggaagtaaattgttacatgtgacaatgtatgtgatcctacgagttatctgaacttccatttcaaactatggataggctgctgctaccgtagtattttttgaccaagttatttattaaaatataaatattttttatgagtaaattgcatattgggtcatgtatttttttaccatggtttcagactagataacttaatccaatgttttcactttcaactataatttgtttccaaaaggttgcactttgaaccagtagcccacctgtcagtgcctatctttcatctttatctctattcggtctccaccaacagcgtatgcaaaagcgacctcgagcgaagtagagtaagtgctagggcggatcttgagcttggtgagaacgaggtagagcttgagcaacccagaattagcaataggggaggttgacctcgacctcgagctaggatggtgcatctagggggtagatggcggcggatcctgagcgcagggtcaacgtcagcggagcctgagtaggtggaacccgagcttgacctctgcctacactacatcgcccccatcgcaccggtgggatcagccatgggctcgttctctgctagctttgtcttctgttggcattatcgttgtcctcttcccgtggcttgacctcgaccttgaccttgccacaatctcgaccttgactccaagcctctttgctcatgcaatccacatgctcgagctcatgcacaccgctgtgactgtgagataaaagagaaggttttccatgctttggtttttttttaaccctagcctacctgatcaatgggccacgagtttaaagtgtaactttcaaacacagcttactacttgataggctatgtttaagaagagaaataaaaaagatacacaaaacgaggtacccctccgtactcataaagaaagtcgtttaagtcaaaccttggggaatataaatcataaataactctcaagttattgagtttgaaaatgtgaaaattatatgaatagatttgtcttgaaaaatacttttataaaagtatacatatataacttttcaaaaagatatttttatagaaacaagaagtcaaagttgtgttttggagaccttgtcgatgtccaaaacgacttcctttacgagtatggagggagtaagttattagtgtgtaactaataattattttaaacctaaaaaatgaatttttaaaaagatacacaaaacaatttttctattgaaagttttttttaaaaaaagatataccgattagcagtttgaaaagagcgtgtgaaaaatgatgttgttttcttgtttttgtttaactctcgaacacagtctaaagtgaaaacactactgtgaaactaggatgaagaaaaacataacctactgtaaccctgtttagtttcaaagttttttttcatacttccaactttagtgtgaactaaacacagcatgtattttaaagtactactccctcagtcccacaatataagggatttttagtttttgcttgcaacgtttgaccactcatcttattcaatttttttttaaatataaaaaacgaaaatttgtgcttaaagtactatagataataaagtaagtcacaaataaaataattaataatttcaaaaaattttaaataagacgagtggttaaacgttagaagaaaaaatcaaaatctcttatattatgggacggggagtagtacgtacctggctaggcgagtacagtacgcacggagatgagaggtcgtcggccgaggcgtcatgatcatctgattgaaaaggtgcggcggaaacaggaacagtggagcgcaacatgcgtcatggttgtgtgtgcaaacatagcccaccaccgaacacccagctattttaacgctttttcggtgttgggaaatcgcgccgtctcccatcacggagcgttgcgttggagtagcagtatttggggcggacggtgtacgccagccgacttgaccagcccagctagctagctacaccaccacctgtagatcgcacgtgttcggcgttgttccatcgatccctgtactgctgtcaagagagaagagagtggagtagcaggttggtggggagtactgtatttatttactcgctgcgcggcgtggcgtcgaaaggcttgtcaatctgcacgtatcgtcagcggggaccgacgtacgccacgcgagtgtgcgcgatgaggtccagccccttatcgcttgtagttgtatcgcttgtgagagctaagctacgcttcctgaagtataatttggttcttctaaggacagatcgtccagctagtagtagctaactcccccgttttcaaaatactaaggacactgtataattattggttactgaaaaaataacaagccaccattttagcggcaataattgcattgaaattcgtgcaaactcttttacctatccctcttgtctacccctccgtccaaaaaaaaaaaataatactacctatgaacctggaaggctggacacaaactaagaattcgttttttgacagagtagtattccgctcttcgcatgcagtttgtcatcaccgcctcccctcccaagtcccaaccacgctagtcctcatgatcaccagctaaccaagaagcccaataacaacgtcgaggaaccgctgcaccttgcaagcctgcaattggcggattggaagctggcctacatacaatggaggaataagttcatataggtatgtcattttgtcatcgaatctgaaaggaaaaagtacgaattatgcccctaaaatatcatggtcggccgaattacccccctaaacttgaaaaccagatattattcaccctgaattttcaataccggacgaattacccccctcgaccctatccaacgcggttttgtcctacatggcgtacgcgtggcaaccagtcagcaccttatttattaaaaaaatatgggtcccacatgtcatactcatctttccatcttcctccctctcctctctcttctctcgcctcgtagagctccaccgccgaccagatgatgaggacgcctgaaccgtaaaatgatgaggacgcctgaaccggatgcccgcctcgtagagctccgccgccgaccggatgatgccgccgttggcctcctcctcgtcgtcgtcgtggcggcggtcatctctcctggcggcggcgccgccgcctctgccccggtcaccgcgtggtctatggtgctggccactgagcaaactcttgcggaacaagtcgagcgggtggagcgcccggtgttccttcgccggcggcatcttgcacgaggccagatgaacctcagcaccattttgttcacttcatactcgatgtcaccctttttcaagtaatccgttaatggtgagcttatagctagcaatggtggaagagagatcgatcaatatcaatggtgtccattaccatttctttgggcttctttgccggtctcgacggcgacgagcttctggaggaggaggagaggcaggtggttatcggtgatgagcatgtcgcggcggacgtacggcaccatgtacagcgcgccgtggcggccgaacaccgggtcgttgtgtgcgtatccgccgccgctgatcaccttcgtcgtcctcatcatctccagcagaccaccagggagcacccgttggtgaacatcaccggcaagaatctctcgccgcgccactcgccggcgaggtccacggcggcaacgaactcctccaccggcctgcgtggagatgggtgcgtggcggatgggtgctcaccgggatgcggcggaagcagctggacagacgacggcggcgcccccctgctcagctcgcgggatgaaggatcggcgcagcctgctcagcccgccgtcggcctcggctcctcgcccgctgcccgcagccgcctccgcgcccgcccgcctccagcctcggctcctatcccgccgtccgcagctatctccgccaccggccgcccgtcggcgtcgattcctcgcccgcccgctgtccgcagccatccccgccgtcggccgcccgtcggtgtctgctcctcgtccgcagccgcctccgcggccgcccgccgccgcctccgtgcccgttaacctccagcctcagctcctcacccgccgccggccgcccgtcagcgtcggctcctcgcccgcccgccgctcgcagtgtttagttgttcaccgagagagagggggaagagaaggagaggaaaaaaaggtgctgacagctgggccccacctttttatatttgtttttttcactgtatcgtcacgtgtgtgccacgtaagctgaaaaccgcttcgacttagggtggaaatttagccagttttaagtgtttgggggtgtcaaatgtccggtattgtagtttagggggtaaatcgtacaaccgtaatagttcggggagtaattcgtacttttttcaatctgaaatttatccctaaaacaaaaaaaaaggacaattgctcatttgaccctattctgaagtctaactactaatttgaccctaattttttaactttgcccatttaactctgctttttaaaatcggaactgccgtctgaccttgttttcactacaccgttaaagtttatttacgaaacagaaaataaatcattttatattctaaactgactaaaatgccccagagtacaaaatcaatcatatccccaaaattttcacccggtgccgtccactcatcccaggtcttctcagatctcaacggcgcggctagggttcggcggaggcggcgcatggagggggctgcggcggcggcgcgcggtgagggcttcggcggcggcggcaggacgtgcggtggtgacgacgcgcaggtgcagctgcgacagcgacgcgcaggtgctgctgctgcacggcggcacgtaggagctgcggcagccacaacacgtggatgtgggagatggccgtcgagcctgatccttcgggcatgccataactacatgtctacatgtgttttttcccttgtacagtttgagtttgatgctggcaaaattttatcaaatctaagacaatttgtcaaacctatatcaaacccatgtcaaaatttgtcaaatctaacatcgatttgtcaaacctagaaaaataaaaaaaatcttttaataaagtagggtcaaataagtaagagcataaatggcatttttgttatgaactaacaccgttacattgcctttacagaatagggtcaagtttgatcttcatttgtgaaaaaagggtcaaatgagcaaattttaaaaaacaaggtcaaattggaaattaggtatcaaaacagggtcaacaacacaattgccccaaaaaaaaagatataacgggttcctcaatttgtaaaactggatcacctaaagtactaggcgaatcagatgtggcaagctaataagtcagcgcgagatcattatgggcccacatgttattgactagcactttcctactactctcttcccttcccctctctcttctcctctctctccctctccctctcccttcctccctatcccctctagggcgacgaccgacagaaagaatgacgtgatgggtgacgaggagaagggcggtggctggtggccacaggagaggagggcggccaatatatcgtagagggcggcgcccaacgaagagaagggtaacttgcgaccctctctctcatgcttgaatgggccgagcttgttgctttttctacatcgccaccacggcgggtggacccttgaggtggaacaccaaggcgggcatggcgctgccctttatgatcacgttcgcaacctcctctgcaaaggaaaaacacatccaaaacccccctcccctcaacccctaagctcatgacttgaagccaggcatggaaaaccgcgaatcgacgcggtgcagcgagggttcaggatgggtgcgcttatcctttttggcgagttccataaggacgttggtggcgcgcttggcggcggtgcagtaggcatggtgccaggagaagcaccggtggagggcgccgacctgcgtgtggaccttgcttgggagtgctggcagcagatctctggcttgcccaagtcatcctcctcattgtcatcatcgcacgccgccctttcctcctcctctctctctccctttctgggacaacagctgctgcagaggctagaaggggagtggacattggtgccagacactagctacaggggttgggggaactgagcggtaagcaagcacatcggggtgggtggtgggtgggtaggtttggacaccggagaggcaaaggccagaatcccaaagtggggaggtgagagggttcgacggtggcggttggttggccgacgattgaggtggattgagtagagtggcgggggaaccaacgagagagagagggggagaaggagagaagagaggaaagagaggggtgtggtgggtcccacggcatttcttgttttgaagcgtacactcgctgacatgtgggtcccatatttttttttgataagtgccacgtaggcaccaaatcagcctaagccactgatcaaacgtctcgggaccttatttgcactggttccggagttgagggaccttaagtgaatttcactccgcaacaatttgagggacgtcaagtgaacttattcctacagtggagccctgtaaaggccactgggccagtagcttaccctactccgtgattccggggctctgggccgacaactcgatcggaccgaaaccagtggcccgttcggagtttttgaaggcaaatggagccgggtacccagccatattaatttgatccatgccactgcaaatttggctattcagaaaaatgccattacaattcgtctattcgtaactatgccattaaaatttttaaaaaactagaaccgtgccactcccgttacatttttcatctatcccctccttttccatcttctccgtcgcagcgcaccaccgccacctcagtcagccaccgcacgcggctgccgctgacagccttggtcgaggaaccccacgccctcctccaccggcctcacggcctcgtccccacgcaccaccgcttccttggctctagcgccgagaccgacgccgccggtgaggtgtggacgcgcagataggcggcgggagcaggagatgggcgtcggcagtggcggcgattaagctcggcgatggaccatgctgcgatccattctccgccggcgagttaattgcacgagttaattagtttcacaaaattgatctagcttccatgctacgatccattctccgccggcgagcagtcggcagcagcggcgacggcttcgtcgtctccgcttccgctcgcggcggcgtgagccggaccatgtgttcgccgccgtcgcgtacatgcgtacgccacctcgagcgacacaggtggtagccactactactcccgctgcctccatagctacagctgcgacgagcacagccggcgccgacgccatctctacttggtgctggatgactggaaggaggggtacagcctacacaaagctcgacttcagccatgtctccggcgacgacgccaccagttgcgccgacgtgtgaagccgcgcagacgccgtgcttgccgccgccgccgcaggttgcgacagagtcgccgatttcttcgattctccttttctctttctcttttcttcgatttcttctttcctggcttggcatggccggcggcgtgatgcggacgaagctaggcgacggtggcgcagcccgacgagggcacgacgaggttgggcggcgccacgaccttgcggtggccggcgaggtgtggatggcggtggggcgtgaccgcgcggccctgcggtggccggcgaggagcggcgcagcaagccgaggacggctcggcggcacagcccgaggccaacgtgcgacggtgcggcggagctcaaggcccaaggccgaggtgtggtggctgattgaggcggcggcggcgatccgtgctgcgcgctgtaacggagaagacggaaaaggaggggatagatggaaatcatgacgggagtggcacggttctaatttctgcaaaacttcaatggcacggttacaaatagacaaattgtaatggtatttttctgaatagccaaatttgcagtggcatggatcaaattaaccctatcagggagattggggtgtgccgtgagtgtggcttgcacggggtccagccagggtccctggtctcccttgatccagtaaacagacgacacgcggacgatcgccatcttagcaaagatacttcatcaagcaagaaggcagtacatcttctaaatgacgcagcctctgagagcgacagacagacaggagataacacaacgttttcaggacacaaatcgcggataattttatcggaactaatacgacacctgcgacgccggagcaaaacgacaccacaacagagcgctctagtagcctctacagcttaaacagactagcagtggcagtagtctagcagatacaatgggcaggaatcgccaaaggattctaagctagtagccaatagaacctgcttacctgcatcgacagcaaccgagatagcaacagaaagttcaagcctaattgcactggattagctaaaagattgggacatcaaccacagcttttatacaaaaccaggaggattaaacgtacgccacaacacaaagtaaaagagctaagtagaacatcatcatccacgaaaatgtcgtcacatgcatacatctaaaacaccatttttctgctgccataagcgccccactcttacttattcagttcaggacttcaggcgaaggctacctctcaccttcaggcgcggtgacctcacctactgggtcttcgccgactcgctcttcgacggctgggcctccggcgataactcgccgaaaaccttggcgatgcgctcggtggggatggcgggaaggtactgtgctccggtgtaacccttgtcggccgcggcggcgatcaccttgttgtacttctcggcccagtaggcggcggtgggcacggcgatctgcgccacctgcgggaacagcggcaggttgttgagcgagcgccaggtgaagacggcgaggtgctccgccgccggctcgtagcgcacgtagaggtccttggccgccggctggatcctgccgtacacgcccttggccacgggctcgaccttggcgtacgcgacgcgcgcggcgccggtgacgcccgactgctgcacctccgcggtgagctccctcgccacgtccggcacgccgcgggccaccgcgcaagccttggcggaggcggccttcagcgtcggcgggaggtgtcggtccagctcttgcaccgtgtcatccacctgcaatttatggttacacctccgttagcaagaacacataataatttctaccgtgcttccaaatacctacaagaattagcaccgaattctaccacaagcaatcctcagtatcaacttatgtattgccaagcaagaacacattgaaatcaaatcggaatcaatttaaaatgaacacgctgaactcaatttctaccgtgcctccaaattcttgcatcaattagcacccaaagctaccagaagcaatactcagtatcaaattatgtattgccaagcaagaacacagtgaaatcgaatcggaaattcggaatcaatttaaaatgaacacgctgaacccaatttctaccgtgcctccatattcttgcatcaattagcaccgaaagctaccagaagcaatactcaaaaatcaaattatttatcgacaagaaagaacactgagtggaatcagtcaaatggactataccaccacatttctaccgttcttcctaaattcctacaagcaccgaactctactgcaagccaatcctcaaagtcaaattctatattgccaactaagaacactgaaatcaaattggaatcaactttggagttcgtcggcaggttcgttgccaactgccaaactaggacctgttcatcacctcggagactccgccaagtgctagaatgcgccggaatctaataaggaatctaccatgggggccggattcgatgcaccaccacgggaatcccgtacggggacgaattctccaccacagattgcccacccctgtaggccccagctacatcacgcgcaccaagaaaatgaccacccacgccatcgtagggcccgcgtcggagcaatcatgcaccgcacccgaaaaaaatctagcggcgccagatagggcacggcgcccatcccgttctagcgtgcgccgccgcaagcgcggccacctcggccggcgagcgagcgagcgagccgcgccaccgctcgttcgtctcgcgggacaacgccaagtcggcaaccgttagcaacggcgaaagagggggctggggctaccttgcggtcgacgaaggcgaggacgtcgagggggacgccatggaagcggccgtagacggggccgacgacgcccttgacggcggactcgacggcgtcgacgccggggcggagcgggccggcgtggtccttggcaagcgcgtagagccccgcgaggcagatcgtcgcctgcgctgccgccacctgcacgaactccaagtacctcagcttcggcctcctcaccttcttcaccttcacctccctcttctgcaaaaccaaaccaaaccaaaccaaaacccccaaaatcggaaccaaatcagcaccaaattccacccccaaaaccagcatcaattcgaaaccaacaagccacaacgaatcgcgcctaccacttgcgggttgggctccgccatcgccggaatcgaggccgcgagggtttcgagaagctgctcgggaatcgggggagacgaagacgagacgagacgagacacgattttccttttttttttcttttctttctttcttactttcccttcaagcggggaggaaacggaaggatcgggaggaggtgggtatataggcgacgaggagctccgcacggccgtccgatgcgaggggtgcgggtcgatctgggccgttgggacgcggccgcgagaatgctctggagcgggtccgccacgtcgtggctcgcgtgagggacacgtggaggcggggccctgtccacgtctcctacaggcgccatcttttactcgttgatctgtgtgcgggatggttgaggatggacggccgaggtgggtcatgccggtgatttgctgatgtcgattctagcttctagaaatttctatcaatcatttgtgagtgaccatggctagcttgcttcaacattaagctgcagatttgaacgattcagttataaagcaacgagtatgcatttgatggtgttcttttctcaagacagattcttcggggttgttcaccaatgacttgacggccgcggtgccagcacaaggatatcgatggaaagaagtaggctggtgaaaacgcaggccggctagaagtagtagtacttccgtagccggcacgctgatcaagaactgacgtgcgtgatgcaaagaattctcagctgctctctttcctcaatggccattctgatggggatcctgaactcagggagaaaatggtttcacatcgctaaatacatcaaggcgctccaggcaggcaggggaagtgaggcacagccacgctagccgccaatctcctgcaggtactgtcgggcagtgccaggacaacctgccttgtgttgtcaggggaaaaaacatccatccgcgcatctagatcggatccacatccacttcaatagaagcatactccgtatacagtatgatcgaaagaaaaccatagttcgcagttcgcaccatacatttcatggctaatcaagaactattaatctcagacgttgagcgtgaggttccatccaagcgaatgcggcacataacaaagagcaccggcgttcagcatcagaccatcagttgatcgaccaaccatttttaaattaaataaaacaataatacataagaacatacacaacaatcgttctagttagacgcctttgtcgttgagcttttcctgcaaacagatacacttattgtatttgaccccctttaaataacggtgcagacacgagcacaattagctacagctgcacaacctctcgtacacaacgaatgcaatgttagccactgacagctaacgcctagcaacatcaggtaggagcatactgttgtacaggcctggagttgtttgcctgaagcaactccggcttacgagctatctagtgaaggccgccgagtcttggtctggttcaatcgttatactagggctaagaccatcttgcatctgctgctcagatccctgtttgcagtacgaatgttagatctatcaaggaaatacataaaatcaagtccatgcatcagcagtaaaattttgctaacaagtacagtttgaaagtttaaatgccctttgaaaactcttttcaaatttaattcaatttataatgaagtttattgttccgaaaagccttgcaaacaagcattccatgtatgtcaccctaaaaactgtgtacctgctattcttgccaatgttcaatagctgaggccagacaactaatcttgtccgtagtgatagtcccagagaggactctgtaatgcaattaaacataactattggtaatcaaaatacctgtaccaacttattatcgcacatttgcatatatgtgtttcgattagatctcgcaagtaattcaggtaagaataccaatacttctgatgtttactccttaaaaccaataccatcccccattatgatattctgtggctagttatatgtacatgtgtgttatctgcaatatattttgtaatcatgtgtttctttgcatgtgtatactgagtatttgtggaacatgtattctttgcatttgtgtcgaatggtgggcccaacccccattgtttatgtggtcatgtatataatttctaaaattaagaataataattattttttccatattaactcttgaacttgaagtatatttatctcgcgtttgttgtattgtgtaagcacattactaacaagattaaaaagcccagagtaagcaattatctaaccgtctccatacagtcaaatacagtaggcagtaacataggtacttcaagtacaggattatgtgccttgcaggaaatgagacataatatggtgatttttctggtgttgccagtgttatgcaagatgcagatataagcataagatgtactgcatgaaaataaatattaaacaaacatccccgttgttcttcaaatacctaatagaaaacaacttacctgtggctgcaaagatggtaactgctgctgctgctggtcttgttgcatcacatatggttgtggttgagacagcctgtagtatggctccttgagttcaagtttggctgtggatgtctgcaggatgccaccttgttctgccccctcaccccacattttagcttccagaaaataaccaaaagagcaagaaccatcagcttcaagtgcaatagagggaaaaaaactgataacaaacgaaatagaaaatgcccaacctgacatcgtcaagtatatcgtgtagctttgtgcactgtgggctaccagatgaagtcgtcctgttatttcttgtcctgccatgacatataatggctgtgaaagtatgcatcgtagttgataccagtgagtcgtaggggaggacctggagcagtggtaagccacctctggacagtgctgcagtaaaacacacagattgtagcgggtagaagcagacaagagacaatatagactcaaataaaccgatatagcactgacctcccattgaacaatacatcaaaccaacaagctagcccatgcaccctagtgccaacagaggccacaaaatttaggggaatgtcaatctcgtaaagctcctcttcctggcaaagaaagaaaagaatgcttcattttgcagggagaaacaatacagaaaaattacctgtagtttcagtctcatcaccaataaagaaatatttaccttcatggtagtgaaatcaagcgtatgaaacgtaggcggagaaaccaataatcttggatcgaatgcatccaccacaggctgcatgagaattgcaggggcgtttagatttgataactagtcagtagtcactctgatcaacaatgcagtcatgggttatatagaattacttaagtaatagccattctcggggttcaattcttggcattaaccactggaactggaatacaggtggctaattgaaagattaggtgccagtaagagtgcattgaactatttattgttgtttttgaattgaggtactttctagtcaaaagttgaaaagaaaagggatgagatacctgtgaaaaatacccctggaatgctgaaccatgcaaaggtgtaagatcaacaccaaaaaagttatgctgctgccagaagagagcctgcagagacacacaaccaaaatataatgtgtcaaactaaagaaacacttaggattgaaataacatactttcagcaaggataatatacttgctcaacaacatgagaataaataggaagtgaccacaaggtggctttaaccccccaccagcatcatcatacgaaaatatgagattttcgcatagagcaaatgatgtgctaaaaacacataaaagctaggaataagtgtgcattttcttttttcagaaaatacacagaagagctgcttatctttgtgttaagacaaggtataagtgggggaaatggacacattctcactttggtactgtgctatacagttgacagaaagcatggacaagttgagaattcatttctcaatatctcctatttaaagaaccagggaaattttgaaacagtaatatctatatataggatgtcagatgttatgggcgttgatccagagatagggtaacggtccaaagatgagaataaattgatagttaccccctctgtcccaaagtataacaacctagtactcgattagacaccacctagtactatgaagactgtctaggttcatagtactaagtggtgtctagtcgagtactaggttgctatactttgggacgaagggagtatttcattactttgtgttcaataaattgcaagttgtatagtgtgtatctgaactcatcttacgtagttgctaggtcaagcgcgtgaacataaacatatggtgttacagtttgatgttctggacatttccgctccaacaagttccaatgtcatatccatttctggcattaccattttgtattctcatttcaagaaaaaaaaagtatggtttcggacaacagttttgaatattttcgattcaattccaactgttttcacaacccacttgcacatagtaatttacaacaaggttagtatagcctcactagaagcactggatagtaagattgtgcagtaaacttaggaaaaagatttcatcggagtgtaatactgtaccttgtttgccatttcaacatagaggtattcatcggaaaatggagccatatgaatcctagtaaatatttaatatatcaggcatcagtgagtaattgtgaatgccaaaagtagcttaaaaagccatgcatctgagtttattttttggaaaacttagccaatagatctattctgacgttttagtaagcacagatgatttagtgaacaatcctaatcaaacacctaaagattttgtgaagcagaacttccaataaatatccagagtggttcagattaccttccagttgttggaaacattttaccacctggcacaaggaatctgtctctagctataacataggactccagcatcctttcattcaccaagagggttcctaaaatattatagacaaaacaagtcactacataatacatataagcagatacagaaacaagtttattgtcctataccaaatttcaaaattcaaacaacaatataacatttcaaatattagctagtttacattgggtattcaactattcaataaacaccgtggataccgcatatactatcaccatttggccaatggccagtgcttaacccatacaatccattaaaaggaacattgatgctaacaacggatagtttgtctacaaatatgacagccaatttcttgacaggattaacagatggcaatgcaacctagtacttatccgtcacctagctgcaaagtgtgaaagttatccatatgtatacaaacacaatgaatcggttattagattgtgcaacgggtataagatgtaaagcaggaacaccacaggtgactctgggaaaagaaatgctccagaaagtttatcattgaggcatacccataggctccgaaataagtatgtcagctttctctggaagttcaacttcctcaactttgcctttgatgacctagttatgatggggacactgattaattttagggcaaaaaggaagcctggaagttccaaaccaaactggcacataaacgaaccgttattctttgtccaagagatgggtttccagaaataagacgctgagcatgttcagccatttcagatgcctcaactgcatatacatgtctggcaccagcctgatattaacatataaaacatcatctgttattttgtataaaaaacaagaagttagaaaagtcatggagaatgttggagtgtacctgtgcagcaaataatgaaagaatgccactaccagctccaacatcaaccacaactcgaccctcaaaatcggatcgattttccattacagcagcatagtatgttcctggagtaaaaggttgtaaactaattacatatatacagaaaggagaccttcatgccattattttaactcttttgacaataggccagagatactgacctgtcctgacaaagtcttgcaacatattttgctgatgtaataactggccatagtagtggaaatacatctttgctgatgaggcctcaatttttgtatcaaatttgcttttagaaccaattattaatccattttccaaaggttcacctgccatgaagcagcaatatgttgaaataagaatctatggcattttacattaaaaaaaagggctaatgactctggcttcactgttggcataagttttgagattaacatgtcaatgttgtcccttagttgccactttgcttcgtcacaaataacacttttgaaaaaggaaacgaatacaaagagaagcacaaaaaggtgtgctacaatgagcatctcataaccaagttctaccaagagaaatgatgcaaagtattaatgtatgttctccaaaataacatgcattaatataatcatgcatgatgtaatttgatttcattaactacagttatccttcaagaaaactggatgtgcagatataaagcagtaaacatgctacttctacaaattcctaatagcattatttttttatcagaccaggcacgaccaaatatgcaagttaaatggcattatgcatttcattagatagtagagcactagagctagcagaatatatcaaaccaaagtgaaaaacattatctagtcttaaaaacacttggtattgaagggcagctattggcacttaaagaaaaacagacatggagagctgtaattgactatatgcatgataatctgaaatttagcattgagaacatgggccgatgactcagaaataatgcaacaaaatatgctactggaattatctgaaacaagaaatgaaaggacaaaccagcttttccactaatcactcggtgtttccattgttgaaaagctaaatagaaggctttgctctcagcttctgtcctaagaacaaccttaattgctcttgaatatgacttctgcctcaaagaattgagagttaacatgaagccatttaatatgtgctacaagaaagttccaacagaaaaggccaaacaatgatctacaaattgtcatattacctttacctctaggcaacattatcagaaagtctatgcgatgagttatttagcagatggcaacaaagaagtgtgacacagcagtcagcaggaaattcacctttataacgtaacaataggcagcagactatcaagagttctataagtcagactttcagataggcaggaaaattctagttatgtctcgcatctcacaatcatagagcatatcctttgcagtttcagaaagttgcttttagtacatataggatggtatcgagagagatcatatcacactccagcctttttctttaggtgtttcaactagtatgtgtctaagactctaagttggatttggatgaagatatgacccccaaaagaaagagtgttccgacaacaaacttgaatgcaaactgtgtcatgttattcaactagtaatatcaacatcttcgccccagatttaaaatgtcactgaatcttcttttgagccatcttttaaaagaaaaatgttggtatgcctctaccgtgcaacaattaaaccttgagatcatcttaaaattggcttgagcatgatacagccatacaggcatacagctcaaggcgtggtatatcagggaattggactggttatatactggaaggctcagtgcacatcagaaatatgaaatccaacagaggaatgtacattatgaccaaacgaaagcacataataactcaaaaaaacagcgaaattactgaagagtacctcctccacaccgtccttagcctccgactcgccgctcacgcacagccactccgtcggccccagcttaaatatctgcaaaactcaaaatctcatcctccaatcgcacggcaacagcagaggcacctctcagagccccaccatgaaatcgaatcgaaccaacgcggccacgccctacagcccaacgcacttccacttctacttcccccataaaccatcgagatcacggaggaatacctgcgcgtcagagagatcgatctcgagcgtgtgcttcgcctgggtctccccggaccagacgaggctgaggcgcggggccccggtggacgcgtccccgccgaacacggccgtggcgccgccggtgacctccgtcgacgcgcccgcgacggcgggtacggagacatggcagaaggagacgttcgggaacaggtccgccgacgccattggggccgggagcttcggatccgggatgccctagggttttgggcgcgccgaggcgggcgacgcggggtggctagggttttgggcggaggcgcgcggcgtcgcggggtgaaggagctcgctgtttgtacgcgtgggtggagtatgcgtctgccattttctaataaatatttttatttaattcgagagagaagacaaccacgccgccaaagtcacggtgacgcggtgagttcgaatgaggctttcttacctttgacggcaggtgggacccaccgcttcgttatcgatgaagggccccacgtgtcagtggcgaatgggaatggtatgatcgtacgcataacgacggaccatagttaaagccgtcgcttttttggctttttacggagaatgggtgaacctttggtactgacatgtggggtctatactccaaagtgctttggtccacagatcatgggaatgtattttgggagtactctgaacttttggtattaattgggctcttgggacttgggccacttggattcatttgttttaagcccaaaatttgctgggccatgactaccaagcccaaaattctctactgtacataagttgcatgtcctatattagtgtaaagttataatccattaatcataaatcttaacatgtaaatatatcacctcatcatccactagcataattacatataaaacttatgcaaacatgcaacatcatctataattctttaaattctacaaatcaacattcaatcatcttccttcacattatttttcacaatatttttaatatatatatccatcatttttataatccttaacatatattcatctatataaacaaagtgcataatatcatattttatctataatctcatatagagtctactaaatgtatttctccttaaacatagtttgataacctgttttatttattgttaataactaatatatattttattgttaactcgattattaaaataatattaaaagttacttagaaatttacgcagcaaagcacggggaatcacccagtgtatttatataagtgattgtgtgcacgttttacatgagcttctgcatctgtattttgttttgctaaaaaaaagattatgttacgatcaaattattatttattttgaaacatgtacaatcgtgcaaacatccatatacacacgtacatactcacccatataaacgctcgtattcatatagtatctctacgagcacaatcaaccagttgtatcaatatatcttgaaattgatgaagtaatcatatgtagggtatgatcgtatacaactgagatgaaaatatacttatttgtataagatcctcatcatacgcagtggttaacttccaggcttgatgttgagtcgatgtgccttgttttcgtattttccaactgttgcaactaactgttctgtcaaatatcatagaaacggtaaacaccgcgatccaaaaaccatcaaattctaaactccgattacagttaagctgggtgtatttatctgcgatgatgcaaattgagacaagtactcttttgtcatgtaaagatcatatgggtcttctaagatgggctggaccaaagcaaactttaggtggtgtttatttatgttgaagatgaagttaggacactaaaaaaaaaatcattagcacataattaattaagttttaattattataaagttagaaaatgaatcttcatgataattaaaagtaacatttttataaaagacatcgtttaacaatttaaaaagtatactaatggaaaccgatgtaaagccctaattgttttattattttgcgtgcgctaacttcatcatcatcttaatatatctcaaatactaattattagtgcataattattaattttaattattataacttagaaaatagatttatttgatattttaaatcaactgatgtatagacagttttttttaaaaaaacacatcgtttaaaaaagtgcttaaaaaaccgaggtaaaatctatgcatcttgatcagaaaagaacatggcacacttttgtttggtacggaaattttctacatagaagttatttttaaatatgaagtaaattcattttaaatatgaaataaatacatttttcaaaacgtaattaataatactccaatgatttcaaagtattttcatctgaatcaaacggggcccgtcgtcttctttcgtctccactctctcgtcgtcgtcggtctcggggcccgacggggtctcgacgccgccttccatccacggcggccgccggtggcgatctggctcctcctcctcttcatccaccgcgcattacgttccgtacaacgagagctctcccttccaccggcctgcgtttgcatatccatccctccgcccgccttcctcgccgcgatccaggaggatgccgccggagcaagccggagacctcgccgccgttgtgagcaaaattctgacacatttttttggaagtaacattacttaggtttatcgctagttagtcgttggattgcggctattcctcgctagttgtaaaatactccgcccgggggggataaactttatgtcatctgattgcaactgtaaatcctctgggtaggcgagttcaagccgattcaacaatgccgccatgggaggagcagcagaagcttcctcatcagagagagactccatgaaagggcgcacaaagaagctcctagtagataaggtatacctagcccaatgatcggatctgtgcaggggactccacgagcaagcgcgcgtggcttgaattcactcctgaaatcgacgtgctgtgctaactgtagcctgtaggagtgtagggggtagaggaggctggtcctgtgctctcttatctagcagggtggctggtgagggttagttcattctttgatgtcccccaccatcctaatccaaagagaagctatgctaggttattagggaggggaaacaccactgatgagatatggagggagggggcctggcctccctcctggctgtccctgttcttgatgtgaagaaaggggcaccaatctctgacttgtttctgcctcagcacagttcattcccctcacaggcatgcttgcacctccatcatgaaagtgtccctcctccctcagcctccccttctttggtcttttcccacctttatgctgtgctacaatgagaaccgccgtcgctcgcgcacccgattggcctgcgtgagaatcgactcacctccttcttaataacatcgatatgatagcctcctttcatatccagctttttttaatgctgtgctacaatttagtttaagttattgacttttttttttgctttacctttggtttagctctgatgtatttctccaaaaactttaggagacatggaaacaggagatgcttgcttgagaatttttttgagatattacgtaatcgctagctttatggtgatgctgacttgagtgaactatactagagaacatgaacgtggaaagatatgccctttttaccttgaaagaagcagattgctctgcttgcctaatgctgtgcccactaagaagctcaagaagcatggtggatgcattttagtgtttggtaaaatgtcgaagctcaagaagcatgtatgtataatagctgctgaatgtttcatttcttgcacatgtggctattcagatcatggaggatgcaggccactttgaaggggttttttttttcattagtttctgttgtggagcgagaaggttagatagatctcacaaggacaaggagaaagaaatctggggatatatgacaataatgatattacaagggatccaataactcatctttcctgattaatccttacaactttagcaaagaatatgtgcaccgtttccccttttttgtgaaggtagttaatagacgaagagcagggggcatggcaccaccacagggagtgcaccatatgcggcgagcatccgcatactgtaaatgcatgcctttaccctgaaatgactagataatatcataaagaaagtatgatgcctgggattgtcacctacgcgtttattccatcgatatcaccttttgaaaatggctaggggtacggtagaattccgctttctattgtgataatgtgatattcaattgaaaggaattggtatgtgaaataatctgcagctgccacctttgtagcaggtgtaagtcagtagagctcagctgatgtactgatattttgagcatatgcatgcgcaggctctttaccttcctgagtaacctgttctttttactattgaatcatccttggatgcttcaagttggggatgcacctagtatggaatttggtgtttgtttatagccgtatgttttgttgattcagtgaccttgggaccttgcaaactaaggctagcattgttcccttctaacgccttatgttacacgaaaccttcagatgctgttacaactttcctggaataacttttttagtgtacaaaatatgttattgtctccagtattatctactttactgatgtgtttcattgtgtgcgaccttgtaccacggcagtgtattccttagttgcattattgacaactttatcatgatctgacaaatatcattattgtgtgtgcaccttttgcctcatcatcttggtggatgttttttttttccactggaatattgtttacctgtggtctatgtgctttgatttgtcattgtcagcatctccatgcccagttccatatgaaattgcagtcaaaagagttcacatttttttttgcatgaattaaactttgttctgtttttgccagcagcttcatgcttaggtccatgggattgtgtggcaatgtaaacatgtttttttcttctgtttactccttttgaccacaatactaatattatgatttttgagcattgtag

SEQ ID NO: 29820 - DNA, 2019 bp, Oryza sativa
tttcctggaatactttttttagtgtacaaaatatgttattgtctccagtattatctactttactgatgtgtttcattgtgtgcgaccttgtaccacgcaagtgtattccttagttgcattattgacaactttatcatgatctgacaaatatcattattgtgtgtgcaccttttgcctcatcatcttggtggatgttttttttttccactggaatattgtttacctgtggtctatgtgctttgatttgtcattgtcagcatctccatgcccagttccatatgaaattgcagtcaaaagagttcacatttttttttgcatgaattaaactttgttctgtttttgccagcagcttcatgcttaggtccatgggattgtgtggcaatgtaaacatgtttttttcttctgtttactccttttgaccacaatactaatattatgatttttgagcattgtagatggtctctgcttctggagagtggagactctggttagcatcagtcacttgacccactacaaataatagaagttcctgggatgaagaaccaataactgtcagccacaaccctttgtttgcattcttattacctttgttacttagtctccgctagattatccatctcctttgattgaggttaatcatgtccttttgatccaactggtttaaaagttacaacttttcatctaggtggtgcatttgttattaatttgttaaccacaatccatggcatggtactattcaccttttcttgatacataaaacatttcattcaaaaaatggaagtggatcaggtttacacttttgtcactcacctctcctaggatcttcaactcagttctagcttttccaacctattttttctatcattaccacaaaaagattgccctttacttactggttacccaagtatagtgtcttttgcctatccctacatgcctcatgttttcttcatggctaggagtttgtagtgatatttcaagactagtgcaaatatttcatattttttcttcatgacaaaggggaccttcttaaaggtacatcgtgagaaacaggtggagttctgcgtcacacagcaaagcaaggcaatggataatggaggacagcgtcttgatataatttttaagttttcaacatattatcacatcacattacacttttcaatagaacactactagagggagttccataaattgagacactgtcgtgtccagaaagatagcaagtggatcatcttgcacaggctgcaccgtcgtattggttcagaatctttcaaataaagtcgaaatattaagaagatatgcttctcagaccatgcatcaccacactatataaggggcaaacaagctcccagtatcgttactttgagcccccgcctccccttttgaaataaggttgactgtaattctgcttttgttcgtaatatggatgatcataacttagactacaagggaagtggtgctcttgaagagcttgagatgttaacagtgaatgccaaagaagcccaagagctcatattgacgaaaatccttgagaggaatcaggctaccgagtacctgagcaaattcatgaatgggtcaacaaatatttctgccttcaagagacatgttcctgtagtaacatatgataaggtacatccatacattctcaggattgcaactggtgaggaatcttcaattttatgtggagaatatatcttggagctgcttagaaggtgcgcctctcatttcaatgcattcatcagttcacatctctttcctgtgtatggtagagatagtagcaaccaacatatattggttggcaatctggcaggccctacatgtacttgcctttgatagaagttggttttagtgcacttggtggttaatgggagaaaaataagttctcttggtacttgctaggctgctgttaatgactgtcataaatccagaggcacagaccgagcttcgcttaggaaaaattgtttatatttattttttggaatgtgctaggctagaaatgactggtcatactaagctacttgc

SEQ ID NO: 29821 - DNA, 11344 bp, Oryza sativa
aacgggcctgtagccaaaggttacagtgctcaagtagcacctctaggtcctgggttcaactccccatgggagcaaatttcaggcctagtaaaaacaagtcactcgttggccgggcagggacctcaaaccacaggttaaggaccgatccatagagggcgagtccgcgtgtgtggggccagggtttgtggcttttcttggccgctttggttgaggcttcttctaaatgaaaagccgtgagggcggtcattcccctgccggtcgaatttttttaaataacaatctgtttaagctattctgactcaggatcttctaagtgatcctctctatatggaaggaccgaagtaattagcaaagtacatacaaaatgcagaagttctattaccaaagtatgtataaatattttctcttgctcctacctttgaggatataatttttcaagaacacacagaagagatgtgcatattttgcatcaggcagaagaaagagtaagaaataattcccattaggccagacccagaatatactcatcataagcaaccacaatctatgtaaacaactagggcccgcctgcaaaagaatagacaacaagttgccaacaaaagtagatacatcagtttacaaatatatcatctgcttcttgaagaaataccctaatgtttgatccatgccctataatatatccctctttactgtcattaaagaaattactgttaatattaggccttattgtgtttaaagaatttaatacagggccttgctattcacttagtgactgtgcttttgatgctaattacataattaatttgtagctcggggacttctcgaggtgagccaagattgatgccgtccatcttaaaggatcttgaccgtcgaacctacctctatagtctgatcatgcctatcatgaacaagtaagtttatatcttcttatggaaatattgtgatgtggttatgacaacttcattattgtgtaatatctggatccagttgtatgcctaatctcctttctgcaattttctaaccttcttattcttgcaaaagtaatgagataagtagttaattattgcattaaccaaattttgtttttgtttgcctcaaacagatgatatcatttgtgaagctctgttgacactgaccctaaaattgacagatcctgagaggcgttgttttgcatgcttcctgtttgacatttttttttggattattcacattagtaacacaacctgggtccagtactccagttgcaagacgcaaagtattggacaatagttaccgcatatgccactgcttgcagctcaaaaacttaaaaataagttcatatattggttgctgctttagcaaagtatcaggcaatgccagatatacatttgctacctcataccacatcaagaaaccaactgttatacacagctgttttggtgtttctaaaatccacactattaatgcttccaaaggtaattatgtttaatatggtacctgaattttggactaaactgaatggcaccctcagatgcaacttagctcaaatgcttttgttcctgactgtattaatatccagtacataaatttgttagatagcaccatagcagtagcgcacagatatatcttccagagttccaaaggtttatcaagagtttccagacagatttgtcttggactggcaatttatgtcataatccaatctgcaggtatatatcaggccttggtgaggggaaagctatgtaccttctctttgtgaaagctgaaacactgacagattctggaattccagttcgatcagtcctcactagctactataagagccctcatttccttcaccgcaaacacgatttatacaacaactataccagtcctgatgaggtcattctttgccctgatagccagcagagcatgtactgccagctgctctgtggcctggtagaacgccagcatgttcttcgtatcggggcagtctttgcctcagcattccttcgatctatcagcttccttgagcagcattggcgtgaccttgtcaatgacatacgaattggtcagctcaactccagtatcaccagtccagcatgccgtttggccatgctgaacttccttgcattgcccaacccagagctagctgatcaggttgaggcaatatgcagctgcggttcatggaaggggattctgggaaggctatggcctaatgttaaatatatcgaagctgttcttacgggcacaatggcacaatatatccccatgctggaattctatggtggtggtgcgattcctttcgtctgcacgatgtatgcttcctcagaaagctatttcggtgtcaatctgagtccactatgtagcccagctgatgtgtcttacaccatcctcccaaacatggcttactttgagttcataccattagaggacggcctcaggttgactgatcacgaggaggtgatagagaatgacaagcttgtcagcctggtagatgtcaaggttggatgttactatgagcttgtagttaccacattttcaggtaagaacactgcagttatattacggtattttcttggactaagcatatgtagttatacttagatctacatcagcttttactccatatgatcaaaagaaattttcttgacatgaaattatctataacattaatatagactatcattttgtcaaaacttcaattttcacaatacaatatatgtgtcaactgtcaggtatttttgcttcaattttttttagtgatcagacaagtgaaacggattatttatgttcactgaagtagtgcttgtcaccataataaatatgtagatgcagtggtaagttcacatacaggaaaacaaaataaaactacaaacccctgcactgcagatatttggaaatgtagtaactcgcaaatacatgtccttcaactgacatatgtcttgcccaggtctttacaggtacagggttggtgatgtgcttcaagtgacaggcttctacaaccgagctccgcagttcaaattcatttgccggagaaatgttatcctcagcatcgattctgacaagaccaacgaggaggatctccacaacagtgtcaccactgctaagaaaatcctggagaaccaaaattacctcctcctggagtacactagctacactgatatttccactgtccctggccactacgtgctgttctgggagatcaagtccacccacgatgaaaggccggcccctcttgacgctcagctcctcgagagctgctgtgctgctgtcgaggagtcactggactacgtctaccgtcgttgcagagcccatgacaggtccatagggcctctggagatacggcttgttgaagctggtgcatttgatgctctgatggatctattggttagccatggcagctccattaaccagtacaagacacccagatgcatcgaatctagccttgcactgaagctgctgaactccaaggtcattgcctgctttttcagtccacaggatcctgaatgcggcatgtaaaactttggtaaataagcaagtatgcttctgtgcttgcttgatatgcaatcttactacaattaaccgaaattaatagtctgagatatagtggaaataataataataataatgtactactagcttaaataatgaagttcttattttagatggctgcaggctttaggagcttcatttccaatctagtcagatcagcctgctgcctagataagtgggtataaatgttgccaacttttagattttcatttgggttttaattactgaatattcaggggccaacatacccaaatgagaatgatatgtgctgttgctgctaaagaagtttgctgctcccctctgtagtctcatggatgactgaacacttaactgaatgatgtatacttttgttcctatatatgctgcagcagcaaatattccactcttggtctcttttagctactggaatactgatgctctgatctggtatttaccagtgcagtatagtactctagtgtacagtaacaactgcatcttccatttcctaaaaattaaaatccaattctctgaagccttttctgcatgctacactgcccatcagttcctgtactccctagtagtccatagtacaactatggacgcatatgcatgataggcagatactaccatgcgtgcagagcctgctgattctgctgctggaaacatgatttttgtgcttgctggttaagtgtactcaacaacttagcaggggattaggaagaagacgatgccatggcagtgtgtcatggagtgcctgtaggcccaatgtctgtgtgtttttgcatgcagacacggcttacctggctgaagccctctgccggtttgatcccctgctctttgcacccgtctgatgttaacgtcttggttaagccgtgcacgcatattctattctacgtgtcgatcgatgtcttcagtggatgattaggttgtgcacgggtgccaccactctctacttttacctaacctaatctcttctggaacccatgaattttttttaaccgaatgtttctttttctacgagcttcctacctgtaaatctttgtctaggacaagccattttcatgtgagtttcactgaaaacagttcaattcttgatgagtctgctacctcctttcccaaagataactatttttggctatatatctgagtaaacaagaaaaatgcttatatttaggatcggaggaagtattttctttagtttcaactgttgttgtatatttattagagaacagaaattgctatgtatacaatccaatcgtctgactcacgtgcaaccgatcgacggcctacaatgtacatgaacattcgctcttgaagaatagggtgtgtttggttgacctggtttacacaagggatatactagcaagttagcataaagcatgtaaagtttggttttgtgaaagcaatgagctttcaatcatgagagtgatggcattcatgctaggttaattacttctaagctaagacttgaggaatggccgatcgaaagatacatcacaacttcacaagagtgatcagtcatgacaatacatatactagtagtattgctatgtatctgaatggacccaacaatgcaatgcaaagggctccttttcagatggacctatgcctgcttgccgtcgctggtgacctaaaaagagttttgctatcacacagcctacactacacagcttcatgtcagctttgcggccccccttttttttttctcagtgtaaagtcatcaccatcaccagtgcatgcctcttctggaatttgctctcgagttgagtgctcaaatctttcaggtggtacatgctctgatcattgcactgcacatgcatgtgcaaatattcacgtagtagaaaaggcctgtaaaacaaaaagaaatgcaagagatgtttttatctccgttccaaaatataagaacctagaatcggattacaaagaatctgcacatgcaacctatccagatttgttgtacaagaaaatatcccttccggtaatagattcttatatttttggacagagggagtacttaataaaatgagaaacattaacaaaaaaaaaaagaaaacattcattatgcagatgccaaaagtattcttggtgtaattgtatcatcttgatatattttattgagatcaataaaaaagtttcaattatcttgaaagtcttgtgatcaattactttaataattgtttaaagatcacaaagaatgtgccatgagtatctgtactgaaagttcattggtgcatgcatgtatgcatccagccaaagaaatcacgggatatgctcgtatgcatgttggggagacagggatgtgtattcgtgtccagaaagtagaacaggtttggaataatacaccatttttgtcgtgacaggaacatccaattattttgtggtggattaattatttcagtccttttgctttataaaccacggagataatgataataattctggcaacatccaaagttttttttcagaaaggcaaacacacataaccttttctctgtagctgaacatttgcgtttggtactatatatataattccgatgtgatcgaattgctttatctagattatcaaaaggctgccgcattagttgggctactccattgcattttagcacagctttccatcaagcaattcaagcacatgtgagtaactcagatagtcagattcgatctgcctcaatcgtactgagaccaataacaaagcgatcaagcatgttcatcggtcaaaccgtgcttatggcaataggttgcatcatcagctgctttgtgatgcacaggaaaccagtgtcactcagctccaaaagaccatctattttgtcacaataccatttgctacatgttagatcatcgatctattttgtttcagcgttatcttgttggcatctaactgaatctcctctggtcacccgtaacatgattagcaccatttctaaacctacgcacaaggaccctcagttacatgcataaactgtggatgaaacaaagcatgtcacagaacaggatatatagtaggctgggtctaacacagaatccaattctaaaattcaaatttgtcccacaaacagtacaatactacttgtctcacgaatcatttctcatctcaccaaactatccttacacttaaaaaaaccatccctcatttaacgaggagtatctcaggcacagttgaaacatattacttcctccatcccataatataaggaattttgagtttttgtttgcactgtttgaccactcgtcttattcaaaaaatttgtgcaaatataaaaaacgaaaagttgtgcttaaagtactttggataataaagtaagtcacaaaaacaataaataataattctaaatttttttgaataagacgagtggtcaaacagtataagcaaaaactcaaaatcccttatattattagacggagggagtactattaattaagtagattgttgctgcgaattatctacttaattataacgataaagtaaatatttttataaataaacttaacaaataacttaaaaaacaagtggtcacaacaatataatagaagaatctttttttaaatgtatttttaaagcgtggggctaataacccggtcctataatctgataaatgatacgaaaagttgcaagcctaaagtcttttacctttcctactaatttaccttttgaatcctagaattatattcttggccgagttctttacaagcaaaaaaaaagtatctaatttttcgcatgctcgcttcctaaattgctaagcggtatgttttttgaaaaaaaaatctatgaaaaaattgttttaaaaaatattaatatgttttctaaatttaaaatatactcaattaatcaggtcttaatgactcatcaatcttctcccattctctcctctcaaatacactctttagttggacagaaggagtactctacagattagacggaaggaaaactagaaatggcccaacaagaaaaataaaaatactactatatactcctgtgttgaatgaagcttctcacatgtcagcttaagtgcaagggatcctgacatctcagcgttgcacatgtactcactccctcaaaaaaaaaaaaaaaaaaccaaaccctgggtttctgtgtccaactttaactgtccgtcttatataaaatttttttataattcgtatttttattgtttagatgataaaacatgattaaattttatgcgtaacttgtttttttaattttttttcataatttttcaaataagatgaacggtcaaatgttagacacggaaactagggtttgtcttttttttttttttcggggggacggagggagtatatatacgctcctagtacatgctggagttagacaccagctaggagcagaagacttttaataatttgttggaagtgctcagattcaatgagcatagtgttagcgtaccattgctactgcccccaacttttaatttgttttggttgcaaaaatgcaaaatggcatttatgcatcctgtcaaggctctggcattgccattgaatttaccccagcgagtgcatcagctctggcagggtttgtcgtcgcaatcgcaaagatgagatgcagcagagccatgacatgagtagtagtggtagtggtactgctagtcgtaacacactttgaacacgagtagatctcgcttcaattcatacatttgctgttggtgcagcagcctgagcttggagcaggagcattcagtcattcacctgcgtttctccggaagaaagaaccatacactagagaacaaaatctacacacacccaggagagatgagatgagatggccattcaagatgcacagctctgctgcctggaaccttcaattttccttcagtgctaaaataagctctttttcatccaatataaaacctaaaaagatcataatatcatcatttcatcgaatcccaatataattatttcttactttatatactctcggtacatttattccatattttcacatcaacataataattattttaaaaataaatttattttgggataaataggaaaatgaacaatacagatagctaggagagatgcacctaatagtgtagtagtaaggggtgtttggttttttcaatctccaatacgcttaaaattttttctcaaaatatattttgaggctcataattttttcttaaaaaatatttggaggtacgtctttccttctaaatctcttcttttttcttcttttttttcttttcttcttaaaatattttgaggctcataattttttcttaaaaaatatttgaaggcacgtctttccttctaaatctcttcttttttcaatgatgcggaggctcgtaatttcttcttaaaaaatatttggaggtacgtctttaatttcctagctttttttttttttttttacggagagagtagtactagtactacgcgcgtcctccctctggggttgcaacgcgaccgcgaaatctttggttggttccaacgagaaaatgggtcgattttctgtgggatttcgacggcggcggccggcgaggcgatatgcaggatgctcaagccgcggtcaaacagcgggagactttactcgcgtcggcacttggcagtagtggcaggcaggcagccgcagctagattccgctagcctcgccgtcgccgtcgccgcggctcgtctcgtgccacaatacatgcagcacagtgcacgcgcacgcacacactggcattgtcactgcctcaccgttaattttactcgctccattcctaaatacgtattttatctgtattaaaatataagtaattttaggattacttaacagaggatatttttttaagaggaaagactttgatgtcgcttagtaaatgagggatcgatgattgaggataagatactaaagaaatttgaatggtgctagcagatgattggaacttgggaagaacggtaatctgaatagattggaggtgcatatattttcatggtatgattttgaaatgttagaagtatttatattttatagtggatagaatattctctattgactattactgtttcgattttactcaccaatttcctctaatttttaataaatacaatatttttttaatagtatttgttttttttgttaaaagacaagtggttaaatttaaaatgtcaatagtttcaactgtaaagatttagcaactaagggagtagtaaatgggtgtgttcagaaggtcggcttgtagcttcagcagcagccgtatgttacactgatgcttgcaacactgttgttattggctgtgccggatatttgtagttgtttgaggaaaaccaagataaaattaacgggggctttccaccgaattaatccgttgctggtttgggggatcgacacggcatgtggacgtgcgtacccgggaactgacacgggcagtccagtcctcacaccagaccagtcctcgttgcaacgtcgtatggtcacctttcaaaaaaatgttttgcccggaaacaccgggttttacagccacatttgcgtgtcggtgccatgaatcctaccagcaattttgctctccgtcccgtggatggagatgctgccatccgttctcactgtttccatggggtgtacacaacaaattaaacctcgcatatatactccctgccttgtacgactacctactatactacagatgaacagtctctgtgctccttttggtcacaacacaactttgaccaacagctgtgttgggttgttaatgttgccgtctcttctttctctttttttttacgtccacgcttcttaaattattaaacagactttttttttgaaaatacatatataaaaaaattgttttataaaccatattaatctatttttaatcacgtattaatgagttgctcaaaaaggtgcacgagggatttgctcccaactcaaactgccaaacatatttttagtttttaattgctaccttctgtaatgaaaattatgatatattgtttgctctctagcttaattattaactgtaaccaaaatttaaattttaaaattacttttagtgttgatcttaatattattaattacttttacttacattagattttaagtgattaagaatatatgtgtgtgaaagttttatttataaattatttttcgctaataagcattagggcttataatcggctataggcgaaacaataggtctgtgcgttgtcagtcacagtttgctaacacttgccaacaaaagaaaccaaacatcctcaagattaagtgttcaaaatatttgtccagcaggtctaaaagaatatttccatatttttctaaatcattaaaacatggcggatacgagaatcttatcataagtaactgaacaactgtctcagttaaataaatttgtctaacttaactttagaagtggtaaactgtatatggctggccaacaatcgacccctaaacaaaccgagactatcgtatccctaaacactaactatatcaatcaaacaagtggcgcattggttaaacgaaatactatcaagagtaccactggtaaatgctaatttaaacaactccattcataattaagaaaaacaaacaagtccatgtccactctcatagtctcatgcccttgctgatttgtccactacccttccattatgctttccccaaaataatcaaatcaaggagcgtatcacagaacaacgcaagaatcattgcattacatgtggacaactctggccctttgtttaatttgcagagtaatcatctcataaacaaaagcctgtgagccaacaggacgccagcttaactagcctggccaaagactcttcttggcgccaaatgtgcctccacttgcctcacaattcggagtggtaggtaacatcacatcactgctcaaattcaaaatatctggtttatttggtt

SEQ ID NO: 29822 - DNA, 539 bp, Oryza sativa
ccttctcgggcacctcgccctccttcttggcggcgtcgtccttggccggcttcttcgcctcggctttcttctccttctccggcttcttctccgagctctcagtcccagcttccttcgccgcctccttcgccttcttctccgcgcccttcccgcgctccccggccggcgccggagcagcagctggtggcggcgcggcggcgacctcgtcgggcttctgcttcgccgcggcggcgaccggcggcgacggccacaccgtggcgtgcttccctgacttgtgcagccgcctgacgagcacgtcggcgccgacgctgctcgtcaccgtcaccttgtgctgcgccgcgtcgattgtcaccttgtacacgcctgcgcatcaccggaaaaccaatcaatcaccaagaaatcgatcaaatctcaatcaaacctgcgaaaactacacataccttcgatgttctggagcaccttcttgaccttcttcttgcaaccctcgcagtggatcgacactcggagcacggtggtctgcaccaacaagaacagcaaga

SEQ ID NO: 29823 - DNA, 1082 bp, Oryza sativa
ttcctcctccccacccaaagctcgagctcccgctagggtttcgccgccgccatggtaagtccccctcgctttctccccgccgccgcctccaacctgacctcactgcgtgcccagttcctcccgggattcaccgctgatcatctcagcacccgcgagtctttccgtttcctcgtcgttctcgctttttttttttttattttttttgagttttctcctggacgagttggctgcagccgcagggagatcacatagagcttcaccagaagcgccatggccggcgcctggactacgaggagcgcaagcgcaagcgggcggcgcgcgaggtgcacaagcgatccagggatgcccggcaggtgagagactgtttatattcccccccccccctcttctgttcaattttttttggtgcgtttctgttgctgatgcgcgcgcgtttgttctgtggcagttgcttggtgctaagggtaagaggttcgccaagaagcggtatgccgagaaggcacagatgaagaagacgtaagtacttgtcgaatgtttctgtcagattgcatgtttgatgctccatttgatatattgatatttctgttgagtgttgatttcttgttgtattggtaggggatgtgagctcaggaatgcttgctgccattatttatagtttatactagattgatgcattttgaatagatgatatgatttgatgtttgtttactgctttgttttgcatagcgatattttgattgtgagatgtgagcattataattcgcaagtgtaaaatttgcttgtttggttgcatttctgtaaagttcattcacggatgtacacttgcagcctgaaaatgcacgacgagtcaacttctcggcagaaggttgatgatgttcaagagggtgctcttcctccatatctgctggaccgtgatcagacacaacgtgccaaggtaagtactcatattttgggttgctaaaatgctatctttctataatctagatgtgatacacaagtcaacttttcactgttttgatcattcatatgctgtgaaacataggttctcagcaacacaattaagcaaaagaggatggaaaagg

SEQ ID NO: 29824 - DNA, 885 bp, Oryza sativa
aaaaaatttagtgtattaatgatatccttgttaggtaaattaagatcttggtgcagtcgacaagtgcaaactcaccaagcaaatcgaacatgtcaagctaatgtcgacacgcatagagtcaaagaggttgcatgaaattgttggtttgtcatcatcgaatacgagagaacaatccccaaagagctccatagcaccgttgttcttcttgcttcttctcaagttcatgtagaaagccatcagctcacagagccatggggattgaagtatttcaatatgcagactctgggcttgagctttgaattcctgcccttgcttcgagtaatgtatctggaaaagagaggcttttagttaatagtcttacataattattaatataaccattgaggaccgtcttaaatccaaagacaagaacaatgatagatacgttaattctaacaaaaatagtcactagaaagattaaatatataaatacaactcaatcatcctctgtgtgtgtgtgtatatatatcctcgaagataccatatgagtatatgacccattgacacctatatagactagcattttgggcttcaccaaactcacatgcttataactaaaagtgtgtgaaatttttgtgttcctctctcaaataatggaatacttatatagttatcttcccccttcgttcggtttccaaaaaaaaatattccccctttgtccttagtaagctttaaatgtttctaatgcctttaagagataaagagaggtgccaagataaagtttaagggcatgccttgcatatttctttaaaatttcctcatggccacggcatttataaatgcataagtaacccaagtctttgccttgctgatcaatgccccatggctcttgggacccttgcttgt

SEQ ID NO: 29825 - DNA, 7749 bp, Oryza sativa
gattaggatcggctgggtctgagttgggctaggtaagccgatacagccgattccgacaatacgatctgtgtacgacgtcgggttcaagttaatttacttcaagatggttgccacgcacggatagagtcctgggaaggcaattgtatctattaattaggatattttatgtaggttccatatagataaatgtgggcaaaagtctgccgcaaagacttgtggtatcttagagtttgttagagataatagtagtatgggcatatcttgtaattctcgggtataaatagaccccgagccatatgtaattaaacacacacacgttcaatacaatttcggcgcatcgccacccttttgctttagttttgtttcgacgagttcttgctttcgggttgagctgcatcggtttcgatcttcaacaagaggtaaaacttgttatgatgacttatattctcgggattagtgcttccatctttacgacactctaatcttgtttatgtaatttatcgagttatcatatatcttacataacctctggcaatatcgctatctaatctactatcggctaacatctgttagcagagggcaaccgattaggttagattttgacgttgatctagattatataagatatctaccactctatgaaacttctagcggcttgattgtctagatatcgttcttcttttcatacttaatactatatcagttgagtttgatatattaagtcgtgtttagaatatcgatctctagcctgctttctagttaccgattagagtaacatcgaagtttcagccgattttatcagatttaactatatttgttctatatgcttcattgacatgttaaatctgccctttatatcaagatattgttgtatctaagtatattaggcctttgtttgatatattatacctgctttaatatcctgatatagagtagtatcggagtattagccgatacatgctagatctatctgatcggctatgctataaacatatatagtcttgttaattgatatatatttcgatctaagtgatttatactgtctcggcatagcgattgatctatcccaatcacttgatttaagtatatatcaatataaggagtgtatatcattaatatctacagccgatcgagtagatttagttctttcttatttattcatgactgccgatcgatacacagatgacatcggctcaaagataaatgatacgtcatcggcacctagccgattggctatcatttatagatttacccacggtttctttgcttctatttcttattgattataggatcaaatcaactggcatgctaacatacccgaaggcgagctttggacctgcactggagttaagcagatctcccaggccacgtgttttcagtcaacagcgctgctcctcccccgccgcccgcgggctgctcctcccctcgccgcctgcgcccaccacccgcggtgctccgctgcctccccttctcctgcttcgcctgtcgccggccgctgaagtcctcctccgggtctgcagcctctgcaaccactgcctccccttttcccgtattgtcgccgcctccgcggcatcgccaggaccaggcgccgccgttggcaggagctggaggggtgggaggcatggcgcggggacgggggaggatggcaggagcggcggctcattagagccgacggccaccgccgcccaactcctctccgtcggtcgtcgctcctctctcccagccaccgctcctatctgttggccgccaccgctctctcccggccaccgttcctctgcccactcgttttcgctagcgagggcctatcgtcagctgtgcgtctccccaatcatcggtcgccaagaagagagaggaagtgatgtggccgcgtcgtgctctagggcggcgcctgtgggtctaagccgacggccgccaccgttgacgcctagctcctctcttcgcaagcgagcaccgccaccgccgagagcagtcgcgcgtctctggttttccctgcccgtcgccgccatcgctctcgctccactaccagttgccaaagaagaaaggtagaaagagaagggtagtggctcacttgtgggtccacgcgggtctcatgctgactcagccgccacatcagataaaatcggggtcaaaaccaccgaaggatctaaagtgaacggttttgtaagttgagggacgcccgatatctggttttatggttgagggacgattttgaatctcgatgacaagctgagggacctactgtgtactttttcctataagggaaactggggaggcccactcccccatcatttgacggaggaacgggccatgtttgggttactggcccgctacgccggcgaaagtcatctcctcgatccgtccgacggacgaccagaccaacggctaaagtgacagtattccagcgcagatttcgctcagatatccagtgcaaaatatgctcttggatcggcgcaaaatctgttcggggaatggagtttgatactgctttggtttgttgtgtgcagaagcagaacacgaagctgatcttgagtaacgtggaagcaaagatcgtgatggtaccattaagaatttagaacagaatttttactcttgtttgcaaccggcagatctcgtagcagatcagctttgtttcgtcgtagacgcataaacaaatgacacatgtgctgcgcaagcacaccaattcaccaaaacaaaaagggtgaggtcgaggacgacggtgaacctcgtggggtcgtggatcatgcatagtaaaaaaaaaatgggatcgagcaggcggttgaaccgaaaataaccggaaccagtgaccttggttgctcggttcaacaaaacgaccgccactgtagcagaacccgtaaaaaaccggtgattcagacggtttttgcgagaaccggtgaaccggtagcggttttttaagaatcggaccgattttaaatttgtcctaacagtatgacattacgaatttactacattaccacactatttttgtttttttatgttgtgaccgtataataatagatatactattttacttatgcatattttaccagtttgtgatgattctatatttaaaataatgcaaatcaaatataatattaataaataaaaaaccggcgaacaggtgaactggtcgaacaggtgaaccgatgaccagagcagatcgacctccggtccggtttttttactatgggatcatgcggactgcaaatccacgcagattcaatattaaatcctgatccaaattcaatattaatcctgatccaatactaatgagagagaagcaagtagcaacatgacaaacaaacaaactcatctcatcacactatattttttttacaaatctgcaatcttacaataagagcagagagcaagtagtgtagtgtagaattgggccaaagttcgcttatctgaaactgaaagaaagctacgaagacttgcaggttgcaaactaagcaaaggaggatgtttcagtcattttctgtgtctcccatcctctcgctgaagctggccttcgccgtcgccttcgccgtctccttctccgtctcctgttgcgccgcgcctccctcgccgcgggccgtagccgccgacctcctcgccgtgctcgccggcccgggcgccgcggcgcgcgtgccgccggccgcggagtcggcgcgcctgcgcgcctgcctccggttcctctccccggtcctccccctccccgccgccgcagcgatctccgaggggagggccgccaggaaggttcttgtggagcgcggcggcgcggacgaggcggatgggatggtgatgtggccgccggcgccggtcatggagctcgcgcgcctcgccgtcgactccggcggcgaccccggtgccatccaccgcgcgctcgaccccaccatgctcccggtgagctctcgtttatctcgttcttcgtagctcgtagctatatctatctccgagaaattgtaaaaattctaactctgcatagttctggatgtgttacgtacaatcctgaaattaatttccataacaaaatctaccgggggaatttcgttaggtgcctgatgttcagagggcgaagaggaacaaatgccaactcacaagaacaccatatgggaggcgtttcgctaacaaggtccagatttttgccctagctgtttgcttgcacttgaaattctttttacttacaaaggttgggcattgttcaagtgacatgtttgtgttatcaacaggacatcaattcatacctggcgtttttgttcgaattgattgcggcacgaggaccatcagtggggttaaatgtatcacttagtcgatacgatttcttccacggacacctcttccttgcttctgggacaggaaggcttggaattctgtaagtgtcatcagttactctatacaatttgtgctcaacactttctaacgctggccactccgatttcttaagtatcaagtgagaagttgtatgaaaatgcacggttctgtatgtatggtaacattactaatttactattcactatctgttatattgactaggtactccaatctgaacatacaacctagaattgaatcatatgcaaatttaagttggatattagatttttctttggaaaaattgagaattgaatctaaaactatcgcgagtatgcaggaacaagcatttggtcacagatatgtggaattttttttttagtgccaacacataatctttaatacagtacatatgtgccagaaacttgtatagtatcttcatcaaatatgtaaatgcaaatgattaaggtgtgagctattcttgagacagattccatgctaaagaatatccagcatttgataaggaattgttcccttacagtttgggattttgtcaggcaggtatgattttagtcagatgcatgggaagtcttaatctgacttttttttcaccgattggattttattaaattgtttattttctctatgacaggatctaatgtagtgtacgatgattctatgaatttacgcaacatcctttggttagcaccattgccatctaatgaaacaaaagcttggctatcaccaggtatgctgcccctgagtacttaacactgttcacatttctccattgtctccaagattgtttaggttctgaattaggggctcatacgcagttcatctcacttcaactcctatttctatttctctcgaacaaacaaaaaacaaacttttcctacatatgaattgacattctgctggtaacttttacatgaaacaggtgttttagttgtcctggatgcacatcctgatgggattatctatcaggatatgatacgtgattatgttcgggatgtacggacaatatatgaaggtttgattttataatttatcaatctacctgggtgggttcactatggagatagatggataacctagttggttttctgaacacctctgcagatgattttggagaggtttccgttgatgtcaactatctgaatgttgccaactccgctcctgcgaatagagttttcatttgctgaaatttaaccagacaattagctatcttccccgggtgtgattttatcattgtgggaagtagacaccatgtatcattcttcaagtcatatagccaggaaagcaatggtttgcttagcaaatttgcctcttgacggcatttgcatcctctgtgatgtttaggtgtttatttgattttctggaggatgcttattttgagagagaacgaagcaacttatatgggccgcacgcaggccgcaatcccgtccagaccttcacgcgggccagaatcccgttccggacaacctgttttgggccgtacggaggccggagtccaagttcatgcctcgtcggctaaacctgtttctggttttgtagtttccgcaccgagtagaagtaacgtgtgtttggttatatacaatagaaaatatcaaacttatccaagttagaaacaattagccacatcttaacaagtctaaaggaatcggtttgcattttgcaggttaaaggcagaatgacgtaccattaagggtggcataatggttaaaggtaaaatggaagaaaaatgaatgagtaatggttgatagataatatgggataatcgttagatgtaatataaacactctagaagtgtttatatttcaaatgctagataattttggaacgggggaagtactagcagatacactgttagtacatacatgcagaagtctagaagcaaatgagaccagacttgtagctctcataacaggttgtaaaatgtaactagtaaagatcttttctgcaccacgacatacaatgtaaaatgtattccagatatgttaaaggcatataacagatgagccttgtgcccacagtttaaaacacgctactctgaatgatcggtcaaaaagacccactgaacgggtacatctggggtgagagtcgcaacgagaagaatgaagtgtatagcattgcgtccttacacgagtaagacagcattgatacagccatcattctctgggttgtttgtaacttgtgcatatttacctgcacgacaagaacgctgttttatggaacaagttccagggagaagttaaaaagcaaaataagcagaacattcaacagatgccttaccccaaacaacttttccagcaggggttaccagaccaagttcactaacgttcacctgaaaagataaagtctgtaagcaccaacaggtaaaagcaggatgtctaaatgaacatgacaagcatccaacaatgttaaagtggttccagcaatctgctgccactaagaagttcaccatatcccatatatgccacatcagtaagataatcaagagcacaaaaggaatttatctcataaaagctaaagttttcattatcaataattcactatcagctgtaatactaacaacttaaatgagattacttttgttttcatatacaggcagaattcttgacatacctcaatgatagttccccttgtcaaaacaccaagagtagagtacatttgaccatttgggtttttcttcacagaaattatgtcaaggttgaaagtacatttcagctcagggtgagtaacatgggcctttgtgaaacgaaggccagttggcctaataaaccgttcatactttggtggtttccttgtaaacccaggtccaacaaaggtggccttagtgaccattctcttccactgtttggctgcataagcgtcattcgttagcagaaatcagatgcctaataacacatggtagtttctcagatcactactagatgacatgtaaaactgctttggcagaaatcagatgcctaataacacatggtagtttctcaaatcactactagatgacatgtaaaactgctttggcacctagctacgaggaagtacaaatacatgaatgcaccgagcatacaagccaaatgtcaactaatattacagatttacactattggcacctaggttcacttactttttctcttgccagttcgtaaaactttgaacatttcttcttcagccacaggtctgacctgaaaggaagaaaattgtgacagtgcttagtcaaggtaggaaaaccattgattgccaggtactagaaacagtttgtgttgaaaatcacctttggcaaaggaacctcccatttgccagccttttccatcctcttttgcttaattgtgttgctgagaacctatgtttcacagcatatgaatgatcaaaacagtgaaaagttgacttgtgtatcacatctagattatagaaagatagcattttagcaacccaaaatatgagtacttaccttgg

SEQ ID NO: 29826 - DNA, 16549 bp, Oryza sativa
tagtgtgcgaatttgattcataatttcatctccttcacccacaatacctgatatgtttaactccccaagtattaaaaccggtgcaatttaactccctcgatggttttggaaagctatttgctgacgtggcggtgttaacctggtctttgttccacgtgatgtcgacgtggcgcttacgtggtattagaattaaaaaaaatatgtggaacccattttcacgcaaaaaatattgtggggttcatgggttaaaccttttacacaaaacgatgataaaagtgtaaaaagtgtaaatggagtgatgcatgttagtgagtccgcccgtcgaatggattggttgcacggttccagaggggggctgttacagacctgtttgggagagcttctaactgcagcagcttctctcggaatcagaatctcctcaaacattctagcctttggtccagtttctaagaatctgtagttgtataattcagaaaatgaactagaaaccaaaagctaaaagttgagcgtttgcagattctcgtaagttgactatcaaccagttacttcttataatcttaaactctcccaaacaaatgcttccccgaacagacctacaatactttgcactctaaattcaatctcgaatggagagccttaacatggtaacatgaaactagatctttcttggtcatttttttttatttttgctgggagcctgggactattggtttatacatttaaaaatggagttaacatgtacctagtacatttggtttgatgttgtctaaatcaatacttaggaggccaacaacaaaggagatcacatattaagagctgattgaagaactgccctttattgcttaaacattctttggcattttgccgaagattcaagggcccatttaagttagattgttctttggattattttacggattatcacttaactatagggatacattaaatatattaagccccacatacaacaagcggtctgaacattacagtaaaagaaagactccataaaacatcagttgataccaaaatttaaattttcaaacttaattttaaagttgattttaaaattttttattgaagtttatttttcaacagtaatatttaagtagctaagaacgtttatataaaaattttacctataaattattattattttgttaatacgccgaatgacattatccacatttagctatacgatgggttttgttattcctggagagttttagaagccacattgttcagcgccacaggaaatgaaataatatacgtgcatcgacttaatcactgcagaaaatgatctagatttaacacaacatgaaggccacgcacacgttgaaggggatgacagcaacagggacccaaaacattaaccacaaagtcaaacccccagattgaactgatcaaatataaatgaatttacagttatgcacttgaacaatgactacaaatctaccctatttacatctaagtgcacagtagtgaacaacccctgctgtttttgcatttaggatgacaaatccaacttcttacacaaagaggagcaacagagcaggatataagtgacaacaaatggcaaattccattttgtcaagaaactatacatcacatatgaagcccctctaaagaaaaaaaaaatccaccaactttagaatcacatgcccaagaatgccctgcactgtgactcccagtgttccttagccagacgaacacgttcaacccgctccatctgtattctcttctcccagtactctggacaactgtcaatagatgatccatattaaatttcaacttggtaacaatccttgtccttttgcgataaacgaaatatggtgataatctatgttcatgacataaaaaaaagtgtacatttgtacggccgtgcagatgactgatgatatgatcctgagcagttcagacttacctatagcttagtagcatgttcagctcatccaagtgtacagcattaggaaagactcctgcctgaaatgagaaatcaggtcagttgatgggacatgcacaagcatatggtcatcaaatttgaaggaatgttatctaaaacaaagatcgaattgaaggaattgtttatacctgtcggcacagtgggcactttgatttgcgctcggcagacttcagcccatcaacgatcgtaacggatgcagcagaacagctgcacaagtagcaatatatgtgaccacaggaaagagcaactggatcaaacacggtatcctgcaaaagcaagtgaatttcagaaatttacaatgcaataaggaagtgctatgaatttcgcagtaacaaggaacaaagttgatacttgagcacattataacaaggagaatataacctaagtacgaattcatacttcataacataaaaaatttagtgtattaatgatatccttgttaggtaaattaagatcttggtgcagtcgacaagtgcaaactcaccaagcaaatcgaacatgtcaagctaatgtcgacacgcatagagtcaaagaggttgcatgaaattgttggtttgtcatcatcgaatacgagagaacaatccccaaagagctccatagcaccgttgttcttcttgcttcttctcaagttcatgtagaaagccatcagctcacagagccatggggattgaagtatttcaatatgcagactctgggcttgagctttgaattcctgcccttgcttcgagtaatgtatctggaaaagagaggcttttagttaatagtcttacataattattaatataaccattgaggaccgtcttaaatccaaagacaagaacaatgatagatacgttaattctaacaaaaatagtcactagaaagattaaatatataaatacaactcaatcatcctctgtgtgtgtgtgtatatatatcctcgaagataccatatgagtatatgacccattgacacctatatagactagcattttgggcttcaccaaactcacatgcttataactaaaagtgtgtgaaatttttgtgttcctctctcaaataatggaatacttatatagttatcttcccccttcgttcggtttccaaaaaaaaatattccccctttgtccttagtaagctttaaatgtttctaatgcctttaagagataaagagaggtgcaaagattaaagtttaaggccatgccttgtcatatttctttaaaattttcctcatggccacggcatttataattgcataagtaaccaagtctttgccttgctgtatcaatgccccatggctcttgtgacccttgctggtgaaccacattgtatatttcttgaaacctgatgccaggtgcaactcgagaagcttcttggccttttcattgaagcagccaataacggctgacatctcattgagaagagatgggaaaaaactcccatcacatactgcatgttgataggaatttgtcagataaccaaccatgaaaggtaaggtagacaaaaataaccatcatggcgactctaatattcttttctaggcaaaccgcagtagttacaatatcaatatgaaagaaccaggaataatcgactcttttaggactctgaaatatttatatcaaaaccatcccaaattatagtagacaagtcgacactaactaaaataatcgaaagttattcaaaaggacagatgaataagcccctgctaatgaatacaaaattaagagtggactttgtgatggttgacatccccttttccatggttactacggcctatagtatcttggcacttgaaaaattacgtggttgtcattgacaaacaattaccaccttgacaatgacttgcactattataatggggcagtcaatgggctatctctagtagtgttcaatttgaagttatgttataaatctgccgtccacacgacagtagtatatgcagattttccaaatacccgaccgatcaacttaatttgttggtattgatgtttgaaagcaaacaaaacattatcgccattttaaaatccaatcttaaccatacaaggggcgacagagaaaatgcttcgaaagaattgtgctaagaagtcaaattgttgctttctctgcagtaaagcttctcttccatgcgaagctgtaattgtttgacactataaataaaagaagtacagcgagaacaaggtaggatacatatatctaaaggataaataagagaaaataggttggcattcccaggaagagttcaacttgccgaataccaaaaccgctgtgtacagcctacaggttcctctgttcccgcagaattatcaactagttcttctcacttctcagcacgatgaaactaaaaaaactgaaaaaaaaaacaattgcctcttgcaagttgcaacaagtcctaaattctaatccttttctaggtatgccattttgccaagggtttgtccttttttaaccaaaagaaaaaaaaagtaccaaaaggcatgagcccgcccattaatcctcgttttcattgaaaacaagaaaccaacaggtttcttttgaaaaaacagcattattttcagtgtaagagaatcaagaatagtcctacgcatcaaagagaccatataggaggaaattgaaaggtatagtagctttattcaccagagcaatggccggggcagcggccggcggaggagccgtcgttctcgtgggattggaggtcagagcggcatttcttgagcaatttcttgagccgcttcagccccacgcccgggagctcctcatccatccccttcatgtacttctcgtacttcttggcaaacttcatgaatccaaatttaaggcaaacttcttggcaaatttttggagcgcttgaatggataacttgtacgcctatggcgtctgcaaattgatggattcaaaatcttggggtatatatatgtttgtgcgatgtgagtatgcctgaatgacttgagaaacgatttacagggtgagctggaaacgaacaaaacgaatccaaatttgtatagctcgcggacgaattgggggggcacggttcagagaaggaatgcacatgcaacaagagacggcaatcggaacaatggctaaagaaggaaatggaggaaaactgatgaaattaaaccaccaagagaaggcaaagaaaaagggcagcgaagctcacggagatgaagagggggccagaaattcagttgagctcaggcgtctcacgtgagacagtaataagaacaaagaaagaaattaagcttttaggattttttttccgagcagggtgaaacgaaggcaccggctgcgacggcatcgcgccgaatatatacaagcgaggagaggggaaagggtggcgccatggtggatgtccatgtggcgcgctcgcgtcgtgaggcggccgcaacggcggggtccgcgtgagagcgcgagatgatgatgatgttccgtgcggtgcggggcgagcgtttcgttgcgtttttctctcgttttcccccggttttgtggcgcggggagcgtgcgtgcgcgtgtgcgcggacgccgtcggagcggacaatttttgtggaaacagaatttgatcggcggaattcagctaagctcccacgcaaacctttgaattttgcaggttgcagcttttttttcgtgaacgcgcaaaaacgattgtacgtcgatatattagaagaaaaaagttacagttacacaaccgcactcagccagatcggcttttgcagccttttttccttccggaaaacttgtcaaatcgtttgatttatattattgtcacgtgttatctacttaattatgagaatatattaaaatttttaaagttctagctaaaataagtggttagcaatacagtagagaaaattttagaataattgtttcctgtcgtgtataaaatcaaaaagggtttattgataaaaacttgttccaaataaggtcgtatacgttttgtgatttcataggtatggtcaagaatagtgtggcctaggagaagacgagagggaccaattgacgcatgaagaaatggaattctcgctttgcagttatgcatctatatcaaacgtgggcgaatttggatagggcgacggcgacgtaaacgaaaaagaggcgtgcagttaactaaattttagttgaatcttgtggctgcccgtgctgctgtgcctgatagaaaggcgcgtaatcggataactgtcaaggaaagggttgcgtttcgctacctgtttagtttagcctagcttccaggtctcaatcctctgcgtccgtcagatattctgcgtactagataagctagcgtctaaagccgtaaagcgggcgatatacatgcttaacggtctacgcctaagaggtaaaattagataacagttattttggtcaattggacaattgcatgcaagtaaagttttcctttcttttctaccaaatttgatacacacacaaatgcaaatgtacatatatcataggaggcaaatgtacatatatcataggaggtagactacagaacgatatactgttacaataaaataactgacatcatcatggtacagttagacatgatacctactagtatcagatctggtacgtgggtatcatgctgaggtccgtatggtatagtaggtaccggattccaataccaaacataatacccccatatcagatctattacctaggtattatgttgacattagttatttcgttcgaacggtatatcgttttatagtatttatgatatcatatttggacgggtatatctcaatattgacgaaataaccatatgtccgagagattggacgatgtatcttgaaattgatgaaatcatcatacgagccttgctagttggcatatctcaaaattgacaaagtcaacatatggttcattagcacacgtgtctcattggtcgtcatatcttaaaagatcgacaaaatctacatacgtcttgctatcgatggatatgccatatatcaataaaatatacttagttgtaaatatgagaacccatggaagcacagaatttaaactctggtgcaacttaacttcgcgcactgacgttttctactgctaattagaatctcagttgtaaagtttaatacgagcagcacctaacctgaaatcaaacctctttttcttagtgatcataattgctcacttttgacaatgctaccactttccaaacaacaaagacagaccaacaaccttcgtggtaaaagatgaattagtgaaagtaagcatgcctagagtagctgctatgcatattgagtcgtctgcttaattaaacaattctccactaaattgttccaaaagcaaagtagatctcaatctcatcgattttttccagtaccggatacaatcacggaggacaaatttatgtggcaccttttcatcctcatcttgggtcgtctcaattctcaatagacttttccacgagaaaaggatgtcacgatatgtaattaaaacatggaacgataatactactgtacctaccatatgaatattgttattcaaacgacgtgaattcggtttgcatacttgcaatcactccgttgtcgaacaggctaacgaatccttgtgctaattgcataagtagttttcaatttggcataatctacatggtcaaatgtggatgaacatgcagtttgaaactggatcgacttcatgacctggtagtagtatacataccgtgtccttatcggcaacgtactcttacccggcaccgatttctcgtgctcgatcacatgaacacaccatgacaacatccagtttctaacagcaataccttaataggctagtagcatatatttatcagcctaaacaactatgtttattgttagagaatgcttcttccagtgtagcttccagtgtagcaaacagtggttggtttcttaatgcgcaaatcaaaccataaaatcgatgtcaccttgcccacaaaactggcggctgctgtttgcttgatgtaaagcagcggctgctaagctggtggcatatatattctccacgaccatttgcctgccacttgcttttatctgtgaatcagtgaatccaagcagggtaaggccatgcaaagaaattatgaaagcttagcgtagcgaagaaccttactcttgcagtactgttctgaccactgcatcaattgtattttgtcatttggtcatttttaaatgattcagggatgaaaatatcaaaattactttgtatctacgtaaagtaggtagtaataatctattacgcaatatgatatattttgcgatatatatgtctatttggagaagcttcagttgtaacgtcttaaaatttctagctctctaaatagtccaaattgtcaagcagattctggtaatagttatataatccttaaaactggcttccctagattcacactagctgctctggaaaacactgcctcccccaaataacatcataatctagtttgctaattgaaaaggataaagagaagaacgttctggagccgtacggtttctgaatctgtactattttggcccggccatggcccatggattcacgggttatttatccctcaaaacggattcttgttttggattcctgatacacttcgatcctctgccgcacacaacacgcagatttgattgaggtcaacgagtaaagaggttgagacaacagaccttgtctagcgataatgcattagttagtggttgcttagcggtgcctctgtttagtggcatgccatctttgatggtgatattgagtaaagttttttgagatttcggacgctccaaaactacaaatagctagctggaatattgggcctcatcggttacccatattccctaataagcccggcttattaaggaataataaataatttataggaaaattttttatatatttgttcgtaccgacttaaaagccaacgctaaaaagaaataatgctaaaaatatcttaaaatgaactccaaaatcaaatcaagttcagaaattcaaattttagcttttgatttagcttattaggtgaaccgatgtggctcttggttagctagctctgtatccagatagacgttgacctttttctgtcgtggtagatcagatgcaatcagggatgaattgatggacatttggacaaaagtagcatggagatggatactagttcttggacggaagaatcagattctcttcccttttgcagtggaggctatggcctacttcttacctgtccaactccgatccaatccaatccaggcgagaacgttgctaaacaccggctgctgcgtcctggattagagagcaaagagaagggtaaatgtataagaaaaaaagggggctgatgagaatcaaagcttccatctgaactgaactgaagggtgagaggttgaggaaagaagaagaagaagctcaatttcggcccattaacatcggcccaaattgttagaagatgtgggctgcaagcatatattgatacatgcattataattatactcagaattcaacagaacacacttaacaatattttcttgaaagacttaacagtaattctacaatctagatacggtgattaaatgtttgaaacataactcaggatgacagagaacaacacgctaatagattatagtccctacacttaacaatattttcgtgaaaagaagcatatatgtgtcctttgtgttacaaaattctgaatacgttttccaactagaaaaaatgattaaaaatcacagaaatgcagtgcagtacctagtatagcatcctacactatagccttgctccctcatgatattggacaggaatgcagcagttgaacatttccccttggtcccagcaatatgaatagcctacaatcacattcattcagttttgtccaaatattaatcacattttctccattcaaagtaaaatcatgactcatatgcaagatggcagctgcctaatacttgaaagaaacaaatgtcaatgtgccatgcaccagaaaaatcatatatgtttccttccttatgattttaataggcagtttcaaggcaagttgtgagcctctggtgttaaggagagggtgaggtctcagtcactgggagtgtggagttcacaaaggcggccgaggtgatgcatgcggccaaggtcgaagccattgtcagagttggtcccggtgctgtgtggcactccagagcaatccatgtactcagagaaatccctgagatggacatcctcgaagttctattgataaagcaggaagaccagcggagtgagatagcgaagcggaggagcatacaatgaggtcgtactgccgtcgcactggcaacggcagaatttgacggagggagtggagataccaccatgtcgctggagagtagtggcagagcttggaatttttcgttgggtgtgcctacttcacacaccaaacttttataacaacacaaaccacatatatatacatgtacagatttccccttttgttaaatgtgtaatgcaaatatgcgacaatatctcacagcattgctaatcgactaaaatcacgagaaaaaaagtacaatacagatagttccaatgtaaacgatcttacataaatagaagattacagtgctgctactttgcgtgttctcttagccttgaaagtttgtagtactgtcttcctcactactatggagaaataaaaatctagcttaacaaatgagactaaacaatcattcaataattttccacacatgctgtttcacaaattgttattcacaaatcacaggatagattctctatttggattaactacatcactgatcgcgacaatttcaatcacaaagttaaaaccatactgaggaaaaaaaaacagtacaaaatgagctaaagaattacctgtcgtcggcgaatggctaaatgcctaaaatcagtcccggtcagtcactcagccggtggtagcggcgggcggtggccggccggcggggggcctccggcccgagaggatgaggatggggcggggcgactgagcgactcgagatgcgagggcggccatatgcggcggacttggcggaggcggaggaagatggccgcggcaacggcagaggctgccatggaggatttccaagccacgaaggcgtcggcggacggcggaggctgctcggcgtggaagcggcggcgctgggctcctctctacggcggcgtctgaattgatcctctccgtctgatctgtatgtgtgcaggggtaaatccgtccactcaattggggatggaaaataaaactagaaaaaaaaaagagaatggcgttaaataaacaattcttattctccgtgcaaaatgctaaaaatcatttaaattgattggcaactctttggaggctttgcacgatactttgttcgttccaaaatatagccatctttaggtctaatagagattaaggttgaaaacagatattgccgttcggttaaattatttattaaattttgaattatttatgatctgttttcaagcttttgattgattgaaaatggtttggacttttgtacattagaaatagtttcctaaaaaaaattgtgatacgaaatttaaattataaaattatgttttggaatggagttgtaagggataccttgcggtacactttctgctccttaattttatcccttctctaattttctggttttctcatctaagatccacgccaaaagccaataacggatgtaatggagctggaaagaaaacgcctctttctgagtcagctgccagcattttttttctgaaaatgagcgatatatataaccgaaacaaccatcttgtttggaacgtcatctttttccgagatcttagaacacggaatcaaaacaagcatgatattttctcaaaaagaaaataaaacaatcatgctatctactcaggaaattcctggattgcagccacaaaaccagcggtatctctgtgtttagttcgctaaaattagaagtttgattgaaattgaaacgatgtgacgaaaaagttataattttatgtgtaggaaagttttgatataatgaaaaagttaaaagttacaaaagaactaaatgcccagctccagatacctgtcgcaaccagggttcaccttaccgttttggggggggttaccgaccccccgcggtatggtggttaccgcggtaaccgtgcggttaccgcgaaaaaccgcacaaatttcgtttccaaatttttgaattcaaaatccacggtatggacacggtaaccgcacggtttagtacggtaaccgcggtaagaggacggtaaccgcgatatgttggaactgaaataaaaaaaatgaaaaaaataatagaaaaaaactaaaatgtgagtattttagtttatgttggaactgaaataagaaaaatgaaaaaaataatagaaaaaaactaaaatgtgagtattttagttaattaagatgtggttatacaacagaaaaattcggcatgacctactctatattgtagagtccacagtataatgtccatgattacaattctagttcgaatgaaaggaaataaacaaggacatgcatagctacgcattccactgattatatgccatattgtactcctctgtggacatgagcatcaagccatgtgaatgtagcaaccccgccttgtattccttccaactttgacctgtccatgatgatgttgtttgccactgagcgtacaattgagcataccactgaggctcttgccattcatacacccatgtagtagcaggataatcagaagcttggggacggttgtacacatacgttggatagccactttcaaagctagaggcactgaatgagctagagctatcctgttgtatgtcactgaattgttgctgttgtcggactcccggtgcaatggtagttcgttgagagcttggagcaccatgatcctggtcctgagtagcatgagtgaagtcgccctcacctgcaaatcaaaaaattgcaagaaaattatccagtactgaattggaagatgaaggttgaaattgcaactgaattatatcacaccagtgaattgaacggggctgtggtgatctgattgttgggtgtgacccctaggaggcacattagtagtgccttggcctccttgaccatcgtcgtcgccgtcatctgtttcagttcttgagctactatcattggactcttggtactctgggctttcttgggtctcttcatcgctatcaacactagtcgatcgtggacccttgccctttacctttttagatggacgtgcttttggcggctttcgagtcttccttttcccaatatgagtgtcacctacattcgtatcagcccactcagcaatactagaagctcccgtggtccttcgcaggtcatccaagttgactaggtcagacacaagttgactaggcaggggagcgtcactctcagctgaatcttcatctagttcggggcaagcattagagcgagcattgtccatccaggcactgatatgattgttagtttcatagaatgagaggtccgctaatctttgaaggggatcatcgtcctccaccctaatttgggcatttgcttgctgaattcgaaggcgaaggttgtagttcacgtacactagcttgttgagcttcttgtgggtaagtctattacggaccttcgtatgtacgaatgcgaatgtgctccaattcctttcacatccactggaggagcaacattgaccaaccaaacgcaacgcaagcttcttcaaattcggcgtgtctgaggcgaacatagaccaccattgtgctacaaaagccaagtaacatgtcatttcataattctgaatacatcaagatcaattagatatatcatagttccatgattagaaacataccaggtgaagttttcccatctatggccatccttcttgctagtgccctcccaaattcacccgtcttacgtcggtacatctcaacctccagcaaagcggcggcagccgtatcgatatccgtcatccactcgaatgcctgtcggaggtcttggaagacagtagcacttggagaatacgcgtagtgcgtcctagggttcaatgcggcagctacaaaacatggcacaggttaagtaagagttacataatatgccatgtggattatgttatgaccaatatttaccggcattgatgagagtctcgttggttaggtcgtgcatccttctgttcacgatttccatgtatgcttcaaacttgtccctttgattcgcaaaaagactgtcgtactccattttgagcaactgatatctcaaaagtacctcactcaaattggggttcttgtcctcgtcagcaaaccgaaggaatgagtacataggttggacaaaattcactactgcctctaagttctcccaccaagacagactagatagacatgcatgtgcatatctaccttccaaagtcccactaaatttgctttgcatgaagacagaggaagccatccattgcatgaaaagatctcgcttcctaaggaaactctggagaaacatgtagtttgttccgaaccttgtagcattccacttaaccagttcaccacctatagctaagaccatcatagcatgcaacttgttatgattgtatagccatctgcaaattttcctagcactctcaatcaccatttcgtggtctggcattttcccaacctccttaagcatcaagttaactgtgtgtgccacacaaggttgccacacaattgtcttgtattcttgccgtagtagtctgcacgccttcttgtagttagagccattgtcagtgataatttgaacaacatgctccgagcctatttcgcgtaccaccttccttatctcctgcattggtagataacataataaaaattagtccatgcccctaacactgacgataacaggtgatgaagtaatttgttgcatgaaccatacataccttcagcacaaagttagcatcctggctttgcccggtcgcatcaatggacttgtggaaaaacattattccattgtagtatatcagaaaattgatgaccgacatactcgtcggacctgtccaagaatcacacattatagtaacaccgtactcatcccaatccttcttgaacctatcaaattgcttcttcacatccttctctttagaatcaagatattttccatctatctcgttaccagttggagaaggtacactttcacctacaattgacgtatgaaataagtagtgcgcaatgagttagaaaaaaagaagttccttaatagatgcatatgtaccccacttttgtgtctcccgaacggcgctcacaaagtatggattatcggcgtttctaccaggaatgccggcggtaaagaagaaccttgcccatgactcaccaatggcttgcctagcttgcttccccttctttgtgaagaatcctatgtcaatgcgtggctgcacaggggccttggcagatgctaggttgtaatctctcacagcaggtgactccctatgagacgtagcccttcgtagcatattggtaattgggttacttctacctttccgtgcctccggctgagcggatccactcccaccgccatgctcataagtgccaccacgctcctcaacatccctcctaaagttttcgtcttgtcgtgaggctgcaatggctgcttccatttgttcctcctcgtcggcatcacctgttaggtcataatagttgacccttactgcttcaacccttcttccgctatcactcttacgctggtcacctgcatcttttatcctgtccaactcacggcagaagaactcacggacatccggaggcactgaattgcaatatgtaacccccttccctcttgcagccaagtgttgctttagtcttgttgccccaccaccgcccctctttgtatggcaatacttacaacgccatccaggtgggatattctccccgtgctcccacacagggtccctactatctgacatctccaccctgtatcaaatgcatgagaaattatcactgctaattataaacatacctcccattatacaataatacgacgtaattatatgtacactggtaagcatgcatccaaattcttccatactatgacgtatttaatttaacctatatgtacatagaccaaagcaatcaaatatacttcacatgcatggttttagccaagcacgggcaaccaaatgccgaaataaactcatattcccaatgtatttcacatgcatattggtaaaaatatgttctattgacctaaatccccaaatatgtccatgcatatcacagtaaaaaataccataccacggttcaagccacggtaaccacggtagggtggacggttaccacggttttcacacgattaccgcacatacgtatatcgtctcatagattacgaagccgacggtaaccgtacaaaaccgcacggttaccgctcctaaccgcgcgaaaaccttcaaaacggagggattacctcttgcccgtcgacccaggcggttaccatctcgtaccgcgcggttacccgccgcttaccgcgagggaaccggcctcgccggcgtggaggcggcggatcttggcgcgggcgcacgccgtcgccccttcggtcctgagcgcagctacgcgagagaggggaaaaacggtaggattcgccagagaaacgaagcagaggcttccaaagatattttcctcccattgtgggccttattgggcctcgtgaacagtgcatacttggcccattccatttaatcttttttcttttttataatt

SEQ ID NO: 29827 - DNA, 1206 bp, Oryza sativa
caacagaaatatcaatatatcaaatggagcatcaaacatgcaatctgacagaaacattcgacaagctgcatgcctgcaggtcgactctatctgtgccccctcggcataccgcttcttggcgaacctcttacccttagcaccaagcaactgccacagaacaaacgcgcgcgcatcagcaacagaaacgcaccaaaaaaaattgaacagaagaggggggggggggaatataaacagtctctcacctgccgggcatccctggatcgcttgtgcacctcgcgcgccgcccgcttgcgcttgcgctcctcgtagtccaggcgccggccatggcgcttctggtgaagctctatgtgatctccctgcggctgcagccaactcgtccaggagaaaactcaaaaaaaataaaaaaaaaaaaagcgagaacgacgaggaaacggaaagactcgcgggtgctgagatgatcagcggtgaatcccgggaggaactgggcacgcagtgaggtcaggttggaggcggcggcggggagaaagcgagggggacttaccatggcggcggcgaaaccctagcgggagctcgagctttgggtgggggaggaggaaaggaggaaaaaagaggcctcgcttcgggatttataagctctcttgggcctcctgagtgttagcccatgagagctatatgggcctcaccaatgatgtcttgggctttgcaggtagtaccgctatgtgaggtgggctaagttcacattgtctcccttagctagtgtgcgaatttgattcataatttcatctccttcaaccacaatacctgatatgtttaactccccaagtattaaaaccggtgcaatttaactccctcgatggttttggaaagctatttgctgacgtggcggtgttaacctggtctttgttccacgtgatgtcgacgtggcgcttacgtggtattagaattaaaaaaaatatgtggaacccattttcacgcaaaaaatattgtggggttcatgggttaaaccttttacacaaaacgatgataaaagtgtaaaaagtgtaaatggagtgatgcatgttagtgagtccgcccgtcgaatggattggttgcacggttccagaggggggctgttacagacctgtttgggagagcttctaactgcagcagcttctctcggaatcagaatctcctcaaacattctagcctttggtccagtttctaaga

SEQ ID NO: 29828 - DNA, 1908 bp, Oryza sativa
gaaactcgcacgtcgacgacggccggcgcctccgctgaaacagaatgctgctgcacgcccgcgtcaccgtgaaccacgcccctcctgctcatgcaccggcggcagcgtctcgttgcctctcgccgctgctccatttgtacccttcccacttgccgaatgcaagcttctgcatgcaatcacaatgttaacgacacacatgcccgatcaagaaaacacgagaaatagttgtggatagagtgcagatttgtatccgtttgttagggttgggttttgggtgatcctaactattgtccctttgttggtctagcggcggtcggtccagtgcgctttctcctagtaggattgtgtgttggagttgtcaatgcttgggtggggttatttttttcttcgttttcctggttacgaccttccaaggttgtaatcttgtattttttttctactctatcaatataaacttcgcactgtctcgtgtgaatcattaaaaaaaagactcggaagaccatatggttaaacacctatcagatcgcagtagggccgatcagacatgtactgtggtctgaccggcctttgttaaaaggctctgaatttgataattttgagctaaatcaaaactaatgtcaaatttgatcgtcaaatgtccaagtacttttttgtttttgataaagcggcatagatatgataagaatttcgagatcttaaggtttgataatatttaaacaaattagatacatggaaatcatatgcatatgtagattgtaagatcgaagaaaaaaaaacatatcaaaaactgtgtgctagccgtgatgatcatgtgcatataaataccttcttgagtatgttcaggacgatcttgccgcggaggtccatgaggtagacattgtcgctgcagctggagccgtagttgtcgacgcggtagacgatgccgccggtggagtcgtagacggtgcagccgcggccgttgagcaccagcgacttcatccacagcgtgaacaccttcctctgctcgctcgtcgtcgacggcggcggcggcgacggcggtggcggaggaaaagaggagtagacccttgccatgaatttaattacctctgccgaattgtatgtttggaagatgatgatttgaggaggaagacgatggttagtttggtgatatagcatctagggcttggtttgtggctagtaatatacagggggaaaagtgaagaaagtgcaagcgtgaggtatattgatgctgacatactgttttatttgaacctttttggaggagggcaagtcatgatgatgttcttttatatggatacaaacaatcagctgttttaacatatttatgaattatgacaaacagctggagaaggcttttttttttttgaacaactcaccggagggaagagattcctcaactgaatttcattcaaaagtgcaatagtagaaagtacatatgagagattacaattttacataggcaaagtcgtttcaatttcaggttaatttgtatgctctaggcaaagtcacgttcgttcacaggacgtaatgtaatcttaacaaccatgtttgttgaaaatattttaccttctcttaatcctaataaaattggtcagggcacttcttcgccaccgagccggcaaagaagagatgagatcaataaagataatgcaaaacccactagcttacattctttgttcttgaaagccctaacgtggcactatacattcatttggtgcatacaagattaatttgagtgagtaagaaaatgtaagaactcataacttaattccttcttgcatgtaaccgtctgaaattctgaatctatctttcgccactaggttctgcaacatttcaatgattcagttgcagagttggtcaaggaagagaattattaataaattccacactgaacggggatccaaaatg

SEQ ID NO: 29829 - DNA, 736 bp, Oryza sativa
gttccctaagaatgaacgatttcaaacatgcacatgagcaggtaatgttactgccacttctttcctttttcaggaaaagaaaatgaggaaaagggaaaaacaaaaagagactcaggctactacaagatctgatgtctcaaaactcgcaatttctaataaacgtatcgatggttttcatttccatctcaaacattacgtataattgctgcctacagccctagtggtgtgtcaggagaaaagaaagaactcatatgttcatgtctacatggtcatcagatgttttgtagtctctaaattacttatataaaaatatgatgctaacataaactactttatgtataggtatgtgcaagtataacatctgattcgagaaatatgactgagcttattcagtggaacgatctatatggagaaggcgggtccaggaagaagacttctctaagctacttcatgtagcctatcgctagcctatgtacatacaacataagcattagcgtaaagcggtccgggagatagacaagaaatagctcttcttgtgtgtgtcatgtataggtgatacccagtcacaatagtcggtgatctctctattcatgtcaactgtaagttcgtaggcccgaagtgtagcgtaaaaaaaaccggtttgaaacttgaactatcaagctggaagcctgaccatcaaatcggttgattaatgtcgacagccagtgcaattcatttaatcaattgatgctcgtat

SEQ ID NO: 29830 - DNA, 5063 bp, Oryza sativa
  unsure (1)..(5063): unsure at all n locations
gctttgatagaatatgatttggcttatgaaccattaaaatctatgaaaggccaaattgtatgtgattttatagtagaccatcatatagatattgcttatgagggagaggtttgcttagttgaagttataccttggaagatttattttgatggttctttttgcaaagaaggtcaaggcataggagtagttttgttttcacctaatggcatgtgttatgaagcatcggttcgcttggaatattattgtacaaataatcaagctgaatacaatgctctattgttcggcttatgtcacgcccagaaatttaacccaaatttccagactattttgcgtattaaatacctgtccaggaccagccagggtacacaaaacgacaagtaatatacagttctaaacgtaaataaagcgtaaaatacttacagaagaggcacttagtcctcagaccaaaacagaacgacagcagcggaaaaaggcgatccttgcggggcttcagctccactccacaggcaaaactcaactggggtctgagccttggtcctctaactccatcttcagctcagaagcactacacttctggaaaaagggggaataatagcaagactgagtacaaccaccgtactcagcaagccacaccaacgatgcagacgtgcaaggggatacaaggatggcttgtggctatttgcataaaggcggttgtaaaacattttattgagcaaaacagtaaaactgttgagtaattaaagtaacattaaatctccactgatcaacgctacaccacgttgaacaggcccaaccaacccacctgaactacagtgtattgggtcgatttattaacatgggactaatcacggtgaatctggtcgatcgcccataaccgcgggcacggctattcgaatagttttactctggccagaggtgcacaactgtacccacaagacacaacccaccgacatgtcaccgcgtcatcatgtgcccatgatgctcacgtcaccatgtcgagtgattgtgacgagacccttcgcataaccctcccctaaccatccacaccacgctaaggtttcacccccactcctcaaaaggcagtgggcggtcccctcttgcgccgcggtgaatccggcagctagacaaccggacaccccggccgacccaactccatcacgcccaccctcgccaccggtgcctaggaaagggtcgagctatacttcagatcaagcggttacccactcccgcttgtggcaagcgctgtaagacttccagggtttcccgtgaaccggtccttaattgccatgggtgcgactcacaaaaccatgcacccacagcccaccattcagtcgcattttagttggataattacgaccatgaaacatggccagatgtctcgagcacgcagctcaacaagatactagaatgtctaatactgcaattatcccatcgactgagctagtggtaattaagcatggctaagcatatagttctagctaggtcatcaaagtaacacaagctaggcgatttattacccacggttgacaaaggacagatatcaagtaaacatggcacaagcgagcagataggtaaaaccctaaccccatgtaattagcaaaacatgcatgtttatttgcaaacagtaaaacatttataaattaggatcaacatgctcaaggggaatgtgtgacttgccttgcttcttcacttggatcttctgaactcttatcctcgcgaccgcgaacttccgaaacgacagattctacacgctggcacgcaaaacgaggaaaaactctaataaaaaccaaggaaacagtacataaaaactaaacaaacatgtagagctcaattttagatgaattttgcaagttgaatggctcaattcagagttcgaatgaattagatatgaattttagaagttttgagccatttaaatgagtttctagaattattaacgaattatgacgcaattattatttatttttccaaaggaaaagagggttgctgacgtcatcaaaggggaggggccgcgccggcaagcgggccccaccggtcagcgtcacaagggcgccggtccaccgtggccgggaccaccgaggcggtccaccgccggtccacgggaaccgacggcccggattggcccaagccgatcggacggccacggggcgcgcggctggggcacggtcacggctcaaagccggccagccgagtgatggcgcacggcagcgcggccaccggcgacgacggccgacgacggcgcggggagcgncagcgcatgcggcaggtggcggcgcacgctaggaaacggcggcgcggcgcggtaaggtaaggcggcagccggctgcccggcacagccgncaacggcgcggagcgcggcgncggcgacccggtcgaatggccaccggcgacggcggcgcgtcgcgagcaggcacaggaggtgcccgacgaaggggaggaagggaagagggaggggagtgctcaccgagcggcacgacggcaaacggccggccgacggcaaggaacggcgccggcggggctcctcgggaagacggcgcgacggagctccggcgacgggcgtcgctcaggaaggggcggacgggctcggcctcggtctgaggaaaatcaaggaggggctagggaggtgagacctggtgcgaggtaaatgaaaacgactgccgaccccgacaatacgaggaggagctctccggcgacgagggaggtggagctcgggcgtatttccggcaaagagggccagtggccgaggatctccccgtccctgcggagctgagggaggcgccgacgcgggtcggcgaggaccgaagcggtgttgcgacgcggctggaggtggccatggtgaggaaaacaggtggtgcgcgtggcggcggcgttccgcaggcaaaatgggaaaatggagtagggaccggggtggagctcggcgggacgatcccgacggtggcggcggcacggcgcggtggtggctggagcggcgaggagcggcggctggagctcgtcggtgagtggtggagagagggagcgcggtggggagggggttccgacgatggaatggggaaaacggagcggagccgaggtgcggcaaggcacggcgaagccgcaggtggcggcggaacagcacggcgacggctgtagcggtggtggcgagcggatggagagtcgccggtgagcggcggcgatgggagcaccgaggggagagcagtacagggcgcgagaagctcgggaaaattgggggaaatggaaaggggaggccggggatgctttttatgggcttggagtgacgggatcatgctcgagagaggtggcaaccggccggcgagatgggcggggcatcgtggggtggtggagaggttaaccggcggcgattttcatggggagagtggggaaaagggtggaggacgtggggcgacggggtcccacgaccggcgggcttgcgcgcggggtggatgaggtcggaaacggcggcgtcgtggggtggctcgggcggccctggcggttgcagccggccaaccagaggtaggaggaggagctgacaggtggggcctcgggtcccacctgtcggggagagagagaggggaaaacgggcgagggaggtaaagcagacttgagggagagagagagccgagcgggccgagggagaaggccggcccgagagggagagaaaaagggcgcgtgggccgcgggagggaaggaagacttgggccgaaaatggcccaaagagaggaagggggaattttatttgttttctttttattttaattgatgaaatgaaatttgtgctattaaaactatttctcgagctccgaaaattcacggaaaattccggagagtacattagggcacaaagaatattacaaaatattcccggccaatgatttttaaaggaaatttttaattccctcaataattcacttgattaagttgatttaacttttatttaatttctagaaaatgtattattaattgatttttattcccgaacgaaaatcggggcgttacagcttacaagttatggagatggtcggagctaaacatgtggaggcttttggtgattcggaattggtggtgcaacaagtcgccggagtctacaaatgcttggacggatcactaaataggtaccttgattaatgtttagatattattgccaattttgataattttgctattagacatattgctaggcatgataattctagagcaaatgacttggcacaacaagcatctggttataatatgaaaaagggataatttctggtattagtagagccggtgcttgattttaaatctttgtgcgatattggcaaaactggagaccaggggcggtctgaccggcgttgcacggccggtccgaccagtgaccaggggcggtctgaccggccgcatgtcgccggtctgaccggcgaccccgtgcggtctgaccggccctgtgtgaccggtctgaccggttctggacagagcgctggggggcaagtttcaatcattttggaagccgaattaattgtgaattcgtacatttgtgcctaggaaacagaagaagattggagaattcctttgattcaatatttgaaggatcccacacttaaggttaatcggaaaattcggcggcgagcgttcaaatacacattgcttgatggagacttatatcgccgaagtatagatggtgtcttgttgcagtgtttagatggagatcaatctaaagtggctatggaagaggtacatgaaagaatttgtggaactcatcaatcggcccacaagataaattggttgcttaggagggcaggattctattggccgaagatgattaatgattgcttcaaatattataggggatgtgaggcttgtcaacggttcggcaatgttcaattggtgcctgccaccgtgttgaatcccataatcaaaccatggccgttccgagggtgggctttagatttcgttggtcaaatttatccttcgtcacaagggggcataggttcgtgctagttgctacggattacttcaccaagtgggcccaaaccgtgcctttgaagaatatgactcaaacgaaggtaattgactttattttgaagtat

SEQ ID NO: 29831 - DNA, 595 bp, Oryza sativa
gattctattggccgaagatgattaatgattgcttcaaatattataggggatgtgaggcttgtcaacggttcggcaatgttcaattggtgcctgccaccgtgttgaatcccataatcaaaccatggccgttccgagggtgggctttagatttcgttggtcaaatttatccttcgtcatcaagggggcataggttcgtgctagttgctacggattacttcaccaagtgggccgaagccgtgcctttgaagaatatgactcatacgaaggtaattgactttattttgaagtatattattcatagattcggtattccgcaaacattaactacggaccaaggtgcttttttatgtctaaggaagtgaagagttttaccgaatcttatagtattaaattgttgagttcttctccttactacgctcaggctaatggacaaaccgagtcgagtaataagacattgttgaagctagtaaaaaagaagattgaggaacacccaaagaggtggtatgaggtgctttccgaagcattgtgggctcataggatatctaaacatggtgccactaaagtcactccttttgagttggtttatggtcaagaa

SEQ ID NO: 29832 - DNA, 665 bp, Oryza sativa
ttgttttcactttttgttgtgaaaacagggtagtgcatgactggtttcaacttgccggaaaacttcaaagaaaatccagaagctttcttctggagcgtcaggccgcgagtcgttggtccgcagaaaactctaccgacaaagaaaccagccataccagcgccaccgaccttcaagactatggctaacaagactctccgcgagttcgctgctccctctgctgacaatgtggccattgggctgcagatcaacatggtaggtgtggatttcgacttgaagtccagcctcatcacgatggcgcaggcttagcccattctgtggcaagcctaatgaggatgccaatgctcatctgttacaattcttggagatctgtagcacgtacaccatcaagggcgtcagtcccgacaccgccaggctgcggctgtttccgttctcccttcttgggagagcgaagcagtggttctatgccaaccgtgttgctgtcaatacctgggacaaatgctctatggcattcctctcgaaattcttcccgatgggcaaaaccaatgcccttcgtggaaggatttcaagttttcagcagacaaggaatgagtctattttcggagcatgggaatgtatgtaggagtatgtggcccgctgttctcatcatgggatggacaactggctga

SEQ ID NO: 29833 - DNA, 2917 bp, Oryza sativa
ttgatgcggagaaagtctaacagtttggacaagtgggatggtgggggaccaaactgttggttctgttgcgcctgctgcaacatctgatggtaatgttgttgcatctgttgcatcatcattgtcatcatctgagtgaccattgggttctcgggcggtggagatggactgctgctagatgcaccactggtatgagctccatcggtctgctcttcgctgccactggcatcgttggagtcacggggatcgttccttgtcttcaccatctggacgaggataggtagaaataagagaaaggaattaaacagatggctcggcaactaatctttcttgtaaatttaagtgcaattatcttaatcttgattaaaaaactgaaaaggaagcaaacaactcctaattaaggcagccataccactggcacttgatatcgaccgccgactaacccacaagcaacaaacctaaacacagaaactagcaagcaatcaaaactaagaagatgataaggctaaaggcgacgactctgaagcttggagcgtcgcttgcgaacgaggaacaggtctaacatctaaagaggacagaaggataggaaccaacacatgctcaaaaccaaattaaataaagcaacaaatgactcaagtaactcgccgagcatgatgatttttatgcgtggaacatttttcatgaacccagacaaagatactaatgcaactgactaaacgataaattaatgcacaaaatagatgcatagctataatacacacataaaattgcccatcgaacctagacacgacttagtgcatatcacctaacaaattcccgactgactgccaaataaattccaaataatgtttttctaaaacaccatactattcctagtcgataaatccaattgaaatagcgatcaagatttttcccacgaatcaaaagagcaaaccccaaaattttcccaaaacaaatccaagtgcaaaaggcatgtgcagatgaaaaggtttcagagggctcttagggtttccagttggcttgtcctacggtcaaggtcggctctgataacaacttgtcacgcccaaaaattcacgaaccagaatttctaagctgaatgtgcattaaacccctgtccaggaccagccagggtacacaaacgacaattgttgacatacaaatctacgtcttacaaaaatataaaagattacaaatgcagtggaaaagaaaaaaacgagataagcctgaagacttgactcctgcagcgggcgactccattccacaggcaatccttgacggtagcgacgaaaccaacctcttcgagacatcaccaactgagaagaacttcaactctggtgtgggggaaaaagagagcaagactgagtactacccactgtactcagcaagtcataccagaagaggaggtatgatgcaggatatatccaagggaggctaaaggttcttttgcataaagctagcatttaaaagcagtagttgaaagcagtaaaacagttgcagtaattaatcaatattaaccaatcactgctcaacgctacaccacgttaagacaggcccaaaccaccacctgaactaaccagttccattagctaactaggggtgagactaattacggtaaatctggtcgaccgcccataaccgcgggcacgactattcgaatagttttactctgatcagaggtgtacaactgtacccacaagacacagccccacgacacgtttccgtgcgccgacatgccaccacgacatactgaaaagaggccgtgacaggacccttcgcataaccccctctaaccgatcgcaccacaccttagggttcgcccccgtccccagcgggcaacgggcagcccccctttcgtgccgcggtgaatccggaagccgatcaaccggacaccccggccgacccaacaccatcacacccaccctcgcctgggtacgtcggctagagggaagctatactacaagcccagtcgttgcccacgctggcttgtggtaagcacgataaattcttccagggtttcccgcgaaccggtccttaatcgccatgggcacaactagcaaaaccatgcacccacagcccaccatgtagtgtattttaattaactaacaccattgcggtggcactaatccaaagctatgccaataatcaaagtctatgcattaatgtgattcccctttgtgtactagttgaactaagcatggctaagcgttccctaaaccaacatctaatcattttgatacccaagttatcgatggcataaggtaaacaatatatggctgagtagtaggacccatcccacatgatattgtaaaacaatgcaacatttaatagaaatgcgggacatttgtaaattgggtacaatctgatcaattgtaatacatgacttgccttgctcttccactgatgagaccatagcaacgtcttcgaggagccacggatcgacgaaacgaccgaaatctacgcgaaaaacaaagcacacaagcaaaacatgctataagtctactgaaacaggagacaaaaccatttttaatggattctatacatttttacgaatttactgagacttgaatggactaaaacggagctcggatgaattagatatgaattttagaagattatctgtatttttactaataaagaaaagccttaatgtatttattgcgcaatatgtcccagggctgacgtcatccaaggggtggggcggcgccgacaggcggggcccacgggtcagcggcacaagagagagggtggtgacctggcgggtgggccccaccaggtggtggcttaaaggggggagaggaagaccgccctggtcggcttattttcaagccggccggccgttatggcgagggcggcggcggcaagcgaccaccgacggcggcagcggcaagcgtccaccgatggcggcgacaggcgaaaagac

SEQ ID NO: 29834 - DNA, 24718 bp, Oryza sativa
cgggaggagtgggccgacggcccaacaaaggaaaaagggaaaaagaaaagaagaaaaaggaaaaaagatttttcctaggatttaaatattacacatgctcatttttaattagttaaaattatttccaaggctctgaaaattccattaaaaatcctattagcatattttgacacgtagaatccaagaaaaattccacacgccgattccgattattaactgtatttattaatttagggtttctctcttgcctttaaacaaataatttcttaaaacaatttatcaattgaatttttgctaggaaggaaaacttcagggcgtgacacgcgcgctgtggggcaagtgtcattggggaaagccgcgacgacctagagagggatggaacctagaccacgtcctggtggggcttccttggggaaagtggcggcgccatacgtcgggaagtggcaccatctggataaacctggacgtcgtcgccatcttcggtccacatctccaccgacaagtccgagctctccgccggctctccaccttcaaacagcaacaaattgacccgcaccactgggacaatagcccatggccatgtccggtcgtgcacgaagccactccggagcttcatgtcggcgacgtcagacggctcatgggaggtgcgtgaggaggagaggaggcgatgcatcgacggaggagaagaggcgatgcgttcgtccccactcacgagaccgagtcaaagggcacggttttgagggtacccaggtcatttcgccttagctcgtatcgctttggctatgtgggcttggtcacgtccactgtgggctgtgtatccccatgtgtggctatagataggtttggatcttgtttgaggccatattgcattgtggatcctgagacttttaaaggacttaaatctatttggtcctccggggctgaataaatggatgacacattgcttttgcccttacaatcctcttgtcaaagaagcggtaagaggaggggtctcctaccttttcaaattaaccttttcagactggggtaagggtctgtttgggggaggtgtttgggggaggtttagattctgagaaacagctgtttggtagccagcttccgagaatctggaaaagctctaaaacccagcttctctagcttctggcttcttagttcattttttagaatctgtaactacatattctcagaagctatggactgcttgaggcagcttctagcagaagcggcttttggaaaaagctgcagcggggacaaactctcccaaacaggctctaaagtggggaatctggggattctgggatccaaccggtgcaaaaataagagaagaggaggatatacccaacgagggagaggttgaggagagatgccggagctgccggaggtggaggtggcgcgacgggcgctggaggagcactgcgtcgggaagaggatcgtgcggtgctcggctgcagatgacaccaaggtcatcgacggcgtcgccccgccgcggctggaggcagcgcttgtcgggaggaccatctccgctgctcgccgcaagggcaagaatctgtggcttgcgcttgattctccgcccttcccttccttccagttcggtccgtggatctccacaccctctctatagtcacatttcccttcctttccgcaatggaccatttattgcttttctttttattactattattttttaagatagaaccgttcttcaggaggtttagggtttttcttgagttgttttttatttgtgacattttggaatcttgtgtcatgctgttcttgtggatttttcatgtttcgttgacgctgctcttagcgagtcccttattttagttctggtagtagtgtaaatatatatctgtaggttttcttttgtacagaatgcctataaggtaattaattactattaaactaaatgcgcaactcttggagtgctaaatggagtgcctaagcacaatggttgttttggtaatccggcattatcataggcacctcattttttttgtgttatgtcaactttcttggagcatttgatcacaacatatttgtcaatcaacaactacacttctagtctttctccacgtgctacagctatctggatcttagtattcgtgtcttacctaaagaaacggaaacacaaaattaagtacgcaatagctaaaaaacaataaaaaagaaatgaaggtgaacaaatactgaaggagaggtgtgactagctaaagttcaggttaaggaactccggtgagtaaaatttgtactggaaccttcagtgcagtttttgactagtgaaaattccaccaaaatcttgattacagtttctctttgccccttttctttgtaaatacgttttcttccttattaatgaaatgaaacgcagctcaactgcgttttcgagagaaaaaaaaatcttgattttacagtttttgccgagttacaattcagtctttccgccatgtgtgattctgactcagcaaaagtgcaatggcactaactcagtgtgccagcattgacattaaaatgggccaaatttgatgtttagagggctgcttttggacattttaatagttgaaggaccaatttgaggccactgtcaatttcaggggtcatttagtgcattaacccttttaagttctaagtatacaaagttacaaacagtacctaattgttagtttctgttacaggaatggctggagctatttacatcaagggtgtggaactgagcaaatacaaaaggtcagtggcacataatttattaaacaagacaatgaaatggcttatcaatcatacaatattaagtattagctttatatttaactatttaggactattctgcatgcttttcttcattagcagatacaatcaatttgtactgaaacatttgcagccgcctaatgttcttgatgcctgttggtgattctgcaaaagaaaattttcatctattggtgtattccatgaaatcgtggaaccttaggaagccctatatttggcgaatagatgattttactccactttcaggaaagtgttatgattccaattgacataactggagagacacaatcaaatacatagtttggttacactgttaattacaccctgtgctgattctattctgttatggtttttgtcgtaatttttttagaaatgtcagaaaaatctgtgaaaagctatgacgacaaatagtttaagtagatagatggtcaacgttttcatatacttttttctatttttcattgatactagagaaaacataatgtgaatatgccttccttgggttgtatgggtggatgttatttcgtgataagagttatttgggatattattaaagcaatatgcttgcataaaccaaaaaaaaaaatcatttgagcggcaatctagttatgtccagtggaccagcctctgtgacaatacttcaacagtcttgtagaatttcaatatgtgatcatgtctatataatatatatccactagaattttgtgtctgctaagtgttaataagtgtccgttaggtctattaaattggttggaatagttgtagtttatctctactattataagaactgtaaatgtttttgccaaacgtttggtacgtcgtccgtgttgtatatgtgttcccatttggtgcatgcgttgtgcactcttgtcctctgccgtcggtgcgtatggcccgtgttgttgcctgggctaggcccatagctagctggcttccatttgaagtatttttgttgccgtccgtataggactcggtgaggtgctgctgcttgcaagccatgctgtgggctgcctctccaaggtaggcccgcagtgtgcaagaaacaatttccttttttccctggaggacccatcgcatggtcaattggtaaatgaaaaaaatacgagttgaattatctttttttagaaacgaattaaattatccgaatgacaaaaaaaggactcaaaccgtatattaaaataaaattaagttcttattgtttcacataaatataggggttgacatacatatttttagggttggtgcctgtgccggttatcaattttttggctagtcagtatttataatgaaaattccttgtataattttttgttaggaaggtgggcatgatttgaatagtgtactactcatggggcagactaattgatgtatgtaccgtataaaagaacataaaaagattgaaagttttgtttattagttcataatcggcttattatgctagaaattcagttcttttatctaaacaaaatcccatcccctcttgctctagcatatgtcgccttcattaccgtagaacaaccgctctatctctccttccacattgccatcttacttggttgtttgccgatcatgctctctctccatgtacacaatttgttccattttcttcccattgcaatgcacggacactttggctagttcaactaaaatatttagcatatttttcgtgtggcatttgatataggtctgcagtgagcccgactgaggaatggcctttgaagtattccaagctgcttgttgtagtatggattctaatcttctattccacacctatttttttaatgcatccgccagttcactgatgaatttgaaatactccttccatatccaaataaagattattttgtgtttttgtggtcttcaatccaagactttgactgcattgattttatagtaatgtactagtaaattgtaggagctaaatccacatgttttgaaaatactttcaaaggcaagtataacaatattgtttgtgtgaggtttatgtactttttgcatatattatctacttctagataaggtcaccgtgggaagtgtgctgtcaaactgaatttattccattaatagaagtgcagaaatgcattaggtgctagcaagccacccatctagtgcctagcacctaagttaacaccgagagtgttataggggttgttcatgtaggattatgtgatttgtgacctgtctctgggttctgcttcttggacatatttatcttgttcagtctttttaattttattaatgattgaaatatgtatgttatgcattgcacttaagtttattgaaggattctagtaaatatattatattggaattcatacttttggtggtgactttgcttgcatgtttaattgtttttccttctctccatattgtgaaaagaatattactttctgtttggaaatgctctaatccctcatgatactccatgcagttcagtcctgaggcagacgtcaactaatgatccgtttaacactttaacttacatcaggttcatttttatttctgtcaacatcacagatggatgatggtttggagttttccttcactgataagaggcgttttgcaaaaattcgctttcttgacaatgtaactctctagtgattatttgacttcaaagtttatagcttcagtatgctgcagtaattcactttggaattttgtctgcatgttataatagccagaagctgtcccaccaatttctgagcttggaccagatgccttatttgaacctcttcatcttgatgattttgtagagtcactaagtaggaaaaaagctccaataaaagcccttttgcttgatcaggtatcaatctttaatgctccgttctctgatcaaagatctgcagtgtaacaattggatatctgaaattatgcatgcttagtaacagaaggcgaaattttcccttatatatgtgggaatcagaaataactaaaaagttgtctttgtcaattgttgcccagatttggttagtgaacctgaaagtcagtaatttgtgtgtttgactagtaaattaagatattacaattttatacccaaatgtagtctaaataccacagtaaatactacacttttgattctgctagcttctaagactgtttttctgaatcatgtttttcagagctttatatcaggaattggcaattggattgcagatgaagtgctttatcaggtcagtttccctagagttggcttgaaactacagaaaactgtcactgtacaaacacattacatgtttatttgctgaccaaaaacttttcgctgcccaaacacacaaaattttgaatattgtatccagtgttgtaaaaaataatttaggccctgtttggttcatgggactaatccattagtccctccattttagtccctaagaatccaaacaggggtgactaaaagggactaaaaagtgcatatgggactaaaattccattagtccctcttggaggaacttatagggactaaagtggcagcctctcttctctctccctcggtccacgtgcctttagtcccttttagtccctgaatccaaacagtaggggcctaaagtttttagtctacggactaatttagtaattttagtccagagactaaatgatccaaacagggccttagcttcataggttgtttggaggccacggcagcaggcccaattggcacatgtcacaagcagctcggctgtgctggaaatggtgcagtacctgtgcatgaattacatgtttagtagtagtactccaatttgttaactaaagattagttatttgcttagttatctggttggctagatattcttatttgggcttgtctcgtcatataaaatgggcagctttatttgagtttaagtgtttgaccatagaataatatatttacccatatatcgttctctcttctccatcccatgacctaagcccgtaacacattctcttctccgggccatcaatcctgagccatttgtttcttccatgtacccaatcctcatgatataggccatagatgagatatgatgttgaacctaacatgtgggatttagctttggtttaagtgattgtgtcaaataaagtgctacttctatgggaatatcatgtatccccatttaggcatttttttctacagaacacccaaaaaattgtgtaatttgctggtagacatcgcaaaaacatgtcacggctgaaagacaccctagaaaatcggtagcttgccggaggacattctcaactcaattggagtgagaaattcttcaaataggggataatacccctggagccataggcttcaaacatggtgttggagtgaatatttgaaaactatgcaactgtaaatctgtcgttaccccaactacattgctagcatacatcatattccatcttcacgacatcctcaggtcagaagttttttggcctaggggcattctcacctttttgaaagtgtcctccggcaaattcctagtttttttagtgtctttcagccatgacatgtttttacgatgtctgccagcaaattacacaaattttgagcatcctgtagtaaaatttgtcttccatttaaccaacaaagatgtggccttgttttagacataaccttctttgggcatctaaattgtataatactaggttattttttgtgttattcttttcataaaaaaacataggcatgtttcatcctttgcttgcttgatgcgtaggcaaggattcatccaatgcaaacagcatcgatgatttctaaggagaaatgcaaggcactccatcagtgcattatagaggttagtgtgatgtgtgtcacatggttgttctttaggaatggatagcatgtggcatcctatatatttataaagttcatccccactaagtttagttaatgctaattctctcttctctcatgaagctacatcaccttaattgtttttggcctttagatgatttcatcaagggtgcaaattgcatctcctccccaaaagccacaccatacaactcaatcatttataacctttggataattgattaatgtacaaaatatataagcaaatgaaagaaaatggtataataagtaaaaaagaaaattttataactcatatcgactattttatcacaattctcccacggcaacacgaagggtacccatctagttgatttgtgaacttgggtgcattttctatttatttatcaattcaaccatatataaaaaaatgattgcattttatatacgaattagatactgatatctgagtaatgtatcatgttagcatatactgatatctgaatactagatatgcacagttgttttttgtgtcttgcctgaactcaagaaaaacacctcttatataatgtatcatgttagcatatacattgaaaatataactgaatattagaaatgtttcaacatattggcatattaagcccaataggaatctggtttacctgttgagtattttcatcgcaatgtctttactggcccaataatatcgcaatgtcattattggcataaggagtccatttctgtgtatgataatcttatttttgtgtctatgactctaggtgattgaaaagtccttagaagttggttgcaacagcagtcagtatccagaaaactggatatttcactccagggagaagaaacccggcaaggcctttgtggagggtctgatcatcttttctttggtaaaacatgtgttcgtgatgcttagcattattgaagattgagttttgttgcttgcagggaagaaaattgacttcattacagttggtggcagggtaagtcctttacccatttggatcaagctcaatatatctttcatgcgttgcgctgatcgctgatcccattctcacttgtttgttcagacttcagcatatgtgccagagttgcagaagctggacgggattgatgcaacagcaagcagagcgaaaataagcaaagaacagagcaaatcaaataaagctgctcgtgaagtggacgatgatgaggaagaggctaaacctgccaagaggggaaggaagcaattagtgaaggcaacccatgagatccaagaggatgaggaagatacaaaagaatcaaagagaggaaggaagcaaccagcaaagacatcgaagggctcgtggaagaaagctcatcattcttctgagggtagtggtgacgacgacagtgatgatgaagcagttgataaggtggtcgcggaacaagggaagaggagggatccaaagcaaccagcagaggcgaaaagctcgtcagacaaaggaggaagtgctgccccagcaaagaggccacagaggaagaagcggcaattatagacccttacggcgggtggtgaactgtctgaagtaccttagggtggtgtttggttcggaagtggtaacgtaaactctcatggtattgccaccggccgtaacagctaccattgtatccgattacacggttagtttggttgcagacggtaacatcatttgtttacattacggcgtttggttgagggttgcagccaaggaacgggaggccgatccacaggacacgattcgaaatttggaacagaaacttttgggaagatcatttgcttggagaactgcttgcttccagacaactattgatcaaataactgattaaatgaagctggtatacaagtatgcaattaagcgcatggcatatgctatgaaacattcgcggaagatacactccagtactatatcaatagcagctgacatcaaaagctacataaagaagctcaacaaatttcggcatgcaaatatttgaaagcagctagttagaagtcatgaaattgtatctaatatcagcctagcatcatatcctggaagatctctgaacaagatcttgtagatctacttcagactcgagtaaatattggacaccatgcatcacaaagcagagaattggacgcatcattatattaacatctcatcttcatgtaataaagaaaaaaacaaacgtgagtaaaccacgcgatttacatagctaattgcacaagaatataggcataaaaacaagtaaaatgtctccaactcatcaaaggtatatgaaaagttctcaactttaaaatttgcacatgcttgaaagcacctaacacaaattaaatcctctatttctctgttttagaagtcattttgtgacaaccaagctgttgaacgcaatttatacaacagtaccagattttgtgacattcatgtttatgatagtagctagcagtcttatcgtcttttaaccaactgcacaatattacaaactgtcatagtgcaagcttataaaatttcaaagtactgaaaatgaacatgctcatgaaaaataaaggcaggcctctaatcccgaagtcaaatgacctacgaattcaaaatctcgtaatgagcatctgatagattaaatgacatatagccatcacatgaatttttcttcattgcttcatctggtaataaaaaatttcagaagttagtaaaagcaagatattgcgaggttacataatactcatgcatttagtcatctactgacaatgtagatgtgcagtacaataaagtgagtaaaagaaagtgagatttcgtgcgatactaaaaaaatcttaacataagaaaataaagtgagttaattgttaaatacttaatagaatggcatgaaatctaatgtcactgggatcaattcatgaaataaaaatagccagaataatgatgcaaccataatcatcaataattagttcaatgacttactctgccatgatcatcatattgttgtttctcgcactgcaccatcttgactcaattgcaccaaacttggtcctaaagtgcatcactcatgactcaatgtgcagaacagcagtaaggcaagaatttggcaacctcttaccaagtacgctctctagaacttgacggtatccatttttgaaacccccttttgatttcgaccttggatccaaagaaagctcaaacaataccttcaaatccttttgttcttgcctcttccacgcataatgcctagactttaaggaagctccgtaacactgcaatattagaaattcaacagaaaactaacagaaattcaacagaaaactaacattaataaacaaacttctttttttagttcttatttgcaaataattagaaattccatacaattaattcagacaaatataaaaaatgtttgttacatttgagaaataaattgaagtgtctacttacagcctcgccacttcaggaaaaaacataaatttaagagtaaaatgcaccagcggtccttaaacttgtcaggaggtttcacttaggtccacgaacttgcaaagtgcacatcgaggtctctaaacttagtttattgtatcatcccggtccaaagccgcgtttgaccgtggtcttgcctacgtggcacgccacgtggacgatgacatggaatttttctcttctccctttttttttggacccgctgtggcctcaaaacctcctctcctctgccgctcgtctcctcctcgctgactcggccgccgccaccgccgcctttccgcgccgcgccgtgccaccgtagctgctgacgataagctggccatagcggcgacggcggatccgcgggcgaagccgcccgccgcgacgtcgacgcaccacctcgagccgtgggggcagccgccgccgccaactcccttcgatggtgggatcgaggagctttgggtgaagctcatgggtcacctacgagacgccgccaaccgtctccgcgtgccccagcctagccccccaccccccgctgccgctgacgacgacaaagcccgagagcctacctgcagagatggactccgagcccgagttcaaggccctgcctccgcctccacttctcgccctgccacagccgcaagcggacggtgcagcgaggccgtggaacctgctacagtggacacggcggcgcccagccgcctccatgttgtgggcggcggcggtgcccgtgccgtcctcgtcccgacgctagaaagcgcgccgttcttggtggcactcaccccggaggagatcgaggaggacatctatgcgccgccgtccccctccctcccgtcagcgccgccatcctcctccccgagtcgccgccgtcccctccctcccgtcagcgccactgtcctccctcctgtcgcgtgcttgcctccggcacggtggctcggcgagtggagtagaggctgatggaaaaggagatgaaggcccggctgtggagctcgtggtgcagcggccgccggagagaaaagaaaatgaagaagggagaaaaaaaaggagaagaagggagagaaaaagaagaagggagaaaaaaaattccatgtcatcgtccacgtggcgtgccacgttggtaagaccacggtcaaacgagactttggaccgggatgatacaataaaccaagtttagggatctcgacgtacgttttacaagttcgtggacctaagtgaaacctcacgacaagtttaaggaccgctgctgtattttactctaaatttaatatcaatcatcatatttctaagtcctacatttcttctccagattttagtacttaagggaagggatgatgagccatagtaatttataaaaaaatacaaatcaaaacaattattaaacctatatccagaatatatcccggtagcacacataatacatcaagctgccactcaaatgaacaagagtacatattaacttttgctaaaaataaaccatcccttaattcttacttcaagatcaatcacaagaaaattgcatcaaattaaagcatatcatcataaatcttgagcactactgattaaaagaatggattggcccaagatgttattagaaaatttcagaggttgcagagttggacaaaaaaagatggtttcagcaggggttctcaccaacaaggagtagtgattgaccgtgaaaacgacgaaaacatagtgattgatggtaagagaacctcctgggcaccttctctgtgtacctcaggatcttcggctaggggctaggggagcggggcctccttgaagagatgtcgatgaacgatgaggtcagtctccttgaagatggcgaagtcaagccgcttgttagggtcgaatccatgaatggactagagacgaaactctggaggtggtggaggtcaccggccttgccgaggtggccaagctccggtgtcgacagcggcgcgcacgggactcggggagcggcggtggtggcgagcgcgtggagggggagcaacaccggtgaggctgggggcgccggcgacccgcgtggggaaggcgaagcggcggcggcgcttaggctaggtcacgagactcgcgacaacacaagcgttgcttccgctccgtatcgttaagctttaccactcgttttggagcggtaacggatttgtactaggcccggatctgattgcagtgtattcgattgcaggccacccaaaacaaacaaacaaatgtaatggggttcaattaaggaaaaagtacaccgaaagtccctcaacttatcatcgagttacaaaatcatcccccaaccgcaaaaaccagatataggacatccatccacttagaatcgttcactttaggtccttcggtggttttgaccccggttttgtctgacgtggtggctatcagcgacccacgtgggccccacatgtcaggatgtcacttcatcacctcttttatttcccttcctctcccttcatcctctttctctcaatgttctcactgggcaagcggcagggcggccgacgggtggggaggaggccggagggcgaaagaggttcggcgacgcgtcgacggaggcaatgccgccgtccacatcctcgttgtcaccgccatggtggccttcttcgcctctttccgctgagcggagtcgtcagcggcggctttctccaccacgtgccgccgagcttgacgcgggggatgccgctggcggcggggccgtgtctcgccatgtaggagccgtcgacgatccttgcgtcaccgtcaacaatacagcaaaagcaacaggggatagggttcggcaggagctggagcgacaggaggcagggacaggcacgatgacggtggctctccgggaccaagcgtcgtcgccaggagcacaggaggctagcatccatggaggcgagctcggcagcatgccggcgtcgatttgtaggacacccatcatctggccaccatgacaaaaagagaatatttacccaccaacaagcagatctgagaatgcgactataaatacccccattccccttccaagccaaggttgctggtgctattgaacattattgtctttggcttgatttacattgagatccacttttgagccttgctctcttatttctcctctgcatcgatcttcaaactcggactttgtgtgcgtttgtgtgaaagttgtggatttaagttcgtgtgagtgtttcgtgttgacttcgtgaagatttattgaggacgtattttatcccattgagattcttgctccatcctttacttttggaggttaagaagtgctagaagactagttgttacttttgagctatcaatctacgtatggttagctagcataagtttgtcaaggccgaatcttacctccgaaaagaaagagatatcactagggaaaaaaatagtgaagtttatgaaggtcgaatctcacctccgaaagagaagagataccactaatggaagaaataatgctttgtataagctctcgaggaaaaggtcagtgaagaccaggtttttgtgagctcctcaaagaaaattataaccccctcatggattcaaacttccaaggaacaaatttcagtgatatccttttccctagctttgctattgtttgtgcttgatattttttattgtgactagctagatccaattttctattgcgtttgtcgctgttctgccattttcagaaatatccgaacctccttcagatatattcgaaaatttcagcttccgcacctaattgagtttttaaattagcctattcacaacaacccccttctaaacctaaatgaccctttcaattatttgtttaagcaactaaccaaagagattaaaacaagcacgacattcggtattaaaacaagcaagacgttctgtacaacatattacaagtcaatacgttttaaaagatcagctcatcaagctgataatacatttggttcacacacaaataccaacacgaaacgttgctaccatagcacatcatatgatagcaactgcataatgatttatccttaagtgtatttaatgactttgcagtaacaatgtaccacatgaacaatatagctggaaagaacatccacaagcatgaagcagtcatcaccaactttattcatagctctgatcgacaagagtaccaccaaaaacagaatttcatccattcgttcgtgaaggcttcagtttccacggcagcaaccaatccacggacttacctgacgcatctcagtaactgcccgtatgcagaattgcagattactcattaggtcaaaaccctgggtctgagaagttaaagaactctccgtacatattctcatcagacaatggaagggatcatctaaaatccccttcatagcctggaagacctgccataccctgtaaatcagtaagtcaacaggtaaacatctgtaattgacataatctgattgtttagcatacattagttgtttagatgatacgtttggttattagttgaagaatcttctctggataattacatcatctgagcacgtggttggtagttgaattatttggggactgacgttcaattaaaagattagacaaattttcaagttaaaatttgataataacttcagattctagcgtatcatgaggcagaaattaataggaaaaaacaaaatatcaaaactaaaaagtaattaaactgcactattaatttagctggtataaatcaattaaagaattgtgacagagacaatcgtctccaggggattacaaatgaactcctaatattagcaaggaaataaatgattgaatcaaggagatgtaattcaattattcatttatcaagaaacacataatcttagataaacagtctaatggggcaaaggtagggctagataaagtttatgcgtcttctcattcataagagtatgaaacaaagcgaaaaaggagtaaaatgaccatgctacccatactatacttaaatttcttggtaataggagagatgatggtgttagtgaggtgtattaggtgagatattagtgtaagagagagactgataaatgaggacaaaacaaggaatagaagcattacaaaatgaaatggagtaccacaattaagtgcattcaaaacttaccagttccaagggtagcacttgttatgcttccaagacaagcatcttccaaaagaaacattacatgacagggctgtacttatcaaggccgaattcaagtgtcaatcttcgccacttactcccaacagattctcagcaaatcctgaaaccaaaagagaatataatacatttgaaccagagaatttcagtgtatttgtacaacaaaaggaggtgagttctgcatccaaaaactctatcaaaattgaggcacccaagaaaaaaaattaaccttcatggtacaagctagtcacacaaggtaattgccagaccatgcagattgtgctggtaattgttccgccagtggaccattttgctggttcccttgctgaaaattaagttctggaagttgctttgtgggcccaaaaaggtggaaatcctgccactgtttttcatcgctacctctaggatgcatgctgaaagcttgttttccaggaaaaggaaagggagtggtgaaagtactgctggcagtggtaacatttgaatgtgcaaaacgctgattattgacataatccagtgatgacctgtagccatccaaccagatgccgtcattggtctgaacatgctggccattgccagctaaaatggaatcatcctgtcgctttggaggggcattgttaaatcctggaggagggccaacatgtcttccaggacggctgacaggatttttctttgatacaccatcagaagatactactgacggcagaactgaatagaaggcagaagggatggtaacttcagtatgtttatactgaccaatcattggatttgtactattcatagtagcttgagcagatacctgaggcacatttcccacagactgtaatccactgagtccaccattcactctttgatccagaaatccacttgcacctatgttaacattgtttaatgcactcaataagaatgaatcttgcccagggagtatggctgtattatctgggttactgaaacaaccgagtgacgatggaggtgtacgctgatccgaaattatattggaaaagctcgccatagggactgtatccagtgagccaacaagtggtgcaccagtgcttacccagttatgatcaggtgctttcagagactcaaaaatatcagatgttgaccttgcaccaacatcaagaatcacatgttgcccagcattggctgcccaaccaagagaagagattgggagagattgaacataaacattgggagtcagaaccggtccattgctctgaaatgtcattggtggtggtgcaccatcatttgaccaattgacatcagacaccaccactggctgtaataactcattactagtctgttctgaagtaactctcggaagcttttcagaaactggaggcttgaaaactatttcttcatcatcatctccatcaagaaagagttgtgcctttgactgaagcacacctagatcttctgcgacagaaccaattttactggagacttcaggttcctgttgtatgtgatttgttgtctgcgcattggaagatacaacaagaggaacagaagaagcaggaggaggaggttctgaagccataaggaacttttttgaggatgcatcaaaatatattcgcagctgatcaatttgaacgaaatttaacagcgccttccctgcagcaagaatcctttctacacgtgcttttttctccttggtacctccatcacttccaaaaccttgcttggtggagaagtccaagataccttgagcaggtaccaaaggcgaaaaccctcttaactcaacatcctcccacaacgcaagcctgttcccagtttcaccctcctcatatgtgcccatgtcaaaaaagcaagtttcatcattatcaccatcgacatgtgcgagaccagtcaaaatgagcttattcataaatggcacgcattgactccagaagaaagatcttgcatcggcttgcttttcatccatctcagaactagccacaaaatctggatggcacgccagccattcaatgaagaccaaaatagctggcaagtagatacttgatgcaacatcatgaagctctgcgcatcttttgagaaggtatccaacaaattcaaaggctgcagcaaatgcattttgaagaagaactctgcgttgcacaatttcagcatatgattgattatctgcgtctttgtttgcattgtgcactgtgaatataaggatagcaataagcttaacaacagaaagcgcgttttcagcagcctcaacaccaaaattaagctcctcgtaaggaccagatgaaagaagaatttgcaaatcgctgataactgtagcagacaactccccaaatgtttccaagctattagaggaaaaaagcaagacattttaggagacaaagaaagagagaataagatgagtcacagaagtgttttacgaagtaccttgtccttgtgaaaagaattccattgaggcgaacaaatcgaatatagaaagccttcagtatttcttgaatactgtgctctcgctcctttgaattttcttctgtactagaacctttgggctgaaatcttgtctcaccccttcctctggccctaccaactgatctggatggcaagctcttagcgttgggaaccttgctattacctgatagctgagcatagatatcatgattctgcatatgaaactataagcgtttgagatccaccgcacagcaaaattcggattctgaatttgctcatcaaatataataagaagctgacaggagaaaccccctaggcacttgtacacactggtccaaatctactgcaaggctaaacggtgcatttctccattcttgtgttatgtgcatcagatactataaagaactccctcaaaaaattatagggtgtatattatttgaagaagtcttttgagaaaattatatgatgtgttttattataaaatatatttacaatacttataaaactaataatgttttataaaagctcttagaaggatgaatctattggtataacttctatgcactaaatatacttataatttgacaaccgttggtcaaaataaaaaaaaaagtgaccttttcaaaatattatacttcctccaccccacggagggagtacactctatagttttctagggaggaagtatgaaagacacgctgcaatcaatgaaagaacagctgtacaataataatataagtaagaacgtttttattgacccagttggtaaactgcagaacatttcttatcttatggaatctaaataagattataaaaattgaagatgtttttatcagtattttggtaggtcattcgtatttgagtcggtttttaagttcgttcacttttagaaatacagatctgtgtttgagtcggtttttaagttcgttcgcttttggatacaaaagacatcttataagaaatctctttaaaaaatctcgcatgctaacttgggacgcttttggaaatacaaaaggagtcgtataagaaatcattttaaaaaaactcgcatgctaacttgagacgagagtcagactcctaattacaactcatgattttctaaaaatatatatatacaagcgaattcccacaatgattttcacccaagataaaccgtataacaataaaaataagactaaaatagccttcacccgttgcaacacacgggcattttttctagtctaaataagaattccacaagtggataataataggctaaacaccagtaaagatacgaattttctgtgtacaaactgttgaacaacggaatccaacaagatcgactatctcctagctagataaaatcatgcagtatcatttcaaggttcaccaaggaaaaatagcttcaacacccaatcacaatactggaaaacaaggatcatactaaagtagtatcatgaaggtagcataataccttgtcaaatgcgagaatcaagttttccctcgctgcagaaaaaggattatccacagctaagctacggaagtacctatagatagctgttacctcatctccagcatatgatgccagtattgcaagctgagcaagaacacaaaaaccttttcatcagtaccatcgccattcaagcacacaaaacaagttttgtactaatggtgcagaaaattactacagcgacatgctgcatacctgatgatgtgggttgccattcgaagggcacagcgaagctgcttccttgtagtagatagaggctgcagcatattcacgacttgcataatccacatccccatacagacctttgtatcgggtaagatctcctaaatatatcaaacagcgatagcatgacaacaagccttttttcaccccaaccactttcttcccatctttatcaggaacaacagaactatcaggaccctcagagaagtagcccaacggaagcccataagtagaccgaattttcagcatcaagtcatgatagaaaccagttgcttctgagaggaaacttctaacagaagatctgatcctcttgatccgatcaggattggcattgttcttcccagcagagacaatatgagctcggaattcctcaattcttttgtagtgcaactgccacagaagatattctatctcacgtttttcagagaagtcatgatcagcaaggattatcttttcatagttctcacgcatctgaaaccatatgttaggatctgatggcactttggactgtgctgaccttcgcagacgactttcatgttcagcgttctgcagaagtaacatcattatcattactcactcgtatacactatctatttcaacataaggtttcatgtcttgaaataaactatagaagtggaagaaacaccatgtgaaagcaccaggagagaattttagtgaaggaattaaaaggaacagacataagcattcaataaatagtaaaaggaaataggccatatgcatccaataaatagtaaaaggaaataggcactccaaagctagatcaaggacatcaaaattctaaaagctttaacatctcaactcagaagccaaaaaaggtgacctatctatatacatattatgaacaatgagcagtcaactgttccacaaaaccatggacagctttttcatttggtggagatcacatacatttcaaatctgcatctagtttaaagttaactcagttccatgaacaacgtgattatggtcataaacttctctcggacatcgtcagatagcattaacccacagagaggaaaacgaatacacattccagtatgccaactagtagtagattatacagaggtttttcacttcttggcgctttttccacaaggcttcaacaaatatgaattaaaaatacagcattgtttgaaacacagtttaccccatcaacacaggaacccatatatataccacaaaatacatatgttacaaacatgaaatataaaatatatagctaccaccccatttgctctatatctatttaccaatatgactaaataattgccccataattaatccacttcacagctagctgtagctagcaaatgccacatcacaaagcacaggaacataaaactgttagctttaatacaagtgaatgttttaaattcatcacctggaacatttccatttttcaatcaagcaaattgtaatgctgaccatgctaatgtggttcatttggtcaagtgaaactgtttaaaggggatggaaatttgtgggcacaaaagttcagttacaactcaagcacgtgtgtgcaactatcgattaatgtgcaagctaactagcaccgtgggacgaatgcggtataaatgggaagaagccagaaccaagggcatatcacaaaggggacaagacataatgtgcacagttctgctgcattttccctaatggtaaaagtacatacagaaaaatgtcctacacacatgcatgaacaggtgacaaaggcaggtaacaaaagatgtttttaggagaaagaaaataaccaaagatgtaactattgcattgtttacaagaaaatataacagccctggacaaaccgacaaacacaattagacaattgcagttacagatagatgaaatagtgagcattagataggatcgtatgatctggtgcgaggaagacaaagcaatgcgatgtatacagcgatagcacacacagatagggaaagtcaacgctcagtaagcaatgtctgggacgaaggacagaaggaacagtcacatagagatgactgtaaacatggaatgagatggatggtgacaggagatcatctgcgcaactcagctcacaggaccacagtatgccaaaaacagttgcatgttagctgtttgaagagggttcatgacaacttcacacatataccattaatcttttccttgcatgctactacagaaactcacaggcaatgcagattgcagaaacattgaaaagagcaaaccttctttaagagccgctgtgcaagctcccttgatgatggggaagcagtagctttatccatcggaacggtcatcatccatcaatcacatatggggtcaactacgctgcggaggggaattaacaagaagtcaacaccaaatctcaagaggtaaaaacatgcagcttagtagtacaaagtaaagcctaccagacaccacactcaactaccgcgctaaaggggggaaatagcctaaacagaaccgaggaactacgctgcatccacgacgggatgaagcttccgcgaccgtaacaacccaaaaagctgctcgacccatcgccggcgcacaacatcatcccaaaacctaaacgcaatttcactagaaaccctaggtgaagaatccacctaccgacccagacgatcgcccaagaaaccctaggaacaactaacgctagcggatcgaaacccccaagaggcgaatcgagcagccagcatgaaagaacaatcccccgaaaaaaggaaccaccaaagatcccgcggggagcccgaccaagtcgaggcgctgaatcggtggtctcccgagccgaggccgaccaattgggcggacgccggcgccgaatccccgcgggacacaggggattcgataaggcaaggcgcgggggagggagggagggagaaagagcggggggtgtccgtacctcgtcgagcaggaggatgcagaggggaattaggaagcggagaggagaggagaggggagggaagagaggggggctatcgttataggcgtgagtcgcgtcgtggcggtgttggaattggctttggcacgtccagtccaggtcaaacccaaggtggggaggcgagacaggaggcggtgtgagaggctgccagcggggaccaccgtcggttattgtgttcttttttccgacgtcatttctcttcttttctttttatttaggctatctattttcaacttttttttcttcttccttatgtacgaagatttacaagactacaaaattcataataaactagccatagctcaagtttgttataaaactaaaaattcaaaatttagaaccacaaaacaagaggttttagagcatctccagcaataaaccttattttaaagccgggagcgtatcctatgcacacatgccctcacgtgtacacacgtgcacaccaactaaaaaatgtcaccaaaaaatctagaaaaaatcatacacatactttcaattgtattacacctagggttaaaatcttaacgtcaaattcattatattttagccgtaacaaaaaaaacaaaaaatctgacagttttaaggttgcaattttgtcagaattttatcttttttgttattctctatgtagaatgaatttgaatatgcgactttgcacgtagatgtcatagaatttttctagaattttttgtgataatttttagttggtgtacacggtgtgtacacgcgagggcctgtgtgcataggatacgctccctttaaagcccctaaaagttaaatgagggctgctcccatcttccaatgatcaaaaaaaatacctccaactctagcaatagcccatattttttagcccctactcatgtttctcttttattttaacatgcaatccttgtttacactatgtttaacaccacaataattaaacataaatatttctaacgcgtataattgaaacatagttaaatttacaatttcaaacgccacaattcagaaccaaaatcaaaattttcaaacatgtaaatatggtgtgggcagaatgccatatacaacaacatgcaaccaaaatttatagttcaccaatgaaaacaaaaatttctcaccaacatgtcattggctgtctccatatcaccacaataggctatgtgaacccagtgatgcattattttttttgcggagatgcattatataatttaaaaataacacaccctacaagaatgaatggttcgttcataaaaatagcaaatctaaaagtagtatatatcctactagcaaatgacacttagataattgcagaaattaacacaaaaggactccaagaaccaatcgtggaaatgacatatcctactagcaaaggacacatggatcatccaaaacgatccaacttattccattgaagtgctcaaacttctccattactgccaccaaactcacctccaaagccactactaccatcaaatccaccattgagggcagccacctttgaagctgcaatttgtgtcctcatagccaacacatatgttctcacatctagttccaagatggaaacatcacaaaacatgatcttctattcttgatcccacactaacttacgctcagcaaataagagcttgcgctcttgaatctccttagtttccttccatctctc

SEQ ID NO: 29835 - DNA, 1918 bp, Oryza sativa
cgggattagtgcttccatctttatgatactctaatcttgtttatgtgataaatcgaattatcatatatcttatataatctccggcaatatcgctatctaacctacaatcggctaacatcgatctgtcagtagaagacagccgactaggttaaataccgatgttgacttagattatataggatatccaccactctatgacacatccaacggcttaattgtctagatattgacttttttttcatacttatagctgcatcagttggatttgatcttatgagtcgtgattagaatctcaatctctagcctgcctttggttgccaattagggtagcatcggggtttcagccgatcttacctgatttgaatatatttatcttatgtgcttgattgacatgttaaatccgccctttatgttaagatctcgtcgtatttaagtatattaagctttctgtttggtatattcgacttgctttaatatctcaatatagaacggtatcggagtattagccgatacatgctagatctatctgatcggctatgttatgaacatatataatcttgttgttaatatatatttcggtctaagtgatttatactgtctcggcatggcgaccaatttatcccaatcacttgatttaagtatatatcgacataaggattatatattgttaatatcaacagctgatcaagtagatttagttctttcttacttattaatgtctgccgatcgatgcatatatgacatcggctcaaagatcaatgatatgtcatcggcatctagccgatcggctatcgtttatagatttaaccgcggtttctttgtctttgtctcttgttgattgcaggatcaaatcaactggcatgctcacacacccaaaggcaagttttggacctgcactggagttaagcagatctcccaggcctcatgtttttacatcaacaattctatactagaataggaagagagtagagtagaagaagttggaagaattccggagttgtcggtaatcttctcctatttcttttattctgtttattactctgaattcaatataatattcttcttgagtaatttagatttatcttgtgagaattatctcttggttagtttctaaatagcatacaggattattgttcactataatcaactaaaacatagtgattgctttggtgagttataaacactaaagtagatattaattgcttagacgtggtgtttaggtaattattatccagtaattgatgcgtgtcccacagtacgttgaggtaggtgtagaggtggtgacagccctcgagatcacttaagtccttcctgtccgggtacgtagtagagcgacatctgggaacagcgggttgccagtgcctgaagtattgtgttaggattaaagttaagctttccctagacactaattctcactagtaaatcctctctatccaagcctatcctttgcttggtgtccatggatgaaccggaggaagatctgaccatacacgttcccttggattcgatacccttgtaatactccataggggaagtgctacattggtatatccgtgcgcttgcgcattttatctgtaatcgtattaaataccaacagtggtcgaagtggagccacccaagacagacagcctggtgaaattcatgcaaattttcctggagaaggaaacatcgatgcccaggaaccgttattggaagacgccggtaaaaccacccatatcgccaagaagttagagcagccggctcagaagaagccgccgtccgcaccaaagccaaggaaggtgtggagggaaaagccaaagacgcccgctccatcacctccagagacgggtggaaaatctacgaactgaatcagaaggaggtacggtcttgcacgtcggactttaaatgacgcgaccttcgccaacaggtaaattggtat

SEQ ID NO: 29836 - DNA, 6283 bp, Oryza sativa
agtccttcctgtccgggtacgtagtagagcgacatctgggaacagcgggttgccagtgcctgaagtattgtgttaggattaaagttaagctttccctagacactaattctcactagtaaatcctctctatccaagcctatcctttgcttggtgtccatggatgaaccggaggaagatctgaccatacacgttcccttggattcgatacccttgtaatactccataggggaagtgctacattggtatatccgtgcgcttgcgcattttatctgtaatcgtattaaataccaacagtggtcgaagtggagccacccaagacagacagcctggtgaaattcatgcaaattttcctggagaaggaaacatcgatgcccaggaaccgttattggaagacgccggtaaaaccacccatatcgccaagaagttagagcagccggctcagaagaagccgccgtccgcaccaaagccaaggaaggtgtggagggaaaagccaaagacgcccgctccatcacctccagagacgggtggaaaatctacgaactgaatcagaaggaggtacggtcttgcacgtcggactttaaatgacgcgaccttcgccaacaggtaaattggtatgtatctacatttttgctttcaacaatttggatttttgcatcagcacatggttgaatttcaaagttgcatttaggatttttgaattttgaggaaattcttccaatgaatttttcagagcaaaccaaaataaaacttccaacaaaaattcgcagtgccacgactacactgaccgttggaatccaacggtcgaaagtggggccgattgggcccaccaggggttcggccgaacacctggttcggccgaaccggccaggcaacggtcggctgcctccctctttgaggcaatggctagtgggccccacaggtcggttttgaccgttgtgggtgcactacttaagccaaccggccgggagagggaactccaccccatttcaacaaattttcattccctctccaaagtttgctctcaagttcattcaagctttgatagtttccctcaaattcaaatacttagttgcatatatacaagctgctttggtgaaactaatcggcgggtgaaattttttttattcctaacccccgccgagttagtccgttcttgctccattgtgcagaatgaggaggcgattgtctcgtctgttcaaggggtccagctcttcatcaagtcatcatgatgagtctagtactcgttcattagctaatgtctcgatggaagacgccgaagctccgcgatgactcctaaacgacaccgaccttgaccttgtcagtgatcgggaaagacaagcctactacatgttgagcgaccgggagtatgctcacacacgagaatactctccggagctgctaaaaaagataggtatggatgttgaatttcgttctatttggaaagtggttggttggcaaagatttgctgtggtagatgagcctggttctcgtttgcttactttgcaatttctgtgcactttgaaagaaatagaagatggaatttcctttcgctttttccataaggagtacacacttacatagaaaggcttaagtacacttcttggttttcacgattcctgtaaaatatatcttcagaaaggaatttctgggttcgagaaaaataggttttgggaagatatttctggtgctccaatttgcaagaaacctatgacgaatgatatccataatcctacacttaggctcatgcataaatggattgctatgactttgtttcctagaggtgatcttagacccattaggagggatgaattgattatcatgtttgccatggttagaaagatcaaaattgctcctgtgaaatgtatgataaggcaatggttagaaagtataaagttctctgctcctgttgagttcacttctcttattactcgaatagcaaaagggctaagggtcgttagcgactaaattgcttttatctcagccgctcgtccgtgtattgatgagacctatctagtgcaagggcatattctgaagcatggagtagatggatctttgatttactttttccccggttgtacaaatgaaatcccgttgccaaatgcggggtatcatttgtacaactgccatgaactaaccatttccctgcaaaccatagaagaatttcgtgtaggtggagcatacagggagacgcgcaacatgacaaggaatgaacgagagagttcatcatcctcaacacccgtacagatgtatgaagcaggttgggcaccagctggggatgcacccggatggacccaagctctacgccacagcatcggagtcttaacctgggcgagtgccagtgaggaccggtggcgtgcgcctcatgacatccaatggggggacacccaaccttccagatcaagtggtgtgcctccattccttgatatgcagatgggggagatccagtacaacctcatggaacacatagctcaaacgcaagaatggcaacaatctgctgatgctcagttcgccaacttcaacaacatgatgctgcaacagcacgatgaccttcaagcgtacttccgttttcaggggttcaatccttatcaaggatcctgagcgaaagcaagcttggggggagacacctctccccctccctccccccccccccactgaggtaacttgtatcacattgcatatttccctttccaattgcatatttgctttccaattgcatcttataaaacttgaaaacaacataaaaatttgcaaaatagaaaatatcaaaaaaaaaggataggtttgagtcatgctaggtaagacaagctagttctctttgttgaaatgatgaatagttgctctgttttatatctcttatatatgggttcataggtaagtattctatcaaaggttaaatatgagtagccaacaattatccgggaacctaaggtaaatgggctgcacttgctgatctaagtctaagttattgcgagatatgagatagtaaataagaattgctatgatcctgatactagtttgacttgaattccggatgtttgtttttcaaaatgataaattgagagttcctcatttgatataaattcctaccaaagccaaaaatgtgctatcatgattaaaccatataaattttggttgcttgtcattccattgaactttgtcaaactcttgtaacttgtgtagatacttctcatgctctatgatcaagatcatacacccacatatatgcacatgctaaactcctacactgggagctaagcaatattccatattaccaccaaaaataaattctccatactttcatgtgctttcttctcctaaaaatgaaaatccttttgaaaaaaaaagagaaggagggaaaggcatggttgtgaaaaaataataataataaagttatgctccatcaagcatgagcatgatgttgaaaaaaaactgtagccatgccctctcctaatcaataaaagaaggatttttgggagaagaaagtaagcacaaaggagaagcatttttctttatttttcctcatgtaccactttcatcatacaccacacacacattttgcacgatcttgatcttgagtatgtttagttatctgctttagtctaagtttttgctttagtaataaatgtgaatgcaagtatgccatgtttgatccctaccaagctccacatatcaaaccttagagtaggaataaaaaaggaaaaactggtgaggaattcaaattgatacacttggagagaccgagtgaatcatttgaggaacttggttttctttttcaaaatcatttgaaaacttctggaataagagttgaatgaagattggatgattggtgctctaattgttgttctgtctttcaactgcccaaggcaaggagaagcagtgtctcgtggtaatcaggagtaagggtaagtcaccgtgtcaaagattatttaatctgagagagattacatataccctgcacctgtatctttgagatatgcagcatagtagcaactcctgatcaacaaccaagtctttgtttccttctgtccttcacttggaacgagcaaaggttcaagctttgggggttttgttgacggtcgttatcgatcagtttcgaccgtcaatattactaaaatagagaagaactagtgatacttgcaatgcatatatctgttagaataataatattccactagtattaggtatactaaccttttgcagagaatgacaataaagtggaggagaattgtcacgtcctgataaattcatcccgaaataaaaatcattccctaaaaggaataatagaattaattaaaattcaaaaagaaattggcaaacactaaaatacgtacaagaaaaattcgaatatggcccggagaatttttgttaaattctccttggtctaaaaggagccctcaaattttacttgaattttcagagcaccggaaataattattaagcaacaacaacatttatcaaagtttactaaaaagaaaaagctaaaaataaaccctccttcctcctttgggctgagcccagcccaaagtccttccctcctccctctctttttccatccctctctctctcttgggcctccccttccccttccggcccactccatactctcctcctccttctgggccgaccctcccctcccttcttcccctcagcccagctccctcctcctccctctccctcccgggctgcctctccctcctctcctcctgggccgcctccgggcccaagccaagcggcgccctcctgcccgtgccacgcacgtgcgtgcgctgacggcgcgcccgcatgggtcccacgcgccgggtcgttgtcctcctcccgcccgaccttctctttctctcccggaaacctagcgccattcctccccaaaatccacgcgattcaaaccgggaattccaaaattgattagggggaattaatcccctttccttcctattcaattccccccaatttcccccttgattcgtgccctctaacgcccggaacagccgcgccattcccggccgccttccatggccaccggccacgaattccgccgccgttccccgcctctcccgtggccggctccctcccctcacctataaactggaaccccctcgctccgttctctcgttttagccttctcccgcacccccccgtgtgatatgaccatggctactacggatacatccgttgctcacatcatggatgaacaacaagatatcaagttcgagtcctccaagtgccggaatccgattcggccacctgctacactgctgacttcaaacggccgccgaatctgcatacgacctccgtttttggcccgtgaatacttgatggaaagctctcggagcgctctttccaacggatccagcctcatctccgaattccatctcgtgtggccggaatcacacacacaagttgctgcatcacctataatgggcctatgggcttgtaacttcatttgggatcccggcccaagtggggcccatgtggggtgcgccccagctaggtggagcacgaccttaggcacccctaggtcatcctcccacccctatttatatagctaggtacccattcagggtttcttgggttttgatagattgaagtttagccattgctacttgcttgcagcgcgcgtgtcggctagaccgtccgttgtcacgaccggaaataacccaacgggcgttccttacgtgcatgtattattccttgtcccaggaggcaaggtacaccaaaagttgatacatttcagagtttatcaagcggaagcgtaaataattaatttattacatgggcggcgaaggcccagcacacacaaagacaaacgggaaacagcggaagactagggcgacgaccacaggcgcttgacggcaggcacgagctagacaccaaagccttcatcttccaggaactcctcttctgggtttgggaaaaattgagcaagactgagtacaaccaccgcactcaacaagacacacccacaagtgcagaataaatgcaagggagtacaagggagccataatatagggggttagggtttgcagtaaacagcattaaaagtcacttagttgctcaaagctactttgtaaacacggtcctagagatatacaatattattaattaaggccgtgaacccacacgaacctgccttaacccaaggcctacgatgattcagaccgaactggcaacccgaccctgggtcccagctcgtcccaagccaacccaggccaaccattccacattttagttgttaagcaggttttaagaattaaaacactaacttgggtacattgctcggcttgcc

SEQ ID NO: 29837 - DNA, 6974 bp, Oryza sativa
cccacaagtgcagaataaatgcaagggagtacaagggagccataatatagggggttagggtttgcagtaaacagcattaaaagtcacttagttgctcaaagctactttgtaaacacggtcctagagatatacaatattattaattaaggccgtgaacccacacgaacctgccttaacccaaggcctacgatgattcagaccgaactggcaacccgaccctgggtcccagctcgtcccaagccaacccaggccaaccattccacattttagttgttaagcaggttttaagaattaaaacactaacttgggtacattgctcggcttgcccataaccgagggcgcggctattcgaataggttatactctgatcagaggtgtacatctttacccacaagacacatctttctcacgtgtaaccacgtgccacataccaccacggtatacggacggaagacgtgacatagtttccaacccatcctagccatagacaagagtaccgacccaaccccaactacggccggaacctccgggataggtaggcaggactgagcccctagcagtaggacaccggccctgtgccatgacatctcgactaccgggccgtagctcgtgtagccttcatttgccctagagatgtccatcgacccccgacttcgtccatctccatccgtgtacttttgtttataaccagactgagccacaaactaagccttacccactagacatgtggaagtacggtagtgctttgcaacagaggcccgaagaccggtccttatatggccgaggtgctactatcaaaaccatgcaccccgagcccagcctaaaaccattttgaggattttgaatagagggggaggtgtgaatccaattccacaataatccatccattccatattgtccaggtgatgagaatattcccaaagtctagagttgtaaaaccacctaatgttgcctaattaaccagcgaagcatctacctaaaatcatactagtggtaccatgagtagagtgtctactagttggggttttgtttattctagggtgaacaaggaaatattatcaataacaataataaggtcataacaaaggtaaataggcatggctagataaaacagtgataacgcgggaatttaaataaagcgataatgcaataatttaaatcaaaataattttataaactgggattcaatatgttcaaggatgatgtgacttgccttgctcgctttcccaaacgtcggcttcaacctccacgaagagcagatcttctgaagctgcagcgtctacacgaccaatggaaaataaaaggcttttactctaataaactccatataacaagcaggaacaaagcacaaaaatgggttcttgacttcttaaggaaaaattagagacttgaacggtccaattccgagttcaaatggccaagttatggccatttgaagtttatatgctctttaaatgaatatttgcgaatttcttcatttaaattttaatttaaaaagggtttattgcgtcagccgagggggaggggcgcgcggaccgggtccacgggagtggggcccacgcggcagcctcacagtccacggtggaccaggtgcacccgggctcacaccggccggcgccgtgggccccacacgtcagccgcacccgagggcggccacgccggcgcggtcggcgggagacggcgcgcctgtgccccgatgatcgccgccggcgaccaccggcgcggcggagcggcggccgagagaggggagggaagggggaaaggaggcgacggtccacggctcaccccggggcgacggcggcgacggaggaggcggccggagcggagggaggcggtggcgcggctcaggtcgacggggacagcggcgctccggcggtcggcaaccgaaacagagaggtggacgaggtcggcgaggatgcggtgaagccgaaggaggcggcgccgaggtgggaggcggtccggggcgacgacggcggtgaaccggagctcggcggcgacggcggagagagaggcgatggcgcgagctcgattccggcgaggagaaggcacggcaaagggtggaaacgggcgaaggaagtgcggggagggtttaaatagggttggaagggggagagagcggccggaggggaaggaaaccggcgcgggaggtcggccgccatcaatggcgccggcgagatttgcgggggcaaatccgcccgtttgaacgcgagagagagagggaaaaatggggggaaagggagagggaatcacgggaagtaattcgccccactttattgcacgcggggacggcaggaggcggcgggatccgcggcgccgccggcgctagggcgcgggcgaggcggcgggagcggcgggaggtcggggatgacgggtgggccccacccgtcagcgagggtggcgggcaggcccgcccgtaagcggcgcgcgcgcggggagagcccgagtgggccgcggggagaggagagagagagtggggggaggaagatgggccgggccggcccaagggagggaagggggacttttagggtttttctttttataaaactttttcaactttgtttatttcttaataattattatttgtgctctgaaaattccactaaaatttatttacacattttaggcttttaggaaatatacaaaaatcctctaagccttatttgacttttaactttgcacattttaattgttggaggctttcacatggattttaattattataggcataatttaaaggatatattttagagtcgttttggcacgtgacatctgtctgcttgttcttcggaaccccaacttatcattcgtatttaactcctatttgcaattcagattgcttttatcttgttcttgcttgtatcttcgatttgcttgtaggaataaggttgatctgcaccggcaagatcaacaacccatggagaggtgtatcgatcgctaaggcgcaacacaacgtcttgtacggttgtagtcggatcgtcaacgtcttttccacaaatcgtagttatctcagctcaccgaaagatcgggccaacaatagccttgagtgtctcgagtggaactcagggttcatcaggtgatatcagagctttcgttgctcggtgagtttttttttatctacctataaccagaaaatagccaaccaaaaaaaaaattgtatcttttacctagccatattgtgccattgcattgttcttttcagtttttgctttgttgaattttgtgttgcatcgtcatgtcgtgttgctggtcttagcgtctagttcgtttagagtttcgagttctggtcacattttgtaccacagtcgtcaccgcccccgtgtctctgttgtcgtcgggacctacgaaaacggaattggctcgctgccacggttctattttcgtagttttcagaagtttatgtcggttagtttttgagttcttgagttgcatagcttctgtttggtggctgtgccgtgatggtgcatgccgtgatggtgcacctgtgcatgcgcgtgtgagaaagatggaaggagaagattagattagattgactggtttggtttctatttagtgccgagtctgtttctatttatcacctggtacctttccaaaccgaagccgagtaggattccttcccttgcgtcatcttgtggccgagacttgtgagtcgactcacactccctcacgtttgtttctgtccggattggttaaacacttcggtgaaattttatttttggtgtcggattcaagatccgtttgcaaaaacggaaccgacataactttagcattccattgttgtataatttttaattttggtttggacttttacagttgagtccctgtaatttttatatttacgtttgagtccctgtaaccttacattgaggtccttgaatctgtttttgtaaaataaaatcaaaaaaaaagaaagaaaaaaaaaggcagaaaggtgcataaaaaaaagaaaagaaaagccgcacccaaaaaaaaagaaaagaaaaggaaaggaaagaaaagaagaaagaagaaagaaagaaaagagaaaatactgttatgtttgagctgaacttcatatatcagagttgtgcatgagttattcctagtgctatcttgtggcatcgtttgtgtctaggctcgcgtctctagtacgttctagcctaggaccagcacggtgcttgactttgaacaattattcaactttgcattctctgatttgagcatttgctattcctttgctacatatttaagcctacccagagctccacagatttgattgcagccgtacagcaagtattcaccaaggcatcgatacatccaacctccattggggtgcttggttgagtcggtgtatgtcaccattccgcttgcattggtaagatcttgtaagagcttggttaaaagcttgagtgtgtgtgatttttgagctgccactacctagtagttaataggaacgcgcatatttttgtgtatgtttcttgttttctactaacaatggcagggatacgcaagataattggggatagctgtgctcaacatcgacatcttcgtcgagacatgaggagggatcaacatgaccattatgaggtaagtgatgatgttctaggtaagatcaaatctgcattgccttatttcgagggaaactatgatcctcgtgcttacattaattgggagctagcggttgatagtgaatttcaaaagcatgtcttgtctgagaaacaaaaggttatgtgtgcctctagtgttttaattaaacatgcttctaatgattggaaacatctttgtaggcataacaaaataccacaatcttggaaatacctgaaacgatatttcagagatgtttatgttcccatgtattatgctgacattttgttcaacaaactgcaatgtttaaaacaagataccagaactgttacttcatactatcatgatatgcaagcttgtttattacgttgtggtttagatgaatgcgaagaagctaaagaattgaggtttttatgtgggctaaacaaagaaattcaggacatgcttgattgtcaaagatatacatctctttctcatttgttacaacttgcttgcaatgctgaaagtaaaatagaggagagagacatgaaagagccgccaatcccattgttcacactcaaagtcaaggcacctccatcatctgaagaggacatcaaaggtaaagtaaatggtattgaaattaatcatggtgagtgcattgttaacgaagtaaatttgtccacctttcatactaaagtagagcaaccgttagtggaatcaaatgctggaattcctttgtcacaagttgatttactcgctgttccttgtgataaagaagagttgtgtgataatgcttcacttatatccatgccacaactagtgaatgaacatgatatttctagagtttctttgtgtgctgattttaagcatgctgttcacattgctaatgaagttgaggaacgtaaattgctatcttctttaaatactttgggctatgttcagtttgatgatttttgtgagctcgataatttgaaggagaaattatttgctaagtctgatttgccatgtccaactaatgctatttttcatatcattggcaaatataatgatagaggaatatatttggtgcatagagttttcatttgttcggatgtagagaaacatgttattgctaatcacactacttcgagtttctcttgttttgattgaatgaaacaggttattttgaatggactatgtgaagaacaccatatggaaaaaccgaggacggttttccgtgaagaaggggaggatgatgtgaccatggctactacggatacatccgttgctcacatcatggatgaacaacaagatatcaagttcaagtcctccaagtgccggaatccgattcggccacctgctacactgctgacttcaaatggccgccgaatctgcatacgacctccgtttttggcccgtgaatacttgatggacagctctcggagcgctctttccaacggatccagcctcatctccgaattccatctcgtgtggccggaatcacacgcacaagttgctgcatcacctataatgggcctatgggcttgtaacttcatttgggatcccggcccaggtggggcccatgtggggtgcaccccagccaggtggagcacgaccctaggcacccctaggtcgtcctcccacccctatttatatagctaggtaccccttcaaggtttcttgggttttgatagattgaagtttagccattgctacttgcttgcagcgcgcgtgtcggctagaccgtccgtctgcttgttcttcggaaccacaacttatcattcgtatttaactcctatttgcaattcagattgcttttatcttgttcttgcttgtttcttcgatttgcttgcaggaataaggttgatctgcaccggcaagatcaacaacccatggagaggtgtatcgatcgctaaggcgcaacacaacgtcttgtacggttgtagtcggatcgtcaacgtcttttccacaaatcgtagttatctcaactcaccgaaagatcgggccaacaatagccttgagtgtctcgagtggaactcagggttcatcaggtgatatcagagctttcgttgctcggtgagtttttttttatctacctataaccagaaaatagccaaccaaaaaaaaaattgtatcttttacctagccatattgtgccattgcattgttcttttcagtttttgctttgttgaattttgtgttgcatcgtcatgtcgtgttgctggtcttagcgtctagttcgtttagagtttcgagttctggtcacattttgtaccacagtcgtcaccgcccccgtgtctctgttgtcgtcgggacctacgaaaacggaattggctcgctgccacggttctattttcgtagttttcagaagtttatgtcggttagtttttgagttcttgagttgcatagcttctgtttggtggctgtgccgtgatggtgcatgccgtgatggtgca

SEQ ID NO: 29838 - DNA, 3754 bp, Oryza sativa
tgtcttgaataggttttatacgatctactgatatgttttgtgaatagtgactttgtgtctgtgcttgacactttagtaacttcgtgtatatttattagttggtttctttgttaaggtacacaatttctaaatatttatgtattttcttgttgtatattgctatcaattagataatgatgtttacagttattagacacacgagtatttagtactccataatagtgttccaactagatatgcggctatatacaaaagaaagctgtaggaaccccccttgattttgctctggctccgcccctgctggtgatcgccgttgatcccaggttttggcatggacgtcccagatcacgccctgatggcggttgcggggcacttcggacatttccccttcgccaaccgtcatacctacccctatataaagacatcatctcactcacttcaacacacacttccaagcttgagctaaattataagaggctctattgtactatattgttgttaacgaccaaatttggtaatctaagtattggagatggagttgagaccgaggtggaaattaagatggaatcgctcgaggaatagagcagaatcggctgatgtccgaatcggctgcgactaggatcggcagagttcgagttggacagggttagccgattgagccgaatccgataatatgacacggcatacgttgtcgggttaggttgacgtgcttcatgatgatttccacgcatggatggagtcctgagaaggcaattgtatagtgcttcatgatgattgccacgcatggatggagtcctgagaaggcaattgtatttattaattaggatattttatgtaatttctttagagatatgtttgggcaaatgtctgccgcaaagacttatagtatcttagagtttgttagagataagagtcatgcccgatatggacatattttgtaatctcgggtataaatagaccccgagccccatgtaataaaactaacacacgttcaaatcaatctcggtgcatagccacccttttacttttgttttgtttcgacgagttcttgctttggggttgagctgcatcggtttcaatcttcaacaagaggtaaaacttattgtggcggcttgcattctcgggattagtgcttccatctttatgatactctaatcttgtttatgtgataaattgaattatcatatatcttatataatctccggcaatatcgctatctaacctacaatcggctaacatcaatctgtcagtagaagacagccgattaggttaaataccgatgttgacttagattatataggaaatccaccactctatgacacatccaacggcttgattgtctagatattgtcttttttttcatacttatagctgcatcagttgagtttgatcgtatgagtcgtgattagaatctcaatctctagcctgcctttggttgccaattagggtagcatcggggtttcagccgatcttatctgatttgactatatttatcttatgtgcttgattgacatgttaaatccaccctttatgttaagatctcgtcgtatttaagtatattaagctttctgtttggtatattctacttgctttaatatctcaatatagaacggtatcggagtattagccgatacatgctagatctatctgatcggctatgttatgaacatatataatcttgttgttaatatatatttcggtctaagtgatttatactgtctcgacatggcgaccaatctatcccaatcacttgatttaagtatatatcgacataaggattatatattgttaatatcaacagccgatcaagtagatttagttctttcttacttattaatgtctgccgatcgatgcatatatgacatcggctcaaagataaatgatatgtcatcggcatctagccgatcggctatcgtttatagatttaaccgcggtttctttgtctttgtctcttgttgatcgcaggatcaaatcaactggcacgctcacatacccaaaggcaagttttggacctgcactggagttaagcagatctcccagacctcgtgtttttacatcaacacgcttttggcacgcctggtgggaccattagaagtcagaaccgcaacagtattctctcatggctgagaaaccaccagcatcgccgtctttggccggcaaagaagtttcttccaaaactaggatcccgaagtttggtgggtctgaagttcatgagagcaacatcatgctcatcattttggacaaattgacacctgaacaaaagaaggatcttgaggcgatgatgtagcaaacacagaaccaattcttgaactcattcatggagactcgccaaggaacaattgttcagaggtacaagatgaaattagatgctgatgttgctgcgacaagttcttccaaggatggggaggtacaacaggtctcagatggtacggctcaatcaggtgataaaagtgctgcagatggctcaggtgataagggtgatggttctcagggagtgcaaggtgaggatcttagcccagatggcaacctggcgcagctacagtttaacaacttccaagatcggattgactatactgtgcgacatgctttgattaatcaatctgggagtgtagtcaatactttgtcaaacatcgtgaagtcgatggttgatggctcaatagctgagtatcaggctacaggaccagtttatttaccaggaggtgttttcccaaattatcggcccttgatcacaaataatcagccgactgctcagccaattgctcccaatgcgccatcagttcaaccgacagcaccagtgtcggctcctgcacctgctgcaccatgatcagcaccagggcaattaattaatcctcggttgttggtgagagagcagccacagcatagtggacaaaatgtgaatcggctaactcaagagcaagttgcagctatgttcttaccaactcggcctactgctgacccagttcaacagcagtcgattcagcagacaccaccgaggcagcaagttgctcagccgattcaacagcaaggtttgctaaatgcatcggttgggtttaggacgcccgataatcagccaaggcagcacattgcaaatcaagttgttccagagcatttggttcataatgtgcaaccagatcgatcggtgataccacaagttattcccaaacatttggtgcacaatatacagccaaactttcagaattatcaagggggcaatttgaattatcagtatcagcctccatcgccgcaagttcagtatcagcaaggagggtcggctcagcctcggttcgctcctcagtacaaccagttcgagcctgtgccacagcaagtgcagggggtgcctcaacagagaccgtgggccaatatgattgcagatgtgatgagagagcaatttgggctcaagccaaaggacgctagaaacttgtatcggcatccaaaccctgagtggttcgagagggttccattgcctaaccggttcaaagttccagatttcacaaaattctcagggcaagatagtgtttcgacctatgagcacgttagccgattcttagctcagtgtggtgaagcatcggctgttgaggccttgagggttagggtgtttcctttgtctttgtctggatgtgcttttacttggttttcttctttgccatatggatcaatcaacagctgggccgatttggagaagcaattccatagttacttttatagcggggttcacgagatgaaattgtctgatttaacaacgattaggcagagg

SEQ ID NO: 29839 - DNA, 2898 bp, Oryza sativa
  unsure (1)..(2898): unsure at all n locations
ttaggcagaggcatgatgagcctgtgcaggcctacattcagaggagatgaggaataagtgttacagcttgagcttgactgatgcccagttaaccaatttggctttttagggtatgatagctccgatcaggagaaattctcatcccaggactttgatattttgtcacgtcttgcacagaaggtaaccttgcatgaacaaaggtttgcagaagcccggaagaactttanaaaggttaatcatgtctgtccctacatggatccgatgatgatgatgatgatgattctgaggtagcagcagccgagtgggttaggagtaagaaggttataccatgccaatgggtgaagagttctagaaaagaagagaggtatgacttcgacatcaccaaggctgataagatctttgatttgttactttgggaaaaacagattcaacttcctgctggtcatacaattccatcggctgaggagctagcaaagaggaggtattgcaagtggcataattctgggtctcattctaccaatgatggcaaagtcttcagacagcagatccaggcggctattgaaggaggcaaaatcaagtttgatgattccaagaagccgatgaaggttgatggccatccttttcctgtcaatacggtacatacagctggtcgaacagccgatggggggaaaactcggggttttcaagtgaacttggctaagattatcaacaagtatcagagaaaatatgataagcagcaggaaaggtgttatgacgaagatgacggcggttttgacgaaggtatgaggctgtcgtctattgaagactgtcctaggtgcagcaatgttacagaaatttcaaaccgatcgcataatagaggcaatccgctaaggcaagcaagggttcctgttcatcaaagattgggcccaatgaaccaagattgtgaccaagaggacaatgaaggcagaaagactcaatggtgtccttctggtatttttacaaagaatcagaagagaagggttcagaggttgaggaacagggagcgctttcaggaggttgagcaagaaatcaaccatcggctgaagaaaacgaagccgaagcaggagtggcgcgttaagaatcaagttcctacagctgatgaagccatggccgatgaggcaaaaatattggctaaagggaaaactgttgtgattgcatcggttaacatggttttcacactacctgcagaatttggggccaagcaagccgatgttgatgaagttgaggaagcatcagctaggttggttttatcaccagaacaagcagtctttgagaagccagaagggacagagaatcggcatcttaagccattgtatgtaaacggttaaatcaatgggaagccgatgtctaagatgatggtcgatggtggggccgcagtgaatttgatgccttatgccacatttaggaagctaggcaggaatgctgagaacctcatcaagacaaacatggttctcaaagatttcggtggcaattcgtcacaaactaaaggggttttaaatgtggagctgacagtcggcagtaaaaccatccctacaatatttttttgtcatcgatggaaagggttcctacagcttgttgcttggaagggattggattcatgctaattgttgtattccttcaaccatgcatcaatgcttgattcaatggcaaggcaacaagattgaaattgtaccagccgacaggtcagttaacgttgccagtgttgattttgctctttgggagatggatggccttgattgctagtctggaaaggtttgggaaggagattttctaaaggtgttcgattatgatatacagccgattgaatacggagagcccaagttattatattgagggcatcgtggagggttcaaacgtctacaccaaggacacagtagatgatctcgatgacaagcaaggaccgggtttcatgtcggccgatgatttggaggaaattgatataggtccaggtgatcgaccaaggccgacatttatcagtaagaacttatctccagaatttagaaccaagttgatagagcttttaaaggaatacagagattgctttgcttgggagtattatgggatgctaggactcagccgatcgattgtcgaacatcggttacctatcaaaccaagggttagaccgcaccagcagcctccgagaagatgcaaagccgatatgctcgaacctgttaaggctgagattaaacgtttatatgatgctggttttattcgtccttgccgatatgctgagtgggtttctagcatagttcctgttatcaagataaacggcaaagtaagggtgtgcattgatttcaatgatttaaacaaggctaccccaaaagatgagtatctgttgatggtcgttattgaccaatttcaaccgtcaatattatccaatatatgaagactagctatgcttgcaatgcataattctcaaataaaatagttacttccactatatgctttgctactaacatgtatgcaggagaagcactcgtaaatgaagagaacgaggtggaaatatatcgatcaatcagtcaaaagtctgccaacgatctacaattacatgagaaggcccaaaagtccaatttaataatcacaaatgggcctagaatgtatgtcactgatttaggggcccacatggaagtctccttgaggaagctaagggccagaagagcccatagggggttggccgaccccttgttgagcccaatccagtcacattttggcctggagataagggaggccaaggaggaagcagcaggccaaaaactaggcctattgggccactctagggttcggctgaacctagtaccttgatcttcagccgttggctctcccctttggcatggacgctccggatgaactctgatggcggttgcggagcatttccgacaa

SEQ ID NO: 29840 - DNA, 14781 bp, Oryza sativa
atttgcattgatgctggtataatgtctgattacctggtcataagtctgctctggctaggctgagagctatggcccggggactcagctgctctgcaccgattgaatggttgtagagtaataagtagtaatttaagcatggagcttaggttacctcttatcattatttgggggtatattctctgggtgatttgcaggccgctgatggtgacagctcagtacgggtgtctcccctgcagtttatattcctacatacaatttcctagggttggatacacctccgaatcctacatcggttggagggttatgacaggttgtcgtaagaaactcggcaacccggggtaactttgcttttcatcgggagggcatagctatgctgcattgttaaaggggttatattacatagtgtacaggaatagaacatatctaacctactgccacttagctataattaggagatgtaggagttagctaaatccttagctgtgtgtcattctacccttaagctaaacatacccctgcatagacccttgatgtatacaagtaatatataaactattagcatagtactctcttaccatatcttcccttgggattaaacaaatacgatacctaggaatactcccgggtgaaatggtacaatggtatatctgtgcgattccggatcacatctgtaaccataatataccatgagtatttctagtgctattgctgggaattatatttccagtagtgtcgctaagaaataccaacaagcatttctggcgccgttgccggggaagataaatgattaagagtttactacttgctaatagttttatatttacctctgtataagtcattgtccttcgtaggcaaaccttgtttgttttctcttttatgtgaaaacaaggtagtacaggactagttctgatctgccgaccaatttcaaatctggagtcactagtgaagtgaagccgaccccgtgtcgtttatccttaaggttactctatcggcaaccagaccagccaattccgcgccaccagaattacacgatacggctgagaagtccctttgcaagttcgctgctcgctctgctggtaacatactagttggaacccaagtcagcaggggagatggtgactttgatttaaagaccagctaaattaacgatggcgcaggcttgcccgttctgtggcaagcctaaggaggatgcaagtgctcatttgcagcaatttgtggaaagccatagcacgtataccgtcagaagaatcagactccaactgttgccgttctccctcctcgagagagcagaacagtggttctacatcaaccgtgcaacggtgaataccgaaacaattgctcaacagcattcctctcaagattcttcctgatgggcaagaccaacgctcttcgcggaagaatatctagctttcagcagacgagggatgaaaccattcttgaagattgggaaaggctgcaggaatacgtcaccacccgtcctcatcatgggatggccgagtggctcatcctgcagaatttcttcaaatgattaaccccctcgtcctaggatcacctggatgctgctgctggagggacattcttctcaagaatagtcagatgccaaccaattgagaagatggtctcaaatatgggttggagcgaggaacgactccaaacccgtcaatgcggcatgtacaccgtcaagaggacggagatgctcgccgcccagttggatctccttatgaagagactagacaacaatgagaaggataacaagcagggtaccgttaaagccctggacttccacacgacatgtgaggtctatggcaacaccggtcactctgggatggattgcccgaaaacccatgagaacgttatgctcatgaacaataacaatgggtatcgtccacgaggagaccaaggatggagcatttctccatggggtagatcaagaatggaccaaacacaaggaggtcaaagtaaaaccccgaaggacggatagcctcaatactttcatgatgaacttcctggagcaggaagaaacgagtaaccgtcaataccttaagccggcatccaagaagccgggaatacaggccggtcaacctgtgttcccagttacgaagaggccgctgcccgcacctaaggcaaagaaggtgtggcgggttaaggagaagacactcgttcctgtacctccggaactgggtgcctcattgagctaaatacgtcggaggtatggtcgtgctcgtcggacctaaaacgacatcccccttgccaacaggtaaattggtagttatctcatatttattttccattgcatcaaagcatgtttggattttcaaacacacattgagatctgaatttgaggcaaattcttcaaataaatttttgtgagcaaaataaaataaagtttttagaaaacttttgcacagccaccaccacattggtcgttggaatccaatagctaaaggtggggctggttgggtccaccaagggttcggccgaatccctggttcggccgaaccggcctggcaccggctggctggaaatttttgcagggtagcggctagtggggcccacatgccattcctagccgttatccatgcactatatatgtagctcggctgggagaaggaagtcacaccaccttaactcattttcactccctctcaaaaccttgctctaaaaatttattcaaagttttgcaagctcgcctcaaattcacacaatttgctgcatttagtttagacacttgcatatacaagtttgctttagtttggtgcaaggttatcggcgggtatttgcttaacccccgtccgagtagtcttgtattcttgctctttgctgtagccataaagaaacgacttttgggcatattcaagagacgatcaagctcacggacaagccgacacgataagccgagtacaccttcttccgcggatgcatccatgaaggaggcgtacattccaccgaggctgtacaacaactcctttcacgacctcgtgggcgaccgggaaatgcaagcctatcatatgctgaaagaccgaacctgtgctcggacctgagcatacgactcgaccttctgaaaaggataggtatagatgctgagcttcattactttttggcgtgctataggttgggataaatttcatgtgtagacgagccgggttcctggcgggcgccgaaaaggaagcagtgacgccttttcgacgaaagcttagcttggtaggcgctgcttactcaccctattcccttagacaatgcaatgctgtgaacacgaaagtttgcagttcagccctcttctcccatgcagagtcgcaggcagcgcctcggataaaagcatggacgagccacatgcagggaaacttgcacgtgtggttctggccggggaccccggtatactgtactaatatgtgtaggtccctgtaattcgagtgagattgtcatggcgcaaaagcagatatggtccggtattcccttgttccccgtattggttatgttctttattccttgtctagcagaaactaatcgagctccgtctgatctcccagaagcggaagctgaatcagttgctggctataatgtggaatatgcacgggatgcgatccttaatagttcaagtcccatagagttattttttatctttgattcccaaacgctgcgtgcaagtcaagcttacagaattcctgccggggcgccttctttcttatgccagccaagtagtaatcagaaaaccaatcaatcttccttacactacgacaattcacttgaactaccaacatcatgagtgacccaggccggccgtatatgcgtcatttctcttcatcattgtctctatttgttaattgctcgctacccgtagtgggccttgagtaggatttaagcacgggtttcgaaccgtgcagtttttatgtgccatgctagaggtaggcgatggtgttactttccggttattccgcaaggaatatcaccttttttggaaggaccttagcttgcatctaggctttgacaaaacatgcaaaattaatttcaggaacgcatttcctgattttaacaagcgtatgttttggcaaagtatttcgggtctctcatcctatagaaagcctagaactaatgacatccataatcctaccttgaggctgttgcataagttgcttggtttcacatcgtttcttagagctgatatccagatagcgcgaactagtcctcttgtatgccatggttagaaaaaaaatcaacgtttcacccattcaacccatgatcaagcaatggttagaaaatgtgaagttgtctggtcctgttgagtgtatttctttggtgactcgtttagcatgaagagttgggactatgcttaatatgcaagtatctagtattcttgttaccggctcttatgttgatgaggcctatctggttcaagggcacgcactcaaacatggtccaaatgattttgtttcccggctatacaaatgaaattccgttacctaacccggagtttcatttgtataactgccgagaactaaccatttctctccaagcggagttgcctcgtgatgtcccacgcaggataacacggcgtatggggagaaaagcaccccaagaggcgtcttcctcttcaccaccagtgcagatgtatggagacagttgggacccgaccgcgcatgcccttggttggacccaattccggcaacatgacggcggaggttcgtcctggcagagtgccagcgacagccggtggcatgagccgtaggagctgcactggggatactcgcgctccttcagttcaagtggtctacctccatcctcttggatgcattgctcagtctcctctcgaagggatttgggagaactcatccgggggacggatacacttgaactgcaggcaaggaacatgcaacataccttggaggatgatgtggtacagtcatgggaatggcagcagtctgttggtgcacagctcgcaaatttcaacactatgatgcaacaatagcaagctgactggcaagcgtttcaccgctaccagggatttgatccccgccatgagccatagcaagaagcaagcttgggggggatgtctctcccccccccccactaaggtaacttctatcacattgcatatttccttttcaacttgcatgtttaaattgttttattgcatttataaatctgaaaacaacataaaaattgcaaaactaaaaataccaaaaagataggttagatttcatatgctaggtaagacatgcttagttcttcatgtcgaaatgatgaatagttactctgttttatatctctcatatatgggttcatggttaagtactctctcaagaattgaataagagtagccaacaattatccgggaacctgaggtaagtgagttgcactttgctgatctgagtctaggttgttgtgagatatgagatagtaaataagagttgctatgaacctattctaagtttgacttgaattccggatgttttattttccaaaatgataaatttgaaagttcctcatttgatataaattcctaccagagccaaaaatatccatattgattaagccatatacattttggttacttgtaattctattgaactttgtcaaatctttgtgacttgtgtagatactattcatgctctatgaacgagatcatacacccacatatgcacacatatgctaagcttctacactagaagatagcatccatatcatccaccatatccatgttatcattatccacaaataagctctccatccatgcttcctttccaaagaaaaatcctttgcaaaaaaaataaaatttaaaaaaaaagagggaaaggtatggctatgagaaaaataataaattcttgctctcccaaaattggagcatgaaagaaaaaaaaagagagaaaaaaaaagagaaaaagtagccataccctctctatgaaaattaaaggatattttggaggaaaagcataagcacaaagaagaagcattttctgtatccacattttattttctatcatgttttccaccatattattcgcacacactttgcacgatcttgatcttgagtatgattagtcatctattttagtccaagtttttgatttagtaataaatgtgaatacaagtgtgccatgttttatccctaccaagctccacatatcaaaccttagagtaggaatcaaaaggcaaatctggtgaggaatccatattcatacactttgagtgatctagagaattatttgaggaacttggctttcttttgcaaaaatcattttaaaacttccggaatgaaagttaaataaagattgggtaactagcgctctaattactgttctgtctctcaaccgctcaagacaaggagatgcagtgtttcgtgggaatcaggggtaagggtaagccaccatgccaaacatatttaatttgagatagagtacccataccttgcatctatatctttgagatatacaacattgcagcaactcctgatcaacaaccaagtctttgttcctttcgtcctttactcgggacgagcaaaggttcaagcttggggggttttgttgacggctgttatcgaccaatttcaaccgtcaatattatccaatatatgaagactagctatgcttgaaatgcataattctcaaataaaatagttacttcaactatatgctttgctactaacatgtatgcaggagaagcactcttaaatgaagagaaggaggtggaaatatatcgatcaatcaatcgaaagtctgccagcgatctacaattacatgagaaggcccaaaagtccaatttaataatcacaaatgggcctagaatgtatgtcactgatttaggggcccacatggaagtctccaagaggaagctgagggccagaagagcccatagggggtccgccgaccctttgttaagcccaatccagtcacattttggccaagagataaggaagaccgagaaggtacagcaggccaaaatccaggcctattgggccactctagggttcggccgaaccactaggttcgcccgaaccttgatctcagccgttggctctcccctttggtgtagacgctccggatgaactccggatggcggttgcagggcatttccgacaattcccatgctctacaaccgtcattgggtgctataaaaggacctcacctccttcactttcaatacacactcaagcaaggatcaaagctctctacaaagttagtagtagtgttagtggagtagagttagaatagttccaagtccgcggaggcttcggggagttcggtaaaggttctataccttttcctttcttctttgtaagacttccatttatcaatataatattcttctttatacaagttcggtactttattccaatcatagagtatgagtaccagtcttagtttattcataagtagtataatctgtgtagttaaaccttctgggatttgcattgatgttggtataatgtctgattacctggtcataagtctactctggctaggccgagagctatggcccgaggactatggtgctctgcaccgattgcaaggttgtagagtaataagtagtaatttaagcatggagcttaggttaccgcttatcattatttgggggtatattctctgggtgatttgcaggccgctgatggtgacagctcagtacgggtgtctcccctgcagtttatattcctacataaaatttcctagggttggatacacctccgtatcctacatcggttggagggttatgacaggttgtcgtaagaaactcggcaacccggggtaactttgctatgcatcgggagggcatagctatgcctaagcatagctatgctgcattgttaaaggggttatattacatagtgtatactagttagaatatactaagatgttgtatacttgaagtacaggaatagaacatatctaacctactgccacttagctataattaggagatgtaggagttagctaaatccttagctgtgtgtcattctacccttaagctaaacttacccctgcatagaccttgatgtatacaagtaatatataaactattagcgtagtactctcttaccatatcttcccttgggattaaacaaatacgataccttggaatactcccgggtgaaatactacaatggtatatccatgcgcttgcggatcacatctgtaaccataatataccatgagtatttctagtgctattgctaggaattatatttccagtagtgtcgttaagaaataccaacaatatccaatgctagtagcctatcagctgattgatgctgcttcggggcagaagatattgagttttatggatggaaatgcaggatacaatcaaatctctatggccgaagaagatatccataagaccgcttttaggtgtcctggtgcaatcggcttatttgagtgggttgtaatgacttttggcttaaagagtgctggagctacatatcaaagagccatgaattatatataccatgatcttatcggctggttggttgaggtctatattgatgatgtggttgttaagtctaaggaaatagaggaccacatagctgatttaaggaaggtttttgagagaactaggaagtatggtttgaagatgaatccgacaaaatgtgctttcggtgtatcagctggccagtttttgggatttcttgttcatgagagggggattgagataactcagaggagtgttaatgcgatcaagaagattcaacctccagagaataagacggaattgcaggagatgatcggcaagataaattttgttagaagatttatctctaatttgtctgggagattagagccttttacgccattattgagattgaaagccgatcaaatgtttacttggggggcagagcagtagaaggctttagatagtattaaggaatatcttagctcttctccaattttgattcctccacagaaggggataccttttaggttatatctatcagccggtgagaagtcaatcggctcggttttgattcaggagcttgaaggaaaagaaagggttgtgttctatttaagtcgtcggctcttggatgcagaaacaagatattctcctgtggagaagttgtgcttgtgcttgtatttttcctgtacaaggttaaggcattatctactgtccaatgaatgtactgtaatatgcaaagccgatgtggttaagtacatgttatcggctccgattttaaaagggagggttggaaagtggatattttccttaacggaatttgatcttcggtacgagtcgccgaaggcgattaaggggcaggctatagccgattttattgttgatcatcgtgataattcaatcggctcggttgagattatgccctggactttgtttttcgatggatcggtgtgcactcatggttgtggtatcggcttggttataatttcccctcggggggcaagttttgagtttgcttatactattaaactatgcaactaacaatcaggctgagtatgaagcggttctcaaagggttgcaattactcaaggaagttgaagccgatgctgtggagattatgggtgattctttgctggtgatcagtcaattggcaggagagtatgagtgcaaaaatgatacattgattgtttataatgaaaaatgtcgagaattgatgaaagaattttggctggtgactttgaagcatgtatctcgaaaacagaatgttgaagctaatgatttggcccaaggggcatcgggttacaagccgatgatgaaggatgtcaaaatagaaattgccactataacaaccgatgattggaggtatgatgtgcatcattatctgcaagatccatcccaatcggcttctcagaaattgcgatataaggctttgaagtataccttgttggatgatgagctatattatcagacgattgatggggtgttgctctgaagtttgagtgccgatcaagctaaggtcgcaattggtgaggtacatgaaggaatttgtggcactcatcaatcggctcataagatgaagtggttgcttcggcgagcgggatatttttggccgacaatgctagaggattgtttcaagtattacaaaggatgtcaggattgtcaaaaatttggagcaattcaaagagcgccagcatcggctatgaatcctatcatcaaaccatggccatttagaggttggggaattgatatgatccgtatgattaatcctccatcgagcaagggacacaagtttatattggtggcaaccgattattttaccaagtgggtagatgcgattcctttgaagaaagttgattttggagatgctgtacaatttgttcaagagcgtataatctatcgatttggtattcctcaaaccattacaaccgatcaaggatcaatcttcgtgtccaatgagtttgttcagtttgccgataacatgggtatcaaattgttgaattcttcaccatattatgcacaagctaatgggcaagccgaggcatctaacaagagtttgatcaaattgattaagagaatgatgatctcacatgtgccttgtgcaacacacatcaaagagagactaggcttcatctcttttttacatgtcccttcagtgtggcttgttggcagcagatgggcatttcctggaattgtaatctggagtttttccaaatgcttgtcttggcgagaattagatttgctcgaaagggtttccttgaagtttttttcatggcagcatggcatatttggaagcaaaggaatggattaatctttcaatctgtccagccatcaattcagtcatggaaagctatgtttgttaaagaagttcatctgcatatgtgtagaatgaaagatcctctcaagcaatccatttctgattggatacaaactttgtagcatttttgttttgcttttccctctgtaactttgtacatatctttattttataatatttaaactgctgggcaaagccctggcatactcgattaagagaaagatgattaagagaaagatttctgattatcctcggcagtggcatactcgattggccgaagcattgtggtcctatcggatggcttgtcatggttcgatccaagtctctccttataagtttgttcatggacatgaggctgttttaccatgggaagttagaatcggcataagaagaacggagttgcaaaatgatttgacagccaatgagtattataatctcatggctgatgaaagggaagacttggttcaatcaagattgagagccctttcaaaggttaccaaggataaggaacgtgttgctcggcattataacaagaaagtggtgcctaaatctttttctgaaggtgaacttgtttggaaattgattttgccgatagggactcaagataacaaattcggcaagtggtcgctgaattgggaaggaccgtttcaaatctataaagttgtgtctaagggagcttacatgttgcaaagacttgatggagaagtttatggaggagcactcaatggaaaatattttaagaaatattaccccaagtgtttgggttaatgcatgatcggctggtgttgccgatacatgatagctgatgtatttacatcgccttgagatggccgatattgttgtatcgcgcttagttattttttctattgtaatcggttgtgttttgccgatgtacaatggccaatattgttatatcgcccttagttcaatttataattttatcaatgcctttgacattgtaaaattatggggggcacatatatgcaaagttgaaaaatttttgagcaaaaacgaggagttatattaatcggcacaaaggattattaagacaagttaaataatgtaccagaatgtcttagccgattacaaaatctactatatcctattacagaatgtcactgagacaagtggcgctggatagccgatatagctctctgcctaatttgttctacttcttcaatggcctgggcgtcttgagcatcggttccagagatgacttttaaggacttggtcatgtcagcgacatttttgatggccgatttcaaccttgccttctgttcttcgacagcttgcgggagatcgggtagcttattgtgttccaaatccagttcggcgttgcactcttgaagttgtgccaagagctcaatcttacgagcttcaagccgatcaatattggatttgatcaggccctcggatagttgatcaagcttagccttttcttcatgaacaagctgccgattggcctggattgtagcttcaatatccctacgctcccagcgttcggttaatctcagtttggatttctccagtttgaattgatgttgttcaagataagcagctggagtgaggatgtcggctagttcttccgggatcagagcctgaacttcgtgtagccgagtcctaattgatccacaatctaccaccaagctgtctagagatgatgcctctaacgaatgagagatatcttcaagagtcttcctcacatcattggataagggagctaaagctttgcttgtggtgtcatcttctgtctcatcaaagtaatccttgatatcaaaagagaacagatcggctaagacctgcaaaaataattcaaagagacttagatgccaaatagacatggccgatctaagtccttgtgtcaaagggaaacttactgggatggcagaagcggctggttgtacttcttccttgacatggtgactccctgcagccgatggaatttggtcacttgatgattgctgtacaggggaagaaggaggaggaggaggctgcaaaaagagataagtgctagataagatcggctatgattgactagtgaaagaattgagaatatcttactggtggagccaatttgagagttgttgctgctgatttcttcttcacagcagttttcttcttctgcaattataaaatctataagcaatcggctataaatgaaatggttgcaaaaagaaatcaaggagagttgtttaccctggaaaaatgagctggagcggaaggagccggagtagtttgtttaggtgaagccaatggttttctttcagtatcgcttactctagctgcagcttgatcaacatcttctccaatctcttcttcatccagagcttgttcaatggatggatctagggcaggcaagtcatcggttggcttggtcttcttcgacttagctttcttctttggggctggagccgatgggtctatagtcgatgctctggtttttctctttttgccggcatcggttggttctctaatgagcccttggagaagacttgaagtcttgggggcatgatagccgatgacagggggagatggtccaccttcattgggaatgagacttggagcatattcgatgtatttgccactattgctcttgtgagggggagaggattctgttgtctgcaaaatagaagagaagattagtcaagttatgaatcggctgacaattgttcaaatagaattaatgaagtcaaggtgtacctaggggataacattggaaaagagatctgtcatgtacatagaagccgattgatggaacagatgcatcttccattcaccccaccatctgtcaaatgccccgctcctgaaggttgccagctctatattttcaatgctgcccaaaggaggtccttgaagattgagcaaccgatccatcattagggttgatgaaatttctcctcggcattggattttatcggcaaagaacaggccgattggtaattgacccatatcaaactgtctggcagaactcatcggatgataaaattcataacaaacttggatatttcttccttgatgaatgccgataggaaggatgcatgggctgattgcagccgagaagacttctctggacttttggtatctctcgtggttgatgtcttcaaatctaaagtctgatgggagctctagaagtgctgagtcctcataggggaaccaaattttagcatctttttgaaagccctcataaaagctgcagaaccaatctttgagcagctcagccgataactttgctccaacatcggctggtgtggatgcatattccccataagacatacatctgcgatgggtgcgttcttctccatcgtcttctataattggctctagtcttgggaattcggcttctgtcacagatggccgattgacaaatttcataaccatcagatttagccaagtctgcaatagccaccatggtccacctgttccaactactaagccgacagctattttggccgatgctttatttaacacttggtataggtagccgagaagaattttgcctaagggaaattgtttctttgattctagggcttcggctacaaattgccagttggttgtaggaccacaactggatccacagaaaaggaacttttctagccacatcagcaagaaagccacatgttcccgaggagtgacaggccctttgcccatgtatgccgctacatagccctacatagccagaccaaccacctatgcttttggtcctgaaatcaaattggttcttggtgttcatactcatagggttagctgatgaagttacgtctaatccggtaatcatggtgatgtcaatcaaagttggagtcatcggcccttggttgaacaggaaagcgttgatggtattggactagaaataggtggcggcggccattaaaggttcatctttagctgaattggctatggtaagggcaagcacttggccgattccgatttcgtcccagtgaactttcttgctagccgacatgcgcttgtaccatatagtccagctcttctcgggtgaagttttctcgagagatggccaagatttgaaggtattcttccagtgtcctagatctgggttggctaatctgaaaggaatcgtattggtttcaccgatg

SEQ ID NO: 29841 - DNA, 729 bp, Oryza sativa
aaatacgatacctaggaatacctcccggtgaaatactacaatggtatatccatgcgattgcggatcacatctgtaaccataatataccatgagtatttctagtgctattgctaggaattatatttccagtagtgtcgttaagaaataccaacaatatccaatgctagtagcctatcagctgattgatgctgcttcggggcagaagatattgagttttatggatggaaatgcaggatacaatcaaatctctatggccgaagaagatatccataagaccgcttttaggtgtcctggtgcaatcggcttatttgagtgggttgtaatgacttttggcttaaagagtgctggagctacatatcaaagagccatgaattatatataccatgatcttatcggctggttggttgaggtctatattgatgatgtggttgttaagtctaaggaaatagaggaccacatagctgatttaaggaaggtttttgagagaactaggaagtatggtttgaagatgaatccgacaaaatgtgctttcggtgtatcagctggccagtttttgggatttcttgttcatgagagggggattgagataactcagaggagtgttaatgcgatcaagaagattcaacctccagagaataagacggaattgcaggagatgatcggcaagataaattttgttagaagatttatctctaatttgtctgggagattagagccttttacgccatt

SEQ ID NO: 29842 - DNA, 786 bp, Oryza sativa
ttccgaaggcttctggactcctgatttctactctattcctattccaccatctagatattactaaactaagggcccctttgaatcaaaggatttatgtaggaatttcataggattcaaatcctatagaaaattttcctatttggccctttgattcaaatgattgaagctttccaaatcctataaaattcctatagaatggcacattgcatgtggattttggaggaaatttttagcaagagcttcaacctcttggaaaatttcctttgagtctatctctctcatccgattcttgtgttttttctgcgctccaattaaacgaccattcttgtgtttttcctgtgttttgcaattcctggttatttccggtcgtgacatttagcgatgtctgccctgctaaaccaaaggaaggggcttctttggcatatacccatggacaattcagggcatagtgtccttgttctctacaatcatgagaaaaggggacatgctcttctggcattggaagctcattgacctgggtggcaaatgctcgatcaaacacatactgattttggtcttgacttccaaccaatggtagctgtgaactaagcagcatgcttggaatggaccaagggtgtgccctttttaactctcttgaggctagtggtgctagtggtggattgagttgaaaacttgagttactggaggcatacccgctgacattctttcctttttctctgttaaacatctgtgacagggattgaggtgagagaggaaacaagccaggaaagaatagaccagaactag

SEQ ID NO: 29843 - DNA, 2899 bp, Oryza sativa
tttctgcgctccaattaaacgaccattcttgtgtttttcctgtgttttgcaattcctggttatttccggtcgtgacatttagcgatgtctgccctgctaaaccaaaggaaggggcttctttggcatatacccatggacaattcagggcatagtgtccttgttctctacaatcatgagaaaaggggacatgctcttctggcattggaagctcattgacctgggtggcaaatgctcgatcaaacacatactgattttggtcttgacttccaaccaatggtagctgtgaactaagcagcatgcttggaatggaccaagggtgtgccctttttaactctcttgaggctagtggtgctagtggtggattgagttgaaaacttgagttactggaggcatacccgctgacattctttcctttttctctgttaaacatctgtgacagggattgaggtgagagaggaaacaagccaggaaagaatagaccagaactagagacaggaccttaaaggaactaactcttcttgttgatgtgttgtttgttttacttattctgcaagtagattaagcaaacaacctagcatggttacatcacaacccaccgatgcaaaccacgcgctacacacacaagcaaaggaaacacacgacaaacgaaacaatagagggtggcttaggttctgcgacgggttctccaagatcttcactgcttcttcacagctggcttcactgcttccttcgcttcgctagcggaccctgtggtcttccggagcttcggcaaacaattggcgacatcttcttcttcgcaaagctgaccatctagtactagtcaaaaatccgaaggaggaagaagagaataaacattttgcaaatagcattacggaaaggaggaaaaaggaactttcacaaatagtttcatttataaaatatgtccttaggttttatccacttggcttatcctacagttgagatggctctgataccagcttgtcgcgactgagaaattttgcatttcccgaacgctagtgtattaatccccgtcccaggaaaagccggggtacaccacacaaacatgatacaaaaggcacatctttattatatcgataatatttacattattacaaaggcacttaaggcctgacaatcaaaattaaacagcagcggactagcgggcctacggctccatcttcacaggcgctcaactggggtataagccaggactccacctaagacttcttctccaaagcttctcttactgaaggggggaaagattgagcaagaatgagtacaaccacagtactcagcaagccacaccggcagatgcatgattaatgcaaggggtacaaggggtaataatataggggttaagttttgcagtaaacagcatttaaaagtcacttagttgcccaaagctattttgtaaacacgatcctagagctatacaatattattaatcaaggccgtagacccacacgaacctgccttaacccaaggcctacgatgattcagaccgaactggcaacccgaccctgagtcccagctcgtcccaagccaacccaggccaaccatttcacattttagttgttaagcaggttttaagaattaaaacactaacttgggtacattgctaggcttgcccataaccgagggcgcggctatttgaatagattatactctgatcagaggtgtacatctttacccacaagacacatcttcctcacgtgtaaccacgtgccacataccaccacggcatacggccaaaagacgtgacatagttctcaacccatcctagccataaacaagagtaccgacccaaccccacctatggccggaacctccgggacaggcaggtaggattgagcccctagcagcaggacaccagccctgtgccatgacatctcgactaccgggccgcagctcgtgtagccttcatttgtcctagagatgtccatcgacccccgacttcgtccatctccatccgtgtacttttgtttataaccagactgagccacaaactaagccttacccactagacatgtggaagtacggtagtgctttgcaacagaggcccgagcttaatccttatagtacccgaggtacgactaacaaaacccaaccacgcacctcgagcccagcctaaaactattttgggggttttgaatagagggggaggtgtgtgtccaattccaacataagccaaccattccatagtgtccaaatgatatgagaattcccaaagtctaaagttataaaaccatctaatgttgcctaattaatcagcgaagcatctacctaaattcatactagtggaaccatgaatagagtacccactagttggggttttgtttatcctagggtgaacaaggtaataataacaataacaacaatgataaggtcataacaaagataaataggcatggctaaataaaacagtgataacgcgggaattttaaataaagcgataatgcattaatttaaatcaaaataattttataaactgggattcaatatgctcaaggatgatgtgacttgccttgctcagagataacggccttccgaaccttcggcgacgaccgcaaaccacgcttcgggaacctccggaacgacgaagactacgcgaagcacacaagcaaagctacaagcctataaagaagcaataacaatacataaaaagaaagcacatggttctttaggttataacaaacattaggagacttgaacggttcgattcggagctcgtatgaccaagacatggtcatccgaagtttaatgctgttatatggagatttgcggattattgtaattaggttttacaactataaaacatgtgtaagcgctagcctggaaaagacaggaagactgcgctgttgacatgcggaccccacatgtcaacctaagggaccatggt

SEQ ID NO: 29844 - DNA, 904 bp, Oryza sativa
ccgaccggaggagtcgtcgatgaggatgaacggagacgatgataacgaacaccggcggggttcggatggaggggaggcgaggccgaaggcgaccttgccgctgcgatgccggaggaggagatggcgacgtcggccgatgcacgggcacggcggaaggggttgccgaaggaactccggcgaggtggagggcgagaccggcgtgggcgacggcgttccggcgaaaccgagggcaggccggggtggaggtcgacgcggcgacgccgagggaggagacggcgcggccggcccgcacctgaacggcgcggcaggggcggctggagggtgggtagcggcaatgccaccggttgccggcggggatgcgcctccggtggtttccccgcgaaacggagggctgaccgggggagagaaggtggctgcgaggccgctggtggcgacggcgcgaccggacggcgctcgggcgaggaaggaaagccggctggaggccggccggcgccggaaagagaaaaagagaaggcggggagaggtggtgcggccacggtgatgaaccctgagttccactcgagacactaaaggctattgttggcccgatctttcggtgagttgagataactacgatttgtgaaaaagacgttgacgatccgactacaaccgtacaagacgttgtgttgcgccttagcgatcgatacacctctccatgggttgttgatcttgccggtgcagatcaaccttattcctgcaagcaaatcgaagaaacaagcaagaacaagataaaagcaatctgaattgcaaataggagttaaatacgaatgataagttgtggttccgaagaacaagcagacggacggtctagccgacacgcgcgctgcaagcaagtagcaatggctaaacttcaatctatcaaaac

SEQ ID NO: 29845 - DNA, 3958 bp, Oryza sativa
cactaccgtacttccacatgtctagtgggtaaggcttagtttgtgcctcagtctggttataaacaaaagtacacgaatgaagatggatgaagtcgggggtcgatggacatctctagggcaaatgaaggctacatgagctacggcccggtagtcgagatgtcatggcacagggccggtgtcctgctactaggggctcagtcctgcctacctgtcccagaggttccggccgtaggtggggttgggtcggtactcttgtctatggctaggatgggttggaaactatgtcacgtcttccgtccgtataccgtggtggtatgtggcacgtggttacacgtgaggaagatgtgtcttgtgggtaaagatgtacacctctgatcagagtataatctattcgaatagccgcgccctcggttatgggcatgcctagcaatgtacccaagttagtgttttaattcttaaaacctgcttaacaactaaaatgtggaatagttggcctgggttggcttgggacgagctgggacccagggtcgggttgccagttcggtctgaatcatcgtaggccttgggttaaggcaggttcgtgtgggttcacggccttgtttaataatattgtatagctctagaatcgtgtttacaaaatagcgttgagcaactaagtgtcttttaatgctgtttactgcaaaccctaaccctttatattataacccccttgtactcccttgcatttattctgcacttgtgggtgtgtcttgttgagtacggtggttgtactcagtcttgctcaatttttcccaaacccagaagaggagcccctggaagatgaaggctttggtgtctagctcgtgcctgccgtcaaacgcctatggtcgtcgccctagtcttccgctgtttttcgtttgtcttcttgtgtgctgggtcttcgccgcccatgtaataaattaattaattacgcttccgcttgttaaactctgaattgtatcaacttttggtgtaccttgcctcctgggacaaggaataatgcacgcacgtaaggaacgcccgttgggttatttccggtcgtgacaaccccccacacttagccctttgctcgtccctgagtaaaggttagtgtagaataaatttcttcaagatatgaatcaagcatataaatcattcacaaccatacctgcacctgtgaactttatcagtggctatcttaccatcttgagtaattgataaatggaacgatcttgattctagtccttcttgcttctctgttacactcatgggatttttttataaattttcgcaaataagctcttctcctattgacttcctctcttgtctctcaagaatgtatattttctttttggatccttaccaaagcaaaatgtgccataattcattcctattctaaggttaatatgtggagcttggtagggataaactgtgacatacctgcatcatatatattgcaaagccaaaaatatggactcaagaagatcatcatactcctagatcaagggtctttatttatggtggaaaatgaaaaagtaaaatatgtagtggaatggtggaataaagaaatgattatccctttttcctatactttctctccaaattggttctcttggcatgattgtggaaggggcatggctacatttttctttccaactttgctcaatgttttgagagcaagctttatttccttctcttttttttagccatgcctttccctccttttatcattttctttttgccaagaacttttcaaggagaagaaagtataattcaatgtaggagtttatttgaatggatatttttgtggaaagccaactttcagtgtagaagcttggcttaattttatatgtggaaatgaaagtggaattgaccacttgatcatgagagtatgaaggatatctaacatgagtcacacgaatttgacaaagctcaatataatgtcaagcagtcatatgcatgataaggttcatcaatgatatacttgcatatggtcttggtaggcataagatgaagtcaattagaggattgagcttttaaaacaattttattttgaaaacaaattcccaagagtcataacaagagttgcaagaattcctttcatctcgaatcatctctcatatagcaattacttagatgcataaggttccctaaacatggatggttgttcacaaacacaagttcagctgggaataatgaatatacaagatcaatcacatgaagaatttcatgagttggaagttttatctttcatttatgcttgaaccaattgttttctgaattttcagctctagtactataccatggtggagatatacagataaaagacgtgctcacctgcttacctgtaaaaattgggagaggttggggccagtcttggttcggccgaaccactctggtgcccaatccctttgcaattttctgcagagttgagtgctttcaggtgttcagagatttcatcaattttcagagcatatgcacgtcagaagctgggatatctccccacacttattcaaaacctgaatctttattaaacataaaacaaaaacaaaccttggcaaacattggggttaacaccaatgtgccacattattcatagcaagtgcttacatgattggaaaataaaaaccaagcacctactaccattttattcatgggaaaggactaattagcataatacttattttcctttcccagctctacgaatgcacgcttgatttaagcgcacaaaccgagactaagggtgtcgaaattgtttctaatttcagcaagctctacccctagctccgcgttgcaatccctaagctctatgttctccttgcggagtttcttcacatgtgcggcgagcttatggatcgagggctccagcgacttcacctcatcttcttgatattggctgggagccctcacaattggagggggcatcaaatgacgcttcaccttcataggtggagggctacgggattccgctgccccctcctccgacgccgtcaatggccggagtaaacccttaccatacccaccgccgggagttcgcactccctgaatacggaatcgctcctccttcggagtggatggagtagtggtgggtgtggtatacttgtggagcacctcatcccctgctttggtgaacaaggtgcccacataacgctcggcgggacgtggcgcggccttcccgtcatcttcggaaaggcgtcgtgcctttaacaagccgaactctcccgtcgtcggccatcgcgcaggcgaatccccccgaatttttgtccttgtgacatggcgaggggagagggatcgctctgctgaacgaggggccgaacccctggttcggccgaaccagggagctcgctaatcggctccaaaattgctggggagcctggcacagctaaaggggttgagcccatacagcattcgccccttccatcgtgtattcttccaccggaatcaattgatttgccagtgtcggctctccggtgaggttgtatgtggaattggatgaagagccgatgaatggaatcaaggatttgctagccattagaggttcaaagaatttggatcgaaggtcttgggggtgaatggcagattgaatagagaagcttttgcaagggaggaagaaagagaggaactagcttcaggggtgtgatccgatcgttctacctccaaactggcatcaaaatagactcaggactagcgggggagactatcattcaaaaatggggccgaacgggtgctgccctggttcggccgccctggtgggcccggctggccgccacctttcttcctattgccactaatttctaagctaagcacaaaaataacaactatacatggttttaagcatgcattagatgagatcaccatggttcataaacaattaattcaataacatccacttcttcctctaaagtttcatttggctcaaggaaaatctttaagtgttgactgtttaccttaaatatgttac

SEQ ID NO: 29846 - DNA, 2613 bp, Oryza sativa
aaataacaactatacatggttttaagcatgcattagatgagatcaccatggttcataaacaattaattcaataacatccacttcttcctctaaagtttcatttggctcaaggaaaatctttaagtgttgactgtttaccttaaatatgttacctgaatcgtcacggagtgtgattgccccttgcaaagaggtgtcgatgacattgaacggtccttcccatttgctgcgcaattttccgtggccaaaaagctttaccctggagttgaacattagcactttgtctcctggctagaatttcttgatttcaattcttttgtcatgccagcacttcgtccgttctttatatatcttcgcattgtggtaagccttctctctccattcctcaagttcagggatatacatttttctccattctcctgctccctcaaaatccatgttccaattcctgatggcccagtatgctctatgctcaagttctacgggtagtcaacatgacttcccgtagactatctgatatggggacattccaatgggtgtcttgtatgctgtccggtaagcccacagtgcgtccggcaatctatccttccatcctgttcccattttgttgactgtcttttgcagaatattcttgatttgtttgttcgatgtttctgcttgaccactggtctgtggatggtaaggagtggccacgttgtgtttggctcccatttctcgtagaaggtctctgaaggttttgtcaatgaagtgagaacctccgtcacttatgaccattccggggtaccaaatcttgggaagataatttctgtgaacatcttcttggcatgcttcgcatccgtggcggtgcacggtatagcctcaacccacttggagacatagtcgactgccaccagaatgtactcgcagttgcgagacttagggaaaggtcccatgaagtctatacctcacacatcaaatatctcgatttgcaaattgtatgtgaggggcattgcatcgcgagcagtgattcctccttgcctctggtagcttgtgcatcttctgacgaattcttttgagtcttcgtacattgttggtcagaagaaaccactttgccaaatcttggcctgggtgcggaatgcaccgtattggccaccgtagggtgaggcgtggcatcgttctatgatcttaagtccttcatcagttggcacacatcttcgtagtaagccatcagagcagacccgatataggtatggctcatctcatatatgacggcgactttcatatttcagttttcgtttattttcccctggtggtatgtacttggataccatgtagtttactatgttagcataccacgggttagagtcacgaaccgtcatcagcatgtcgtctctcatgaaatcatttatcggttgttcctgcatgttagtgatctgcagtctagacaaatgatctgctacagaattttctactccctttttatctttagtttctaagtcaaattcttggagcagcaaaatccatcttaagaggcgtggtttagcatctttcttagtgagcaggtatttcaaagcggcatgatcagtataaattatcaccttggctcccactaagtaagatctaaacttaccgatagcaaaaacaaccgcgagcagctctttttcagtagttgcataattcaactgagctccggttagagttttgctagcctaacagattgcatgatgctttttatccttggtttggcccaagactgcaccaacggcgaaatcacttgcatcacacataatctcgaagggcagagtccaatcaggaggttgaatgattggagcaaaaacgagtacctttttgagaatttcgaaagattttaggcacgcatcatcgaactcaaagggcgcatccttggctagtaaattgctcagcagcctagcgattgtagagaagtctttgatgaaccttctataaaagccggcatgtcccaagaagctgcagattcctttgatgttcacaggaggaggaaactgatctataacatctattttagcacgatcaacttcaattcctcgttcggacactcgatgcccaagaactatcccttcacggactatgaagtggcacttttcccaattaagcaccaggtccttttcttggcatcgttgtaagactttgtctaaattttgcagacaatgaccgaaagtctttccatagaccgagaagtcatccatgaagacttccatgatgtcttcgatcatgtccaagaaaatatacatcatacatctttggaaagatgcaggagcgttacatagtccgaaggacatcctacggtatgcataggtgccatacgaacatgtgaacatagtcttgctttggtcctccggatggataggaatttgatgatacccggaatacccatcaatgaaatagaagaaggaatgatttgccagccgttccaacatttcatcaatgaagggtagcgggaaatgatccttttttgtagccttgttaagtttcctgtaatcgatacacatcctccatccggttacggttcgttacggaattagtttattttgagcatttgcaacgaccgtcattcctctcttctttagtaccacctggactgggctaacccactcactg

SEQ ID NO: 29847 - DNA, 12892 bp, Oryza sativa
ccttttttgtagccttgttaagtttcctgtaatcgatacacatcctccatccggttacggttcgttacggaattagtttattttgagcatttgcaacgaccgtcattcctctcttctttagtaccacctggactgggctaacccactcactgtatggtacgggataaataatcccggcatgcaggagtttcaagacttctttctttacaacttctcgcattgcattattgagccatcgttgaggttccccctaagatcttgaagcgagtagccaagaatagaacgatacttttccaatacggcgagaagacgttgagtctcgtcttcagagagcttgtcactgattatgacaggggcctctctgccattatgtaggaaagcatatcgtaggcttggaggtagaggtttaagctcaagcggaggtcgaggtggcggttccatgattggcaggtcgagagtctcaccgggatctgcttcttctttgataaaattggggaactcatcttccaaaagggcttcgggagactcatgaaggggaactgcggtaacctcttccgctgactcaatttctgggagagggtcggtcaaggtgatccttgcccgtgagaatggaattgagaatacattttctcccagtgttattttgaggctacctaatcggggtgtgttgattaggagttgctcaatgggcaatatgattaggatgtcaaagccttggatttcaaagatgtggaaatccaagattgcctccctgtcttcaaagcagacaggtacatcttgtacaatcccaaatcctccaatgatatttccgttcggatgtttgaaaaatttgtttgttggggtcactgccttatcgcttaaataagcgaatgcaaaagactcagagacgaggttggccccgacaattggactgtagagaataccgacgtcgttcccttccatatagcaaggaatgattcggggagcggtatttatccgaattacttcggatgaaagctctgcctcccttagccattcatcgctcattatggatgttaacacccagacagtttctcgtaggaacccgagttccataggatcgggaggtggcaaaggaacgagtggtttcctcttgctaaaatagttcagggtattgccgtagtcttcgtcgaagccgtccatgaacagaattgcggcacaatccggagtctgaatctcttcatcctcgacggacggttgctcaagaactttctcatcaatcgagctagctgaagtggatggttcagtgcgtggctcgatcattagaggttcctctatcttggacacgaatgcctcctgctggggttcattggattgtgtcatgaaggaagtattttctagaatacgattcaaaattgttcttccttctgacgacgttttgtgcatgaacgatcctccagcggttatgtccagatagaatgcagactccttatccaaacccgtatggaaatgttggagaagcacatactcgggtaagggcagggttggtccggattgcactaaattagtgaatctggaccaagctgcaccgattgattcgttttcgatctgcttgaaactgagaatttctactcgaagggcagtaatacgagtaactggaaagaaggcaagacagaatccgtctcgcaacttttccaggttagcaggggtagaggtagaataaaaaagtaaaaaggatatgaggatgaactgggttcggaaatgatcagcaaccgtcccccggcaacagcgccagaaatgcttgttggtatttaatacgattacagacaaaatccgcaagcgcacggatataccgatgtagcacttcccctatgtagtattccaagggtatcgaatccaagggaacgtgtgtggtcagatcttcctccggttcatccaaggacaccaagcaaaggataggccaggatagagaggatttactagtgagaaacagtgtctagggaaagcttaactttaatcctaacgcaattcttcaggcattggcaacccgctgttcctagatgtcgctctactatgtacctggacaggaaggacttcagtgatctcgagggctatcaccacctctacacctacctcaacatactgtatgatacgcagcaattactggataataattacctaaacaccacgtctaagcaattaatatctactttagtgtttataactcaccaaagcaatcactatattttagttgattataatgaacaataatcccgtatgctatttaggaactaacaaagagataattctcacaagataaatctaaattacttaagaagaatattatattgaattcagagtaataaatataataaaagaaataggagaatattaccgacaactccggaattcttccaacttcttctactctactctcttcctcttctagtatacaatatagtacaatagagcctcttataattcagctcaagcttggaagtgtgtgttgaagtgagtgagatgatgtctttatataggggtaggtatgacggttggcgaaggggaaatgtttgaagtgccccgcaaccgccatcagggagtgatctgggacgtccatgccaaaacctgggatcaacggcgatcataagggtttggccgaaccagggggttcggccgaacctgggctgggccctcctagtctggccttcggttggtggacttcctaggccttcctctatccatttctcggagttttgggttgatttactgatgtttcaatgaagttcacaacccctccttgtatggatacataattctcctcactttagtctgattttcctcccaacttcagggtttatcatctgcatacaaatatacacgaacacttgtggaatatgtgagattaagcacctattactatgttggatgttttattgtctcgactttatgcagatgttggcggtatgagaatggcatttaacaaccgccaacaacaacttgaatattctgtgggttcggcccgtactttatcctgaccatggagcattgttctgtccttggttgaaactcaaacttctcttccttcccgttgatgtggaaacggatacttgttgacggtccttaaatcataatatctgaccgtcaatacctacatataatgaaataaaacatggtatccaacttagtggtaggtattattactaatcatttccactagttttggtgaaatatgtgtatgcaggtattttgaggagaaaacacatccgtcatgcgacaaaatgcacctctgcgcattcaggacacgtttacacgaattggaggccccataagtcaataaaaaccatttaaaattgggccaaaacatggtgcaggttattgggggcccattaagcaacttaccggccaaaggagaggccgggatgacacatttttgggttcggcagaacccaccaattcggccgaacccgttctgcggccgttcgccatctgcttccacgtggacggcttggattccttcccagaggcggttgcagggtgttttggacaattcccatgcccctaaccgtcatttggagcctatgtaaggaggtcttcatctcattccaacacacacaactttgagctgaattacaagaggctctattgtatcttttatacattagaataaggtagagagtgagaggaagctctggaggagtgcccagaagtttggcgctcatccgacttctgcctcgacgagtgtagcttcctaggaggaattcgggaggagtaccggagctatcggtatactctgctccgggttcggagaacttcttctataaagtaagcattcatgttcctttcttatgttatttaattatttagtctgagtaagatatatttccatctttgcaggttcattgtttagcatttatactaagtgctctagtactaggactccggatagagaaggaagttcctacgcgagtagtagtaattaatctttatgaagattatggaaacaccctgaattattccagcaatacaaaggctcatcccaagcatgagccgttcgaggaggtgatgtttgtatcttcgttcgtttcttctgaacctattgaccatcttcatgaaacggaacgaccctcatcaccctcgatcaagcctaagccttgtccctctggtcctcaaagcgttgttattgtttatcatcaagaaacaaccaggttcttgcacgatgtatctcttgagaaggaggccacggacaagcttgagacatcgactctggaggatgagagaaaacattccacatatgagcatgaaagtttctatttcaaaatcccccaggattcatgctcacataaggaatccctagagtcctgttcgattagtgtcgcgtctctgtgcgaggaccacaaccaccttccggtccacatttctagcatgtttagaaggatggttgtagatgcttacatttatcataaatactgcaaatctcctatttgtttgtggcactaatcttgcatagcgatgtcccgttggtcaagcttgtgaccataaacaaagcactgccgggagataccctggattatcatggtaagttttctttctaataaaagcaagaaccagtttttaggatagtatgcaccatcaggtattcttggtcactaaccattttaggttgagattaagaacgagggtcatacgatgcctaagaacactgtagctacatcaattgtacactttggtgaccctgggtattggaacacactcgataggagaatccgacatcacacacttggtttttgatgtcttgcgacacaaaagtccaagtgtgggggaaaggtcgacgagcttttcatgacgagttccatcaaccaaggccatcttggtttgaagttggtgttagtcctagcttgctagaaaaaaaagaaaaaaaaaagaagataaaaaaaaagaggagaaaagaaagacaaaagaaaagaaaaaaaatgggagaagaagaaaagagcaagagagctgacgagctacatttggatcaaagaccgcattatgtgcgtgtctttgaaatatggctatacacctcgctagtagcaatcatgctgcctggctacacctagtccctctctcgagctcatgtgccaccttggtttagactttatccactcctagctgtgcgtaacttcttgctcccgcaacacctacacgcatacaagcaagaggagatgccctcttcttttctaggtgtttcctgctccactccagttggcacttgcacatttgcccagaaagaaatgtatcctacgtctctacagcattgtgccaatggatcacgccttcaaggcacaaggttcttgcacctgatgtgtgtgcatgaccaacttgcttgcctgagttggcatggttaaagcgtcttcctccggtacaatctgcatggaggtggaggagaaatcgacaatcatttgtgaccatgccactgccccagagatttcaaaatatacatcatgctggcggtaagtacactcaggtatgcgaaaaataaaacagggttcaccattccttttactcatacttatcttcatttgaatgagacttgatcttacatggttatgtttcttgtgtctatttgcatatgctctattttgggtgttcgcgcaagacatctataggctttttaaattaagcatggcgcttaggttaaaatagtctgctttaatcaaattggacatggagtttagtttgactaatgaatctcagagttaatatgttcatagacattggatatatatcttttgtggattaaccccctacaggaaagtgttcaaattcatgggtgagtcctcaagttcaattcataatggaggtaggtcagggccgggaacaaatcaattggtaacatgcaaaggagaaacatatcacctatcaaggtgcacggtgcgtatattaccgatcactcctttagcatgttcatgcaaatttacctcagccctgtatgaattgtgcttaaacaaaaatttggtgaataataaaaatttgaaaaaaaaatgtttcagaataaaaggactgtctctcgaaaaataaaataaaatgttggcaaacttgtgggatccacgcttcttaagttttgaatccaattcctttttagcgtggatgtgaacaattaatcttgaggctacaataaaatcattcaaatctttgtagtgcttcgagtatttgttgtccactaaccttttgcaggaaataaaaagacaaatcaatgagcaatgtacaataacttcaaacacttatatcatgctccttggtccatgggaaagagatgcacaaggaaccaagcagaacaaatgcaaaactttgttacatttgatccagttctaagcctggtaagatctatctggtaagaatatcatacaccatgtgcatcctcatctcatgtctccatccttccaggatatccaccatttccattgttgcctaaaataaaaagggaaaaagattaaataaaataaaataaaataaagttggctccttggtcttccaaccaagtgagtccttttcgcttcacttttgtctttgtttttctttttgtgttcaataaagcctcccagatacaaagacaagtgtgggggtgatcttgcacatcaacgccataaccaaagcaagatcacccagtagtgatgagccatgacgaaccacacaaggaaaactgatgcagtcagaaccaatgaggagtcagccaaacctccagttcggctgaaccacctctaccatgaatcgtcctctgttttatacaaagcgcaggtttgcacaatttttcctttggacatccattctatcttgagtttaatttgattatcaattctaaaatattaaagataattgaacccaagctagggatggtacaattagagtctatggtctccctgaaaatgacatccatgcctattattctttgctcattacttgttgcttgtggtgatatatccaatagggaccccatgctatctaggtaattgatgaatgagatatgttctgatgatagaaatcctgctcttcatgttgcacacttgggaattttataaaaagaaaaaaaacatttaatgatgctaaactcctcattgatatttttattcccactagagccatggtttgatcattcatgattagctcgctacatacgctgcttgtcatttcaatgaacgttgtcaagttttgtgacactagtgaaacgcttttcatactttcatggtcaagaacacacattccacattgatggaccctgagttcctctcgacactcaaggctgttgttggcccgatctttcggtgagttgtgataactacgatttgggagaaacgttgacgatccgactacaaccgtacgagacgttgtgttgcgccttagcgatcgatacacctctccgtgggttgttgatcttgccggtgcagatcaaccttattcctgcaagcaaatcgaagaaacaagcaagaacaagataaaagcaatttgatattgcaaataggaatttaatacaaatgataagttggggttccgaagaacaagcagacggacggtctagccgacacgcgcgctgcaagcaagtagcaatggctaaactttaatctatcaaaacccgagaaaccctgaaggggtaactagctatatataggggtgagaggacgacttaggggtgcctagggtcgtgctccaccagcttggggcgcaccccacatgggccccacctgggccggggtcccaaatgaagttataagcccataggcccattacagacaatgcagcccattggttcttcaattgcggctcactgagatggaatatcacaatgaggctagatccgttggaaagaggactccgagagctttccatcaagtactcacgggccaaaaacggagctcgaatggagatttgacggccgtttgaagtcagcaatgtagcaggtggccgaatcggattccagcacttggaggacttgatcttgatatcttcttgttcatccatgatgtgagcaatggttgcatccgtggtagccatggtcacatcatcgtccccttctgcatggaaaaccgtcctcggtttttccatatggtgctctttgcgtagtccatttacaacaatctgtttcttccaatcaaaacaaggcaaactcgagacaatttggttagcaataacatttttctctagcttgcatgttttatccacatgtacaggaagttttaaatctgagcagatgtaaactctatgcacaaaatatattccaagatcattatattcgccaaagatgtgaaatataacattacgagaacatggcaaatcagaatgagcaaatattttgtccttcaaacaattgagctcacaagaatcatcaaacataatatagcccaatgtatttaaagaagattgcaattgaagttcatcattctcgctggacatgtgaataacatacttaaattcagtacatggagaatcaagattaaaagtagcatgttcattcactagttgtggaatggatataaatgaagtactatcgcacaactcttctttatcacaaggaacataatgcaaatcaacttgtgacaaaggcaattcagaagtaggttccactaaagtttgctctaggtcagcatggaaagtggaaaaatgtaattcatcagaagcatactcaccttgagtaatttctgcaacatttaatttaccttttatgccctcttcagataaggtaggtgcatcagccttctcctcattcatgagtgatggaagtgacatctcaaacatatcgttcttctcattttggggactgttctgaacttcctgcaaaacatcaatgataggaggcacaagcatagcttgttgctccgttgggttctccaaaattttgcgctcaacattgcaagcaagcatgaacaattggcctatatgattatatgtcacattaacaagcccagcttgaatattggaattaagccctctgaaaaatctagtcattgtgttctcattagattcttgtaaatcactataagtgatacaaattttaaaatcatgaaagtactccctaacatgtgtagtcctgttcagaccatcctttttctctctactcttcatagtcttttgtaccttttgctgtttttgtttattcacctacagatggacaagttttgttacatcctatgattttgctagataaaaactatattgttttttgtagaatcaaatatataggttagaaaatctttaattttggcatcacttttagtttctaacttcgaacacagattcactaagagcaattgaatagtcaataaaatacaaagttggagcaacaaagcggcagaaaacatgagaaaaatggacataccttgctttactaaaatgtacaatattctttactaaaagtcagtcaggattaaatgatatatcaatggtctaaaatcagatttcagcattacatgaaagcatgacatccatactaaaactattactagcactagattttcagtggtgacaaatgttagcatcatctttcttagcatgtgtacattacacatatctcacacattgatatagacataacacattgattatccaggaaatttattagtgggtaagaattacctcctgtcgaaaatcctgagcatagagagtgatgatgagtcgtagtggcttggtatttccttatggttatgatccacctagtgcaatttccatgatacattcatataaaccatgttaaaaaatgagttgtcttgctgaaatgaaaaataacaaagtctcacctcatagcctaaatgctccatatcagtgttctcatgcatgttcagttgttccctgtgcctttttttgttctatggttgaatatatttatttttatttttttcatatattgtgttactgtaggtgttggtaacacatagataacattactgtatgtaacacaactgtaacacactgaatatatgttacaatgtacttgtaacacaaagcaaagtgttcctacagagtgttcttgtaacacatgtctttttgtgttacaaaattgtgttacaaaatgtaggttctgacgtagtgacattttgtcaccttgttttagatgttcaaatttctcaaggagagcacgtctatagtatgaaaacacaaatctttttctcatcagtattttgcattcatcccaagtttcaagcttatttcccacagtatgccaccaaaaagatgcagaaccggtacacttattactagcagccttaatcatttgagcattagaaaaatcatactcatcaaattgtttttctactgctagctcccaattaacataagcggcggaatcatacttaccatcaaaaccaggcaatttagattctacccttgcaagatcattatcatgtacctcatatgtgatgcgtgaagaagtcgctatatctcgttgatggtgaagatgttgacgttgagcatgaccatctcgtttccccgtgcgcaatcctgccatggttagtagcaaacaagaaacatacacaaaaatatgtgcgttcctattaactactaggtagtggcagctcaaaaatcacacacactcaagcttttaaccaagctcttacaagatcttaccaatgcaagcagaatggtgatgtacactgacttaaccaagcacccaaatggaggttggatgtatcgatgtcttggcaaacacttgctgtatggctgcaatcagacctgtggagctctgggtaggcttaaatatgtagcaaagggatagcaaatgctcaaatcagagaatagaaagttgaataatggttcaaagtcaagtaccgtgctggtcctaggctagaacgtactagagacgcgagcctagacacaaatgataccacaagatagcactaggaacaactcatgcacaactctgatatatgaagttcagctcaaacataacagtattttctcttttctttctttttcttctttctttttttttctttcctttccttttcttttctttttttttggtgcggcttttcttttctctttttttttttgcacctttctgcctttttttttattttattttacaaaaatagattcaaggacctcaatgtaagattacagggactcaaacgtaaatacaaaaattacagggactcaaatgtaaaagttcaaacccaaaattagaactatacaaaaatggaatcctctcgtcctgtaggttctgtttttgcaaatggattttcaatccgatactcgaaaaattttcaccaagcagtatgcaagatcacggtatagattgaaaccgtgaccgagaggagacactcggactcggcctggtcgcggacccggggtggtggtgggtgaggaaaggaaggatgcggcactacctaggagtccggatatggtgagagaaaaaaggaaactgatttcaatcaatctgatctactatttctttccagattaaactcacatacttccaaaaacagatttggaaattcttcttcctcctctctacaccggcaacaagcaaaggccgatctattcacgggcaaaccagaaactcaagcaaatcctaaatgcaactccaaaactgaccgataaaaatttctgaaaactacaaaaatagaaccgtggcagcaagccgattccgtttttgtaggtcccgacgacaacagagacacggaggcgacgacgactgtggtacaaaacgtgaccagaactcgaaactcaaaacgaactagacgctaacaccagcaactcgactcgacgatgtaacacaaaactcaacaaagcaaaaactgataaaaacaatgcaatggcacaatatggctaggtacaggacaatttttttatggcaattttctggttatgggtagataaaactcaccgagcaacgaaagctctgatactacctaatggaccctgagttcctctcgacactcaaggctgttgttggcccgatcttccggtgagttgtgataactatgatttgagagaaacgttgacgatccgactacaaccgtatgagacgttgtgttgcgccttagcgatcgatacacctctccgtgggttgttgatcttgccggtgcagatcaaccttattcctgcaagcaaatcgaagaaccaagcaagaccaagataaaagcaatctgatattgcaaataggaatttaatacaaatgataagttagggttccaaagaacaagcagcggacggtctagccgacacgcgcgctgcaagcaagtagcaatggctaaactttaatctatcaaaacccgagaaaccctgaaggggtaactagctatatataggggtgagaggacgacctaggggtgcctagggtcgtgctccaccagcttggggcgcaccccacatgggccccacctgggccggggtcccaaatgaagttataagcccataggcccattacagacaatgcagcccattggttcttcaattgcggctcactgagatggaatatcacaatgaggctagatccgttggaaagaggactccgagagctttccatcaagtactcacgggccaaaaacggagctcgaatggagatttgacggccgtttgaagtcagcaatgtagcaggtggccgaatcggattccagcacttggaggacttgatcttgatatcttcttgttcatccatgatgtgagcaatggttgcatccgtggtagccatggtcacatcatcgtccccttctgcatggaaaaccgtctcggtttttccatatggtgctctttgcgtagtccatttacaacaatctgtttcttccaatcaaaacaaggcaaactcgagacaatttgaatagcaataacatttttctctagcttgcatgttttatccacatgtacaggaagttttaaatctgagcagatgtaaactctatgcacaaatatattccaagatcattatattcggccaagatgtgaaatataacattaccagaacatg

SEQ ID NO: 29848 - DNA, 9913 bp, Oryza sativa
atacataggggtgggaggacgacctaggggtgcctagggtcgtgctccaccagcttggtgcgcaccccacatgggccccacctgggccggggtcccaaatgaagttacaagcccacaggcccactacagacaatgcagcccattgtttcttcaattgcggctcactgagatggaatatcacaatgaggctagatccgttggaaagaggactccgagagctttccatcaaatactcacgggccgaaacggagctcgaatggagatttgacggccgtttgaagtcaacagtgtagcaggttgccgaatcggagtccagcacttggaggacttgatcttgatatcttcttgttcatctatgatgtgagcaatggttgcatccgtggtagccatggtcacatcacacatacacgcacatatgcttgacttctacactagaagttagcatctcccatttgtcattcatttcatccatcaaataaatactccatgtcatttatgcctcttcctccaaagttctttcaaaaaaaaagggagagaagcatggctatgcaaaaacaaaagaaaaaaaatgctaatacaagtatggagcatgatgatgaaaaaaaaagaaaagaaaaaaaaagatagccatgcactctctcaaatttcaaaaaaaaataaatgaaggaggaggtatacaaaaggagttatttttatttttccgttttccacccacgaaattaaccatacacatacacatgcacattcttgaccagaaagtatgtcttgtatttccgtggatccattatttgactttgcaatatatatgatgcaagcaatgctctactcttttccataccctaaactccacataagccttattagatggtaggaaaagaaaaggcacaatcatatgcctttgttaggaatcatacactttgagtgatcgagagaatcaatggagggagtaaagcaaagttataattttgtgttacatgaaaaaccccaagttgttcttcatgaaaagttagggtgacttgagtcgagattgttccattcctcaattgtccaagattgtatggtagacactacaaagatccacaagtacaggtatggctttgaataatttgtttgcatgattattagtaaggaagtcataactctgttgtagagttcatagccttcactcgggacgagaaaaggttaagtgtgggggtgttgttgacggtccttaaatcataatatctgaccgtcaatacctgcatataatgaaataaaacatggtatccaacttagtggtaggtattattactaatcatttccactagtgttggtgaaatatgtgtatgcaggtattttgaggagaaaacacatccgtcatgcgacaaaatgcacctctgcacattcaggacacgtttacacgaattggaggccccataagtcaataaaaaccatttagaattgggccaaaacatggtgcaggttattgggggcccattaagcaacttaccggccaaaggagaggccgggatgacacatttttgggttcggcagaacccaccaattcggccgaacccgttctgcggccgttcgccatctgcttccacgtggatggcttggattccttcccagaggcggttgcagggtgttttggacaattcccatgcccctaaccatcatttggagcctatataaggaggtcttcatctcattccaacacacacaactttgagctgaattacaagaggctctagtgtatcttttatacattagaataaggtagagagtgagatgaagctctggaggagtgcccggaagtatggtgctcatccgacttctacctcgacgagtgtagtttcctaggtggaattcgggaggagtaccggagctatcggtacactctactccgggttcggagaacttcttctataaagtaagcatttgtattccttttttatgttatttaattatttaatctgagtaagatatatttccatctttgcaggttcattgtttagtatttatactaagtgctctagtactaggactccagatagagaaggaagttcctgcgcgagtattagagtagtaattaataacttagacgtggtgtctaggttagacgttacctttgtttgttgtgtatcccacggatttatcagaggtaggcggcaggtggtgacagccctgaattccgtcctagtaatcctccacgttcggatacatcatagagctatagccggaaccaggctggcagaccagcaggggtcggtgcccgaagcaatagataggaaattacctttcttagcgtagataattaaaacacataggaagtcctctctagcctgcctacctatagttgttgtccttggatagccttagccttaggtagattacacacgtttcctgagttcgatatccttttggggtcacctgaaggtgaagtgctacagctgtattccatgcgcttgcggatttatctgtggtcgtaagaaataccaacaatactccccgctcccacgtcaatgttggctcctgcggtgctaaggaacaggcgccctaggatgagcggggtctcttttcccgtgtccatgtccagcaccacaaagtcaaccgggatgaaaaaatctcgtatcttgactggcacatcctccgttatccctgccgggtaacggactcacgaatcagccagttgaaggtgcatcggtgttggtgccaacatcgtgaagttgagcttgtcgaagacgttttttggcatgacgctgacactggctccaaggtcgcacaaggcctggtcgaactgttgtgccccgatcgagcaggtgatcgtcggacaccccggatctttcttcttctccgggagcttgtggagtatcacgttgctccattgctccgtcagcttgaccacctccgttgttgggagcggtctcttgttgttgagtatgcctttgagataacgggcgtatgttggcatttgcatagcgtccaacaacggcacgttaatgtggatcttctggattacttcaacaaaacgagcgaattgctcgtccactaatggtttcctcatccgttgaggaaacaacagcaaccatgtgtcacagtactcctgcggcacggtcttttctggctgatcttccttgtcagccgagtcactagatgacgctttttttgcaatctcgttagttcctgcagggttaggatacggcggatcacgagtggacttacctcccctcatcgtgatcgccttaacattttcaatggaggagtcgggttgccccggaatcctcccagtttcatttacagggactaaggatgctaactgagctagctgggtttttatcatttagttaaagctcagctgattttgaaaagcagaagcaaagccatctaacttgacattattgttttctaggatcttgtcattggttgcaagctttttgcttagcgcatcagtggttttagcctgcgaaaaaactagatccttcaaggagggctggttagaaaagttaccgttgttgttacctccttgataatatgggcgtagttggctccacccctgacctccttgtggacggtaccaattgttgttgcccatgtacatcgcctcctcacgggtttccgggcagtcattcccagagtgacccgtgctgctgcagacctcacacgtaacgtgtgagtccaaggccttgacggtgccttgtggccttttctcgtggttgtccaatcgtttcatgaggaggtccagcttggcagcaagtaattccgtctctttgacggtgtgcatgcctcgctgacaggtctggagttgttcctcgctccaacccatattggagaccatcttctctactaaatcaacggctccttgaaccattttagagaagaaagctcctccagctgccgcgtccaggtgatcgcgggacatcggggtgagtccattataaaagttctacaggatcagccagttgtccatcccatgatgaggacaggcggccacatactcctacatacattcccatgcttccggaatagactcattccttgtctgctggaaacttgaaatccttccacgaagggcattggttttgcccatcgggaagaatttcgagaggaatgccatagagcatttgtcccaggtattgacagcaacacggttggcatagaaccactgcttcgctctcccaagaagggagaacggaaacagccgcagcctggcggtgtcgggactgacgcccttgatggtgtacgtgctacagatctccaagaattgtaacagatgagcattggcatcctcattaggcttgccacagaatgggctaagcctgcgccatcgtgatgaggctggacttcaagtcgaaatccacacctaccatgttgatctgcagcccaatggccacattgtcagcagagggagcagcgaactcgcggagagtcttgttagccatagtcttgaaggtcggtggcgctggtatggctggtttctttgtcggtagagttttctgcggaccaacgactcgcggcctgacgctccagaagaaagcttctggattttctttgaagttttccggcaagttgaaaccagtcatgcactaccctgttttcacaacaaaaagtgaaaacaaccaaggttagcctgcaaaggaaaatgattatacagagataaatataaagtattagttcaagtaatctctattatgaatcttccctggcaacggcgccagaaatgtttgttggtatttcttaacgacattactagaaatataattcccagcaatgacgcataaatacttctggtatattatggttacagagttcatccgcaagtgcacggatataccattgtagcatttcacccgagagtattccaagggtatcgtatttattttatcccgtgggaagatcatgtagagagaacttgactaataatttatatattacttgtgataatcatattctaagcaggggttaaaaataatccaagggtagagtgacacacaagcattaactactcattctcataatatattatctaagctaattgggaagaacagagaaagataatctattcctatacttctaacatacatagtgtttacacccaaatttggcacctaggattaaaatagaaaagatccccgccaaaatttggaagtctaccggtttcctccgagtgggccggtctgaccgctgtgtgttgggcggtcagaccgccggttgagggccggtcagaccggcggtgtgtggccggtctaactggcaggaccgagtccgattctgtttcgtcgggtctcgaggtttccttgctcgggaaggcatgtttcgggtttcctttggcttctatcccgagttggacgtggaggagggcctgtagagggcaagaccaacccctatataagggacatggccggttcattgtaaaagaccaatctactatcaatcaatcgaatcgtttttcatattgcttttagttttctcttagtttgtccatctttgtcggtttgcgccgtaaaccgcccgccgccgctgcgagagtgcaacacctctttgtaggtttgtcctgaaaaccttccgttttgcccacgagacgggtagttatctagaaatcggctccgctagccggtttagttatcaaaacccatctaagtggttggcgactctaggatcaccgcaaggcataaggtgctgcgatcgtgcttgccaacttgtcacaaaaagttgccaacacgatttttggctactccgctggggaggagatccgttcatcgtcaactcaacttcgacttcgccatgacgaagccgccatccaagacggaggtggagccatctaatgtgatgccggtcacatcggatgacttcgaaggagaagatcgtaaagctatggaggagtacatcaacgagctcacacgggaggcgttgatgagagcaactactaggactcgtcaaggcgtgatcatcaagcccgggccacgtcccaagctcgctcccgacgtggtaagtaatgacgaggtatcacaatctatccaacaacaaattgcatctacaatagattcatctatggctaattttaaagatcgattagatgtaatgtttaaggataaagttgatgggtttttaaggagtaggcttggttcttttatggatgattacacattaaagcataaagcctataccactgctaatcaacctcctatagatcaaacgggtagtaaaaccgacagaacggcgttcacggccggtccgaccgggcctggtggctggtcagaccgcgacacagccatcggtctgaccggccaaatggccggtcggaccaagtattaccccggcggtcagaccagctctcaggccggtccgaccgcatattatgatatagggaatagatccgatgactaatgctagttatttgtatcactttaaaacatttgatccttctgtatctactgccacaagtaatccccaagttcccccacatgttcctaatacttataataatgtttctaggggatatcctcccgatactagacaaggccaatataatcatattgcgccacaaacacaacctattaggccaccaaacccaccgccaaatcaacaagggcctaataacatggaggatatgattagtgatattatgaggaatagattctggattgaaactaggaatcgtgctagaacttacaaaaagccatatcctgattattatgataatgtgtcgtttcctcgaaattatagagttcccgaatttgccaagtttagtggtgaggatggtaagaccacatgggagcatgtaggtcaatttatggcgcaatgtggtgaggctaatagtgatacttttaaattgcgtttgttttctctatctttatccggtaatgctttcacatggtttacttctttactggcaaattctattcatacttgggctcaattagaagaacaatttcatgattatttctatactggagaaactgagcttaggttatgtgatttaacatcggttaagcaaaagtataatgaatctgtcattgattatattaagagatttagagatgttagaaaccaatgttatactttgaatataactgatagatatttggccggtcttgcttttaatggtttagttgttcctcttagagagagactagaaggccaacaatttattgatgttagtcaactcatgcaaagggctctggctcaagaaagccgggttaaggataataaaaaattagctagaccatttgacaaaaagcctaatgttaatgtagttgattaccctgaggctagtgatagtgaggaggagggtgatcatgatatttatgttgccgaatggtcatggactaataaaaataagccttttgtttgttctaacttaatgccgactcctcgcaaagatcgccaaagtgaggttaaatatagttttgatgtggccaagtgtgataagatttttgattatcttttgcaagagaaacaaattagattacctaaaggccatgtcataccatctcaagaagagttgaaacgtcgagcatattgtaaatggcatgattctcattctcattctactaatgattgcaatgtgtttcgacgacaggttcaatcggccatagatgaaggacgattgaagttcaccaatggctccaagatgaagcttgatgatgatccttttccggtgaatacaattagtttcaatgataaaaaggtgttgattcggccgaagcaagtcgaatctactaaggaaaaggaagtggtcattggtgagccgaggcctaagatgatagtgccaaagaagccggaggttggcgtttggaaggagaacaaaagtggagcttcaacttctaaggcccctaggaagaccaaggtgacttttgatatgctcttggagaaatataagaggcaaggtggtgagaaaattcacaacaaagggaaaagaccaagatcacctcctagggagagatttggtcattcaccaagacggtcacattcaccttcatatcatcatccacaaaacatgtcatggggtccctatccaataccgccgccgggctacccttatccttacttcatgccatggggggcaacaccgccaatgttcaactatatgcctccaatgcaattcaatcaagggtggggaggaccgaggaggccaattcatgagcgtttgtcttcatccaacaatagccggttttatggtaagaatcgggctaatgaagaaaagagcgaaggaaagcgcgtcaaggtggaggaaagggcttcggaagtaattactatcaaagtggggttccatgatgtgcctataccttctggagatggagttggaaagtccccaagcaaaaaatccgaagccggtaccagctcttcgcagtcggccggtctgaccaggccctctagccggtctgaccgcggccatgttgccggtatgaccgggccattaggccggtctgaccgtcgacccgacagtgatccgaccgacgcctcaggccggtctaaccgcgtgccacacgtcggtctgaccggcgcgtctggccggtctgaccggtggtctatggccagtctgactgggctccagcgccggtttgatgagaggattgcaaagggcaatgtgagggcttcatcgtcttcaagcaaagttaataaaggacattatctacctcctggaacagagccgaatcctaggtagatgcctaaggatttgacggctacacaaaagagaaggttgcaacgtcttcgggcccaagagctaagggagaaaaaggccgaagaacatagggataaaaggttcaatgagttgcgaccaccaccggtatggaggcctaaatccatagagaaggcaaaaccgattgatgtagaggagaaggaagaacaatcagttgataaaagtgaattatctccaaaagaagacatggatatcaacatggtatgtatgttgcctatggagttttgtgctatggatgaagccgaggttgctcaattctaattaggtcctaaagatgcagtttttgagaagcccgatgaatcaaactgtcacatgaagcctctttatctcaaaggccatgtagatgggaagccggaacttgatgccgtattcgttattcaagaagttggggcgtgaggatgatgagttaaaaaagaccaacatgattctcaatggcttcaatggtgaaccaacggaggcgaggggtatcttttcggcggagctcaccgtgggaaacaagacgctaccaactgctttcttcatcgtcgatgtgcaaggtaactacaatgttattttgggtcgttgttggatccatgccaatttttgtgtgtcttctaccttgcatcaatgtttaattcaatgggacggcgatgatgttgagattgttcaagcggatacatcggccgaagttgcaatggccgatgttacttttgagtggcgtcatgggaatatccaatgcttttcggggagagatctttctagttatgattttattagtatctccgatggcaaatttgtacctatctctgtaaagccggctagtgtagcacggctaagccacataaatttgtataatgagtaaagaggctaatttagagtggttacaaaagagggtgcaagaatatcggtctacaaagaacgatattggtgaaaccgttgaggattttgaagaagtagagaagcttggaaaagggtttacatcggccgatcctttggaagaagtagacataggtgatggaactaaaccgaggccgacttttgtaaacaaaaatatgagagccgattacaaggttaaagtaatcgagctacttaaagaatatgttgattactttgcatgggagtaccatgagatgccaggtcttagccgtgagcttgttgagcatcggcttccaattaaaccgggttttaggccttataagcaaccacctcgtcgttttaatcctttgctatatgaccgagtcaaagaggaga

SEQ ID NO: 29849 - DNA, 13917 bp, Oryza sativa
cctatcagactcaaaatcacggttagcatggtagtgctctgcaatcctttgccaatatgccttccctggttgctcattgccaataataggatccgagctaatgctttgccatgaaatgcacagttgaatgtcctccttacgattaaagttgcttgatcttttggctcttcctttttgcaccatttgttgaagtatgaaggtcttcattttgcattggcaaggaatatgcctcaacatgggtctcttcggacatcatgcacacaaaggaatcacattcatttgccatcacaatctagtcactgcaataagtagataaattgacaacttctccaatcaatctcaggaaaaatggcagatactagctaatatatgttggtagaatgcataatggtagcaaatttttctaatcattagaatttagaacaggttatgctagagctctacaaaattgaattaaaaagaaaaccatatagcaccccaaagcagcttattttttttctcttttttaacagtctactcgaagaacctgcatataactaacgtcggtacaaataaaattgtgtagctcaggaaattaagcagcactacacccataccctctagaatacgatcacaagatttcagctggcatagtgtctcaaagtcatgcatattaaaaaccacactgaaaaccatatagcactatccaaaacttacaattcccaaaaccatattagctgtcacaccctgaaaattcaaaatatgtaaattgttgtttaattggaatttttagaaataattttaaaaagtcttgaaaagaagatctaattttttaattaataaattccaatataaaatgggcccagataaaatttccttaaatactttgcttaattctataattcctagatttttctgggatttatttgagctaagaaagtatttttaataaatggaattgcatttaagaaataattttaattgaaaaaggttttaaaaagtcttcttttggctttgggccgaaagtcggcccaaaacctctcttctctctccttggcccagccggcccagtccgccgcagctgcgcgcgccctcgctgtcgctgacaggtggggcccacctgtcagtcgtcgtctaccttcggccgccgccgcccgaaaccctagtttcgcgccgccgccgtttcccttccaaatccggccgttcctttccttctccggccgaatcaatagaggggaaacaatctccgggatctcctctaccttttctcctttggaatctttggctaaatcactttggaaagagttggattcgagttcatctcggatttgttcttcccgagctttccttcgccgttgccgtcgccgtgggccttcgccgccgcctccgagcccctttaaaaggacccccggtgtctcctctacccgtcgccaccttcgccttcgcctctcgtcgtcggaatcgctctagcgccgtgtgccctagcttcgccgtcgccgccgccgctccagccgtgctccgccgctgttccagacgtcgccgtcgctcgggaagaccgtcgtcgtggtcgccaagtcgtcgccgtcctcgtccgccccttcgccgtcgccggagatcgttggagcttcgtcgccgtcgacaacccgaaggtttccgccgtttcctcctcgtcgccgtcgtcgttcgttgtttttccgccgccgttttggtcaccggtgtgttcgtcgcgtcgtcctctacgtgctggtgccctccgtttgcgtcctcgcgccgccgttcgccggcgagcatgcgccgcccgagccgtccgctccgccgagccgccgccgctgtcggtgacgtcattgccgacgtcatcggggtcgtccgccgtgagccggtcgtggaccgttcgatctcggccgtccgttttggattggatcgatctcggccgtccgttcgcgtgaaccgccgcccgtacgctcggtccaccaaaaccctagccgctgacgcaataaaccctcttttccttttcaaaaataattcattattgcgtcataattcaattttaaccgatttaagtgttttaatccgattaaatctttaaaaaattcataactaattcatcttagatccgatttagttggttcaagtctctaaatttttctaaaattgagatctacacattaaaaatatccacatgtactgttcatgcttgtttatgtactgttttggtgattttgctcttttctgcttagattccgtcgtttccggagagtccgttttcgccggagaagagtttgaagagttccaaggccagcaaggcaagtcacacagatcccaaacaaccctttgagcatgttgatcctatttaaagctattgtttcttttcaactattgcatttattttcgaatgtcattgggtggaattaacctattgtttgttatagccctttgttcttgattactttattccttgataccttgggttataataatttgactagttgagctttatttatattggttcaactagatattagatataattgcttagccctgcttagaaaccttagcacacttatgggataactaatgattcactattatttcatgatggcttattgatagttcacgatggacaatcgtgattggttaattaattaatgtgccaactaaaacctgataatggtgggttgtgagcacatggttttgatggtcgtgctcatgacaattaaggaccggttcacgagtttcggttgtgaaacatttatcgtgccaaccacaagccagcatgggcaacggctttatcttttgtatagcatggttcattgcggggcaccagactgagaagtggcggagataagcccacgggggtcgctggggagtccatgccttgtttataagggggtgattatgatccaggaaggtgcgctgcagtggattgtgttatgtgaggggtattgtcacaactcctttccgaggtaccgtggtggtattgaggcacatggtgacatgatgtggggttgtgtcttgtgggtacagtggtacacctctgatcagagtaaaactattcgaatagccgtgcccgcggttatgggcgggtcgaacaatgtctttcgtgattagtttcacacttctcaccatagtaaatgatgctataattggtaataatttgattagctcctggtttggaatggtacattcctggtttggagatagaactgtgcagccgggatggttgttcagaatggttgggcctatacaacagggtatgttgtatagcgttggattaatattgttaaattacttaactgttttgttaaattctgaaatgtttgctaaatgctgcttttgcaaatgaaaccctattatgccatcctttgttatcctgtgcacttgcatatttgctgcgtggcttgctgagtatgtcatatactcaccttgcaatcattcatcagaggaagagttctacaatgaggctgatggagtggaggtttaggagtagccttggtcaagctgcctgtggagtggagccgtctgcgccgtttattttattttccgctgcttagatctttattgtttgagaggaactatctacctctgtaatgacattttattcgcttattaattagagtaataattgtactctattatcaatttgttattgtgtgcctcggctgattcctggacgagggttcacacacatgtaagcgtttggaattttggatagaaattccgggcgtgacaagttggtatcagagccccttgaccctaggttatgccaaatggttacccatagaagccctctaaaaatattggaaaagtagaactgttctcctccctttctcttttaattaaaccaaactaatggcacatgcatttcataatctcttttaatagttctcattcaaaatttattccagtgttattagtactgtacatccattactgtactaatggctcatttatcagcaaaagttttacaatattgttttatttaatcttgctgcaataaaataaatttagcatgatgattttataactttcttttatttcttttgaaacttgttgttaaaaagtacaaaatttgtaaccttgttttcaactatttcaaattatcttgcaagtttggtttactttatttacttaccttttactttgattttcaaattttattcaagttaatccaaaaacttgtgctgttaattggatagatgtcttaactctctcctttcacttgtctttagatgccgcgctacaagcctgagtacctgtttggtgttgagggttttgtccaggagttgcgtacgatgtcctttgccattggatttgggactgcccctttttatgcccagattcctcatgatcgtcatgaagagaagtgccgagtcaaagtcaccttaaacagcaatagtgaagaggtcccctcagtgatgttcgaagctggaggaagaaactacgtccatgcatgtcaggaagtggcaaggatcgccataggagaactccgtgatagctacagtgatcagttggccgacactgagtatcgctaccatcctcgtcaaccccagggaagtgaccgtggcagctaccttgagactgaaggaattgagaatgatgctaccacaaggcatttggttgagatgctgtgggctatggatgaaagtcgtgcggagactgtgttagcagctcaagatcgtgaagaccggaatcgtggtaagatttgcaagctagaagacaaggtggatcgtttggagaaggagctagccgcattgaagggagaagcaccaccgcagaaggccaggattcgtcttaccgcaaggaagagagctctattcgtccctcgctatcaattggcgccaaaggttcgtgtggtggagaaagaagttgcccatcccaagcggatcctccggtcatcatcataagtgatgaagaagaagaatccaagcgcaccaattccaagattgagtgggtagcaacccaagatgatgaagacgagccgaacgagccttcaatcgacctccgatgcttggaagaactagagtgacttgttaagtcgttgtcttagatcgttgtgttagtttgtttgctttaggtttgcttgtgtgtggctcgcatgtgatttacatcagtggtgggatgtaattgcatgcgtttgtttgcttttgagtgttaggaagttggtgagtttagtggtgtgagagtcttcagtttgtaataatgaaactcagttaagatcaataaaagttaaagtaattctctatcctaagtagttttcccccggtttctcttcttgtgccctgttcctgccagatggtgaatactcgcagcaacgggaatggtcccaacaaccccaataacaataacaatggagagaacccaactctggcccaagttcttgctcaacagacacagcttatgaacatgatgatgcagcaacttcagaatcagcagaaccaaggaaataaccatgcacctccccagaacaagttagcagaatttcttcgtgtgaggccgcctattttctctagtaccactaatcctgttgaagctggtgattggctgcatgccatagagaagaagttggatttacttcagtgcactgatcaggagaaggtatcttttgcatcacatcagttgcatggctctgcctctgaatggtgggatcacttccgcctgaataggactactgctgaacctatcacttggcttgaattcactgctgctttccggaagacgcatataccatcaagagtagtgtctctcaagaagaaggagttcaggtcgcttactcagggatctcgctctgttacggagtatctgcacgagttcaatcgtcttgctcgttatgctccggaagatgtgcgcaatgatgaagagcgccaggagaagtttttgggaggacttaatgacgagctttcttacccactcatggttggagattatcctgatttccagaaattagtggataaggctatacgtcaggaggacaagtacaattgcatggagcagaggaaacgtcggattgctcacttcaaggcacaacaggggagtaatcagaagccgcgctttactttaggaccccagtctatgccacagggaggttcttcgtctgttgttcgtccgcagcgtcagttcttcaacaacaatgctggcaacaacatccgcaatcaagctccacgtcctgttgcagctccaacacagcaacagcctgccaagagggagcaaggcagcaagcccgtggtgtgtttcaactgtggagacccaggacattatgctgacaagtgtccgaagccccgtcgcgtgaaggttgtccctgcccagagtaactctgctgtaccagcatcaaaggcccgtgtcaatcatgtcgctgctgcagaagctcaagatgctccagatgtgattttgggtacgttccctgttaactcagttcctgcaacagtacttttcgattcaggtgctacacattcattcttatctatgagttttgcgggaaatcatgggatggaagtagaagatcttagacatcctttgatggttagtaccccaagtaatcaagcactctctttgcagcgtagcccctcggtcagaatagaaattaaaggagtaccatttgtggccaatcttatcttgttagaatccaaagaccttgatgtcatcctagggatggactggttagccagacatagaggtgtgatagactgtgccaacagaaaagtaactctcaccagtaatgatggtcgagtggtaactgttcatgcattgtcttctgagtctttaaggtcaagactgaatcaaataactttggaagagattcctatagtccgggagtatcccgatgtgttcccagatgatttacctggaatgccgcccaaaagggatatagagttcagaatagatctggtaccaggaacaactccaatccataagagaccttatcgaatggcagccaatgagttggcagaagtcaagaggcaagtggacgatttgcttcagaaaggatacatcagaccgagttcatcaccatggggagctccggttatttttgtggaaaagaaagatcatacccagaggatgtgtgtggactatcgtgcattaaatgatgtgactatcaagaataagtacccgttacccaaaattgatgatttgtttgatcagcttaaaggtgctaccgttttctccaagatagatcttcgatcagggtatcaccagttgagaatcaaagaggaagatatacctaagacagcttttaccactaggtatggattgttcgaatgtacggttatgtcttttggacttaccaatgcccccgctttcttcatgaacttgatgaataaggtgtttatggaatacctagacaagttcgtggtggtctttattgatgacattcttatctactctcgaaccaaagaagaacatgaagaacatcttcgccttgcattggagaagctacgagagcatcaactgtatgctaagttcagcaagtgtgaattttggttgtctgaagtgaagttccttggtcacgtcatctcagcaggaggagttgccgttgatcctagtaatgtggaatccgtaaccaactggaaacaaccgaagacagtttcagagattcgcagtttcctaggcctcgcaggatattaccggaggtttatagagaatttttccaagattgctaagcccatgacacgactgcttcagaaagatgtgaagtacaagtggtcggaagaatgtgagcagagttttcaagagttgaaaagtcgcttaatatcagctcctattttgattttacctgatccaaagaagggtttccaagtgtattgcgatgcatccaaacttgggttaggttgtgttttgatgcaagatgggaaggtggttgcctatgcatctcgtcagttacgtccgcatgagaagaactaccctactcatgatcttgagttagccgcagtagttcatgcgttgaagatttggtgtcattatcttttcggtactcgtacagaggtatataccgatcacaagagtttaaagtatatctttactcagccggatctgaacatgagacaaaggagatggttggaattaattaaggattatgacatgggaattcattatcacccgggaaaggctaatgttgtagcagacgctcttagcaggaaaggctattgcaatgctaccgaaggacgacagttgccattggagttatgcaaggaatttgaaagattaaatttgggaattgtcagtagaggtttcgttgcagccttagaagcgaagcccactctaattgatcaagttagagaagcccaaattaatgatcctgatattcaagaaatcaagaagaatatgagaagaggaaaagctatcggtttcttggaggatgagcaaggaactgtatggttgggtgaaagaatctgcgtccccgacaacaaagatttaaaagatgcaattctgaaagaagctcatgatactttatactccattcaccctggtagtactaaggtgtaccaggatctcaaggaaagattttggtgggcaagtatgaagcgtgaaatcgcagaatacgtagcagtatgtgatgtttgtcagcgagtcaaggcagaacatcagaaacctgccggtttgctgcagcctttgaagattcctgaatggaagtgggaagaaatcggtatggattttatcactggtttacccagaacgtcatcaggccatgactctatttgggtaatagtcgacagacttaccaaagtggctcatttcattccggtaaagacaacttattctggaagtcgattggcggaattgtatatggcaaggattgtgtgtttgcatggcgtccctaagaagatagtgtctgatcgaggcagtcagtttacttcaaacttttggaagaagcttcaggaagagatggtttctaagctgaattttagtactgcttatcatccgcagacagacggacaaaccgaaagggtaaatcagattttggaagacatgttgagagcttgtgctctagatttcggtggaagttgggataagaatctaccctatgcagaattttcgtacaacagcaggtatccagctagagtcgacttcaggcatggcagcttacgaagcactgtatggtcggaagtgccgcactccgcttttgtgggatcaaacgggagaacgtcaggttttcgggacagatatcctaagggaagcagaagaaaaggtgaaaataattcaggaaagattgcgagtggctcaatctcgtcataagagttatgccgacaatcgccgtagagatttgagttttgaagaaggagattatgtgtatcttcgtgtcacgccttttcgaggagttcatcgttttcataccaaaggaaaattggcaccgcgttttgtgggaccctataagattgtcagtagaagaggagaggttgcttatcagttggagttacctcaatctttggcaggagtccataatgtgttccatgtgtcgcaattgaaaaagtgtttaagggtacctaccgaagaagctaatcttgaacagatagaagtccaagaggatttgacctatgttgagaaaccaatccgtatcttggcaacaagtgagagaagaaccagaaatcgagttatccgtttttgcaaagtccagtggagtaatcactcggaagaagaatcaacttgggaacgagaagatgaattgaagtcagctcatccgcatctgttcgccagttcttctgaatctcgaggacgagattctgtttaggggggtaggtttgtcacaccctgaaaattcaaaatatgtaaattgttgtttaattggaatttttagaaataattttaaaaagtcttgaaaagaagatctaattttttaattaataaattccaatataaaatgggcccagataaaatttccttaaatactttgcttaattctataattcctagatttttctgggatttatttgagctaagaaagtatttttaataaatggaattgcatttaagaaataattttaattgaaaaaggttttaaaaagtcttcttttggcttcggcccaaaacctctcttctctctcctcggcccagccggcccagtccgccgcagccgcgcgcgccctcgctgtcgctgacaggtggggcccacctgtcagtcgtcgtctaccttcggccgccgccgcccgaaaccctagtttcgcgccgccgccgtttcccttcaaatccggccgttcctttccttctccggccgaatcaatagaggggaaacaatctcccggatctcctctaccttttctcctttggaatctttggctaaatcgctttggaaagagttggattcgagttcgtctcggatttgtattacatatggattatgagattaattattgtattaattaatagtcaaaaatttgaggaaaacaaaatcacataataaaaaaacaaaaccatctcatcgtggaaggttagttcctacccatttcttctccaaatatacattttcgtactgacaacttttctctcgaacacgctaggtgctaccatataactcaatccacaaatccactggaaaaatgaaaacatgataccttcaactagcgccagggagaagggcgtcaggatctagggaggatattgctgggtgggcaggtggccggccaggaaggagggcaccagggaggatgcctacaggggaggagggtgccgccgcgccggcaaggaggaggacgttgggaaggaggaggcctaccggggaggagtgtgacgggcagggaggagggcgccaccaaggatgagggcgccggcaggggaggagggcgccggccaggaggagcggcgtagatccgtggaggcgccgctagcaggatatttcgcacgaaaaaagaagtgcccgtgcgtctctgccgcggatgggggctgcggagaaagccccagggactgggggcctaaggggataatttggaggctttcctactttaggggctttagtagggaccttgttggacctgattttttagtctcaactctcaaaattagtataggggctgtgtttaggacctctactggagatgctctgtaggggccttgttggacctgattttttagtctcaactctcaaaattagtataggggttgtgtttaggacctctactggagatgctcttagcattgaattaattgaaaactccaaatttgtataggtaggtcctcaactatattaaaataacatgatggaatatggagtattgcaataaacttgtcactgaatattttgagatactagacgtaatcccacgcatttgctacatggctattttgtgtttctctgtaaataaaattcttatgatagtgggagtatcttttatagagttgtataattttactttaccatgcaaatacatttcatatcaaaagtacctacacacaatttttacacaatggttttcttcttgatttgagttactatctctcgtattagattgggggcatagctcttgttatggtatttcactcacaagtatattttgtaccaaccaaatagtgtactattcattcaaaagtaggagtaactacataggagtatctttttttaacaatgtatggcatgtgttttaatgcaatcatgcagtaaaatggggaacagcaaagatagttgaataccaatcactcaaaactgtgagcatatgctaataaaaatcggcaaatattgtacaaatgtgtgtacagaatccacaaatggcctagataacataaaaaataaacttaatatatacaacctactctaaatgttttgttaatgatagatttcaaactgaaataaaatatcaagatgatttgcaatgtgagaataaatgtatgtgaagaattatgaaaaccaaaaaaattatatgctttaatatcaaaatttcaagatggttaataaatgttggtgtatgtgttttgtaaatattttgctttaaatgaaaatcatattgcgaggcaaagccatggcaatactttaagtcaaaaaataattttggtgtatgtgtaaagaaaaatcaggaaaccacaatgaccaataatgaaaacttgctaatccacatcaaacttgcacgtgtaattccattatttgttgtgtatttattgtttcaacaaattatgcaatagaaaatataccgtacgatgtacgtaaaataaagtatgcttcttgtgttgacctaacactcaccttgtactacatgcatgtaaagaaatcaagcttgtgcatttgcttatattggcacgaaactatggcaatgaagtaattatcagtgttatggtatcataattatctgtgaatttagtttgattttttaattgatcacagtcgagctgcatctatactaatataaaaaggaggagttacccccttgcaatcctaccggtgaaatcattgttgacggtcgttatcgatcaatttcgaccgtcaatattactaaaatagaggagaactagtgatgcttgcaatgcatatatctgttagaataataatattccactagtattaggtatactaaccttttgcagagaatgacaataaaggggaggagaatcgacatcaacttagacgataaatcaatccgaccgtgtcgagaatatgtatggatgggctaagaactcagaaataacacgacacattgggccaaaattcacaagtctacataaaggagcaacagaggaggccgccagccgaaaggtgggctagttgggccggcccctggttcggccgaacctccctcgcctccgttggatccaggttttggctgcacggttgagatgaagccccaatgacggttggaggatattactgaccattccaaccgtcacaaccgtcatagttcagctataaaaggagctcctcttctcacttcactcacacacctcaagcaatagctccctcatttctctcaagtttagtttagtagtatctagctggtggaataggaatagagtagaaatcaggagtccagaagccttcggaagagttcgggtatggctctagtagcttttctcttctcttttgtaagctttgtacctttattagaatactcttctatatacatttatggtattgaaatactttccgagtatatgaatgcctactttacattatgttcatgttatactgaatatacggctagcttatctgggagatgctttggtgcgggtataatgtttgcatatgcaattactttatgtcatgacgatgatattagagtagtatctggtagtttagacatgatgtctagattacgggatatcattatttggggttatatattgcggatgagaggtgggccactgatggtgacagctcagtacgggtattcctccgcgccggtatataatcctaagttaattccctggggagggtattcctccgtatttagccccggttgtatggtcatgatgggctgtcgtaaggaactcgacagtcaggggtggcttctcgaagtaccaggagggcatcggatagagggtattagctaatatgtcagttaactagaatgtatctatactatgtgttggcaactttttgtgacaagttggcaagcacgatcgcagcaccttatgccttgcggtgatcctagagtcgccaaaaatcgtgttggcaactttttgtgacaagttggcaagtacgatcgcagcaccttatgccttgcggtgatcctagagttgccaaccaccttgatctagcaaagagctaaacctagatgggttttgataactaaaccggctagcggagccgatttctagataactacccgtctcgtgggcaaaacggaaggttttcagaacaaacttacaaagaggtgttgcactctcacagcggcggcggacggtttacggcgcaaaccgacaaagatggcaaactaagagaaaactaaaagcaatatgaaaaacgattcgattgattgatagtagattggtcttttacaatgaaccggccatgtcccttatataggg

SEQ ID NO: 29850 - DNA, 3527 bp, Oryza sativa
  unsure (1)..(3527): unsure at all n locations
ggttttggtnnggcttggggcccaaaaccaaaagagactttaaaaaccttttccaatttaaattatccattaaatgcaattccatttattaaaaatacttccttagctcaaataaatcccagaaaaatctaggaattatagagttaagcaaagtatttaatgaaattttatctggccccattttatattggaatttattaattaaaattagatcttctcttctaggcttttaaaataaattataataattccaattaaacaacaatttatatatttaggatttttagggtgtgacagaaaccatgtctcatgtaagacatagtttcattctctttcctcatttattcacttgccacatcatttttcatcctaggtggcagtttatttaatgctatagatatcatcctagtcattgggttgagaatggcctaagaagccgcccaccgccttgaaaattgtttcaatttacccgagcaacatagttaagaagctatctgtaataacacgatgcgcaccttgagggaccggctaaaactaaatatggatttccacatgcggctgcctcttgctcacacccgcggccacgaccgtcatgctccacccagcgctcacgtgcacgagctctcgccggtggcctttgaggcttctgtcctcaatgggatgtgaagaagaagaaaagaaaacaagggggatgaggaaagaaaaggatttgacgaaaaacataacggtagtggcacaaatcaatttttctgcaaatttaaatgacatgaatttaatagacgaatagaagtggtatttatctaaacgagcatatttgtaatggcatatatccaattgtccctaactaataccagccagcaaacaaatctttttgcatgcatgtgactagcaaggctgagcttggccaagacaagagttacaagccagcctaattagtgacagcaaccaaacagatccataattactgtcgggttaattaagtttgtttttcctgatataaaaattgcgagcatcttacgccataatccacacaagcgttgcgagctcaccgccgctgctgagttgcttggcgtgggactccctgctgcatcggtggctaacgtagtggagcatctccacccacaccttgaacagaaattccacactggccccgtcgtatttgttgagctttttgactagaaggagggcaagcggcagagcattgagcgagaccttactggggtcccggtcggtgactcccagctgcttggcaaggctctgtgttttctggacggatgactagatcctaattttgttgatatctcggatggtttcactgtaaatagtgcgtagtgcaaggccaggtaccatgtagggacgttccagaactaggaacatcatgtagttggaaataagattgattgcttcaacatactcggtggtctctgccttgtcggaggtgcggaggtagatgtccgtcgcgatgtgccagataatgatttgctgctggatctcgtcgcgaactaacctcaagaacaagtcgtacatttctgccttgagcaaccccgtcgagtccaatgggatacccggttgccccgttggtgctgcatcttgatcatcttaatttatccttattatcgatctcgcaatccttattgtacgtcgacgtcgattcttattatatctagcaaatagctgaacacctgctccatgacacgatcaggaatgaccgtggtgccggagtaggtgttgtctttcttgcgccacttgacatgtatcttcttggcaaggtcgtaccagacgtccttggagccgtcgcgtgtgcagtactgcaacatgttgtgctgccagatggtgccggaccaccttctgctgtcctccgcattgacaagccagcggatccacgtgagcgcgcggccgacctggcgccatcgtccgctgcagaccgccgcgtggtacagccaaccccgcagcggcatgcggatcaagaaggcgtacgcccaggtcgacccggctgccatgagcagccaccatgtgtctacaaggacggcgccaaccagcaatgtgtaggtgatggccacgtcgactagcatagccccatgcccaagggcgccgtggaggctgagatggaacatcaccaaggcaccggcggtggccagcggcgaaaagacacggatgcagtagccatgccacgtgtggatgacgccagccttggtgtacatgatgtcgtacagcagggagagctccatctggaggacaacccacgtctctgtaaaatcaaaggtgtttttgattattattctgtgatgaacaattgggcattggagattattggttttgttatttggaatttattcacgaagtggttttggagatgattggatttacaggtgaatcgcagggttatcattttatgtggaccggtcagactgggctctggtagccggtcagaccggcgtgtaatgcgcggtcagaccggcgcagcccgcggtctgaccggccgacactgtatcggtttcggtttcgggttgtttatttggatatccaagtttatttcatgattatgacttctagatggatactatacgtatgtaatactattgtttgctgctaatgagtcaagttggagataacttagtctcggaatatagtttctttgtttgttccatgtgtaggtgactcgatgtctcaggagagtatttgcggtgatggaccgggagtcggcttggggataagacgacgtccgtggtggtcagagatcatgcgggatacttaggctatagttgatgcacgtggttgatggagattccatatggcatacaatgaagttattgtgtacgtataggatgcgtagttgaatttggaaggagttcaaatttggtacgattggttatgtaaagtttctttcttgtactagagggtttcctaaggtgtttaggactcctagtataagtttggttcgtggctttaggctgcctacctcatgtataaatagagggggagcgtgaggcttcccggtatcgctttagagagcaattgagttgagttttgagttagggtttcgagtttagtcaaaatttttgtaaggagtgctgttggtgcactttgtaaacacagagagaatcaataaagtcgtcatccactttaagagttattcgatttgtgtttaccgggtttcggcggtctaaccggcgatctaccggcggtcaggccatgtcacatcctgattttttgtttcaggatttataaattatttaataaattaataatataatttatattaaatgatctttaatttacaagtgaagttaaatgtgggaaataaaatttcctaaatataaagcatggatggatttaatttttattaaattctccatggttaattatactctctgaaattttctcagatttttcagagctcaattctttaataaataatacaaagagacagttcagtaattatttgattctccatgggtaaatatactctctgaaattttctcggatttttcagagctcaatcttaaataatacaaagaacaggtcag

SEQ ID NO: 29851 - DNA, 14472 bp, Oryza sativa
ctcagttgaagaaaaaggatccagaaggagaagacgtttggattataccccagttgagctgcctgtgggagtggagctggagcttcgctagattttattttccgctgcagttttcttcttggtgaggactaagtgcctcataagtaagtatttatcgttctagttaatttgatgaatctgtatattaaattgtcagtttgtgtacctcggctgattcctggacgaggattttatgcacaaataagttcggaaattactagtgaatttccgggcgtgacaagttggtatcagagccatctcgactgtaggataagccaaatggtcaaaccttaaggactaattttccgaaaacatgatttgtgaaaatttctcctttcttccttatctagaattctttgcaaattgtttcattgtctactctcctctctcgttcaacttgagtagttctaaaactagtggttgaaactagaagatgctgatgtgggcaacttatggaggttaagtcaagtggatcgatgaataagaaggtgatggtcgatctgaagagccaagtggtcaagatggaatgaagtttggatcctatcttagaacctatgccgccaaagtgtctttgaagaatagttagtagggtagaacgtttgttgtttgcttgtgtgtaggtatggttgcattcccatcattggagtagttcaatgatgagtgtgtaactatactaggttgtttgcttaatcaacttgaacaatataatggtctacacacatcagatcagttttaacctggttaaggtcttgtctttagtgtaacccctctccttctatcttctctaatctgcaacagatggtgaacactcgcgcaagtggaagtggaaacaataacaatgaagataacccaactcttgctcaagttctggctcaacagactcagttaatgaacatgatgatacaacagatgcagaaccagctcaaccaaggaaataacaatgctccaccgccgcagaacaagttagctgattttcttcgtgtgaggccacctaccttttctagcacaaccaacccagtggaagcaggtgattggctgcacgctattgagaagaagttggaactgctccagtgcacggatcaggagaaagttgttttcgcttcacatcagttgcaaggacctgcatcagaatggtgggatcatttccggatgaacagagcagaaggacaaccaatcacttgggtggagttcacggaggcattcaagaagacacacatacctacaggagttgtttctttgaagaagcgtgagttcagggcattgaagcaaaaggatcaaaccgtggcagaatatcttcatgagttcaatcgtctggcacgttatgctccagaagatgtgcgtactgacgaggaaaggcaggagaagttcctggaaggtctgaaggatgaactatcagttacgttaatctcccatgactatgttgattttcagcagttggttgacaaagcaattcgacttgaagacaagaagaacaggatggataaccgtaaaaggaaaatgactgttttccaggaggcacaaggtagtagccagaggcagcgtatcaagccactccaaattggtgaatcctcttccgctggtcaaggacagtcgcagcagttgaacatcggtggtgagatcaaattagagactaatgaaagcaatgaacttaacatcgagcaagctaatcagtcggtgccagttcagcaggatcagtcgaataacagtagtggaagggagcagcaggtatgcttcaactgttacaagccaggccactttgctagagagtgtccgaagccgaagcatccgcagccacaaggtcaagtcaacaacattgtcgtcacaggagccaatgcagtgccagttgcgtcttcaagagttgtgtcttcaagtgttacaactcagccaccagtttcaaagcagcagtagttttctttaaagccttagaataattatcggagtgatggaataagatagactgcagtttgcctattccctttttctttctagccgttccgaatctcgggacgagattctttgtaaggggggtagtttgtcacatcctgattttttgtttcaggatttataaattatttaataaattaataatataatttatattaaatgatctttaatttacaagtgaagttaaatgtgggaaataaaatttcctaaatataaagcatggatggatttaatttttattaaattctccatggttaattatactctctgaaattttctcggatttttcagagctcaattcttaaataatacaaagaacagttcagtaattatttgattctccatggttaattatactctctgaaattttctcggatttttcagagctcaattcttaaataatacaaagaacagttcagtaattatttgatcattaatgatctaattataattgttaagagcttttctggtttaaaatccttaaattataaattgttgtttaaaaggaataattagaaatgattttaaaagcctaaaggagaagatctaattttaatttgctaaatctcaatataaaattgggctagataaaattttgttaaatactttgcttaattctataattcctagatttttctgggatttatttgagctaaggaagtatttttaataaatggaattgcatttaagaaataatttaaattgaaaaaggttttaaaaagtcttcttttggctttggccgaaagccggcccaaaacctctcttctctctctcctcggcccagtccggcccagtccgccgagccgccgctctcctctctctctcgctgtcgctgacaggtggggcccgcttgtcggagccgtcttcctccttcggccgccgccgcccgcaaaccctagccgagccgcgccgccgtcgctttccaattccgtcgctcctttccatctccggccgaattgatagaggggaaatgatcctcttgattccctcttccttttctcttttggaatcgtcacctaattcggtttggaaactcgatggaatcgaggtcgaatcggattcttctctcctccgaaccctagctttccttcgccgtcgccggtcgccgtgggcctccatcgccgctcgctagcccctttaaaaggacccccgagctctcctctatccgccgccacctttgccttagcctgccgtcgcgtctagcgccgcctccgcgtagccctagtcgccgccgtcgttgccgtcggttcagccgcgtcgcgccgccgttgcagccgccgtcgtcagtcgccgtcgccgccatcgtggtcgtcaagtcgccgccgtcctcgtccgcttctccgccgccgcttcttcctcgtcgccggcgccgtccgttgcccttccgccgttgttttggtcaccggtgagttcgccgcgtcgccctctacccgttggtgccctccgttcgcgccgacgtgccgtcgttcgccggcgagcatgcgcgcccgagccgcccgagtcgccgccggtgctgacgtcatcgctgccgtcatcgctgacgtcatcgggatcgtccgccgtaagccggtcgtggaccgtttgatctcggccgtccgttttggatagggttgatctcggccgttcgtttccgtgagccgctgccgtgcacccggtccaccgcaaaccctagccgctgacgcaataatccttcttttcctttttaaaaataattcattattgcgtcataattcaattaaaatcaatataagtgttttaatccgatttaatctttaaaaattcataactaattcatttgaactcagtttaatgtggttcaagttgcaaaagttgtgtaaaataaagatctacattttaaaattgtccataaattgaattaaatttatttaattctttttaaatgggctttaaatagatttaatcttgtaaaattcataataaattcatttgaagtcagaatgaggccgttcaagtctcataaatcatctaaaattatgatctacatgtttgtttactttttatgtactgtttatttggtttttattagtctttttcttcattttgcgtgttagcttgtcgtttccgtcgttgcgaaggttcgcgagtgcgccggaagtattcaagaagattaattgaagaccgattattgcaaggcaagtcacacagatcctaaacacaatcctttgagcatgttgatcctatatttaaattctctatttatttcaactgtgcatttattttcgaatgtcattgggtggaattaacctattctttgttatggcccttttgttcttgattactttattccttgttaccttgggagattataatttgactagttgagctttatatattggttcagctagatattagaggtaattgctttgccatgcttagaaacattagcacacaattgggataactaatgtttcactatcacttatggttatatttaatggtagctcacgatggtcaattgtgattggttaattaattacttgtgattggttaattaattatttgccaactaaaactggataatggtgggttgtgagcacatggttttgagagtcgtgctcatgacaattaaggaccggttcgcgagctactattgtgaaacattaaccgtgccaaccacaaaccagcgtgggcaacggctttaccttttgtatagcatggttcactgcagagcaccaggttgagaagtggcggagataagcccacgggggtcgctggggagtccataccttgtttataagggggtgactatgatccgggaatggtgcactgtggtgagttgtgttgtgcagagggtattgtcacagcctctattcgggtactttccagtatcgcgacgcatggtagacatgatgttgaggctgtgtcttgtgggtacagtggtacacctctggccagagtaaaactattcgaatagccgtgcccgcggttatgggcgagttgagcaatgtttttcgtgattagtctcacacctctcacaataattatggatgttatacctggtaataatttgcttagctcctggtttggagttagatttgttcagccgggtatggttgtttagaatggttgggcctgtgcagcatgggcgtgttgttcagtgttgattaaaatttctgattaattactccactgttttacttcttttaaatgttttgctaaatgctgcttttgcaaatgagcctatattatgccatcctttggtatccttgtgcacttgcatatttgctgtgtggcttgctgagtatgtcatatgctcaccttgcaataatcaatcaacctcagttgaagaaaaaggatccagaaggagaagacgtttggcttataccccagttgagctgcctgtgggagtggagctggagcttcgctagattttattttccgctgcagttttcttcttggtgaggactaagtgcctcataagtaagtatttatcgttctagttaatttgatgaatctgtatattaaattgtcagtttgtgtacctcggctgattcctggacgaggattttatgcacaaataagttcggaaattactagtgaatttccgggcgtgacaggccagcggcaagcggcggtcagaccgacagcatacaggcgggcagaccggcggcggcgacaggcgcagcaggcgatctcggcggtcagaccggtggcatccactcagtcagaccggcagatcaatctcggtcagaccgactttcttcgatttcgagggtaacttttatttccactaaaagttttcagtttttgggtataccaatcattcaccccccctctggttggcttagttcttgtgattcgatcctacaagtggtatcagagccttgttttcttctttggatttttaccgatctagagtttttgccatggctactcccgctaggttttcaactaagcctcatgttttcgatggaacggatttttctcattgatgtagtaggatgcaatcttatattatggctgaagattatgatatttggagaaaagtttctcatgcttatgtgattcctgaagctattaatactgctgctgaaaaaactgcttttgaacaaaattgcaaagctcgcaacattcttttgagtggtatttcttgttcggattatgatcgtgttgttcatcttcaaactgctcatgagatttggattgctttgagtaattttcatcaaggaacaaataacattaaagagcttcgtcgagatctttttaaaaaggagtacattaaatttgatatgaaacctggaaaagctttggatgactatctttctaggtttaataaaattttgagtgatcttagatctgttgattcttcttatgatgctaattatccacaatctgagatttctcatcactttttgaatggtctcgacatgtctatttgggagatgaaagttgcatctattcaggagtctgttaacatgtatactttgactttggattcactttatactaaattgaaaacacatgagatgaatgttctttctcgaaaagttgattctaaatcgagtgctttggtttcttcttcttcttctttggatattgatgcctcttcatctaagtcgtcttttcttgctgttattaatgccacatccgatgatcaactcgaacaaatcgaggaggaggatttggctttggttgctaacagaattgctcgagctatgaataatgccaggaacaggaaaagaggtggtccaaatcgttgctttgaatgtggttcaattgatcatcttcgttcgcattgtcctaagtttgagagaggcaaaaaagaagacaaagatggtgagaagaccaacaacaacaagtccaacaacaacaagtcgaagggttcttaccaagggaggaagatggagaatcttagaaaggcttttcaacaagtttggtatgggtattctattaatcctattaagccctagcccaggatgtcaaattggggttattaaatgatttcaaatggaaaagtcaccaaaaccaaagttgtagaactcatcgaggtgcaaaatttttatttcggtcatttctccatctaactctatttatacaatttgaaattcaaattttgaaaagttcaaatagaattttagatcagtgaacgattcaactgaaaaagtcatcaacaacaaagttgtataactcatcaacatctacagcttttattttggcatttttctatataacattttttttgaaccgtttgaatttgaatttaaaaatatgacaacttcaaacaacattttcaaatacaaaaatatatcaactgaaaaagttatcaacaccaaagttgaataactcatcaagatctaaaacttttattttggtcatttcttcatacgacaaagtgatagtaacattgttcgcaaaattgacatatctcttatctcgtttataaactataacacatatatgtaaaatttgtgaataatattactaacatttcttcggatgaagaaataacaaaaataaaagttttagaacttgatgagttattcaactttgttgttgatgactttttcaattgaaatcatttagtatttaaaaatgttgtttgaagttgtcatattttcaaatttaaattcaaactgttcaaaagaaatgttatatagaaaaatgaccaaactaaaagttgaaaatcttgataagttatacaactttattgttgacattttttccatttgaaatcatttactacccgtaaaattgttttgactcataaaatgaattattatactgcacttaattattttcctatagtcaacttacaaatataaacatttcatatgaaaaatataaaaatagtcatcggtgacgggctttagttaatgcccgatagagattaagtatatagcccgtcactaatgagtcatctgtgacgggcctgttgttatctcaaacgggcctcaagttatggcccgtcacggatgatggtcatccgtgacgtgccacaacttgaggccgagatatggaatgttatctcaatcgggcctaaactacggcccgtcattgataggtgtcattcatgacgggcttaagttttatgcccatctaacatgtctgtacgaccatatctcaatcgggcacttttcggcccgattgagatgactttcttatgacggcccgctatttctaagcagattagagcccatcacagatagaaggatctgtactagtgttaacaaatcataaattaccatcctactgtggtttgtcttaaaaaaccgacaagcacaacactaaaatccactataatatatatatgttgctttgaaagtatggtttctgttggcattaaattaactaagaatgtttatagtcaatctatgtatttatctaaccatgatcgatcaaacaggtacaaaatagccaaggacattagatcgggtctgctctacctacatcacgagtgcgacccacatatcctgcatagagacatcaaaccaggcaatgtactcttggatgaaaatttcaacgccaagctcgccgaatttggcctatcgaggatggcaaaccaagacaatgcaacgttgctgacaactgccataggctcggaagggtaccttgatccacagtgtctgaaacacggtaaggtcccgttcaagcgtagctcagacgtgtacagcttcggcatcgcccttctcgagatcgcctgcgcaaggaggcacagggagcaaatctgggacctataccgaagaggtggcaatgttgtcgaggcggcggatacaaggttaaccattggtggtggccttgatatgagagagatagagcgtgtcatcgtattggggctctggtgctctgctttggagactcaacaccgcccttctatgcggcaagctatggatgtcctggagcgtgacggaccgttgcctgcccttaacagcttgatcgtcgtcaacactactttggcatcaacgacagaggaagacgcctccagtgcgccggcggcgggcaatcgctatgactgtgatgaggcaccactgctgattgaagggtagcagggtgagccatgcatgaccttaactgctgacaatatctcgtaagcaagcacgcatgcatgcttggttcttacaagagctgctgatcgagtgctgagtgcaaattctcatgttgtcactttattatgtaattgccttctttttttaaaaaagaaaaacttgcacggggaggctctttatggcacgagggagcaacggggaggccggggagtggctgttttggggcggcaacggccggcgacgtgggcgacatcgtgggcgaaatggagctccatcccggcgtgatttttgggggaaacgtgaggagagtgtggaggaggtggaggggttgcggttgctctcggtttggatgcgagcgcgcgagtgagaggttgtgaaaacggcggcgtcgtgggcggcatggcggcatggcgtggttgggcttgggatggctggggattggggatggcaggtggggcccatgggtcccacctgtcggcctgaggagagcagagaccggtttgaggggggggaatagacttgaagggggaagcgagctgggccgacccgagagaagaaggcgcgcggcccgcggaagagagaaggaaggcttgagctgaaaattgcccaagggaggaaggagagatttatttggttttctttatattctaattgattaaatgaactttgtgctattaaaattacttcttgagctgcgaaaattcgcgggaaatttgagagagtatattagggcacaaagaatattacaaaatattcccggctaatgatttttaaaggaaattttaatttcctcaataattctcttgattaaattgatttaatttttatttaaattctagaaaatgcattattaaatgattttttaatcccgaacgaaaattggggcactacagttgccggggatgcaagctcttgcatacctcacagactagcgtggagaatgagaaggaggccaagctagaggaggcccgtgtggaggaggtttgatccgcttgcggttcgggcagcttgggacggcggtggcgatcttgcagctcgccgccccctatgacgatgccattgttgctcgggtcgtcctctgctgtgacgatgtcattgttgaccccaccgctgatatgcccaaagctcaacctccaccacccatctcctcacgattcggtggttgatagccctcccaagccagattcctcaagccctcttttgcaggtttcctcttccccaaccttgcccgttgacccaagaagacaacagttctttcgccattggttgaacttttaacttcctttgagtggctggatttgggttccttcattctcattgtttctttttgtagcagcttccatgcagggtttgtgtcgaaacaagatttcggcaatactaaaagggggtggctatcaagctggaaaagtgcatgggtttggagacaaaggatttatacaggttcaggccttcttattcaagaagtaataccctactcctgtccggggatgaaaccgccgagtgtattattgaatgtaagatctcccagaaaattgatgtcccaggaaggactcggacccctccttatatagaggaaggagtccgtattacaaggtataactcatacccctaacagaatacgagaatacagataaaatacaatcgtaaccgactaaacctcagggtatttccttgacgtacaagttaagaaacaaacccgagatacaaataaagatattctatctatattcggtatcatatatccagtctaaatataaccgccgtgtaaatatggggtatctataatctccacagtagcccccgagacctttgcagtcgacaacatagctctctcaaaaataataatccgagtgctttaatttttccctgctaaggcctgccgagtagcaaagacgaagactgtaaagggcgaaaaataaaaaacatggtgcatcgaatagatgcacctaattaggtgttgcccccgactatatgattagttaacaaactaaacatgtagtcaagaacaaaataatcgcataatcatgcatcatatgacaaaagcatatgcggcgtccaacaaaacattcagccgactgctttccagccatagtaaaaagaatccgagtgaataacactctaaaaggttcacaaatgaacatatttgacaggcatccgagtaaaaaactctaaagataatccatcaaatgttataaaaattatggtaattaataagtctaatagcctaggctatgactctcaccataattaaaataggcatataacacgccaagagaatgaccattgtaaaaacaagtcatctcaaatcaacccagatagcttttgcagcctaaaaaagcttacaaaaatagtataacacttttctgtcgagtacatttcaatttgcattgcaataattccgaagaattatataactgcattaaaaaggattttatcagcattgggccacaccattgcgagcataaattgccaaagcaaaaatgcctaagtccctaaggagcacaacgggccacgctgttaataatattgggctgaagtactgttcaggcctaggcacattagcacccccgaaacccttaacaaaaaatcccgaagtctaagcggcgcttcgtcttccccgccggaactctcaccatttcccccattccttgctatagtacagagctgcgccggcgaaactagggttcaccattccactccaatccacctccaaaaagttcacaaaaatcctccacgcaactcatcgcttcaattccacatctctccccagccatccctcgaatcaaatcaactcattcggatcaaatcgatggcggaagaaaaagaaagctttgaaagccaatgggcgtcgtccgacttgatggaggagaacttgaaggagatggtggcgcacggcgttctcccagcaaaggagatcatcggatggcggccagcatttggtgaagctttcctgacccccgatacacatgaggtcgtggtttttttctcacttcttctatggcggatttgctcttccaacctcgaagtttttccgtgggatattgaacttctatggaatcaatttacatcatttgaatccaaactccatagtccatattgcaaatttcgtccatgtctgcgaagcttttttgggcattaggcctcattttgctctgttccgccgaatcttcttcctcaagccccaaccgaacaaaagcaaaccatgcgtagttggaggggctggatttcaactgagagggaccttgagccaaaagtatttttctatgcccttcaagacctcaaacaaaggatggcatgccaactggttttatgtccaaaatcccgagcccgctcttcccgagtactcctgtcttcccctagtataccaagataattggaactcactgcccatgggagatgaagctgcccaagccttagaactgatggagcgcatgctgaagctcaaggagcaaggcttgcagggagagcaaatcactcggcatttcattaagtgccgattagctccaatcaaagagagatcccgcacagctttcgagtttgatggtaaacatgatccaaaccgtgaagacccagattctctggacttaagatcatgaaggagaggatgtacaagatattctcaaacgccatcgttgtcagttatttgcatctgctgccagtcgtgccatataatgcattcaacccatctccgctggtatgtatcagaactcttcaaaccgcgaccaaaacataattttgtcttcttgttgaattaacagaccgtggaggcatttcattcaggaatttgctttgatgaagtctgaccccccaattgctcaacgccgatctcctcgtcatcagaccgttcaggggagtggaggaccaaaaatcaggtcagactcccaatccaaaactcccaatccgactgggcaatcagattctcgcaagagaaaacttgtgctaagcgacgacgaaggcgacgacaataataaatttggggataagggatcacccaaaaaactaccaaagcacactgctccgaagaagaaaaagttcagaaaatcctccaggtataaaccattcggtaccatctcacttcgacatgcttctctcatgaagataatattgaaaactggaagaaaacttgcaggaaaccgtctgacatagatccatccgggaaggactctgatccagctaacacagagacaggttcatccaaagaagctgggccgacttctgaggaccacccgactggcgttcagacttcaactgattatgtcaacccaagcgaccagcccccgactggaaaccagttggcagaagcggaaactgcaacaagccaagagcccccgactggcaatcaatcggaagtaggtccagatcaagaaattcctgaagttgaagttcaggctacaacttcccaaggactggacgctggtaacgacccaacgcctgggtccccagataaagggcaaggatcgcctcacgctcaaccggaaattgcttcaggtaacccatcttctcaagtaatgccaatctgaataactccgacttgcttgtctaatgtttgggaatacatcaggaccactaggcggtgacggagaagaaatccctcgcataaaggcaactactgattctcgtccccccatcttaatcaaatggtgggacgacaacttgcaacctgcaggcattgtcataaatcgacagaaagaagacgaagaggtgcgccagctaaagaaagcactcggaagaagctacccgcattgtaaatgtaagtcttccaggtggctgcctttggcgaccttgtttccttctcagcaagactaaacagtgaatcattgcatagagaatccatctccgtaatgaggccaaaaccacaactttagaaaagccggttcctcatttaggggcccttgaagtggttagggatcagctacactgtcacgcccggaatttctatccaaaattccaaacgcttacatgtgtgttaagccctcgtccaggaatcaaccgaggcacacaatgacaatattgataatagagtacaaatatttaactatggaatattcgaaaataataaattattacagaggtggatagttcctctcaaacaaaaataacattctacgcagcggaaaataaaactatggcaaactacggaacagcgatggcgactccactccacaggcaacttaaccaagaacaagcctagtcctccagatcatcaccttcactgaagtactcctcttctgatgaatgaatattgcaacaatgagcatataacatactcaacaagccacacagcaaatatgcaagtgcacaggataacaaaggatggcataatatagctcatttgcagaaaacaacatttaataaatatttaagagaatagtaaaacagttgaataattaatcaatattaaataaacaccatacaacacacccgtgttgcatatggcccaaccacatttgaaccaccaaccccaattggacaaattaaacctcca

SEQ ID NO: 29852 - DNA, 10938 bp, Oryza sativa
aagaaattcgcaaatatccatttaaagagcatataaacttcaaatggccatatcttggccatttgaactcggaattggaccgttcaagtctctaatttttccttaagaagtcaagaacccatttttgtgctttgtttctgctgttatgtggagtttattagagtaaaagcctttttcttttccgttggtcgtgtagacgctgcagcttcggaagatccgctcttcgtggaagttgaagccgacgtttgggaaagcgagcaaggcaagtcacatcatctttgagcatattgaatcccagtttataaaattatgttgatttaaattattgcattatcgctttatttaaattcccgcgttatcactgttttatttagccatgcctatttacctttgttatgaccatattattattgttattggtattattattaccttgttcaccctagattaaacaaaacctcaactagtggacactctactcatggcaccactagtttaattttaggtagatgcttcgcaatttaattaggtaacattaggtggtttttcaactatagactttgggaaatattcatatcacctggacactttggaactgttggattattgtggaattggattcacaccgccccctctattcaaaatccccaaaagaggttttaggctgggctcggggtgcatggttttgatagtagcacctcggccatataaggaccggtcttcgggcctctgttgcaaagcactaccatacttccacatgtctagtgggtaaggcttagtttgttgctcagtctggtcataaacaaaagtgcacggattggagatggatgaagtcgggggtcgatggacattctccagggtaaatgaaggctacacgagctgcggcccggtagtcgagatgtcatagcacagagttggtgccctgctgctaggggctcagtcctgcctgcctatcccggaggttccggccgtaggtgggattgggtcggtactcttgtctatggctaggatgggttggaaactatgtcacgtctttcgtctgtataccgtggtggtatgtggcacgtggttgcacgtgagaaagatgtgtcttgtgggtaaagatgtacacctctgatcagagtataatctattcgaatagccgcgccctcggttatgggcaagccgagcaatgtacccaagttagtgttttaattcttaaaatttgctcaacaactaaaatgtggaatggttggcctgggttggcttgggacgagctgggacccagggtcgggttgccagttcggtctgaatcatcgtaggccttgggttaaggcaggttcgtgtgggttcacggccttgattaataacattgtatagttctaggatcgggtttacaaaatagctttgagcaactaaatgtctttaaatgctgtttactgcaaccctaacccctttatggtataattcccttgtactcccttgcatttattctgcatttgtgggtgtgtcttgttgagtacggtggttgtactcagtcttgctcaatttttcccaagcccagaagaggagctccttgaagatgaaggctttggtgtctagctcgtgcctgccgtcaagcgcctgtggtcgtcgccctagtcttccactgtttcccgtttgtctttgtgtgtgctgggccttcgctgcccatgtaataagttaactatttacgcttccgcttgttaaactctgaattgtatcaactgttggtgtaccttgcctcctgggacaaggattaatgcacgcacgtcaggaacgcccgttgggttatttccggtcgtgacaaatacccagcaagtccaaggaaactacgaatttctgaaaccgtcttgggttgcttccaacttaatactgactccacattgcttggatctactgccactcctccagacgagatgacatgaccaagaaacttcacttcggacaaccaaaattcacatttactgaacttggcataaagctgatgctcacgtagtttctctaaagctagacgaagatgctcttcatgttcttctttcgtcttggagtaaatgagaatgtcatcgataaacaccacgacaaacttatccagatattccataaacaccttgttcatcagattcatgaaaaaggctggggcattagtgagtccaaacgacataacggtacattcgaacaaaccataccgagttgtgaaggcggtctttggtatatcttcctcacggattcgaagttgatgatatccagaacggagatctatcttggaaaaaactgtagcaccttccaattgatcaaacaggtcatcaattctaggtaaagggtatttattcttgatagtaacctcattcaacgctcgataatccacgcacattctttgagtatgatctttcttctccacaaagatgactggtgctccccatggcgaagtactgggtctaatgtatcctttctgaagcaaatcatccacctgtttcttcacctctgctaactcgttagctgccattctatatggtctcttatggatagggttagttccaggtaccaagtctatccgaaactctatgtctctcttaggtggcatacccggcaaatcctcgggaaacacatctgggtagtcttgtactataggaatctcttgtagagcaacttggtttaaaaccacaccatgagatttaggagaggacgcaaagaaagaaacagtttccccattgctattggttaaagtcaccttacggttggcacaatctataactcctctatgacgagataaccaatccatccctaagataacatctaggtctttggattctagcaagataagagaggatgggaaaagaacttcttctatttctatagtaacagaaggacaatactgtgtcgaaaatacttgattgcctggggtattaactagtaaaggtctcccaagactaataacttctatcccatgattgcttgcaaaacttttagacaaaaaggaatgtgtagcaccggaatcaaaaagcacagttgcgggtatagagttaacaggaaacgtacccaaaaccacatctggtgcattctgagcttctgctgctgcaacatgattgacacgggccttcggtgctggagcactggagttgttcggggctggagcgttcttcacacgccgaggcttcggacacttatcagcataatgtcccggatcaccacaattgaagcatatcactggtttgctcccctgctccttcctaacgggctggttctgaactggagttgctgcaggacgagcaaccacactgcggttgtcattgccacgattaccagtattgttgttgtagaactggcgttggggacggacaactgatgaagatcctccttgagggtacgatggaacttgaggtccagtaacgagtcgcggcctctggttactgccttgttgtgacttaaattgagcagccctgcgcttcttctgctccatacggttatacttgtcttcctgacgaatcgccttgtccaccaattgttggaaatcccggaaatccgtagacatcaaagcataagacaactcatcatttagtccctccaaaaacttctcctgacgttcttcatcagtgcgaacatcctctggagcatagcgagctaaacggttgaaatcatggaggtactcggtgaccgaacgagatccctggttgagtgctctaaattctctcttctttagagctacaacacccgttggtatatgcgtcttcttaaaagcagttgtgaattcctgccaagtaataggttctcctcccgctctgccttggcgaaaatgatcccaccattcagcagcgggtccatgcaactgatgcgaagcaaaagaaactttctcctgctcagtacactggatcaagtccaacttcttctccaccgcatgcaaccaatctcctgcttctactggattggtggtgctcgaaaaagtagggggactcacacgcaagaaatctgccaacttgttttggggaggtgggggtggattctggttttgattatttgcctgctgattctgtgcctgctgcactaacagattgatcagttgtgtttgttgagccaaaatctgagctagcgttgggttctcttcattgttattggctccacttccacttccacttccagtgccagtgcgcgtgttcaccatctgacgacaagcagagacaacaaggaaagaacgacagagagacacccttagaacggagttattcaattaatttaaattctatattgctcttaactgtgtatgattacatttaagttgcattaacactacctcaccaactttcttacactctgacaagcaaaagaactagactcatgctgttacatcccacccatgatgtaagcaacaactaaaacccacacactcacaaacaaacttaagcaagcaatctaacacagcgaactacggcaacgatctaactaagcgactaattccgccttgcgtcggaacgaagcgatgaatcttcttcctctggagtagctggctctctttcttcaggatcttcctcttcttcctcatcactaatgatgtcgatgacaggctcaacacgatcgggcacagcttcacccatcacgcgaatcttcgaagctaactggagacgagggggcggacaggttctctttcttgcagtgaggcgaagctaggatgttggcggcggcgtttctcctttaagttcagctaattccttctgtaggcggtacaccttgctcttcaacttgcaaatcttgcctcgattccagttttccctgtcatgagctgctttgtctcgctccacacttactgcatccatagcactaagcatatgcaccgcatgcatcagagtggcactctcttcaccatcaggacaggtataggttccatagtcttgaccatgaggcttgtggggatgatactggaaagctgatgaatccaattcttcttcaaagtgttgacgcaactctccaatggccaccaaagctgcttcttgacaagcatggcagtacgatcttcctccagcttcgaacttaaaagacggaaggtcttcactatcactagccaacgtcacacgaacacgacatttctcctcgtcggggtcatgggaaatctggcgatactcgggagcaacttcataacctacttcaaaagccatcaacctcagctccctgacgaatcctaacacctcgatcaaatttcttggtgaatggcgaggcatctaaagaaacatagaagagaagaattattgcatatttttctaagttagctgcaccaactagacttaactgattttgaccaaagaggaaggaattaaaagagaagacacatacaaaaaccattttataaatatattttttttagaatttaactttttggacagagacaagtatatttttttttgacaaataactaaaataaaactaaaatacttatgatctattataagcacggtacagtgtcaccataaggaagatgagtagtactagtgctaacatgattaaatcgataccataataaatgtacagtgccgactaatcaatgaaatttggtaaagagaaagaaagaaacattttgagaagagcaaccttttgcttttaaaagaaaagaaattgagtttcaataaattttgtgcataaccttgcatgtgctgccaacttaattaatttgtaagagaatagagaagagcagttctatttttttcaaaaatattttgaaggctacttaaggtttaccatttagcttatcctaaagtcaaggtggctctgataccaacttgtcacgcccagaatttctatccaaaattccaaacgcttacatgtgtgttaagccctcgtccaggaatcaaccgaggcacacaatgacaatattgataatagagtacaaatatttaactatggaatattcgaaaataataaattattacagaggtggatagttcctctcaaacaaaaataacattctacgcagcggaaaataaaactatggcaaactacggaacagcgatggcgactctactccgcaggcaacttaaccaagaacaggcctagtcctccagatcatcaccttcactgaagtactcctcttctgatgaatgaatattgcaagaatgagcatataacatactcaacaagccacacagcaaatatgcaagtgcacaggataacaaaggatggcataatatagctcatttgcagaaaacaacatttaataaatatttaagagaatagtaaaacagttgaataattaatcaatattaaataaacaccatacaacacacccgtgttgcataggcccaaccacatttgaacaaccaaccccaattgaacaaattaaacctccaaaccaggaattagccattccagaccaggaattaaatcaattacaccttttcaccaataatgagtagtgtgagactaatcacgaaaaacattgctcaactcacccataaccgcgggtacggctattcgaatagttttaaactctgatcagaggtgtaccactgtacccacaagacacaaccccacatcatgtcaccatgtgcctcagtaccaccacgatacctcggaaaggagtcgtgacaatacccctcgcataacacaattcaccacagtgcaccgtacctggatcataatcacccccttataaacaaggcatggactccccagcgacccccatggacttctcgccacttctcagtctggcgcactataatgaatcacgctatacaaaagataaagccgttgcccacgctggcttgtggttggcacgataaatgtttcacaacagtagctcgcgaaccggtccttaattgtcatgagcacaaccatcaaaaccatatgctcacaacccaccttaaccaggttttaattatcaattaattaacatcacacgatttaccatcgtgagctaccattaaatgtaaccataattaataataataatgtaacatagtttataattaatcccctttagttagctaatgtttctaagcatagctaagcaaacttacatatagcatttagctgaaccaatccaatatataaggttcaagctaatcaatttattacccaaggtatcaaggaatagggcattcaatgcaaattggctataacaaaggagtaggttcacaccacccggtgacattcgaaaataaatgcacagttgaaataaatagagaatttaaatataggatcaacatgctcaaagggttgtggttaggatctgtgtgacttgccttgggcttccacaaacgcttcggaaccttcctcaacggaaacgctctcctccggaacgtcggaaactaaagcaaataaacaaaatcaacaaaacagtacaaaaacaagcataaacagtacatgtggatatttttaacatgtagatcttgattttagaaaagtttagaaacttgaaccacctaaaacggatctacggttatttagttatgattttccgaagttttaatctattagaaaatcgagaaaaaggaaaaagagagagagatgacgtcagccctaaggatgatgacgtcagcccttgcgatgacgtcggcatgacgtcagcacgacggccggctcgggtcgacgagctcgccggcgttagggaggttggcggcggaaacggagaccatctacacgtagaggacaacgagacgaacccgttggtactcaccacgacgagaaacgatgcacgacggcggccggcgacgagaaggaagacggcggcggctcgggtcgacggcgacgagcgagctccggtggtcggcggcaggaaagaaggggcggccgagcttccttgcaccacggcgcacctcttggcgatgacggcaagcgacggcgacggcggagacggcgcggcggcgttgctgaagacggccggcgacggcggcggacttggagagcgtcgcggcggcgctaggaggcacgggaggactcgggagagggggcaaacggaagaggagatcaaggggaagctttatatgagctcggattgaagagatcgagctccaaacgggaggaatcgaatcgggaagaaatcgaactcggttttagggataaaaccaaaacgaactcgattcggacccaatcctcaacgattctctttgattcttgggggaaaagaaagaggagaacgagaggaacaaaacccctcaaaatcccaaaggaattgggctcggatttgggcgcaatcggagcgggaagcggcggctagggttcgggttcgcgcggcggcggccggaggtcggggacggacctgacaggtgggccccacctgtcggcctccgtgagagaggggcgggcggcggcggcttgggccggcgtgggccgcgcgtggggagagagagaaaagggagagttgggccgaaaacggcccaacggcctaagagggggatttttgaactttttcgaataaaacaatttgtgaaatgttgtttcaattattaaaaatacttcccttactcaaataattcccagaaaattctagaaaatagaggagcaagcatagtatttaataaaattttatctagctcatttttatgttgaaaattttcctagaaaattagggtttagcttgtaggcttttaaaataatttctaaaaattccaattaaaccacaatttatatatttaagatttttagggtgtgacaaacctaccccccttaaacagaatctcgtcctcgagattcagaagaactagcgaacagatgaggatgagctgacttcaattcatcttctcgctcccaagtggcttcttcttccgaatgattactccattgaaccttgcagaaccgtataacacgattcctggttttcctctcacttacttccaaaattctaactggcttctcaacataagttaaatcttcttgaagctctatacgatcaggatctgcttcctccgtaggtactcgtaaacatttcttcaactgagacacatggaacacgtcatgtattcccgccattgacggaggcaactctaactgataagctacttcacctcttcgactcacgatcttaaaaggtcctacaaaacgcggtgctaatttccctttggtttggaaacgatgaacacctcgtaacggcgtgacccgaaggtatacataatctccttcttcgaaaaccaaatctctgcgacgattgtcggcatagctcttctgacgcgactgggcaacgcgcaacctttcttggataatcttcactttttcttccgcctctcgcaatatgtcagtcccaaaaacttgacgttcaccggtttgatcccaaaggagcggcgtacggcactttcgaccatataatgcttcattcggagacatttgcaaactagcttgataactatggttatatgagaattccgcatacggcaaattcttatcccaacttccaccaaaatctagaacacaagctctcaacatatcttctaaaatttggtttactctttccgtctgaccatctgtttgagggtgataagcagtactgaaattcaaacgggtacccaattctgattgtaacttctgccaaaacttcgaagtaaactggcttcctctatctgacactatcttcttaggaacaccatgcaaacataccactctggccatgtataactctgcaagcttattccccgtgtaagttgttttgaccggtatgaaatgagcgactttggtcaacctatcaaccactacccaaatagaatcatgtcctgccgacgttctgggtagaccggttataaaatccattcctatttcttcccacttccactctggaatcttcaatggttgtaacagaccggctggcttctgatgttctgctttgacccgctgacatacatcacatagagccacatattctgctatctcacgtcgcatactggcccaccagaattgtagctttaagtcttgatacatcttagtgcttccagggtgaatggaatacaaagtttcatgtgcttctttcatgatagtatccttcaactccttattctctgggacacaaattctttctcctaaccacacagttccttgctcatcttctacaaaaccgatggctttaccccttctcatgttcttctttatttcctggatatcaggatcattcacttgagcttctctaacttgatcaaacagagtaggtttagcttctaatgcggccacaaaacctttactgactattcccaagttcaacttttcaaattcttggcacaactcccaaggtaaacgttgaccttctgacatattacagtagcttttcctgctaagagcatcggctacaacatttgccttccccgggtgataatggatttccatatcatagtctttaatcaactctaaccatcttcgctgacgcatattcaaatcaggttgagtgaaaatgtacttcaaacttttatgatccgtatatatttctgtacggttaccgaaaagataatgacgccaaatcttcaatgcatgcaccacagctgccaactctaggtcatgcgttgggtagttattctcatgaggacgcaattgcctagatgcataagcaaccacctttccttcttgcatcaacacacaacccaaaccgagtcgggatgcatcacaatacacttggaaacctttcctcgaatcaggcaaaattaacacaggcgcagtcactagccttttcttcagtacttggaaacttcgttcacaatcctccgtccacttgtacttcacttccttctgaagtagacgagtcattggtctggcgatctttgaaaagttctcaataaacctgcggtaatactgtcacgtcccaaaacgactctaaaatacatcctcgaaattatgcaaagaataagtaaaatccatgtgaaagcctccaacaattaaaatgtgcaaatgtaaaagtcaaataaggcttggaggatttttgtatatttcctaaaagcctaaaatgcgtaaataaattttagtggaattttcagagcacaaata

SEQ ID NO: 29853 - DNA, 5729 bp, Oryza sativa
gctcccgtcggccgtgccggagaggccgccctcgggcgcgccctcgcggctgccaagtgggcccggccgtccgccgcccgcgcccgcgggtgcggctgacgcgcggaacccacggcgccgaccgccgccagccgcgtgcgcccggtccaccgtggaccgtggggctgacgcgtgggccccacttcccgtggacccggtccgcgcgcccgctcccccggctgacgcaataaataggattttttaattgaaaattaaatgaagaaattcgcaaatatccatttaaagagcatataaacttcaaatggccatatcttggccatttgaactcggaattggaccgttcaagtctctaatttttccttaagaagtcaagaacccatttttgtgctttgtttctgctgttatgtggagtttagtagtgtaaaagcccttttcttttccgttggtcgtgtagacgctgcagcttcggaagatccgcttttcgtggaagtcgaagccggcgtttgggaaagcgagcaaggcaagtcacatcatccttgagcatattgaaatcccagtttacaaaattattttaatttaaattaatgcattatcgctttatttaaattcccgcgttatcactgttttatttagccatgcctatttacctttgttatgaccttacttttattgttattgttattattaccttgttcaccctagaataaacaaaaccccaactagtgggtactctattcctggttccactagtatgaatttaggtagatgcttcgctgattaattaggcaaccttaggtggttttacaactttagactttgggaattctcatatcatttggacactatggaatggttggcttatgttggaattggacacacacctctcttcctctttcaaaacccctaaaacctgtttttggtggggtttgggtgcatgccagttgtgggaagtagcaccccggccactataaggattaagctcgggcctctgttgcaaagcactaccgtacttccacatgtctaatgggtaaggcttagtttgtggctcagtctaatcataaacaaaagtacacggattggagatggatgaagtcgggtgtcgatggacatactccaggacaaatgaaggctacacgagctgcggcccggtagtcgagatgtcatacggcagagggttggtgccctgctgctaggggctcagttctgcctgcctgtcccgggtatcccggccgtaggtgggattgggtcggtactcttgtttatggctaggatgggttgggaactatgtcacgtcttccgtccgtataccgtggtggtatgtggcacgtgtttgcacgtgaggaagatgtgtcttgtgggtaaagatgtacacctctgatcagagtaaatctattcgaatagccgagccctcggatatgggcaagcctagcaatgtacccaagtcagtgttttaattcttaaaatttgctcaacaactaaaatatggaatggttggcctgggttggcttgggacgagctgggacccaggtcgggttgccagttcggtccaaatcatcgtaggccttgggttaaggcaggttcgtgagggttcacggccttgtttaataatactgtgtagctctaggatcgtctttataaaatggctttgggcaactaagtgacttttaaatgctgtttactgcaaaccttaaaccctatattattatccccttgtactcctttgcattaattgtgcatctccggtgtggcttgctgagtactgtggttgtactcattcttgctcaatccttcccctcttcagtaagagaagctttggagaagatgtcttaggtggagtcctggcttataccccagttgagcgcctgtgaagatggagccgtaggcccgctagcccgctgctgtttatttttgattgtcaggccttaagtgcctttgtaataatgtaaatattatcgatataataaagatgtgtcttttatatcatgtttgtgtggtgtaccccggcttttcctgggacggggattaatacactagcgttcgggaaaaggcaattttcccggtcgcgacaagctggtatcagagccatctcgactgtaggataagccaagtggataaaacctaaggacatattttataaataaaattatttgcgaaagttcctttttctccttcccctaatgctatttgcaaaaggtttactccgttcttccttcttcggatttcaactagtactagatggtcaggtcagtgaagaagaagatatcgtcagttgtttgccgaagctccggaagactgcaggatccgctagcgaagcgaaggaagcagtgaagccagctgtgaagcaggagtgaagatcttggagaacccgtcgcagaacctaagccaccctctagtgtttcgtttgtcgtgtgtttccttgcttgtgtgtgtagcgcgtggtttgcatcggtgggttgtgatgtaaccatgctaggttgtttgcttaatcaacttgcagaataagcaaaacaaacaacacatcaataaaaagagttagttcctttaaggtcctgtccctagctctggtctattctttccttgtatgcttcctctctcaacccctaccttgtgacagatggataacactggtaacaaaggctatgggaatgatggatccgatgactcaagaacccaagccaatgggaatgagaaaagcatcaacgaaacctcaccagagctaatccaaattgtggttaaccaaaccaacatgttggcaaccgcctttcaactattacagaatcggaacaacccagcaggggcaaccaacgttcaagtacctacagtccagcaacagtgcaagttatcagaatttctcaaaacggggcctccaacctttgccatggccgtcgatcctatggaagccagtgattggttgcgcacagtcgagaagaagctagggttgattcagtgcaccgaccaggagcgggttggcttcgcaactcatcagttggttggaccggcttcagagtggtgggatagctacgaagcatcacggccagaaggacataccatcacctggaacgagttttcatctgtattcaagagatcacatgttcccgcaggaatgatcacactaagaaaacgagagttccgctacctgaagcaaggagatttgaccgtcacagagtacctgcacgagttctatcgtttggctcaatatgcaccagaagatgtggaaacggatgaagacaaacaagagaagtttctccaggggttaaaagatgagcttgcagtgcaactacttctagaggattatgaagattttgagaaacttgtggacaaagccatgcaactcgaaagtgagcataatcggatgacgaactgcaagagaaggatggttaacaacccagtatttccaggtggtaaccaaagacagcgcactgagccacttcagatcaccggatcttctgttgtgtatcaagagttcctgccccaagaagatgaacgcaatgcaggcaacaacaatagcaatactaatgctgatgataccaccaacaaccatggttcttgccccattcatgaccacttagatcaagcgtgcaatgtcaacatcattcaccaagatatcgacgatagtatcaatgaaggcacccagaatgacaaccctagcaattttgactctgggaaggactccaatggtgatagcaataatggtaccactgatgccaatgttagcaaggattcccaaccaccaattccaactccaagtcaaaatgatcgtccccagatggacagctcagtaaagaagacgttgatttgttacaactgcaaagaaccaggtcatttctctagagattgtccacagccgaagcgtaacctgcgccatcactccggccattatgcaagaagaagacaagtcactcgccttgtggtcactggagcaaacgccgtacctgtgaggcctcatgttaattctaacccatagtagatacaatgtaccgatgttaagcaccgtccctttttgtttaaggcagtgccccgtattcatgtaatgagggagaaatgtgtaatacagacaagttccatgaggattcgtttgaaagatgcggatatgtgatcatgtgtataattgtttactgacaaaggagacctagggtctcgtgtcagaggaactatattctaacctcgagttaatagccaacctgtggatggaaaagaaaaacaattaaactgtgttgggttaaaaagccaacgagacagtagttgaggataggagtttggatacgccttttacagatcaagataaggattgttggaggaaaccccgaagggtacccgccatacctctacattgataagatcggatatacctgccaacagataaggagatccaggagacatcaatatttgagaacataatagtcgatggttggtaattagtttatctggtatcagaaaaaggtcaaaggtgatgtggcagaagaacaatttggatgctccccatctcgaggaagcactaaagatgaccatcggcaattaaaccctagtggtatagatacagatagcaggcaatgtatttccctgaaggtagtcagtgcagcttttgacgagccacatcaaggtttcactgaaaggcagcaagccaaaggacctcatcatccccagaagcgtccgcaatccacattcaagaataccacctgttagagataagccgaaagatgattgataaaagagattggcaaagatgttctctagcatgaaagaagtaggccgaaaggtgattgataaacagaaacatgctctgcatcgctcaaggaagacccctgattgtaattgccccgcaacagtcaccttgtcattaagtaagcaagatgacctaggtaaaagtgtttctatgaaggcaaggagtgaaatcttcaactcggtatcagatgctacacgaagtgaaaagtgcaagcaccggttaccaggtaatgccaagtcttgggagatgatccaatgggaaagaacacatcaaggttaaaagtgtaaaggaatacgttgaatgctaactgaggacaacctgaagataataatgggaagtaaactgaatgtaaagaaagtgaatccgagctgcttgttcgtgagagccattcccagttatagaaccagtgatatgttcgaagatagtctatagaggtcagattaaaatcacctctcacaacgaagcctcagatttgacagggtaatgattagacaataacaaatccagcagtaaagccatttgggaagacgtcaaagtataacaagtaggataagttggctctcttgggaagcataattcaaaggtaaagttatcgacccttgcatcaaatagcagaagtagctatcacccggagaccaggaaagctaatatgagacagttgatggcgagttagaagcaaatgacaagcatggtatcctagtaatgacaagcaggttacgacgcatgacatgaagttgataacttgtccgaggttgactccgaagatatgaatcatgagaagttctggaacggaagcatcactgaactaccgcaacttagtctgagtcagccaaaaggtgcaccctggtccaagtcaggtgaagagaagattccatccgcaacaggaggtcaagccaagcagttccgagtggtaaagttttgctggaagttcgtcaagacgcaacggaagaagtcagacaagaagagaagaccgcccaacctatcttcttgctagcctcctcgaatt

SEQ ID NO: 29854 - DNA, 2179 bp, Oryza sativa
acagtagttcatcatcacgtcttccgtccgtataccgtggtggtatgtggcacgtggttgcacgtgaggaagatgtgtcttgtgggtaaagatgtacacctctgatcagagtaaatctattcgaatagccgagccctcggatatgggcaagcctagcaatgtacccaagtcagtgttttaattcttaaaatttgctcaacaactaaaatatggaatggttggcctgggttggcttgggacgagctgggacccaggtcgggttgccagttcggtccaaatcatcgtaggccttgggttaaggcaggttcgtgagggttcacggccttgtttaataatactgtgtagctctaggatcgtctttataaaatggctttgggcaactaagtgacttttaaatgctgtttactgcaaaccttaaaccctatattattatccccttgtactcctttgcattaattgtgcatctccggtgtggcttgctgagtactgtggttgtactcattcttgctcaatccttcccctcttcagtaagagaagctttggagaagatgtcttaggtggagtcctggcttataccccagttgagcgcctgtgaagatggagccgtaggcccgctagcccgctgctgtttatttttgattgtcaggccttaagtgcctttgtaataatgtaaatattatcgatataataaagatgtgtcttttatatcatgtttgtgtggtgtaccccggctttttctgggacggggattaatacactagcgttcgggaaaaggcaattttcccggtcgcgacagaaagtaacaaggcagaattggctgcacaaagggactcggctttgaaggaggttgaaggtattgtcagccaacaacctgagtttctctctttgatgcagcagatcattgacatgaatttgttattgtagaccgcaagatcaagtcccaagcccaattcgacgtcctggttggcaagatcaaaagacttgaaggagccagggatgaggtcgccaatgccgctaccccgcttgtccaggcaatgttctataataacaatggtccgagtagattcgatgcttccgaagtatttgacaagctgagaatcgctccggacacctatttcaagaatattaaagaagccggaagcatgggagcaggtttagcgctagcaatgaccaaatccctgtacccgaagatcgatattgatgccattgatggttttacggatgggacaagcgaagaggctgcccttgatcttatcaacgacactcaaaaagcagccgacaagattgcaggtgatgtcgtagatcggtttcaggataccgaccttcggccgactggtaacaataactctgatgatgagaagactgatactgattaaatgtaaatgtattggatgacgaatgatggaggcacaatttgtataataccggtgtatttatgctgtgcttggtgtttcttgctaagctgttgatttcttaaaagcctttatcaagctttgttgagcctaaaacccgcaaaagctattaaaaactttcagtcctcgtaaactaagtagaaaaatcaagcaaggcaatgatagaccaagtaagcaaattgaattgataaaaatcacactccattattattatagtagcccccgactgacaacctcaagaaaaaaaaggcttgatgttgacagtcaagatagggaaatacatagagaaacttaagcgtagaaacgacgaagatgttcgatattccaagaattgtcaacaagtgtaccatcttcacgcttgagtcggtaggaacctggccgggtgacttcagagattataaatgacccttcccatagaggagataacttgtgccgatctcgtgtagtttggattttgtcacgtcctgataaattcatcccgaaataaaaatcattttctaaaaggaataatagaattaattaaaattcgaaaagaaattggcaaacactaaaatacgtacaagaaaaattcgaatgtggcccggagaatttttgttaaattctccttggtctaaaaggagccctcaaattttacttgaattttcagagcaccggaaataattattaagcaacaaaaacaattattagagtttattaaaaagaaaaacctaaaaataaatcctcttcctcctttgggccaagcccagcccaaaggctccctctcctcc

SEQ ID NO: 29855 - DNA, 12950 bp, Oryza sativa
tgtggttgtactcattcttgctcaatctttcccctcttcagtaagagaagctttggagaagatgtcttaggtggagtcctggcttataccccagttgagcgcctgtggagatggagccgtaggcccgctagtccgctgctgtttatttttgattgtcaggcctgaagcgcctttgtaataatgtaaatattatcgatataataaagatgtgtcttttatatcatgtttgtgtggtgtaccccggcttttcctgggacggggattaatgcactagcgttcgggaaaaggcaattttcccggtcgtgacaagctggtatcagagccatctcgactgtaggataagccaagtggataaaacctaaggacatattttataaataaaactatttgcgaaagttcctctttttctccttcccctaatgctatttgcaaaaggtttactcttttcttccttcaaatttcaactagtactagatggtcagctttgcgaagaagaagatgtcgccaattgtttgccgaagctccggaagactgcaggatccgctagcgaagtgtaggaagcagtgaagccagctgtgaagaaggagtgaagatcttggagaaccagtcgcagaacctaagccgccctctagggtagagtcgttagttgtgtgtttccttgcttgtgtgtgtagcgcgtggtttgcatcagtggggtgtgatgtaaccatgctaggttgtttgcttaagcaacttgcagaataagcaaaacaaacaatacatcaataagaagagttagttcctttaaggtcctgtctctagttctggtctattctttcctggcttgtttcctctctcacctcaatccctgtaacagatgtttaacagagaaaaaggaaagaatgtcagcgggtatgcctccagtaactcaagttttcaactcaatccaccactggcctcaagagagttaaccagggcacacccttggtccattccaagcatgctgcttagttcacagctaccattggttggaagtcaagaccaaaatcagtatgtgtttgatcgagcctttgccacccaggtcaatgagcttccaatgccagaagagcaggtccccttttgtcatgattgtagagagcaaggacactatgccctgaattgtccatgggtatatgtcaaagaagccccttcccttggtttagcagggcagacatcgctaaaccagcctcctcacaccaagtcaagcttgcagcctagtgtgcaaagtagagagctcaacggagagaatccattgaatcccgggaaatactttcctcctagcctctcgtaccacgtggggtcacatactaagcaagccaaaggcagaagagtaagaatcagaagagaaaagccccgatgcgaactgaagaagaagtacgtaagatgactattaccagcaccgaatggcctccagcagggataactattcctagacgtcaaagaggaaatactttccgaggtgcacgacagttgacccagcacctcctaagccatggtggcagagtatctgatagtgaagggtcagatcaagtctccttggatgatgaagatgagtctccccgacatctcggcgaggaagagatggaatcaaaggcatgcacccgttgcggggaaattgaacacgttgctagcatgtgtctcacactctgcactcattgtgaagaagaccatccaccaggggagtgtcccacccgcaaggtcacatgttttctgtgcgaaggtacaaaccatgtgcccaaggattgccaactcagtgtgttgttgaccaagaccgcagaaatccaacgaacaaccctacgattgtctcatcagctagtcagctccaacagcaacatcgacgatatcatccacagcaccaatgctcctcctgctgcacctgaccctgcaataaatcatagcgataataccttcagcaccaaccattctctgcaccgacagcctcagcaaagaattgtcgtcgatgaaagaagttgtgtctctccccgacctactccaggccaagcaaagggcaatcaacctccggagggcgataccaagcggaagaccgttattcgcctcaaccagcaaccagaaggaaacttctcctgtgaatgatagcaatatgcagtcctatcacatcatcacagaaccaatcaaggatgcagtcactagaacaatgccagctatgtatccatgtttgtgattttcagttcgctacttatcactgtaatcgggagtttgcagcaatcatgtaataaataaatatattcatgattataaacaatgagtttgttatgtttatggaagattcatgttgaggatgcaatgtaccaatgctaagcacctttccttttaggcaatgcttagtattcatgtaatgagggagaaatgtgtaatacagacaagttctatgaggattcttttggaagatgcggatatgtgattatgtgtataattgcttactgataaaggagacctagggtctcattccagaggaactatgttctaacctcgagttaataatcaacctgatgatggaaatgaaaatcaagcgattaaccaaagagacatttgtttggacaagagtttcagatgtgtctttttcggatgtcagggttgaatgtgtaaaggaatactttgaatgctaaataatgacaacatgaagggaatagtgggaagtaaactgaatgtaaagaaagtgaatccgagttgcctgttcgtgggaactattcctagttatgaaccaagtgaaatgttcgaagatagtctatagaggtcagattaaaatcgcatctaacaacaaagcttcagatttggcaggaaaacgatcagacaataacaagttcagcagtaaagtcaattaggaagacgtcaaagcatgtcaagtgggataagttggttctgttgagaaacataattcaaaggcaaagttatcgacccttgcatcgaatagcagaagtagctagcacccggagaccaggaaaactaatatgaggcagtttgtggcaaattagaagtaaatgacaagcatgatattcttatgatgacaaacatggtatcctagtaatgacaagctagtgttgacgcatgacatgaagtggtaacttgtatgaggttgactccaaagatatgagttataagaagttctggaactgaagccccatcttccaatgccgcagcccagtcgaagtcagctagaggtgcaaccagggaaaagtcatgtgaagagaagattccatctgcaacaagggatcgagccaagcagcctagagtggagaagttttgctaagcaagtttgttataaaagacgcgatggaagaagtcagacaagaagagaagaccgcccaacctatcttcatgctagccgcctcgaatctcggggacgagattcttgtaaggggggtggatttgtcacgtcctgataaattcatcccgaaataaaaatcattttctaaaaggaataatagaattaattaaaattcgaaaagaaattggcaaacactaaaatacgtacaagaaaaattcgaatgtggcccggagaatttttgttaaattctccttggtctaaaaggagccctcaaattttacttgaattttcagagcaccggaaataattattaagcaacaaaaacaattattagagtttattaaaaagaaaaacctaaaaataaatcctcttcctcctttgggccaagcccagcccaaagtctccctctcctccctctctttctctccctctccttctctccctcctcctcttgggcctcatcccctcctggcccagctccctcccttcccctcggcccagctccctcctccctctctctcccgggctgcctctccccccccttccctcctgggctgcccggcccaggccgcctccccatcctctactcctgggccggccgcccggcccaacccgagcggcgccctcccgcccgtgccgcgcacgtgcgcgcgcgtgcgcgccgttgccgcgcgctgaccgcgcgcccgaccgcgtggggcccacgcgccaggcgagtcgtcttcctcccgcccggcttctctctctcccgtgcgaaccctagctcgctccctcctccaaatccgcttgattcaattggccaattccaaaattaattggggggttttaatccccattgaatcctcttcaattgcccccaaattcccccttgatttgtgccttcaatccccgggaacggacgcgccaagtccggccgctttccatggccgtcggccgttattcccgtggccgttctgccctctcccgagcccggctcccgcccccaccctataaaatgggatcccctcactccgttctatcgttttaaccccatcccgagcctccccgtggtccctagccctctccccgccgccctcctctctctcccacgccgccggccgcctccagccgcctgtgccgcctcgaccgtgcaccggccggtcgcgccgtcgcctcctccagcgtcgccgccacctcctccaccccggcctgccctccgtttcgcgcggtgaccgccggaggcgcgttcccgccatcgcccttctctttcctccgcgccggccgcctccagccgcctctccctcctcgccggagcgccgtccggccgcgccgtcttctccctcggcctcgcagccacctcctctccctcggtcagccctccgtttcgcgggaaagcaccggagacgcgtcctcgccggcaaaacagtggcgttgccgccactgttccacctccggccgccactgtcgcgtttcccgtgcgccggccgacgtcgccaccacctccctcggctccgcgacgccgccctcatccccggcatcacctcctcctcgctcgaagctcgccggagtggcctccacgtcggcgtccagtacctccccgcctccggccggctcctgtacgtcgccggtacgccgatcgacgtcgccgcgttgtcctctcctccagctgctcctctgtttcgccggaacaccgtcgcccgtgctggcctctccatcctcatcgtcgccgacgtcccttcggccgcccgttcatcctcgccggctcgtcgtctcgcggcgccgcctccgtcatcgtcatcgctgcggcgtgttccacgccatcctcgcattcgtgcagccgctgccggctgccctcgtcgcctcctcgccggccccggtcgtcgtcgtcgtcgtcctctcatcattcccggtcgtcgtggcgttcgtccctccgtcgagccgttctcatccgtcgtccgcatcagtcaagcaagccgcggcagccccgtcctcgtcttcgtcctcagctccgcgtcgtcaagccttgtgccagccgcgtctcgccttcgtccaaggatcgccgccgaagtcgttccctcgccgttcgcctccgtcgtccccgagctgtctccgccgcgcccgttcgtcgttgtcgtccccacgcctcgtcgcgtggtggtaaggatccctctccctcgctgccccgtcctcgtcctttcggtgtcgcccgtgctcgttgtgcggttgtcggccccggtacccgtgtaccggtgtcggtagtcgttcacgcgtgcgggtggtgaccgtgtagtgtccgcgttagtgtgcccgctcggtgtctagtggagtccgtttgtcgaccactcgcctcggttgacacacagggtccgcttccatcgacccgtggaccgtctctgtgtacccggtctaccgcggtcctttaggttgacatgtggggtccgcatgtcaacggcgcagccttcctgtcttttccaggctagtgcttacacatattttatagttgcaaagcttaattataataatccgcaaatccccatataacagcattaaacttcggatgatcatatcttggtcatacgaactccgaatcgacccgttcaagtctcctaatgtttgttataacctaaagaaccctgtgctttctttttatgtattgttattgcttctttgtaggcttgtagctttgcttgtgtgcttcgcgtagctttcgtcgtcccggaggttcccgaagcgtggttcgtggtcgtcgccgaaggttcggaaggccgttccctctgagcaaggcaagtcacatcatccttgagcatattgaatcccagtttataaaattatttttatttaaattaatgcattatcgctttatttaaattcccgcgttatcactgttttatttagccatgcctatttacctttgttaaggcattattattgctattgttattattaccttgttcaccctaggataaacaaaaccccaactagtgggtactctattcatggttccactagtatgaatttaggtagatgcttcgctgattaattaggcaatattaggtggttttacaactttagacgttgggaattctcatatcatttggatactatggaattgttggtttatggtggaattggacatacacctctcttcctctttcaaaacccctaaaacctgttttcggtggggtttgggtgcatgccagttgtgggaagtagcaccccggccactataaggattaagctcgggcctctgttgcaaagcactaccgtacttccacatgtctagtgggtaaggcttagtttgtggctcagtctggtcataaacaaaagtacacggatggagatggatgaagtcgggggtcgatggacattctctaggacaaatgaaggctacacgagctgcggcccggtagtcgagatgtcatggcacagggttggtgccctgctgctaggggctcagtcctgcctgcctgtcccggaggttccggccgtaggtgggattgggtcggtactcttgtctatggctaggatgggttggaaactatgtcatatcttccgtctgtataccgtggtggtatgtggcacgtggttgcacgtgaggaagatgtgtcttgtgggtaaagatgtacacctctgatcagagtataatctattcgaatagccgcgccctcggttatgggcaagccgagcaatgtacccaagtcagtgttttaattcttaaaatttgctcaacaactaaaatgtggaatggttggcctgggttggcttgggacgagctgggacccagggtcgggttgccagttcggtctgaatcatcgtaggccttgggttaaggcaggttcgtgagggttcacggccttgtttaataatactgtgtaactctaggatcgtctttataaaatggctttgggcaactaagtgacttttaaatgctgttttctgcaaaacttaaccccgatattattatccccttgtacccccccttgcattaatcatgcatctgccggtgtgacttgctgagtactgtggttgtactcattcttgctcaatctttcccctcttcagtaagagaagctttggagaagatgtcttaggtggagtcctggcttataccccagttgagcgcctgtggagatggagccgtaggcccgctagtccgctgctgtttatttttgattgtcaggcctgaagcgcctttgtaataatgtaaatattatcgatataataaagatgtgtcttttatatcatgtttgtgtggtgtaccccggcttttcctgggacggggattaatacactagcgttcgggaaaaggcaattttcccggtcgtgacagattttcctcaaaaccaggtcgccgactagaaaagctcgtgatcgaacgttgcgattatgatagcgtcgcaacccttgtaaatatcgggccgactgaattaaagctgcttcgcggatttcttccaatcggtgcagatcattcactcggtcctcttcgtagcgttcttcgcgaaaattgtgaaagcgcaaagattcgaattcaacttcactaggcaatattgcttctgccccgtagacaaggaaaaaaggtgactggcctgtggcccgactaggtgtagtacgcaaagaccaaagtactgatggcagctgttccacccattttccagcatagggttttagccggtcaaaaactcgcgcttttatcccttgaagtatcatgccgttggctcgttcgacctgtccgttgctcatcgggtgcgctactgaggcatagcaaattttaattccgaagtcttcgcaaaagtcgttaaaaactccgcgagtgaattgtgtgccattatcggtgataatccgattaggcactccaaacctatgcacaatgttgatgaagaaatctcgagctttatctgctgtgattgtgacaacccgtttagcttcaatccacttggagaatttgtcaatggccacaaagagatgcgtgtaaccgccgactgcctttttgaacgggccaaccatgtcgagcccccaaaccgcaaacggccaagacagtgggattgtttggaactcttgagatggtagatggatttgtctggcgaaaaattggcaaccttcgcacgtgtgcacaattttgtcggtgtcggatactgcagtaggccagaaaaaaccctgccggtaagctttgccgacaatggtgcgtgcggcggcatggtttccgcatattccagaatgtatgtctttcaacaattgtctcccttcctctagagatacgcagcgttgcagaattcctgaaggtcttttcttgtataactcggtttcatgaataacataaagcctacttcgccttgaaatccgctcggcttcatctttatcttgagggagttcttgagaagttaaaaatcgtatgaggggctctctccagtcggcttcaatcatggctatgtcttgagtgtccgcaacttgagttgtttctttctgaggtacggtcggctcataaaggtgttcgacgaatacatcggagggggccacctcgcgcttggatccaaagttggcaagtctatcggcggcttcgttattgtgtcggagaacgtgactaagctcgagtccatcgaacttgtcttccaatttgcgtacctcttgtcgatatgctgtcatgttgtcgtcaatgcaggaccactctttcataacttggttgacgactagctgtgaatcccctcgaactattagacgcttgatccctagggaaatcacgatccgtagtccatggaggagcacctcatactctgcgacgttgtgggatgtggaaaaatgtatccaaagcacataacttaatctttcttcggttggggaaattagaaccactcccgctctagtgcccgaaagcctttttgatccgtcaaaatgcatggtccagtgctccatcttttctgcgggaatatcctcctggcactcggtccattcggcgacgaagtcggctaatgcttgggacttgattgaggttcggggcttgaaggatatgtccaaagacatcaactccaaatcccatttagcaatccgtccgtttgcttcgcggttgtgcagtatatcgccgagcggaaacgatgtaaccaccgttaccgagtgaccgtggaagtagtgggataatttcctggtagtaatcagaataccgtataacagcttctgaacctgaggatatctcgttttggagtcggctaggacctcgctgacaaagtagatcggtcgctggactttttggacatgggcttcttcctcacgttcgacgaccaagactgtactcacaacctgggaggtggctgatacgtatagtagcaacggctcctgtaggtgtggcgaggctaagactggtggctcggtgaggagtttcttgaagtcttcgaaagccttctgtgcttcgggtccccactggaaattgtctgttttctttaatatcttgaagaagggcatcccccgctcgccaagtcgtgaaacgaatcggctgagcgccgccatgcatccagtcagcttctggacgtctttctgggagcttggcggtttcatgttgaggatagcgttgactttctccgggttggcttgtatgcctctatgagacaccataaaaccaagcagcttccctgacggtactccgaaggtgcacttttcagggtttagtttcatcctgaaagcgcggatgcttgcgaaggtttcttctaggtccgagattaaatcatccttctgcttagtcttgacaactacatcatccacgtaagcttcgacattgcggccaatttgcgtcgagaagcatctctgaatcatgcgttgataagttgctcctgcattttttagtccgaatggcatggtgatgtagcaataggccccgaagggcgtgatgaatgaagtcttcaagcagtcggattccttcagtcggatctgatgataccccgagtagcaatccaaaaaactgagtagctcgcagccggcggtcgaatcgactacctggtcaatgcgaggcaacccaaaaggatctttagggcaagacttgttgaggtcggtataatcgacacacatacgtcattgcccagttttcttccgaactaggaccgggttagccagccagtcgggataaaggacttctttaatgaagcctgctgctaacagcttggttaatacctccttgatcgcatccttcttgtcttgtgcgaagcggcggagtcgttgtttaataggtttagcgtcttctttgacgtgcaaggagtgctcaatcacctctctaggaatatcaggcatatcagatggtttccacgcaaagatatctttattattttgaagaaaggtgacgagcgcgctttcctatttacaatctaactcggcgcctattacagcagttttagtgggatcagaaggatctaggggaatctttttagtcttagcatcgctttctccgctcttcgagaccttggtcgcaggcacttctccttcgcctgccgtggtcgcagccagtcggatatcttctcgggcagacgccatctcgcgagtctgggccatctcgcaactttccttatcgcatgtgacggcttgcttgatgtcgctccgtagggataggactcctcggggaccgggcatcttcatcatcatgtaagtgtagtgcgggacggccatgaacttggctaacgccagacgtccgagtatggcgtggtatgctgtctcgaaatcggcgacttcgaagcagatattctccgtgcggaagttttcccgagtgccaaaggtgaccggaagggtgatctggccgagtggagttgcagataaccctgggatgactccgtgaaaaggcgcattgcttggtcttaactcggagcgaggaatctgcatatcatccagggttttggcgaagaggatatttagtgcactgccaccgtcgatgagggttctgcgaagcttgacattacggaccactgggtctagtaccagggggtatcgccccgggtggaccactcggtcgggatgatccgagcggtcaaacttgattgctgtctctgaccatcgaagatattggggtatgttgggctgaacagcgttaatctcccgttcagtcaacttttgctttcttttagattcataagccaaggggccgccgaagatgtggttaagctccttgcggtggtcttagaaacctgccggggggtcgccatcgtccttcttcttcgacgtgctttgtttttcgtcggagttcttccgtgtagtcttggtgtattgttccgcgaactgcttgtagacgaaacaatctttggccgcgtggttggacttaggatgatgcgggcattgggagttcatgatcttgtcgaacgtgttgacgcgcgaacgctttgatgatcttccaccccctcccgtagccggtgtatccttttttggcttccaactggagcccgactgctttgatgcgatgacggcgtcttcagccttggcgtactcgttggctttttcaaacataagtttgactgttttgggaggcttacgcccgaacttgccgaccaattcttcgtggcgaattcctttggtgaatgcggcgatgataacatcgtcggtgatgtcagagatcttgttgcattgttcagaaaatcgccggatgtaatctcgaagagattctccggacttctgaataacattgtaaagatcgaattgtgtgccggggcgctcgaaagtgccttggaagttggcgatgaagtggtcgcgtaattcggcccaagatccgattgtaccacggggcaatccatggagccaggaccgggcggaatctgctaaagccactggtaaatagttcgccaaggccttgctatctcctcctgctgcgcggattgcgagaccgtagacggtaagccatgattccgggttggtggaaccgtcatacttctctattccagtcggcttaaagccggctggccaatccactcgacgcaggtcgttggtgaaagcggcaactccgtctaggtcgtcgtcgtggcgatctagcgaatgatgatggcctcgggctgcccggcgctgtatgatcgtgtcgcaaagatcgacggggcgacgacgaggtggcgaacgaggtcattccactcggcgctccctatgatggtcgggaggcgagtggacagatcactcgtcgtgacccctgctcctgcgattagatcctgcgccagtgatgctaaggcttggctggtggtagtcgtgagatcgaagatgggggactcagctgccactcgacgtgcggacgcttccggagttaactgggaccgaagccgcaatcatggtcttggtctggttcaagatgttgacgacgtggtcagactgattgagctcgttctccttcaggagggtgtcgagaagggtgatcgcggcaacagcattctgttgtggggtgcggaaaaccggtgtcccctcaacgtcttgttggccgataagatctcgcgctcggtgccctgcttccaaggctcgtagccgccggtcttcagcctcctttgcggcccgctcacgctcctgttgctcacgccgtagccgttcttgttcttgtgcttcacgttcctcctccagtcggcgccgctcggcctcgcgtcgtgcttcggtttcccgggcttggcgttgctcctccgtctcgttatcggccataaagacgccgaaatagagaggggtgtagttgtcttct

SEQ ID NO: 29856 - DNA, 765 bp, Oryza sativa
  unsure (1)..(765): unsure at all n locations
ccgattaggctctccaaccatatgcncaatgttaatgaagaatcctcgagctatatctgctgtgattgtgaccacccgttaaccttccatccactttgagaatttgcaaaggcccacaaagagatgcgtgtacccccggactgcttttttgaacggcccactcatgtcgagcccccaaccggcaaccgggccaagacagtgggattgtttgcaactccttcagatggtagatgcatttgtctggcganaaattgcaacttttcgcacgtgtgcacaattttgtcggtgtcgaatactgcagtaggccagaaaaaaccctgccggtaagctttgccgacaatggtgcgtgcgncggcatggtttccgcatattccagaatgtatgtcttcaaacaattgtctcccttcctctagagatacgcagcgttgcagaattcttgaaggtcttttctagtataactcggtttcatgaataacataaagcttacttcgccttgaaatccgctcggcttcatctttatcttgagggagttcttgagaagtaaaaaatcgtatgaggggctctctccagtcggtttcaatcatggctatgtcttgagtgtccgcaacttgagttgtttctttgtaaggtacggtcggctcataaaggtgttcgacgaatacatcggagggggccacctcgcgcttggatccaaagttggcaagtctatcggcggcttcgttattgtgtcggagaacgtgaataagctcgagtccatgatgaact

SEQ ID NO: 29857 - DNA, 672 bp, Oryza sativa
gatatgtaaaagcggctcttaggtgtccgagatttgtaggtttatttgagtgggttgttatgacttttgggttgaagaatgccggtgcaacgtatcagaggacaatgaatttgatcttccatgatttgctaggtattatcttagagatctatattgatgatattgttgtcaaatcggatggtatggaaggacatatggtcgatttgagattagcttttgagaggatgcgccggtatggtttgaagatgaacccacttaaatgtgcttttggtgtgtcggcggggaagttcttaggattcatggtgcatgagagaggagctgagattgatcctaagatgatagaaaaaattcgtgatttcaaagcgccgacatgtaagaaggaagttcaaaagttgctaggtaaggtgaattatttgatgaggtttatttctaacctggcaggtaaaatcgatgcttttgttcctatacttcgcttgaagaaagaagccgattttacttgggaagcaaaacaacaagaggcatttgaagagttgaagaggtatttatctactccacccgttgtgcgagcacctaaagccggaaagccttttcggttatatattgcctccgaggacaaagtcattggtgccgttttgacacaagaggaagatggcaaggaatatatcattacat

SEQ ID NO: 29858 - DNA, 701 bp, Oryza sativa
aatcaattacctccgtatgagtcatattcttcaaaggcacggcttcggcccacttggtgaagtaatccgtagcaactagcacgaacctatgcccctttgatgacgaaggataaatttgaccaatgaaatccaaaacccatcctcggaatggccatggtttgattatagggttcaacatggcggcgggcgccaattgaacattgccgaaccgttgacaagcctcacataccatataatatttgaagcaatcatcaatcatcctcggccaatagaaccccgctcttttaagcaaccaattcatcttgtgggccgattgatgagttccacaaattccttcatgtacctctcccatagccaccttagattgatcttcatctaagcactttaacaagacaccatctatatttcggcgatacaaatctccatcaagcaatgtatatttaagtgcttgccgccgaattttccgatcaaccttaagcgtgcgatcttttagatattgaatcaaaggaattctccaatcctcttcttgtatcctggcacaaacgtccgaattgtaaataattcggactccaaatcgatggagcgtgcccccaacgctctgctgaacaccggtcagaccggccacgcaaggacggtcaaaccgctcgtgaacgccggtcagaccggcggcatgccgcccgtcagaccggcccaagtcacca

SEQ ID NO: 29859 - DNA, 24199 bp, Oryza sativa
ggatttgtctctctctcccggaccctaatctttccatcgcgtcgccggtcgccgtgggccttcgccaccgcctccttgcccctttaaaaggacccccaagcccgccgctacctgccgccacccttgcctttgcccgccgctgtcggtagcgccctagcaccgtgcagccgtgcgccgccgtcgccgccgttcgtccagccgtgcgccgccgccgctccggtcgtcgtcgtcgctcgggaaggccgccgtcgtgatcgccaagccatcgccgacctcgtccgcccctccgtcgtcgccgtaggccaccggaacaccgtcgccgtcgtcaagccgatcatctccgccgccttttcctcaccgccgtcgccgtccgttgatcttccgccgttgttttggtcaccggtgagttcgccgcgtcgccctctacgtgttggtgtcctctgttcgtgccgccgcgccgtcgttcgccggcaagcatgcacgcccgagccgccgccggtagtgacatctccgctgacgtcatcgtcgtcgttccccgtggcctggtcgtagaccgttggatcttggccgtccgttttggataggatcgatctcggccgttcgtttccgtgagccaccgccgtgcacccggtccaccgcgaaccctagccactgacgcaataattcccttttccttttcaaaaataattcattattgcgtcataattcaattaaaatctaaataaatgatttaatccgatttaatctttgaaaattcataactaattcatcttagctcggatttagttggttcaagtctctaaatttttctaaaattgagatctacatgttaaaaatatccacatgtactgttcatgcttgtttatgtgctgttttggtgttttttctcttttctgtttagattccgacgtttccgaagagttcgttttcgcactagaagaatttgaagagttccaaggccagcaaggcaagtcacacaggtcccaaacaaccctttgagcatgttgatcccgtttaaagctattttttctattcaactattgcatttattttcgaatgtcattgggtggaattaacctattgtttgttatagcccttttgttcttgattactttattccttgataccttgggttattataacttgactagttgggctatatatattggttcagctagatattagatatgattgcttagccatgcttagaaacattagcacactattgggataacttatgactcactattatttaatgatggcttaatgatagttcacgatggtcaatcgtgattggttaattaattacttgccaactaaaacttgataatggtgggttgtgagcacatggttttgagagtcgtgctcatgacaattaaggaccggttcacgagtttcggttgtgaaacattaaccgtgccaaccacaagccagcgtgggcaacggctttaccttttgtatagcatggttcattgcgtagcaccagactgagaagtggcggagataagtccacgggggtcgctggggagttcatgccttgtttataaggggatgattatgatccaggaaaggtgcgctttggtggattgtgttgtgcgaggggtactgtcacacctcctttccgaggtaccgtggtggtattgaggcacatggtgacatgttgtggggctgtgtcttgtgggtacagtggtacacctctggccagagtaaaactattcgaatagccgtgcccgcggttatgggcgggtctaacaatgtctttcgtgattagtttcacacttctcaccataataaaagatgctataactggtaaaaatttgtttagctcctggtttggaatggtatattcctggtttggagatagatctgtacagccgggtatggttgttccggatggttgggcctgagcagcatgggtgtgctgtttagtgttgattaaaattgatgattaattactctactgttttataattctcaaatgtttgctaaatgctgcttttgcaaatgagctctatattatgccattctttggtatccttgtgcacttgcatatttgctgcgtggcttgctgagtatgtcatatactcaccttgcaatcattcatcagaggaggagttctacagtgatgctgatagtgtggaggattaggtgtagccctggtcaagctgcctgtggagtggagtcgtctgcgccgtttatctctttttttttccgctgcttagatctttattgattgagaggaactatctacctctgtaatgacattttattcgcttattaattagagtaataattgtactctattatgaatttgttattgtgtgcctcggctgattcctggacgagggttcacacacatgtaagcgtttggaattttggatagaaattccgggcgtgacagtttctacacaacatccaagacatcatgtgagataagtagcattaaatttatgtatagaatagttgtgtttgcattggaagagtagtgtctagtactagtttcttgatgatgtgtagtttatggaaactatatgtagtgttttgggttgggaatggccttaatcacctcgatctaacctagtaaacataaagtaagacattgtgcaatttaatttatatccgcatgtgaacttaaattgaaggcaagcgaaaatggttttttaagtagtgtagtgaggtaattacagagcgtaagtatacaaaagaaatgagatacataccctatatatataggttatcaacaaggaaaacaaattaattggtgagttgcagtcaaaggtacaaacgatcttcgttagtatataaacttgtcagtctatccttgtcgtcatccttgtcgctgtcgatacgaaatataccagcgtgttcattaagaatccagacgattgttgtgagctcaccaccacaggcgagctgcttggcatgggaatcccttgtgcatcgcacggatgcatacaccagaagacgcacccatgctctgaagataaggcgcatcattttcgatgtatcaaacctgttactttcgtctttcaattcaggaatcatatctataagtctctgatatcttgtgtaattaagatttatatcatccggggtatatgggttcgggcctatacgacttagcagcacacgcgcgaaactcgttccgtcagagagaattatattcttgtcgtaaagaatacttgccttttctggcctgagccagtgtccactgacaccaggtctccatttgctgcgcagcgcattctttaagcttggcttctgttccatttctactaggcgatgggccagcttcacctttttctctgtcaagttaccgtgatattcttccttgggcaatatttcatcgtcattagttagagcgtaaccaactgcttcgtacaggctgcgtagcttaaggcccggtagcatatttgggcgcacggcgaccaggaacaccatgtaatctgacaacaccttgatcgcctgcacttctttggacgaggatgagtattgatggctgcataagaggaagacgtccgtggcaatgtgccagatcaggatgctctcttggaatgcaggtgagaagttcagagcatcttctaattcccgctgatgtagatgtgcttccttcggcggcagcggcggcgtcggtgccggcgcctctttttttttatctggatacggctccggtggtgcagctggtttggcttcgtcggctttctcgataggaacagtaggcgggtacgctgacttaagatattcccatatactttcgaacaaatgcttgcagaaatctgatgacatacgaaagcccttcaagtagtggtattggaactccatacaattatcctctggaacaatcttcaccaatattgagatgaatatcctcgtcagcaagaaggtcttggtctgatcttgatcattactagtgcactcgtgcaatatgttgtactgccccatggttccggaccacatcctatagctggttggctccttactgagaaggaaccgaaatagattcaatgagacgatgagacgacggagcagtcgccatttccctgagcacagaagtgcgtgatgaagccagattcgtggcctatcattcaggaaagaataggtccatgtcgaagccactgctttgagtagccatatgatatccagaatgacggtgccagcgagcaatatataggtgatgaagacgtcagccgtcggctgaccttccttgctgtggaaccagaacaacaggaacgcggtggctccagcgaatggaaaggcgacacggatggcgtagccaccccaagtgtgcaccattgctgccttggtgtacaggatgtcatacatgagggagagctccatctcaaccaccttgtacagtgtcttgttttcatcccatgttttcgggagtatttcttgttgctgggcatcatgctcgtattgcaaattatcgatgaaggcacccttggtgatatggagattgccatgagcaaccagcatgatttggtcattatctggtttgccgccacgccttagactttggaggcttgttactcttcgacttggaacctccttcttgctttcgcttcgcatgttttccaggttgccacgctgcagcgcgaaaaacgccccctccaaatatttgcagatggccatacagcagatgatcgaggagacccacagcatggagtcgccaggcatggcgaacatattctggtgcaggatataggcaggtgacacaggtccaacaagctgaagaaacacgtttacactctggcgaaacgagagaacgccgtcttccaaggcgtaggcggtgatgttgtccggcataccagcgtgtagcagcatgaacgccacccagagcgtcaccagctgctcctcctgcggcgtgcgtccggcggccagcatggccagcgcggtggtcggggcccaacgtgacatctggttcgccacccacaggatgacaatccgaaagcctgtcgcactatttcggcggacttcggcacacaagacgaggccgagatgtgccacggagctgatgattaccactaccctggtcgacaacagattccatccaggcatcgtcgccccctgctaatgaatgcatgtgttagtcgagccacaatagagattaacctaaacaatcaagagatgcagattactcaaagcaaaacgaactaattatgtaaacccacgcgtacgagacttacctaccccttttcgaatctgaatttgatggcgttcgatcgatttcctagttaaccactcatggattttacgtctgaatggtatccctatatcaagcttggaaatcagtctcaagctagctaccagcgctagtacagcagcaaacaagatgtacagtgtacacctcttgaattgtgccttgctggtgtgtttaattaacaatgcttgcatccatcaaggatttataggcactactatagaaaaggatatgtgtcagttgacaaccacatatgggtgctggattttgcaaccagaacctttgagttctctcaaaggtgcctttgaggtctcaggaatgaaaagaaaaaaaggccgggtcgttgcatcagcttgatcaagccgatgcatcgggcaattagtccccatcaccccaaccatatttcatcgcacttttaactacatttaatccaagaaaatacaagaacaataagaacacaaaaacataaacataaacaacacaagcaatgtgaaaggaggggagggcgctaccgcctcctcccctcccgccgaatctgacggaggggagggcaccactgccgctgcctcccctctcgtcgaatttgttggaggggagggtgccgctgccacctctgagtcgctgggccgccgcagcctccccttctgccggatttggcgaaggggagggcgccaccaccaggtaatgcggtggagagagagggagcaagagttagctgagagagggggagagagagagggataggggaggaggcggagaggataaaggagaggggtaataaagaaatagagcaaggggtgatcaaaagggagagatattggtggaaacaagctgtgattcggcttagtcgggtggttttcttaataagtgccattatttcataaaactgacacctacattataaatatagttatcggtttttaaaaaatcaggacctatgatatattataggtgttgatttttatttagaaccgacacctatctctcaacaaaggtaccggttctagccgatggtgtgtcatggatgcgcgttttggatggaaaaagcaagataggtgacggttttagcattttcggcatatagtgccgatcggtatgttattgcgtgcgctctgcaatttcattaccccaaaggctaatatgctggagtgtatgctagcatgatgatcaacatttttaataaatttgcgctattctaggcaaggatgtagtactaggtatgcactgtgcttttactagccacctaatagaaacaaactagagggactaaatttaacgcactgatctataaatatcaattgtttgtacaactatatatatagcaccacatgagcatcactaccatatgggggaatatgtggtgggatcctagttgcttctaccacagctgtatttgctaaaactcctcttccacaatctccaagtgaatctagttagtagctaactcatttccttgaaggaatctctcttctcagaatcataaggaacgagtgttctagagtttatgttttagctgacaacatgtcaaattacagcattcttaatttcaccaggatttaggtcatgtttggcattactccagatctcaaagccataatagatttgaagtttatacattaaattacagtgctaatttagaaatataagtttcatctgcaatatgcaaaaaaaaatgtaaatgttatcaatgtaattatagacgatgtagatccacgccaaaaaaaaaaaatcaatccagaatttaacatctgcttccaacctatgtaaatagtgagaaaaattctaaaaataagtcgagatgtactttgtaatgcagctaccatcttacattgtcaaaagggcaagtactatctagtactttgcgagttacttgaactaaacgacgtgcatcacaaacttccaccatcccacaccactagcattccaaggtcatgttcccccttcccatcctcttcgcacttctcccattgtaactctcttatactatcatgtttatatcttatactatgtacctaacaaactttctctcccaaaaccactcaataatttttggatcttgccgcactggctagaaactgaccgagggagaagaggcggttcattttcccttcagcttcccctttacgtgtgttgggcataggaggagcaacagtgaggaggaagtcatgaggtggaagggagcgtgtcatcagagtagaaggttggctacactgcccggggacttgagacttccattgacctcacctctgctggttttgttgacaccgtacatacctggcttcgaatatgccacctccacaaagcaccggtcgccaatctttttcatattggagctctccgcattgttgggacaacttgggagtagcatcctcactagcaaccgccttcttcctctccgcactagttgagggcaactatctccgcatcaagctatcctcctcaagccatcaacgatgaagtcatgtcctcgtctcctccgctgtggccaccaccgccttgtaacgacaactgcgcagtcccaggcatgcttaggctgccttcttctgctgatggatggattagtcccaacactaattccccgatgtcatcgagatttctgcacctggatgtttcctcaatgtggtgacgacaacctcattccgagccccatgccttgagctaccgatctcatccacaatgccatcagttcaaagggtggtgataggggccagacgacgattgcaaatctagacatagcgacatgatgatagctagctgatggtagcagatctgactagcaatatttgcgcacggaggcacgaaaggcaattggtggcggtggtgccttagtcttcgagaggagaggtggagaaatgccattaccataactttccaatccctcctctctattgggtttagtcccatgttgctaacaattgagggtctagtaacaagtattgaggtcaatgcataggcttagataaaacaaaagagattgttggccttggactgaaacaagtcttcgaggctacataggttaatgggggagattgttggggctgatgtgagacggaggagattgttaagtttagtcttaaattggtaactgacgatacgagagtacaactcaaaatacgagggctgtccgcacccatcagctattcttttgggttgtgtaggtcaaaggacgagcttgtggtgttggtcggacctatggcctatgtgtggccaacagttgatgagctggtctacgctctctaatagtactatctcgccggtgaagcccatgatgaccaccatcgtgttgtaatcctgcgctggtgcatcaggcagtggttgcttgctctctcaatgctggtatagtgtcctacgcctttgtccatgcatgcataagtgcttggaaaaaaaattgaatgacttgtctcataaaaaactttagaaaatacctcacatgatgatattctaatgaaaaaaatgcatacgagtgaactgtggaaatttgatgtttcaattggcataatactctgttgcacattttatgtttagatctattttttaaatttttttcaatattttagccattgggacttgacgtttcacgtggctgttggtgttgcaatcactattttttaaaagttgcatttctttgaagagttttatcaagaaaattgaaacatttgagccagtgcagaaactatttcctacatgtggtgaaagcacctgattcttaggataaattagccatccaatctttagccatgtgctgaactcttgttgggcctgaatatccattacagaacacactagaaacgggttgtgtcatgtgttaatcgcaataactaaattattaaattttgtcatattttttagcaattattgctgccatgttttaatagattcaggctactaataattatccaacaaaactaatctaaaaaaaggaagaaaatggtaaatgtcgatcagctaaaagtaatgacggctcgctgtgttcaccacctgtagcaatattttaactatactcccttcatctcaaattttaactaccattatggttcatatgtagtacgaatgaagcaatattttgggacggaattaaggagtatacaggtgcagtaccatgaatacacttcctttcttatcatgtgaaacctcgttccacttgttctctcttgataccaaaacaggtcgccctgtaaacatcatgccccaaccatcgacattacctcctacctgtaattaagggcgtcgcataacgatgaacacatacgacaaaattgattgctgcaacaactcatgctctgcaacttgtttcatggcctacctagttgcaacttgcaagtgaggaggtggatgtgtccttggccatgtaccgcatgtatcccatgtatcgaacaagtgaggaagaacatatccccctatgtgttcgatacatgggactgggaaccatcttcttcacacggaaaacggagcggtccattagcgattgattaattaagtattcgctattttttttaaaaaatagattaatttgattttttaagcaactttcgtataaaattttttttgcaaaaaaaaaggtacagtttgaaaagtgtgcgcgcaaaaaacgagaaaaataggttgggaacaccctgaaacgaatgctattcttccctctactttcctaactcaggccctatttacttcccaaaacataaattttcatgttgtcacaatgaatgtttgaacacatgtatggagtattaaatgtaggaaaaaacaattaccagaccctaatggggtttcctgacagaatctataatttgtttcattattatactacgtttaatactttaaatgtgtgtccgtatatccgatgtgaaaatcaaacctaaaaattttcccgaactaaacaaggcctcacctcattctttttacccgtgcacgcttttcaaactgctaaataatgatattttttttcaaatattttctacaggaaacttgctttaaaaacctatctatatatctatctatactaatcgggcactttgaaagagctctcactttaatcagaaaactccgaccgttggttaaatgagccgtagcatcagaacaatgaattacaatctaataatctataacgctgttggctaattaagtctttaaacgtgatgccgtgatgggctcttttcaaagcccatatactctaccaacccatgctcttttataccaagaggaacggtagcaaatcggatggcagcgagagattgttggcaacttttttgacaagttgacaagtacgatcgcagcaccttaagccttgcggtgatcctagagtcgccaaccacctcgatctagcaaagagctaaacctagatgggttttgataactaaaccggctagcggagccgatttctagatagctacccgtctcgtgggcaaaacaaaaggttttcaggacaaacctacaaagagatgtcgcactctcgcagcggcggcggacggtttacggcgcaaaccgacaaagatggacaaactaagagaaaactaaaagcaatatgaaaagaacgattcgattgattgatagattgatttttacagtgaacctgccttgtcccttatataggggttggttttgccctctacaggccctcctccacgtacaacttggggtagaaaccaaaggaaacccgaaacatgcctttccgagtaagaaacctcgaaacccgacgaaacagggtcggactcggacctgccggtcagaccggccacacaccgccggtctgaccggcctacaaccggcggactgaccgcccaacacatggcggtcagactggcccactcggaggaaaccggtagatttccaaattttggcaatctttcctattttaatcctagatgccaaagttgggtgtaaacacatgcccccctgcctttttgatgaacaatgtgaatctaaaagcatagagcatgtttttggtcttaggacgataattcaattaccgaccatagtacctcctaagcatcttgccaaacactcgggaagtatttcttcaagtatttcccgttgattgcccgctgaaaacgctccccttgaagtgtctccaaaaagtatgcgttccctcgaacaatgccgcacactcgataaggaccttcccaactaggagaccgcttaccgaactccttggatcgagtacccaaaggcaaaattgtcttccaaaccaagtctccaacttgaaacaattttgctttcaccctcttcttgtacgccttggccaccctcttcttctctttttctatctcttccaatgccttcaagcgcttgtcgatgacttcatcaaggttgtctcccatcaacatcttgtaatattcacttgacaaatcatcttgcttgatataatgaagagaaccaagatttacctccactggtaaaacggcttctcgaccataaaccaactcaaaaggagtgactttagtggcaccatgtttagatattctatgcgcccacaatgcttcagaaagcacgtcatgccacctcttcgggtgttcctcaatcttcttttttactagctttaacaatgttttattagtcgactcggcttgtccattagcctgagcgtagtaaggagaagaactcaacaatttaatgccataagatttggtaaaactcttcacttccttagacataaaaaaagcaccttggtccgtagttaatgtttgcggaatactgaacctatgaataatatgctttaaaataaaatcaattacctccgtatgagtcatattcttcaaaggcacggcttcggcccacttggtgaagtaatccgtagcaactagcacgaacctatgcccctttgatgacgaaggataaatttgaccaatgaaatccaaaacccatcctcggaatggccatggtttgattatagggttcaacatggcggcgggcgccaattgaacattgccgaaccgttgacaagcctcacatcccatataatatttgaagcaatcatcaatcatcctcggccaatagaaccccgctcttctaagcaaccaattcatcttgtgggccgattgatgagttccacaaattccttcatgtacctctcccatagccaccttagattgatcttcatctaagcactttaacaagacaccatctatatttcggcgatacaaatctccatcaagcaatgtatatttaagtgcttgccgccgaattttccgatcaaccttaagcgtgcgatcttttagatattgaatcaaaggaattctccaatcctcttctgtatcctgggcacaaacgtccgaattgtcaaataattcggactccaaatcgattgaagcgtgccccccagcgctctgctgaacaccggtcagaccggccacgcagggacggtcagaccgctcgggaacgccggtcagaccggcggcatgcggccggtcagaccgccccaggtcaccagtcagaccggccgtgcaatgccggtcagaccgcccctggtccccaattctgccaatttcgcataaagatttaaaatcaagtatcgactcttctaatatcataaataacccctttttcacattataaccaaatgcttgttgtgccaagtcattcgctctagaattatcacgcctagcaatatgtctaatagcaaaattttcaaaattggtaataatatctaaacatgaatcgaggtaactatttagtgacccgtccaagcatttgtagattctggcgacttgttgcaccaccaattccgaatcaccaaaggcctccacatatttagatccaaccatctccataacttgtaagccgaacaataaagcattgtattcggcttgattatttgtgcaataatattccaaacgaaccgatgcctcataacacatgccattaggtgaaaacaaaactacccctatgccttgaccttctttgcaagaagaaccatcaaaataaatcttctaaggtataatttcaattaagcaaacctctccctcataagcaacatctatatgatggtctactataaaatcacatacaatttggccttttatagttttcaatagttcataagccaaatcatattctatcaaagcatatgcccacttgccaattctcccacttagaattggcctttgcaacatgtgtttaataacatcggcttgacaagtaactatgcatgtactagataacaaataatgcctcaacttggtacaagcatagtataagcataaacaaagtctttctataaagacatacctcgtttcggcatccaaaagacggcggctcaaatatgtaatgatatattccttgccatcttcctcttgtgtcaaaacggcaccaatgactttgtcctcggaggcaatatataaccgaaaaggctttccggctttaggtgctcgcacaacgggtggagtagataaatacctcttcaactcttcaaatgcctcttgttgttttgcttcccaagtaaaatcggcttctttcttcaagcgaagtataggaacaaaagcatcgattttacctgccaggttagaaataaacctcatcaaataattcaccttacctagcaacttttgaacttccttcttacatgtcggcgctttgaaatcacgaattttttctatcatcttaggatcaatctcagctcctctctcatgcaccatgaatcctaagaacttccccgccgacacaccaaaagcacatttaagtgggttcatcttcaaaccataccggcgcatcctctcaaaagctaatctcaaatcgaccatatgtccttccataccatccgatttgacaacaatatcatcaatatagatctctaagataatacctagcaaatcatggaagatcaaattcattgtcctctgatacgttgcaccggcattcttcaacccaaaagtcataacaacccactcaaataaacctacaaatcccggacacctaagagccgtcttgtacatatcctcctccgccataaagatttgattgtagccggcattaccatctaaaaagctaatcaccttatgacccgaggcatcattattggatactatagtgaactatatgtctttgttgtctcggtgacgcataatgttgttgaagacacattgcctggggagctattttatttgataaactcatcagctagtctcaaaatcaaggggagaatgttggttaattttatcggctaatgccggttagttaggataaggataaaatcccaccgattttcctatcctaacaagaaacaaactaagagataaatctgttttgtgtgatcggtaaatagattcgaattttagattgagaaaacccccgagcccccccctcccgtgtcgcttatataaagaaagagaaggagggaggctgagtgactacttaactctctccaaccctaaaccctaaatcaatcgcccgatcgattagacactggaaggggttcgtgaggtatctcacaacagaagaaacaaagaagaagaaagaagagaagcaatagcttcatctcaggtcagttagatcaattaatttccgcataagtagaaggtgactatgtttaggctaagattcaattaattagttggattaaattccaacattatggactctgactctcgctctcatataggctaagcatatccaaccacattcgagcccgattctatcgaaatgttatcggctcataactctattattaaaagtagaaactaaaatacacattcattagctcggaaactagccaaaccctggacttgggggggccctaatgggcgatcgatcgccaggcgatcgcctgggtgatcggatctggcccccctccccctatactcctccctcctctcccctctttctcctccccttctcctctttgtactacagtagaccacacaattgttttttaaaaacaaaagttagaaaaatttatgtctagaaattctatatataaaaaatttgaattcaaattcaaatttgaatcgggtatgtaaacttttgacttataaactttgggtctataaactttaggtgtataagctttagatgtatagaaatactatgtatagaaaagatttgaattcaaattcaaatttgaatcagatataattcaaattcaaatttgaatcgggtatataaacttaggtctataaactttaggtgtataaactttcgatgtatagaaatactacatatgaaaaatatttgaattcaaattcaaatttgaataagatatttgaattcaaattcaaatttgaaacgggtatataaacttttgacttataaactttaggtctataaactttagatgtatagaaatactatatataaaaaatatttgaattcaaattcaaatttgaatcggatatataaacttttgacttataaatttttgggctctaaactttagatgtgtaaactttaggtatataaatttactaaaatcggaaagtaatgcggtgccaaaaaaggaaaccagatggagaggtggagggagggaagggggggcgggggtggaaatgatcgccctgggcgagcgagggcgatccctcgctcagtagcatttccggttacgctgcccctcttatgtctatccctctcgagctgacatccatgatatggatgctttcgaatgttcaacaattattagatgaaattatagaatctcgttgcacgtttttcaaactgctaaacgatgttttttgcgaaaactttatatatgaaagttactctaaaatatcatattaatccattttcaagtttgtaataattaaaactaaattaatcacacgttactaccatctagttttgcgtaaaacacttcatgatcaaatatgtaaaaacgtgttttttccacctgaaaaaaaaaatttctagtagtgtccgtcgggctgacaggcacgctctgcctgccgcgcgccttgcacgccaccatgccatcctgtcgatcgcttgcctgaggtgatattgaacgtgacagattttgtgacagaatcggagactgacgttaaagtggtaagagcaagtcgtaatttatgttatagcaatcctacacaatcttagatgctatcgaacgagacaaaatttgtgacaattagcctgccgtgttggaaatttgtctaggttactactagcctagtccacctgatgccactagaattattgtttgccatgttggaataatgaaatgagtcatctggcctggtgttcttggcgtaactaactaatgttctaattattaaatttcttaagaatatacatgacactagctagctagaaacaagtgattagctccctcttgatattattacaacatgaatactgttggtaacttttttgacaagttgacaagcacgatcatagcacccttaagctttgcggtgatccaagagtcgccaaccacctcgatctagcaaagagctaaatctagatgggttttaataactaaaccggctagcggagccgatttctagataactacccgtctcgtaggcaaacggaaggttttcaagacaaacctacaaagagatgtcgcactctcgcagcggcagcggacggtttatggcgcaaaccaacaaagatggacaaactaagagaaaactaaaagcaatatgaaaagaacgattcgattgattgatagtagattgatttttacaatgaaccagccttgtcccttatataggggttggtcttgccttctacaggcccttctccacgtccaactcggggtaaaaaccaaaggaaacccgaaacatgctttcccgagcaaggaaacctcgaaacccgacgcaacagaatcggactcgggcctaccggtcagactggccacataccgccggtctgaccgcccaacacacggcggtcagaccggcctacctccaaggaaaccggtagacttccaaattttggcaatatttcctattttaagcctaggtgccaaatttgggtgtaaacacatgcccccctgcctttttgatgaacaacgtgaatctaaaagcatagaacatgtttttggtcttaggacgataatccaattaccggccatagtacctcctaagcgtcttgccaaatactcgggaagtatttcttcaagtattttccattgattgctcgttgaaaacgctccccttgtagtgtctccaaaaagtatgcgtttcctcgaacaatgccactaactcaataaggacctttccaactaggagaccacttaccgaactccttggatcgagtacccaaaggcaaaattgtcttccaaaccaagtctccaacttgaaacaattttgctttcaccctcttgttgtacgccttggccaccctcttcttctctttctctatctcttccaacgccttcaagcgcttgtcgataacttcatcaaggttgtctcccatcaatgtcttgtaatcttcacttgacaaatcatcttgcttgatataacgaagagaaccaagattcacctctaccggtaaaacggcttcttaaccataaaccaactcaaaaggagtgactttagtggcaccatgtttagatatcctatgcgcccactacgcttcggaaagcacctcatgccacctcttcaggtgttcctcaatcttcttttttactagctttaacaatgtcttattactcgactcggcttgtccattagcctgagcgtagtaagaagaagaactcaacaatttaatatcataagattcggtaaaactcttcacttccttagacataaaagaagcaccttggtccgtagttaatgtttgcggaataccgaatctatgaataatatgcttcaaaataaagtcaattacctccgtatgagtcatattcttcaaagacacggcttcggcccacttggtgaagtaatccgtagcgactagcacgaacctatgcccttttgatgacgaaggataaatttgaccaatgaaatccaaagcccatcctcggaacggccatggtttgattatatggttcaatacggcggcgggcgccaattgaacattgccgaaccgttgacaagcctcgcatcctctataatatttgaagcaatcatcaatcatcctcggccaataaaaccccgctcttctaagcaaccaattcatcttgtggtccgattgacgagttccacaaattccttcatgtacttctcccttagccactttagattgatcttcatctaagcacttcaacaagacaccatctatgtttcggcgatataaatctccatcaagcaatgtatatttgaatgcttgccgtcgaatctttcgatcaaccttatgtgtgggatctttcaaatattgaatcaaaggaattctccaatcctcttctgtatcttgggcacaaacgtccgaattcacaattaattcggcctcaaaattacttgaaacgtgccctccagcaccctgcctagaaccggtcagaccggccacacagggccgatcagacctctcagggacgccggtcagaccggcggcatgcggccggtcagaccgcccctggtcaccggtcagaccggccgtgcaacgccggtcagaccgcctctggtccccaactttgccaatttcgcacaaaaatttaaaatcaagcaccggctcttctaatatcagaaataaccccctttttacattataacctctgcttgttgcgccaagccatttgctctagaattatcacacctagcaatatatctaatagcaaaattatcaaaattggcaataatatctaaacatgaatcgaggtacctatttagtgatccatccaagcatttgtagattccggcgacttgttgcaccaccaattccgagtcaccaaaggcctccacatatttagctccaaacatccctatcacttgtaagccgaacaataaagcattgtattcggcttgattatttgtgcaataatattccaaacgaaccgatacctcataacacatgccattaggtgaaattaaaacgacccctatgccttgaccttctttgcaagaagaaccatcaaaataaatcttccaaggtataacttcaactaagcaaacctctccctcataagcaacatctatatgatggtccactataaaatcacatacaatttggccctttataatttttaatgattcataagtcaaatcatattctatcaaagcatatgcccacttgccaattctcccatttagaattggcctttgcaacatgtgtttaataacatcggcttgacaagtaactatgcatgtactagacaacaaataatgcctcaacttggtacaagcatagtataagcatagacaaagtctctctataaaaacataccttgtttcggcatccaaaagacggcggctcaaatatgtaatgatatattccttgccatcttcctcttgcgtcaaaacgggaccaatgactttgtcctcggaggcaatatataaccgaaaaggctttccggctttaggcgctcgcacaacgggtggagtagataaatacttcttcaactcttcaaatgcctcttgttgttttgccccccaagtaaaatcggcttcttttttcaaacgaagtatagaaaaaaaagcatcgattttacctgctaggttagaaataaacctcatcaaataattcaccttacctagcaacttttgaacttccttcttacatgtcggcgctttgaaatcatgaattttttctatcttcttaggatcaatctcagctcctctctcatgcaccatgaatcctaagaacttccccgccgacacaccaaaagcacatttaagtgggttcatcttcaaaccataccggcgcatcctctcaaaagctaatctcaaatcgactatatggccttccataccatccgatttgacaataatatcatcaatatagatctctaagataatacctagcaaatcatggaagatcaaattcattgccctttgatatattgcaccggcattcttcaacctaaaagtcatgacaacccactcaaacaaaccaacaaatcccgggcacctaaaagccgtcttgtacatatcctcctccgccacaaagatttgattgtaaccggcattaccatctaaaaagctaatcaccttatgacccgaggcatcattaatcatcatgtcggctataggcataggatactcatctttaggagtagctttatttaaatctctaaaatctatgcaaactctaatcttaccactccccttcttctccaccgggactatgctagaaacccactccgcataacgacatggcctaataaaccccgccttcaataaccgatcaatctcttctttgactcggtcatataataaaggattaaaacgacgaggtggttgcttataaggcctaaaacccggtttaattggaagccgaggctcaacaagctcacggctaagacccggcatctcatggtattcccatgcaaagcaatcaacatactctttaagtaactcgattaccttaaccttataatcggctttcatgtttttgtttacaaaagtcggccttggtttaattccatcacctatgtctacttcctctaatggatcggccgatgtaaacccttgtccaagcttctctacctcatcaaaatctctaacagtttctccaatatcgttctttgtagaccgatattcttgcaccctttttttaaccactctaaactagcctctttactcattatacaagtttatatggcttagccgtgctacactagccggctttacagagataggtacaaatttgccatcggagatactaataaaatcatagctagaaaaatccctccccgataagtattagatattcccatggcgccactcaaaagtagcatcggccatcgcaacctctgccgatgtatccgcttgcacaatttcaacatcatcgccgtcccattggattaaacattgatgcaaggtagaaggcacacaacaattggcatgaatcgaacaacgacccaaaataacattgtagttaccttgcacatcgacgatgaagaaagcggttggtagcgtcttgtttcccacggtgagctccgctgaaacgatacccctcgcctccgttggttaaccgttgaagccattgagaatcatgttagtcttcttcaactcatcatcctcgtgccccaacttcttgaataacgagtacgacatcaagttcacagcagcacctatatccaatagcatcctagagaccggcttcccatcaacatggcctttgaggtagagaagcttcatgtgacggtttgattcatcgggcttctaaaaaaccgtgtctttaggacctaatgagaattgagcaacctcggcttcatccatagcacaaaactccataggcaacatacacaccatgttgatatccatgtcttcctatggagacgattttccttcgtcaaccgattgttcttccttctcctcaacatcaatcggttttgccttctctatggacttaggcctccataccggtggtggtcgcaactcattgaactttttatccctttgttctttcgcctttttctctcttagttcttgggtccgaagacgttgcaaccttctcttttgtgtagccgttaaatctttaggcatccacctaggatttggctctgttccaggaggtaaataatgtcctctattaaccttgctcgaagacgatgaaaccctcacatcgccctttgtagccctctcatcaaaccggcgctggagcccagtcagaccggtcgtagaccaccggtcagaccggtcgtagaccaccggtcagaccggccagacgcgccggtcagaccggcctgaagcctcggtcggaccgctgtctagtcggcggtcagaccggcctgattgcccggtcagaccggctacatggccgtggtcagaccggccgactgcgatgagctggtaccggcttcggattttttgtttggggacttttcaactccatctccagaaggtataggcacatcatgggatcctattttgatagtaatcacctccgaagtcctttcctccaccttggtgcgctttccttccctcttttcttcattaacccgatttttaccataaaattggcttttgtttggtgaagataagcgctcatggattggcctccgtggtcgtccccacccttggttgaattgcattggaggcatatggttgtacattggcggcgttgccccccatgacatgaagtaaggataagaataacccggcggcggcattggataagaacccaatgacatgtcttgtggatgaaagtatggaggtgaacgcaaccgtcttagtgaatgaccaaatcgccccttagaaggtgatcttggtcttttccatttgtcgtgattcctctcaccaccttgcttctcatacttctccaaaagcatatcaaaggtcactttggttttcctaggagccttagaagtcgaagcttcacccttattctccttccaaacaccaacctccggcttctttggcaccatcatcttaggccttggctcaccaatgaccacttcctttcccttagtagattcggcttgctccggccgaatcaacaccttcttattattgaaattaattgtatttactggaaaaggatcatgatcaagcttcatcttggagccatcggtgaatttcaatcgtccttcatctatggccgattgaacctgtcgttgaaacacattgcaatcattagtagagtgagaatgagaatcatgccacttacaatatgcccgacgttttaactcttcttgtgatggtatgacatggcctttaggtaatctaatttgtttctcttgtaaaagataatcaaaaatcttatcacacttggccacatcaaaactatacttaacttcactttgccgatctttacgaggagtcggcattaaattagaacaaacaaaaggtttatttttgttggtccatgaccattcggcaacataaatatcatgatcaccctcctcttcactatcactagcatcagagtaatcaactacattaacattaggctttttgttgaatggtctagcaaattttttattatccttaacccggcattcctgagccagagccctttgcataagttgactaacatcaagaaattattggccatctagtttctctctaagaggagcaacaaaaccattaaaagcaagcccggccaaatctctatcagttatattcaaagtataacatcggtttctaacatctctaaatctcttaatataatcaacaacagatttattatatttttgtcgcgtcccaaaacgactctaaaatacatcctctaaattatgcctagaataattaaaatccgtgtgaaagcctccaacaattaaaatgtgcaaagttaaaagtcaaataaggcttggaggatttttgtatatttcctaaaagcctaaaatgcgtaaataaattttactggaattttcagagcacaaataataattattaagaaataaacaaagttaaaatgattttataaaaagaaaaaccctaaaaagtcccctttccctccccctctccctcttgggccggttcggcccagctccctccctctcccttctcctccccgcggcccatccggcctctccctgcgcgcgcgccgctgacgggcgggcccgcccaccaacctcgctgacgggtggggcccacccgtcatccccttcctcctgccgctcccgccgccttgcccgcgccctagcgccgccgccgccgcgaattccgccgcctcccgccgtccccgcgcgcaataaagtggggggaattattccccgggatcccatccccctttccccccatttttccctccctctcttcctcggattcatttggaaacctctcccctaacctcgccggcgccattaatggcggccaggtctcccgcgcccatttcccccttctccgggcgccttttttactcccaaccctatataaacccttcccgagctccccaccgccgtttccgccactcaccgcccttttcccccgccggaatcgagctcgcgccgtcgctttctctctccgccgtcgccgccgagctccggtccaccgccgtcgtcgccccggaccacctcccacctcggcgccg

SEQ ID NO: 29860 - DNA, 10324 bp, Oryza sativa
gtgcctatgggcgccgccggctaccataggggcgcgggcgcgccacctcccgccggtcgtaccgtcgagggcgtctttaagcacgcctagcggctgccgcgtggggcccggccgtcagccgcccgcgccctcgggtgcggctgacgcgtggggcccacggcgccggccggtgtaagccgggtgcacccggtccaccgtgggccgtgagactgccgcgtgggtcccactcccgtggacccggtccgcgcgccccctcccccggctgacgcaataaatccatttttaaattaaaatttaaatgaagaaattcgcaaatatccatttaaagagcatataaacttcaaatggccataacttggccatttgaactcggaattggaccgttcaagtctctaatttttccttaagaagtcaagaacccatttttgtgctttgttcctgcttgttatatggagtttattagagtaaaagccttttcttttccgttggtcgtgtagacgctgcagcttcggaagatccgctcttcgtggaagttgaagccgacgtttgggaaagcgagcaaggcaagtcacatcatccttgagcatattgaatcccagtttataaagttattttgatttaaattattgcattgtcgctttacttaaattcccgcattatcactgttttatttagccatgcctacttacctttgttatgaccttattattgctattgttattatttccttgttcaccctagaataaacaaaaccccaactagtggacactctactcatggtaccactagtatgattttaggtagatgcttcgctaattaattaggcaacattaggtggttttacaactctagactttgggaatattcatatcacctggacactatggaatggttggattattgtggaattggattcacacctcccactctattcaaaatcctcaaaatggttttaggctgggctcggggtgcatggttttgatagtagcacctcggccatataaggaccggtcttcgggcctctgttgcaaagcactaccgtacttccacatgtctagtgggtaaggcttagtttgtggctcagtctggttataaacaaaagtacacggatggagatggacgaagtcggcggtcgatggacatctctaggacaaatgaaggctacacgagctgcggcccggtagtcgagatgtcatggcacagtaccggtgtcctgctgctaggggctcagtcctgcctacctgtcccgggggttccggccgtaggtggggttgggtcggtactcttgtctatggctaggatgggttggaaactatgtcatgtcttccgtccatatgccgtggtggtatgtggcacgtggttacacgtgaggaagacgtgtcttatgggtaaagatgtacacctctgatcagagtaaaacctattcgaatagccgcgccctcggttaggggcaagccgagcaatgtacccaagttagcgttttaattcttaaaaacctgcttaacaactaaaatgtggaatggttggcctgggttggcttgggacgagctgggacccagggtcgggttgccagttcggtctgaatcatcgtaggccttgggttaaggcaggttcgtgtgggttcacggccttgattaataatattgtatagctctaggatcatgtttacaaaataactttgagcaactaagtgtcttttaatgctgtttactgcaaatcctaaccccctatattatggcttccttgtacccccttgcatttattctgcacttgtgggtgtgtcttgttgagtacagtggttgtactcagtcttgctcaatttttcccaaacccagaagaggaggccctggaagatgaaggctttggtgtctagctcgtgcctgtcgtcaagcgcctgtggtcgtcgccctagtcttccgttgtttcccgtttgtctttgtgtgtgctgggccttcgccgcccatgtaataaattaactatttacgcttccgcttgataaactctgaaatgtatcaacttttggtgtaccttgcctcctgggacaaggaataatacacgcacgtaaggaacgcccattgggttaattccggtcgtgacaatttttgcttaaccgatgttaaatcacataacctaagctcagtttctccagtatagaaataatcatgaaattgttcctctaattgagcccaagtatgaattgaatttgccggtaaagaagtaaaccatataaaagcattaccggataaagataaagaaaacaagcgcaatttaaaagtatcactattagcctcaccacattgcgctaaaaattgacctatatgctcccatgtggtcttaccatcctcaccactaaattttgtaaattcgggaactctataatttctagggaacgacacattatcataataatccggatatggttttttgtaaggcctatcacgattcctagtttcgatcccgaatttagtcctcataatatcactaatcatgttctccatgttattaggtccttgtggatttggtggtgggtttggtggcctaataggtttggtttgtggcgcaatatgattatattggccttgactagtatcgggaggatatcctctaaaaacatcattgtaggcattagggatatgtgggggaatttgaggactagtggtggcagtagatacaggggatcaaatgttctaaagtggtacgaataactagcattagtcattggatcaattccctgtatcggcacaattgcgccggtctgaccggcccaaggcccggtctgaccggcgtcatgttgcatggtcggaccagcctgagggccggtctgaccggtgggataatacccggtcggaccggccatctggccggtcggaccgacggcataatacccggtctgaccggccgtctggccggtctgaccgacggctgtgtcgcggtctgaccggccgtcaggcccgatcgaaccggtcacgaacgccgctccgttggttttggaccctattggatctataggaggttgatcagcagtggtataggctttatcttttaatgtgtaatcatccataaaagagcctagcctactccttaaaaacccatcaactttttccttaaacatcacatctaatctatctttaaaattagccatagatgaatctattgtatttgcaatttgttggtcgatagattgtgatacctcgtcattacttaccacgtcgggagcgagcttaggacgtggcccgggcttgatgatcacgccttgacgagtcctagtagtcaacctcatcaacgcctcccgtgtgagctcggtgatgtattcctggacatctttgcgatcctctccttcaaagtcatctaatgtgaccggtatcacatgagatggctccacctccgtcttagatgatggcttcgtcatggcgaagtcgaagttgagttgacgatgaacggatctcttccccattggagtcgccaaaaatcgtgttggcaacttttttgacaagttgacaagcacgatcgtagcaccttaagccttgcggtgattctaaagtcgccaaccacctcgatctagcaaagagctaaacctagatgggttttgataactaaaccggctagcggagccgatttctagataactacccgtctcgtgggcaaacggaaggttttcaagacaaacctacaaagagatgtcgcactctcgcagcggtagcggacggtttacggcgcaaaccgacaaagatggacaaactaagagaaaactaaaagcaatataaaaagaatgattcgattgattgatagtagattgattttaacaatgaaccagccttgtcccttatataggggttggtcttgccctctacaggcccttctccatgtccaactcggggtaaaaaccaaaggaaacccgaaacatgccttccaaagcaaggaaacctcgaaacccgacgcaacagaatcggactcgggcctgtcggtcagaccggccacataccgccggtctgaccggccttcaaccggcggtctgaccgcccaacacacggcggtcagaccggcctacctcgaaggaaaccggtagacttccaaattttggcaatatttcctattttaagcctaggtgccaaatttgggtgtaaacaaatacttccgtacgtcggttggcaaaaccatccgggcataaaactaggtgccactgccaggttcccaaacttgtaccatacaatcaaatcaattcttgacattgttatactcactggctcactggtagagagaatctttaccaccggttaaaaacccctttattttttttatttttggttgttgcagccgaaactaataaatcgtgactaaacatctcgatctaaaatacatactaaatcaaaaaaaatatatgggatatggattttgaactcaatatctctcaccttagccctcatacgtcctatctactacacacatctaatttagatggagatgctttctttctagctaaagaggtatatttagtaactgttggtgttccaacagtactaaaaatatctttagtacagattagtgttaccaaacagtactaaagatgcattttaaagatgcattttagtatagttagtaacacacaccacaaccaaagatgtttgtaggaacttgacttttataaccgatattaaagtatctctaactgatatatttgtgttttgggccctacggtaaaatatatcgtttctttggtagtgacccagctcttggggatgaaatacccaaaaggttcacgaaaagcatccatttaattacctctttgctaatcagaatgcttagcaaatcattttattaaaatgtttgctacaaagcggtgatggtttttttccggggatgtttttttttcctgtcaaccaaaaagtacttatgaaaaaattgaaaatataaattatatgcgtgggtgatatatcactttacaaatgcacgtcttttccttaaaatcacactagattaaatcaaacatattacaagcaaatgaagaagaaaattttaactgtaaatagtacaagtattagcaagagtaatttatttttttcttcgatctatggatcaaatttaacttgcatgtttgtatagtaatatatctatattaatgagaaaattaacaccatttcactcttctaaattatttcattgaagtacttagcccataaactagtttttagctcattctacaccctaaactattgaaaatgttttacatactttacacacagatgctatttcttttttttctttctatataagtcataatttacactcaacttttggtaggacgatagatgcattacaaagtacctctcgacttatttttagaattattctcactatttacataggttggaggcagatgttaaattctggattgaaattttagttctgtgttggcccacctggcagaatattctttccagcattttttttcaggtcagaagaaaacaatgtttaaattcttaaaatttatgtccgagactggagttctgtttccgccattacgcgtaatattaaggccctctttggcacaactctgaatccaaaatttctcggagctggatattcctaggttcacaaattcatggatctagatctatgattacattgataacatttagataaagtttttgtgcatattgcagatgaaacttaaatttttaaagcaactgtaattgaatgtataaacttcaagtctattatgggtctaaaatctggagtagtcccaaacaggacctaaatccctgtgaaattaatatgctgtaatttgaaatgttgtaagctaaaacatgaactcaagaacactcattccatatgattttgagaagagagatttcttcaaggaaattagttaactactaattaactagattcacttggagattgtggaataggagagttttaggaaatacagctgtgtcagaagcaactgggatcccacatattcccgcatatgatagtgatcctcatgtggtgatataatatatagttgtacaaacaattgatatttatagatcagtgcgttacttttagtccctttagtttgtttctattaggtggctagcaaaagcacagtgcatacctattactagcttagaatagcgcaaatgatttaaaatgttgatcatcatgctagcatgcactccagcatattagccttttggtgaatgaaattgtagaagcgcatgcaataacataacgatcggcagtatatttgccggaaatgttaaaaccgaaacctagctattgtgcgttttccacccaaaacgcgcatccatggcacaccatcggctagaaccggtacctttgttgagagatagggtccgctttaaataaaaaccgttacctataatatgttttaggtcctggtttttcaagaaccgataactatatttatattgtaggtttgtttttataaaaaaaatggcacttgttaagaaaaccgacagactgagtagaataagccgaatcacgacttgtttccacctatatctctcccttttgatcgcccctcactcactctttttattacccccctctctcccccttatcctctccgcctcctccctatccctctctctccaccgcaccacccggcggtagcgccctcccctcccctctcattgcttgtgttgttgatgttcttgtgttattagtgttcttgcattttcttggattaaatgtaattaaaagtgtaatcagatctggttggggtgaaggggacttattcgatgcatgcatcgagccggtctcttttttttttcattcctaggaccttaaaccggcacatttgagagaactcaaaaaggttcctgttgccaaattcggcacccatatgtggttggcaaccgacacatatccttttctgtagtagtgcctataaatccttgatggggtaccagcattgttaattaaacacacaattattcaagtggtgtacatcttgtttactgctgtccaagcactggtagcttgaaactgatatccaagcttgataagggtaccattcagacgtatagttcacgagtgacgattaaccaggaaatcaatctaacgccataaaattcagactcgaaggggtaggtaagtctcgtacgcgtgggtttacgtaattagttcatttagctttgagtactctgcatctcttgattgggtaggaaagtcttgattgtttaggttaatctctagagggctgctacaaaacgggatcccattgtaatggaatagacatattaactattctcttgcacgagtatcacaggtatcaggtcctatatatcacaaaggattccttgtggctcccgcagctattgtgactaattttccctaaactcaagaggcatctttaacctgggagaaggccaatataatgttatgtttggcatatcactcataaatattaagattatcatccctgttagtgtcaggggagaattttgagaagtttgtcaagactaatgcttagtacaaatttagtgcctatgcacatttgccgccataatttaaaaggtagcacaaaaaaattgcgtggcgtgcaaacatagtgggatggacatcacacatttcatatgcgccacttgtccatttcatatgattcttctcccattaggctacggtcattttcagagttgtaatactaagacaaagtggaccataattgacttggttcatcattccacaaatcaataagaaatatagaagactaagaggcaaactatgtaagatcctattaatcttgtcatttgatggaaaagatgaagctttactaaggggttgtagcaactccaaatttaataataataaagctcactttcctctcaaggggaaataaaattgcctctatgtcctatgtatgctactcttgaaattttcttctgtaagttctttgcaagcaatagggacatgcttaatgtcctgatttaagaaagtagttaaataagaagattaatggcattattttgggttgaatcattatgagacattgtcgaaattatggcattatttttcggccacatttctaggggagaatatacgtctcattaaggtcgagacacttcacccttagaaatttctgacatctattattacttagataaagctaaagtaaatcaagtgattcaagttcataaggtattatgcttccattacataaataataaaataagtgggagctcatcaagagctctaataagagaagattattctacctcatttatgactcatagctccattatgtggatgttataattttgtgacttgcacaattaaatatacataacatagcttgagggttttgttatggaaagacaagtcacatatggggtgcatacttaagaaatccatttgtggacttaatcaagcattgatgatgttttaaattctgctgcatcattagtgaactaagcttaaataagaatgaggacaataattattctataatgatggaagtaagacgtcattgaaattgtgtcattgtcgcttatgtcacatacctaggggagtttggaacgtctaatgagatagagatattctttcccttagattttaatggcattgtttagctttaagtgaaaatttcactaagttaagaaattagccaacaaatgattatttatggctatgtttacccataagcgacctccgatttcctttaagaaatgtaagacactaatgctaaaatcaaatgaagttatgagatctgattatggtggtaaacactaaataaagcttgttcaccttataagacattaaaaataagcattcatccaaatggttttccaaccatctaagaataaattgagatggatgaacaaaataagacattaaagtgttcatctaaatggtttttgaaccatacaagaataattgagattgatgaacaaaataaagaattttgtagaagtttctgaatgagtcaaaatactgggccatttaagtgggttaataaaattaagcctgactctaatggaaatttcgaacaattcaagtgaggtggacaagtgcatgaaaattaaaggtgggaatttcattcaccggtactctatactaatgacattttattgtcaagcaatgcatattgctgttagaaaccgagaaaatttttccctgagttattttggtctgaaggagtactggcttatatcaataagtcatatattgacataaagaaataatttgagagaatttagttatagttagtcaagctaaaattaaattataaagataatcatttatgattcagcagagagaagcttgagattagctcaaatctggatgcatacagatttggcatatatttttactgggaatcttggcagtatttaattaaatccagactagaccactggtattaagaatgttttgcattatttgcatgacaatcttaagtaacatgctcatatttctaaagtccaatgatctcagaagtttagaggcatttagacactcattttgtgagatgtgtggatatttataaagtttattcagattaagctatgtccacgcataggggagcaataaccatggaaaagctccaaaataatctcttactgcatagtcgatgatgcaattagattttaaagcatgttatgattaatcatatatataagaatatttcccaaaactaagagtggtaaatagcgcttataaaccactcaaaaggtgtaaaccactcaattatactgtgttataagttgtgcactaatcaaacacggttttctattctagtaacaacatgttgtgtgctttctgcctaacactttgatatagttgtgaaagatatgtcctgggatcgaattattattaagctaagcttttgctcatggatccatactttaaaggctcataaagttaagattaattaagatatgttctggccaatacatgtataaataagagcctaactaagatcctagatgagggggacttaattttcaatcaacacccactaagttaagcttgagtttatttggatactatagtgaactgtatgtcttgttgtctcggtgacgcataatgttgttgaaaacacatcgcttggggagctattttatttgataaactcgtcagctagtctcaaaatcaaggggagaatgttggttaattttatcggctaatgccggttagttaggataaggataaaatcccaccgattttcctatcctaacaagaaataaactaagagataaatctgttttgtgtgatcggtacaaaatagattcgaattttagattgagaaaacccccgagccccaccagtgttgcttatataaaaaaagaaaaagagggaggctgagtgaatacttaactct

SEQ ID NO: 29861 - DNA, 7738 bp, Oryza sativa
gtctctagctgctccccgacggcgaggcaaggctcgtccggtcgtgcttccaccgccaacggctttgccgcgctgtgcagcacctcggccgcctcctcgccttcgacatccatcgccggagtccgcttttgccgccgcctcgtgcctctccttcctcgtctaatccctccattctctttattagatcgagggcaagcccgtccgcctcttccagggcgccgcccatcaccggagcgctgctgccttccttcgccctgagctctgccagccacctccctccatctccgtgcccctcggtgagcacccatctcctttttctcggttccttccgccgctccccgtgccgccactcacagccggtgttgccgccggtggtcgtcaggctggcgccgccaccgcccagtcgggttggctagcgagccaacccacccttccgccgtgcaccgccactgtggactcggtccacggtcgactagcacctttggctccgctgactagtggggcctgccctttgtggatgtggtccacacctctccccttgctgacatcagcaatcggcttttccctttgtaaaataattattaattgcgtcataaatcgataataattccagaaatccatttaaatggctcaaaatttctaaaattcatatatagttcatatgaataacgaattgagccattcaacttgcaaaattcatctaaaattgatccctgttgacggtcgttatagaccaatttcgaccgctaatataactaaaataatagagaattggttatgctcataatgcatattttgttttgaaataatttagttccacttgtacttggagaataatttgttgcatgtactgagcaaataaaatgagaagaaatgaggaaaactcactcctaagcaagcatatggataagatgggcccacatgataggtgtaaccgtcctgaaaactgcatcaactaccataaccatcatgaggacccacctgtcagccactctactgtacttgggggcctgctgggccgacccaggttcggccgaacccctggcagctgtggctccggctggccctacacatggtcatccaggatcacttgccaatgacggttcaggggcagaaaggacattttgccttctccataaccgtcataccgaccctataaaaggaggagctcacttcacttctcaacacagtcaagcaagctcaagatttctctctacactttatttagtagtttttgtgctaactaaagtagaatagaatagttttcggagtcctcggagtcttcgaaagagttcgggtatggctctagtatcttttctatcggcttttgtaagacttccagcattaatgaaatattcttctttatatactttcggtactttgtttagtctgagtatcggctttactttacatttgtgtcgtattaattgtatggttagcttcccagagtggtatttattaatgtaaacgaggtacttagattaataagtatcattatctgggcatatatgctacggatctgtagaggtgggccgctgatgatgatagctcagtacaggtcttcctccacgatagtatatattcctaagacaaattcctccgtatttagccccggttggacggccatgacaggttgtcgtaaggaattcggcaacccagggtggtctctcgaaacaccaggagggcactattaggggatattggccacatgattgtatactagcaattgtagactaaagattgagtgtatattagaagtataggaattgagttcttttctatttctccttctacttagtttaggatcattattagagggaatctaaaagcgactacttagtttaggatcattattagagggaatctaaaagcttcgcttcgtgtcactctacccatatgctgaattaacccctactaggctttgatgaaggcaagtaatatatatgtatataatcattagcatggttctctctttcaatatcttcccttagaattaaataaatacgataccctggaatactcccgggtgaaatgctataatggtatatccgtatgcttgtggattttttctgtaaccaaccaggactaaagatctatttttgtcccggttgtttaacaaccaggaagaaaaacgtccacccacacgcgcgcaccaagtctccggcgcttctctctgcatcctgtgcatgcacagcccctctctctctccatctcccatccttatcaatttttcttctcctcccttatctccatcctgtgcatgcatcctctccatccttctccttccatactccccttgctcttctctcaccctctctccagctcccctcccctcccctccctctctccctcctcccctccactccctctccccctccacccctcccctcccctccggcaggccgcgacagaagcagaggcggccggcggcgggatggaggctgagtgtgggccggtggcagccgggcgcgagccaacggtagggaggccggccggcgggatgcaagaagagcgcgggccggcaacggccgggcgagggccagtgggatggaggccggccggcggtggcccggcgcgggccggaggcctcgccctcccctccccagatccggacggagaagaagctgcgggatgggggtgatttgatttttttgagtttttttatctttttttttatgatttgtggatgttgtgatttgtgaatgttttgaatgaatatgtgaatcgatattgtgaatgaatctgcgatgttgtgaatgagtctgtgaatcgttgttgtgaatgaatctgtgaatcaatattgtgaacgtatttgtgatgttgtgaatgaatctatgaatggatattgtgaatgaatttgtgatgtatttgtgatgaatctgtgaatcgtctgtgaatgaaaagatatgaaaggaggaaaaataaaagaaaaagccgaaggagaaaaaaaaattagtcctcccggttggtaacactaaccgggactaaagatgcaaccgtcttttgtcccggttggtgttaccaaccgggactaaggatccatctttagtaccgcttatttcaagcgggactaaagatgggcatctttagtcccggattcctcctcccggttggaaacttaggagtaaaggggttaccaactgggagtacaaatggtttctccaccagtgtgtaagtattttacgatttatttacatttggatctgtatattaatttatcattttgtaccctagctgattcctagacagggatttaatacacaaaatagtctgaaaatttaggctaaatttctggacgtaacatgaaaatagccaaattggcctcactagtcagacctcttagaaacctgtagcctgaccgaagttcattgtccacttttaccatctaaacacgtgcggtgagaccgtcttttgcctgaatgttctgaaccacttctatatttaatctaaatttgacctattgtcaaatttggatgtcagcccatacaaattgcattccttagatttgaactttgaaataaccaatggttgatagttgacagtgtctcgagatcgatttttactgtagtgcacgaatcttggtgtattcctagccatttaaaagtcaatatgtgtacattttcatgtagctgaaaactagacaatcccacagctggaaaatattttgtcagccagacgatgctcggcaggtgatgttggaagcgcgatgccgccaaaacaaggtgaggaagaagacgagagtacctacagaacagagctcaaattgaatgataaggaactcgataacacatcgggtgtaaattaaacagcatttgccatccagctgaaaccactacaagaaaacataatgttttcggcggccatacgatttcttcggtcaaaaatgggctgccaatattagtctttaaccctcgtttcctgattaagtgattatacccctatatatactcccttcggactgataatattagtcgttttgaataagggtaaagtcaaactttaaaatctttaactataaataatttttaaaatatttatcttgcaaatatgaaaactatatgtatagattagtcttaaaaagtacttcaataaaatcacatatttattgatatttcaatataaattataatagaaaatagttgtaaaagttatttttggagaccgtgctcttgtccaaaacgaaaagtattatcaacgaaaagtattatcaacccggagggagtacatctaaaactaaataataagatctggcctagacaagcatatatatttccatccatacacataaaatatcatactaatattcatttgtagtaaattcatgcgaatcaaattagcgaagtcgacggaggacgacgacgaccctaacgtatgtaatattatagtgaactttagtttcttgcattatatattatcaacaacaacaaaattagcatcacgaaaatactttcctatatgaatcaaatgatttgacaggcataatattaaataatacaatttacaagtatccacttttttaaaaataaaatgttctgttttattttggggcggagcgggggtatattgacggagatagtaacgcatgaaattgagaaaacgacggcagataaaccaagtctttggcggctgacggagatagtacctcgtgacttgctcaatgtgcctgcatgtgacggcagcgggtaaatgttgttaactaataacatgcgccaaaagctagtttcgttcaactatatatggcaacttttctgttaaatttccaaggatcccagatcgaagtcggcccaatcagctggcaacttcaagaatacatgaaaaagaaatgttgatttggcagagtgccaccaaatgtagtttcgttcaactatatatggctacttttcgctgaaaaattaaatgtccatactaattaaagctgctaatattgaatttcttcttcctcagatatatatatttcacatctatagcttgcgattatcgaagtctaagtaatgtaattgttcacgtttaaaactttgctaattacttgttttaattaactaacctttgcatccattcgaaatttcattaatcttacagaaacttttgtcccgggctcccggcacggtaattccttgtgcatacattgataacgctgcaaatacaaagtgagttacactggaaaacaaaatatcgagatggagtcctaaacaatttgctgcagttaaaaatacactagtacgaaatacgaaatatgatacgccagcatgttagtaggaaaagaactcttcaggctttttctttttgccatccctgtgatcaatgcgaaatacgccagcatgttcattgaggatccagaggatggttgtgagctcgccgccacaggcgagctgcttggcatgggaatcccttgtgcatcggaccgacgcaaacatcagaagacgcacccatgccatgaagatatgttccagcatttccgacatagagaagtcctccttgtcccattttttcagttcaggaatcaactgcttaagtcttttatacctatcgaagccaggggattcggagctgaaggttttgggcgtcgtaatgttggacttttctcctgggattttcattacccgacttagcagcgccaaggcgaagctagttccgtcagagagaattatattctggtcgaaaagagcacttgcgagttctggcctcgacttgtgggtactatatcctggcctccagttgctgatattcatcggcctcatgggtttgggctgtttctccttgtctattaggagttgggcgagattcttctttccttccacgctgttattaacagaagattgtaattggttgcccttaatttcgttcagtgctttgagggcaccttcgtacaggctgcgtagcttaaggcctggtagcatgcttgggcgcaccacgacgaggaacaccatgtaattcgacagtgccttgatcgcccgtacatgccgcaacgatgatgcatattcaccactgatcaagaggaagatgtctgtggtgatgtgcaagataaggatggtctcttggaatgcaggtgcaaagtccagagcctcttctagttcccgatgcattgctgcttgcggttccgccaacaccgccgctacttgttctggtaattccaatgcgggcaccatgggcggctgcttgtcaggaataataggcgggtacgctgacttgagacattcccatatactttcgaacataaggttcctaacatctgatgactgatagcataacatatgaaagcccaacgagttgtggtatctgtactccatccaacggtcatccagtgaaactaattccaacactgatttccacatcttcaacttccatgttatgtcacgagtgcactcgtcaaacaagttgtattgcccaatgattcctagccacctcctatagctagttgttggatgatccttggaaaagaacctcgacggatccagggagacgatggaacggcgaatcatgcgccatttccctgagcacagaagggaatggtgaagccaggagcgtggcctatcatgcaagaaggaataggtccatgtcgaggccactgctctgaggagccatttgatatccaggatgacgatgccacccagtacgatataggtgatcaaaacgtcaggctgctgcagaccttccttgctctgagaccaaaacagcaagaacattgcagatgtgatgaaatgggaggagaaacggatggcatagccaccccatgtgtggaccatggctgccttggtgtacaagatgtcatacatgagggagagctccatgtccaccacatcgtacaacatctcattctcattccaggtttcagggcggacaatctcttgtttgtcgacatcatgctcgtaagccatattgtcgatgaaggcgcccttggtgatatggagcatgtcatgagccgccagcaggatttgctcgttattgtccatcttcctgcggcctatacgccttaagtttcggatgctattgcttagttttattggcttcttctgctcggcctccttttggcttgaacttcgcatcttctctagcttggcgcgccgcagagcgaatgctctctccccatacttgacaatgcccatgatgaacatgactgatgaggacacccggacaatcgtgccgccgctactgaagaatacattcttgtacagtatatagattgttcccaacacctgcatgaaaaaccctatcatgtcgcgccatgataggatgttgtcttccaaggagtaggaggtgatgttgtccggaccaccagcatggaacatcagcaatgcggcccagatcgtcaccagctgcaccgactgggacgacggtgtgctgccgccgatggaggacagcttgccaagcgcgaacgtcggggcccaattagccaactggtacgccagccacaggaccaacgtctccatgcctgtggctttacggcggcgaacatcggcgaggaagacgaggaggagttgtgccacgaagctggagagtattgccaaccggatcatccacgcattccagaagagctgcaagccaatcatccatccaggcatcgccgaccctgctatagtgaatgggtacatgttagtccacaaggacaaaagattaacgcaaattacatgttaagagatcaaggacaacaactgatccaggatatataaaactgaatgaatatccgttacacctcccagtataatcactgatcaactacgcacctgattgatatcccagt

SEQ ID NO: 29862 - DNA, 622 bp, Oryza sativa
cggctcggcccaactctccctccctctctctcctctcccccgcggcccatcggcctttccccgcgcgcgcgccgctgacaggtgggcccgcccgccaccctcgctgacgggtggggcccacctgtcatagtctacctcgcgccgctcccgccgcccgcccgtgccctagcgccgccgccgccgccgaatccgccgcatcccgccatccccgcgcgcattaaagtggagggaaatattccccgcgaatccctctccctttccccccgctttcccctctctctctccctcggattcgctcggatttactcccgcaatcctcgccggcgcaatcaatggcggccaagatttccgcggccgattccttcctctccggccaccctctctccctccgacgctatataatcgttccccgtgcttcgctcctccgtttccgccactcgccgctcactctccccgtcggattcgagctcgcgccgttgtcctctctctccgccgtcgccgccgagctccggttcgccgccgtcgtcgctccggacctcctcccgactcggcgtcacctccttcggcttcgccgcgttctcgtcgacctcggccacccctccgcttcgctcgccgaccgccg

SEQ ID NO: 29863 - DNA, 748 bp, Oryza sativa
aggtggaacagtgccgcaaacgccactgtttggccggcgaggacgcgtctccggtgcttcccgcgaaacgagggctgactgaggaataggaggtgctgcaagcccaaggagaagacggcgcgcccgaacggcgctccgccgagtaggaaaagccggctgagccggccggcgcggagaaaaaataaggccgatgccggaaacgcgcctccgccggtcaccgcgcaaaacgaaggcaagcccggggtgaagaagttgacgacgacgctgaagaagccgacggcgcgaccgcccggcgcacgttcaagcggcacaagtcgtctgaagcggcccgccggcgtggaatatagagaaggccgcggggaaaaggcctagggaccacgggaaggctcgggatggggttaaaacgatagaccggagtgaggggatcccattttatagggtggggccggaacccgggctcggaaaagggcggaccggccacgggaataacggccgacggccatgaaagcggccggacttggcgcgtccgttcccggggattgaaggcccaaatcaagggggaatttggggccaattgaagaggatccaatggggattaaaaccccccaattaattttggaattggccaattgaatcaagcgcatttggagaagggaccaagctagggttcgcacgggagagaaagaagccgggcgggagaaaaacaacgcgcctggcgcgtgggccccacgcggtcgggcgcgcggtc

SEQ ID NO: 29864 - DNA, 849 bp, Oryza sativa
aggatatgtacaagacggcttttaggtgcccgggatttgttggtttgtttgagtgggttgtcatgacttttaggttgaagaatgccggtgcaatatatcaaagggcaatgaatttgatcttccatgatttgctaggtattatcttagagatctatattgatgatattattgtcaaatcggatggtatggaaggccatatagccgatttgagattagcttttgagaggatgcgccggtatggtttgaagatgaacccacttaaatgtgcttttggtgtgtcggcggggaggttcttaggattcatggtgcatgagagaggagttgagattgatcctaagaagatagaaaaaattcatgatttcaaagcgccgacatgcaagaaagaggtccaaaagttgctaggtaaggtgaattatttgaggaggtttatttctaacctagcgggtaaaatcgatgcttttttttctatacttcgtttgaaaaaagaagccgatttcacttggggggcaaaacaacaagaggcgtttgaagagttgaagaagtatttatctactccacttgttgtgcgagcgcctaaagccggaaagccttttcggttatatattgcctccgaggacaaagtcattggtcccgttttgacgcaagaggaagatggcaaggaatatatcattacatatttgagcccccgtcttttggatgccgaaacaaggtatgtttttatagagagactttgtctatgcttatactatgcttgtaccaagttgaggcattatttgttgtctaggacatgcatagttacttgtcaagccgatgttattaaacacatgttgcaaggccaattctaaatgg

SEQ ID NO: 29865 - DNA, 1123 bp, Oryza sativa
aaataattttataaactgggattcaatatgctcaaggatgatgtgacttgccttgctcagagggaacggccttccgaaccttcggcgacgaccacgaaccacgcttcgggaacctccgggacgacgaaagttacgcgaagcacacaagcaaagctacaagcctacaaagaagcaataacaatacataaaaagaaagcacagggttctttaggttataacaaacattaggagacttgaacgggtcgattcggagttcgtatgaccaagatatgatcatccgaagtttaatgctgttatatggggatttgcggattattataattaagctttgcaactataaaatatgtgtaagcgctagcctggaaaagacaggaaggctgcgccgttgacatgcagaccccacatgtcaacctaaaggaccgcggtagaccgggtacacagagacggtccacgggtcgatggaagtggaccccgtgtgtcaaccgaggcgagtggccgacaaacggactccactagacaccacacggcctgcacacgtggaaaccacgcggctaccgagcgggcacactaacgcggacactacacggtcaccacccgcacgcgtgaacgactaccgacaccggtacacgggtaccggggccgacaaccgcacaacgagcacgggcgacaccgaaaggacgaggacggggcagcgagggagagggatccttaccaccacgcgacgaggcgtggggacgacaacgacgaacgggcgcggcggagacagctcggggacgacggaggcgaaccgcgagggaacgacttcggcggcgatccttggacgaaggcgagacgcggctggcacaaggcttgacgacgcggagctgaggacgaagacgaggacggggctgccgcggcttgcttgactgatgcggacgacggatgagaacggctcgacggagggacgaacgccacgacgaccgggaatgatgagaggacgacgacgacgacgaccggggccggcgaggaggcgacgagggcagccggcagcggctgcacgaatgcgaggatggcgtggaacacgccgcagcgatgacgatgacggaggcggcgccgcgagacgacgagccggcgagaatgaacg

SEQ ID NO: 29866 - DNA, 655 bp, Oryza sativa
tcatacgtgagcatcagctttatgccaagttcagtaaatgtgaattttggttgtccgaagcgaagattcttggtcatgtcatcttgtctggaggaatggcagcagatccaagcaatgtggagtcagtcttaagttggaagcaacccatgacggtttcagaaattcgccgtttccttggacttgctgggtatttgtgacgaccagaaataacccaacgggcgttcctgacgtgcgtgcattaatacttgtgccaggaggcaacgtacaccaacagttgatacaattcacagtttaacaagcggtagcgtgaataggtcacttattacatgggcaccgaaggcccatcacacacaaagacataccgcgaacagttgacgactagggctacaaccacaggcgcttgacggcaagctcgagctaaacaccaaagactgtatctttaaagtgcttctcttcttggcttgagaaaaagttggcaagactgagttcaaccaccgttctaacaagacacagccacatatgcaggatacatgcaagggagtacatgggaattataccatacaggggacatggttgcagtctacaggatttaaagacattttgttgctcagaatatcttgttaacacgatcctaataactatacaaatgttatta

SEQ ID NO: 29867 - DNA, 29408 bp, Oryza sativa
atatcctaagaagcaatttaagctagctagcttcgagagattgatattcaacaatggcgtcagctccgaccgcctcttctgcagtgctcgtcatcgtggtccttgtggcgaccctcgccgccggcggcgccaacgcggcgaccttcaccatcaccaaccggtgctcgttcacagtgtggccagcggcacgcagctgagcctgagccagacgtggaccatcagccgccggccgattctgacgtcacggcgctcaccgactccgactgcctggcgctcgccgactttgaccgcccggcacgctcgcttctccgtcacccgccgcgctctgactccgactctgctcgcttgctccgccgcccacccgcgccgttcgtgcccaggaaggagagagagaggggaaaggaagaagagagagaagggagagggaagaagagaggggtgaggctgacatgtggggcccacgtgggcaccaccattttaaaattatttttttgcgtgcatctaatacgtgggggccacgctttttattattttccgagttataattgccacataagcgccacggcaataccacgtgggacggagacatagtcaaacaaaccacgtaggcgccacgtcagccaaaaccgccttcaaaaccgccgagggatctcgtttgcctggttttcgtaagttgggggacgggtcgtatccggttttacggttaagggacaaaaatcggactgggcgacaaatagagggacccaaagtgaacttattcctcttggcactgctcctctgcttcaatctttcggcctttttctagcgagtaaattgcatccactctacaacaacttaagcagatgggcgtaaaaaaacttgaaaattgaacgtctatgtgcaataccttgttaagtggatgcgtttgagtacaaaaacttgataatttagtatttttgtgcataagcttggctaatcatgtggtaggtcaggtttttttttttcacgatgtcaatatttcatcccaaagcaattctatatatcaccttataaaattgaatttagtcttcaagaattacagtgcacatccaatttacatcaccagttaggatttttttcttcaccttctcaaatctcaaccgaaatataatattttctatgtagtaaagtttaatttattgaagttattagaatgaaaatttgaatatgcttatacaaatccgtactagtatattatcaaaataagtactccattcgttccataatataagggattttgagtttttgtttgcactgtttaaccacttgtcttattcaaaaatttttggaattattatttatatttttacttactttattattatccacagtactttaagcacaacttttcgttttttatatttgcacaaattttttgaataagacgagtggtcaaacaatgcaagcaaaaatttaaaatcccttatattatattataggacggatgaagtacttaaaagttaaaatacaattattttatactttcaatacaattattttatactttcacaacctcaacgcggtgattactcaaaaatgtacttcctctgacccataaaaaaccaagtcatgtggatgaatctagagtagttattttgcaacaaatgagatgagccaaaaataaatttattatgggaaggagggaataggtaagaaatattgaagaaataaaactcatcgatttacggtaagggtacgtactaggatataaatgatcttatttagtacaaaagtagcctaaatataaacttattaatttttagtagagaggtagtattacatttttataaaacactgagtaacatagctacacactcaattcactataggaatttggcatccatatagcatatgtagggcttgtttggtacatgcgtacagctccaacttacctagtgtcaaaagaccaaccaaatatcgtaacggaaatatttatcgtctgtaatttttcgtttaacacaaagtctggggcaccagttcgtacaagatccgacaattagtccaccatgtctacactcatcacagcattgcagcgtcaccgtcttaattgtgcctacaaaaaacgtacagcccgaccacattacgtacactgctaccagtagcattctcacacttgttgctctgcttatatatgggtgtgtttagttcacgctaaaattggaagtttgattgaaattggaacgatgtgtcggaaaagttgaaagtttgtgtatgtagaaaagttttgatgtgatgaaaaggttaggagtttaaagaaaaagttgggaactggtttagttcgcgaaaagaaaatttttggatgtcacattggatgtttgatcggatgtcggaagggttttcggacacaaatgaaaaaactaatttcataactcgcctggaaaccgcgagacaaatcttttgagtctaattaatccgccattagcacatgtggttactgtagcacttatggctaatcatggactaattagactcaaaatattcgtctcgcgatttcctccctaactgtgcaattagttttttcatttatctatatttaatgcttcatgcatatgtccaaagattcgatgtgatgtttttgggaaaaatttttgggaactaaacaggcctaaactaggcctatgtagagaacatgagctgaccaagaggacgcatgcatgattagagaaaagactttaggaagttgctcgcagctttctgccgctatatattcacatttttcaactgttcatgaccagcaataataacagaatcacaatctcccgcaatatccttgtgtttggatggtgccctgaaaagctccagcaccaaatccctgcgttcaatgtaccacgcattcaatcagattaggtgcctctcgcatcgtatatatttgtcgaattcggtgtatatatacaaataatgtggaactgctgatgttttgcttattcgttcatattttataatctaatagattatatatatttatactactatcttaactattatagtacaatacgatattagtaaaattcataaattaattgttaagatcacttttacttataatattgatattataatactatcgatgaggagtccttatgtttttgtcctttcctcgggctgaatattttaaggctattttaatttgttatccaaatcaacagtactacaaatttgataatgccaaattctattaggtaagaaatggaagctaatgttttaaactttatcaaattttggtagcattggtactaaaatgtaatatttaaaattattcctataacaaaaacatatagaagtttcaattgatcagtgaagactcatggcataaaaaaatcaatgtgaaattagtttatcgggggaagtacttatttctagaggtagctaggaagaaagtactggaagtacacaaaagcagaaaaaaggctatatttagggcctgtttagttggcaaaatgttatatcggatatacgaacatatatttaaagtattaaatgtaatctaataataaaataaattacatattccgtcaggaaactacgatacaaatttattaagcctaattaatccatcattagtaaatatttattgtagcaccacattatcatttgtcaaatcatggcgcaattaggtttaaaagatccgtctcacaatttcaggacgaactgtgtaattggtctctcgcaatttcgtgacaaaatgtgtaattggttattttatctatatttaatattctatacgtgtgtccaaatatttaatgtgatagcgtgaaaaattttattcaggggactaaataggcccttattggccatcccgaccgaagaaccacgtgtgtgcacgccgcgtttcaccgacaagcagcggagtcaaatacgtatcagatcaaccgatccatccatcctcggtgtggattgcatctgcaatgtcactagttgagtagtagtaggagtaagaaattcggtgatctgcaggtttttggcgtgttctcccacatgtattccgtggggaccactgtcaccagccacgtcgcggcaggaggcatcctatggtcctaaggtgacaatggagaatcaagaatggactcgtctctgctccatccttaatcacagtgagctagaggggtctctttggtagagctccaacatataaattttctaaattcagctcacctctcgaattcatcttacgagaacgctccacttagctccattctcattttaggtggagctgaaattgtttggctgagattcagttccaggagaggtggagctgaagttggagttgtgccaaatagaccttagcttcaattaatagacatacataattcataatttagtgtaaatatattgaagtctagaaatccccttcccaaaatgaattaactgttactctagattcgtttttgaatacaagtagagtttctacaaaagagtttcagagtggattcttaaaatactagccagattcatataaaaaaatgaattttggaacagcgagagtacgatccaaccttcgagattatctttctataattgcaagaaaaatattcatcgttttagaaatgtggttgcagttgtgaggtggcatttacactacaacagaactcctcatcaatgatgaatagtactacctccgtcccaaaataattatatttctaggattgaaaattcatcccaaaataattgtaattctagagtactaattaccccatcaatcatttctcatttaaatttctccctattttaccctcagccatctttccactctcacataaacaccatttaatgaggggcaccatagtatttcttttcaaaccttaatatatgctaaacaatatagaattacaattattttgggacggaggtagtaatattcttgatgggtataagcctccttagtgattattggtcagtgataaaaaaaaactcatgtatgacatgtgaacacctgtcacagatctatgatgttatctgtgacggttcataacatatgggtcgtaatgatgaaccgggttgcaatcacgactttttaatttaaaagacaccaagaagtattttaaattttactaggagtattcaactatagtcacgcatcgcacgccgcaaattcaagattctttatgcaaaatatgcatgaatgcgctaaatggggttcaaatccaagaactcccagtcccactgcatattgaccatttttaccatctcatctatacaccacatattgttaatgtttggatgttatattgattgtttctgtctgaaatgtgaaatattaacttgattctctatacaacgttgaatgagatttcattgaacttcataattttaatatagggtatatctacatccgaggtcatttgaaaattttgaagtttttttttcaaaatagatctcatcattatatgtaaattatcttaaatgtaaatattatcaactagaacattaagtacatcttgtctagatctacgactttgatatatgacacatgaggttgtttgaaattttcatctttgaaaaataagatcccatcaatttataacacatattcaagcatacaaataaactcaaataaaaatactgtcaattataaagttattttttcggacctatacagtgaaggtttaaaatgttgatatagatatctcaactcatggactattgacatatttgactttagagatgcttcacctttttaaggtcatatatacccaatttcagtgtcgcgtttccctttctaaaaggaagaaaagaacgaccacctaacattcgagcaacacccctctctgaagttattgaatcactcggcacaatcattcagcaaaacagaatgattgctgtttgatcccaaatttgttggcaccctgttatataatttggccttttttatgtctttatgaaatctgcagtgcatcacgggttcgattgaagcctcccaacagccgtacgtacgtacgtacatgcatcaagtaaacacgttaacaattaagaaaagaaagaaaacaattctaaatttgtcggacaattagatgtgcctgccgaaattttgacaaactaaccctttaagaaaacttattttgagattgatccatactaaaacataattgcaaaaataagccgtcggctaagcgtcatcgagtttggcgctaagatccaaaatgagctagcaacgaaggttggcgccaaaatctttggtgctgaccccatgtaccggttaataatggaagcaacaattagcaatctgtgatgcaagtgtagcctagtggtgactggtgagagatgagctcttgcatccccctactatgcttttttttctttattttttcattggtgcaagttctctttctgctttcttgaattagcgtcgcatttattttttacaaaaaacaaacaactgagaataatcaatcttatacatgcgacagaataaaaaagaagagagaaaaaagtatagaaaatggcttatacatgcgaccaatgggaatcgaacacaagacctgcagcaagcaactaaaccattataccactaccagttgaagaggcaaaaatcacgttgttaaaagctagtatggggtcagcgccaaagagtttgggttgacccctgacacgagaactcatctaggatctcagcgccaacgataacagcgttgaaccgttatatgttgcgccaaatttgatggcgctgagccgatgatttatttttgcaattagtttttttgcaaggttcaatcttaaaataagttttccacaagggtcaatttgtaaaaacttcataattgaggcatgcctcagcctcacattattgtataggtatatgctgtaattgacatttaactgccctaagacaattaaatcagtactcaattttatcgatcgtcgctacatttgtaacggtacatgcgaactcctttttataaagaatacaaagtatagaatatttgatcgagcggtgcatatcggaagacactataatcatgatggtgaagtcatcatgacttcacttagcaagtttacatattacataatagtgtaaaaattgatctaatacccatttagattattgagtgcattattgtcccagattatctctcattttatgaaataaacttaataaatagcttacaataagtcgtctaagcaatgcagtcaggactaatccccattatttattgtattcacctgaacaccgataaatttttctgtgaaacatactatttatcaatatataatattttatatcctagtggctcctgagtaaaggatttaagttacatgtcttgagttcaactcctagaactgcatccctatcatttttatccttttattttcaatagtttagtaacaatatcttcattttaagtttttagccaaacacatctccaactttcaatattctttttctttttttagctcttctatcttttatcttgaatagcttagtgtaataatatcttgtaagttgtaacagattttacttaggttttgtgtggaatgtgtcgacgggggatacccgcagaccggatatagaaggtattggggtccgttggtacgaggatctacgtagtacgacatcaagcaaacagaagacaagaattatactggttcaggccccttggtaggtaatagccttaatccagttagtatgggattatatgatagaaaccacagattacaaagggaatagcagaattcgatgataccgacgagaccgtagtcgagttggtccgactagatctcccggcgacttggttcctgtgcgctccggctccgtaggttgtggtgggtgtgttggcagtaatattcgatgtcctaggtcctacccagggggtcccttatatatcgcgggtcagttgatctccaagtagaactcggagatatcggacccctcacgatatggtataggcccagtctcgtccgagtaggattccttccatccgtagattctgtttctattacgtgataaatttccttaacgtatacggaaactatccgtatacgcgcgagtataccgtattagtacccagcgtacatccaaggatagagggtataccttatcagtaaccctgacagcatgcatttttttttacttttttcaattcttccacgctttatttcaatagcttagtgtgatagcatatcttctaatgcacgtggcgcccttcctttttccgtgcggaaattgagagtgagagcgactctcgacttatggagagcaagaaaggaggagaaggagattccaattttcgaaaacttatatagggaagctgttagagcaagtctttcacaaaataaatcttaattttagaattggatctcatttagagatactattggtcatgctaaaagtactagagtatagaaattctcaattttataaacactttaaaaatcgtcactagaaaagtacccctacttaatgtttttactaagtgaaagaggtgctcggtttgaagtctcaaatatatttttttatagtttattgtgttgttctaaaattcaaattaataaattccaagttgtaatcagttttgagtctaattatttttacttcaataatatacaaaaaataaattaataattagcaccttgtaaaatgatgagaactcatatactctctccgtcccataatataagggataatgggtggatgtaacatattttagtataataaatttggacagacgatatgtaattatgggacagagggagtaattaacaaagataaggtcgttgtactctggcgcggaattcctaaccaaataaatttgaatttagaaatatcaagcacaaattgccagtcggcttgtagtaacagttttagttttatcaatatttaacatttccaatgttaaaaattgataaaatatgaggttgtatctatatatcttaacgtctcaagattcaaaattagtaaaattgccctcctaattaaagagggtgtttatttgagtgagtactttgccaaacactgtcaaaccttttaaaacttttaaaactgttgtttgtttcgctgtcacaagtgtatatatcatgccacatttttgcagcggactccacacgtgatactctctatttttcttgtcaccttgacttaatatgtggtcaacatattcttgcgcgtcttttaatgatcgccacaccttagctaacacacattttggcaagttggtgtgacttcttttttgacaagaaaagactgtgtggtatttatttgatatgaacatacaagtaggaatgaaaacgactcaaaaaagacgggaaccatatctatcattttcgtttacatttttttattaaaaaatatgaatagaaaacctcgaatatcaaaacagaatagaatattattgaatgtgaaaacaatgatgaatatttattggaaaccgagtttccaatttctttctaaaacaatagataaaaatttaaaattttagcagctaatagtaccactttccactttgtatcataaggataatatcacggttcataaacactttgtcaagttcaaattttcatctttgagacggtaaacattcttcaaaaaaagttttaaattagtttttcagatattctccaagaaagtttttgacctatttcgctttctgacagatagtgctattactgcatccctttttgttttcaagaaaagaattccaaatttgttttcggttttgaaaatttccgtccaatgtttcccgtttacgaaaacagttcggaatccggaaactttctgaaccgttttcaatcatccagaaattttccgaaccattttcaatcgtatgtatggagaatagtgattaaagcaggagtgatcatggtacaaagtaataatttgtgaatgtacaatactcccatttcctatgttatgtttgaagtgggcaagctgtcgaagatgtttttttcatagaagtttgaatcaacagtgaggtttcatcaggcccgtgtatatgggagttcagggttaactacagggctcccaaaattctgggttatccaaaatttaattgtagtaatagtatgatgagttataaggatatgttcaaaggtagatattctagtataggcttttaattagtacgtttaaagactattcagagataatagttgagacgataaaggctctaacaattaatgtacggactacagaacaattttttttattactctttccttttttatcctcctacaacaaaggttccttttataaattttaagagttgatgttaagtcattgttaactttaatatcaatgcttctctcctttctcctctctttcatatcagcaaatttaccttcttaataatcctaacagtgtgcgaaaattgtagctactccatctgtcccccatccgtcccaaaataagttaatttattacaagataagacatatcttagtactacaaatctaactaccaatcaacagcaaatactgcattatgccatcgtcaaatatggttcgctcaaacgccattccatattttgactttgctaaattgctactcagatttggtattcatatattagaatgccatcacaatgaaaatgcctttgaacttccctagtgcatttttgtcgtccgccaaggccttctagctcttaagcactaattaagagtgacaatttagtgaaaccaaaatccaaaatggcaacccatatttgatgatagtaattttctagaatttctcatagctttgcagactgcagctatgtctttcttctcaacagctagtcgattgatttcttgcgccaattcacacacaactcctcaatcaccgtatgtgaaaatcatttcctccccctcacagttttcctcctaccaatgaatccactcctccatctcatctatttttctatgtttttttttctaaactctaattggggttttgaaagtttgcctcgacaatgacaattgatgattttttttctgtgtttcctattattgaaaaaatgcatcagttatataattaagaaaatatatttggttattagcatttaccaaatgttgggattaattttgcattaagcaccaggcctctaatcctatcttactgtaaagttgatacacactaacttttaaaacacagtatgcaagtgtgtcacatcatcacccactagcaattattatctaaagtattttaaatcacatgcaaaagtgccgcattattactcactagcaattatcatctagtgtattttaaatatcatgcaaatatgacatatcatttacaattttattgtatttttagagctcaatatgtaagcaatgtcaaatcattatctccacgtcatttttatattatttaaatatataaatctatcatttgtttaatgtataacatgcatttatcgacatgtcccgctggaaagcgcagggtatcaactagttacgaggtaacttctgcccatgaattgaactcatgttttaatataaatcattatggggctgtttggttctttaccctaccaaatctttggttgtgtcaaaattttggcatgttttggcactaccaattctttggtagggtagagatgcatggtacatatttaaattgctaccaatgtaaagccaaatattgatgatatagagaagaaagttctagattagtgttaaattgttaatgggtattaccaataatttggattcaatcaaaaatacactatcactattcaaaatacaaataaattggtaaggtcacattttagcttcaatctaaaatggccctacaatttggtccagaggcggatggccccatacggtaaagtagtgcgcttggcccagctaccggcggcccggacaccccctacccccgcaggccacagtctgcaagttgggctacatatgctcgatctgctccctggccttgttcccgatctgttcgatacctagccccaacctggcgacctcctctcctagcgtcacctcagtcacccctggtcccctagcttcacgaacttcagtagcgccgtccttcgctgctgtgtcacgcatcgctacttgcctactgcctccgtccaaataagcttagccgtggatatccatatccacgaccgtccgtcttatttaaaaaaaatataattttttttaaaaagatagtcacacatagagtattattcatgttttattatctaataacaataaaaatactaatcataaatttttttaaataaaacgaacgaccaaacattagacattaacagtgtaaaaccacatttattttgggacaaagggagtacttacccgtagcctcggcggccgacgccccatgaaggacgagagaggacatgaggcacaaaggcagcgggattgccggccgcgggcagtgcgcggcggtggcgccagttcagaagttgcagctagcgcctgaggcttcttttttttttaataatagaacatcccggcctttgctcagaagagttacagccaattattataatctagcactctaaaaagagtgtagttaaaataaaaattgaaaacaccaaccaaaaataagaaataaccaatataagataaggagtacacatttattaaagtttatttatgaatctccatcgatagttgataaaaagttatatatccaagtttacgacatgcaacttttataatcggaaaaggtcgaggtgtgtcacccgattgccgcaacactattccaattagaaatagaacggtaagaagagataatgcgcttatttaactgaaagtcgttagtcactagaaattacccattaccatcggtaggttgcaatttagcagattcaacaagagaacaaatcaggagctagaagcagtaatgtgtttaccattttttatcatttttggtaatggattaagaatctgccctacagtaatgtgtttatatttatcttttttttaatggattaagaattggtgtagatttttagagccattttcaagtttaagtgtcagctcaggctcgtcttcacgttcatgtatacatgtgacttcaatatatgccttgtgggtttgacccacctagttttttttggcgtgctcagtcattgatttggtctcacattaggcctggtttagttcccaaaattttttccctaaaacatcacatcgaatctttggacatatgtatataacattaaatataaattaaaaaaactaattgcatagttaggagggaaatcacaagacgaatcttttgaggattaattaggctcaaaagattcgtctcgtggtttccaggcgagttatgaaattagttgtttcattcgtgtccgaaaacccattccgacatctggtcaaatatccgatgtgacttttcgtgaactaaacagacccttaattgatgatcagatttatttactattccctccgtctcataaaaaacgaatctataactagatgtgacatatactaggacgataaatctggacatatgtatgttcagatttgtagtactatgatgtgtcacatctggtattaggttgattttttatggaacggaggaagtacttctcaaactattgcggtaattttctcatggtgccctacagaagcacagataagaaggcccaggaaatagtgattaaaacatgagtgatcaggtacaaaggtagtaactagtactccaattcccaaatgtgcagtactcccatttcttatgtagtattgcttgaagccgcgggcaaattaagctgaaccaaagacgtttctgtcaaacaagttaatttgaatcaatggtgatgttgctgtcttctgccccacgaattgaacgccctaaccacgtaaacaatacgtggagggccaccaacgtacgccctcgaacgacgtctccaaacagtcgtcgtccatctacggggacctcacaagtcacaaacgagcgtgtacatgccattggataagagaggaaggacgaggcctctgggagacgacggcgatgccatgccaaaggggtcaaacgcactgaggcccagttcttttctacaacaaaagttggatgaagattaagatttttatggcacgtttttcaaaatattaaatggtgtgttttgtgcaaaaactttctatataaaaattgctctaaaatatcatattaatctattttttaagtttttaataattaaaactcaatcaatcatacgttaataccacctcgttttacgtaaaaaaacttaatcttcatcttcatcctcatattcaggaaaaaagaacaccacctgaggaggttttggacattctgctattcccaataagtggtttcgctggaatgccactccgccgaatcgattcgctaaaaaaccatccccaagcattgccagcccgctgcagtgtcatattcaccatttcattggattttgacattttttcccagatgagctgactgaaatgcccttgcggtcggtttaaccgagttgaaatggtgcggtgcagcccattcatcctcccgtcctcaccgcgtcgcagtcctcgccgatggaggccgccgctgtgctgaagcaccgtcgtcggcgccagcgagttcttctcgagccatcgttgtcgctgtgctgtggaggtttcctttccgcctccgcccgtatggccgaagcccgccgttcccagctgggaggaaatcctaaccctagagccatgcagcgaagatttggagtggcaagtgaagaaggtagctcctcattacctggtcttattggggcaactcggtatcctataggtcccagtggcctcacccttgttcgttgccctcgttgtggaagtgcagtagtggagtgcagatcttggaggcagggggacgcgttttcttcaaatgcgaggataacgaacaatttgtgagtctttgatttattttgtgcatttgatttgtttttgtttttggtttgaaattggtctgtatgcaattttgtaggtgccaaattgttgtacattcttcaagtggattaagagctataagaagatggtggaagcaatggagcttaattatcctgatgaggccgtgagtgatgttgcaatgcctatggttgcagatattgttgagaagaggccaaattcggttactaatgcaaaaattgaaaagctagctaggtcgatgcaaatattagtgttcatgaaccgcagcacactagtttttgtgctttgtatgtgtgttatggcactgaattgatgtaatccagctgcaatgtatctagttagtagggttaaatggtagtaggcagtatcaagtgactccagttgcaatggcagaactgtgttttatccaatgttttcagtttttgggaatgtcacaatatctaatttctccacctttgtgttataatgtatcctttttttttggaatggtctataatgtatcaattgacatacactgaattaatttggaaacagtggtaaaatgaaaattgtgtcagcattttgtttatgtaatgctcatatattcaagttcaggttcagacatgagacagcacaaaaatggaaggttcaggttcagatagcacaaaatgacagtttcatgtttggcaacaagcaacaagcaacaaattcatacacatatcagatttggcagcaaagaacaagcaacccattcagattcagacagaggtccaaattcagccatatcacaaaaggacacaggttcaggtccaaattcagacattacaggttcagattcagagaggtttagattcagacattacatactaacattcagatattacaggctaaagacatgacagattcagacataacatagtgatagcaaaatgacaacttgcagctgattcccaacatggtcaaatttgaagcttcttctttggcgtcagcttcctccttggctgggagtagctgttagtaggctgggtacttgaagttgtggctgcttgtggctgagaagttgtggctgcttgtcctcccatcatgagcattgctagccggctgcaagcaataataaagttaccttattgtaactctgcaatatgcaaatattggtacttaataaaagacaatgaagctaccttcttgtgactcttcctgggctctcttcaattatttgttgcacacaaggccttttgggactaggaatatcagaactagtcccatattttgtagtgtttcttcttggcttcctcttcctgcaagttacaaggtaaattattgtaacatgttataaaaaatactcaatgcaatgacatttgagttagtgaactagccttgtctttgttccattaagtgaacacttgtagctagtctgagtatgtcccaattctccacagcccttgcaccttctcttgccccttaccaacaccttctttcctggctcagtattggatgtactagctttggatttagatttgccaccttcaagacaacttttgatcctaagcatcctgtttcttcctgctgtcttcttaggtaaaggtgcacctagcacccatggcatctcaacctgtggccagtaagacttgtcaccaagtggctctataactctcttgtaggcattcttgaacatttagactgagtaatatggatttacaaagtcctcaatgttgacatctctgctctgttgtgctgttatcaatgccaatgcatgctgacatggttttccagtgtgctgccattcctcacaagagcaatatttattgtatgccttcacaacatgcttgccattactactgctgttatcaacaacctctgcagttaaggaatcggctttcactactgacaggtgacctaaacccctattcatagccttcagttgttgtgtaactgctggcaggatcttgccagttaatttctctccaatcctcctcctcttattccaaagaaccataactagcaccctatacttgtctgcaaggtcaccaattggtagtgctttatagtccttaatccagttgttgaaaacctctacaatgttgttagttatgtaatcacacttaatctctgggttgaaaccactcctcatccactaggtttcaagccaagggagaacttcactgcaagaaccaataacctccttcatgtgcatttgccaaatttctttcctatatgccctagcagctgggtacatatgtgagtgtacatctcctccaaacctcttcacaaaattcttcatcaaatgccaaaagcactccctctgcttagtatgtttgaaaacagtgtgcacagccttctccaaccccttacatgcatcagtgcatacagctagagggttaacatctcctatggcagcatgaagctgactcatgaaccactcccagttatcctcagtctctaaatctataaacccaatagaaagaggatacatccaattatgcccatctacagctgtagcagatgctaagtggccattccatctgccatttaaagcagtgctgtctatactaatgtatggcctacacccctctaaaaaaaccatcaatacaaggccttaatgcacagaaaaaccttttaaaaaaaactctcctatctacttccacaatgtcaatctctataacactactaggtgatgttctaagtacctctgccctccacctatacagcatgtgaaaactttcctcccatgttccatacagctgatccaaagccttgagtctacccttacatattgtgtcatagttgattgtgcacttttgatcttctactagcctagtctgcaaggctttaggacccatacctggattcttcctaagaattggaattgcctttgcaaccacccatttactagttggtgtagttgttcttcttctgctgctagaagtacatgtatgatggtcagttagcactgtcacctgcaaatcaaatggaagaaactatcagcattaatgcattgtgtgacacatctactgtctaactgaaaagaaaaaaaataataccatcactgtcttctgattaggctgcttatgcccaacaatatgccaagggcagtcatcaaccatacaacctcctatatatcgttcaggatctgttttgatcaaatgcaactcaaattcctcatttatggcatattgcctcacagccaacctaaactccttcatgtttgggtacatggtgccagccttcatgcatggcttgtcagggtcatagggcatcaccaactcccctggtacttcatcagacacaggaattgctgccccagtagtgtcttgagcagcatcacccacaccatcaccagcagcagcagcttcagccccatcaccaccagcagcctgacccccattgccaccagcttgtctagccatctcggcttgctcatcttcagcccttaaacccagcaactcatagaatttgtcgtccccaacaatatctaaccgcccttcatcgtcgtttcgggccagaatgtctaggctttcccaatcaacaatgtcaatagcaacatatgggacatcaagaacaggagacctagctagttccccaacttgttccacgaccccagcaggagaaacaaagaaaacaccaccattatcaccttcaccaccaccaccaccaccaccactgccgccgccaacaccaacatcgggttctaacacacttaagctaagcgcaggctcctccacgagcctgaagaaatcaaatgtggacgaatgttagagaactctctaactgattcgcacctctaactaattcaaaccaatcgtaatcacaaaagcaagccacaaatcggtagaagaacttacccggacactaactcgtgccaggtgcaatccatcaatgccactatgctcctacctcccacgcgctagcaccattggatggcgacggcaccgccggcgacgacgaccaagacagaggagcgactggatctggggatcccctttctctctcagacctaatagcggctcaatccgctttctctcacctcagatagaagaaacatagcacaagggcattttcatcagcccaaatgcgaaaacagcagcaaaagagattaaatggcgaatgtggcaaagaaaatgttgggcaccgcttggggatgattttttagcgaatcgattcagcggagtggcattccagcgaaaccacttattgggaatggcacaatgtccaatttctcccacctgagacacacaaaaatcagagagagagaagcttttgtccatgatgtggttgcagagatttgcagaggagaaaaaaggttttactctgtagcaggagaccccagtaaaagatgtgcctggtccaggcatatatttacagctgttaaaattaagctgtacacgaaggcgctcgatacatcgagagatatcgatcgagcggcgagtgtcacgcctgcggcagagaagccaaagcttcgagttagagcagtttgcttatcagccaagtgcatatgttctctactggttccttactgtacatgtacagccatacacacgatctgaacaaagtaaaatgtactatcccgtaaagctgatcagtataatgcatgcgtactcctctcccgcagaatggaagaaccggctaaggctctgtttagttctcaaaataaaacttttcaccttctcacattaaacgtttaaacacatacataaaatattaaatatagataaaaaaatcaattatacagattacgtgtaaattgcgagacaaatcttttaagtctaattacaccatgatttgacaatatggtgctacagtaaacatttgctaacaacgaattaattaggcttaataaattcgtctcgcagtttccaagatgaaatctgtaatttgttttgttattagacaacatttaacattttaaatatgtgtccatataaacgtggatatcttaaaataaaaaattttgccaactaaactaggcctaagctagatatatcatggagcatgcagtcaaaggccagggtaaagtcaggcaggtcctcatcgtccgagaagcctcgatctacatctcctccggtcctgcaggctgcagctcaggtcaagatcgacctgcaaaccgccaagaggtgaaaccaatcaaaccatcccattcccatttgccagttgccacaagcgcccatggcaagtaccagttgtacaaattaatggagtacaatacatccattcatcatccttccatcttggaatcgatatgatcgacctaattagtataatctagggcagctaagacttaagctctagatttatctcctaaattattattagactagcaaatatacccgtgcgttgcaacatgatctagtaagaggggttaaacattccgttccactgtattatagtatgttttcagttctttctgtgtttcaacttttttccatggttgttttctccgtttgtgtgtatgttcaccgggttttcggaaacttttgtttttaataagcggattgactaaaatctgctttcgcccttcctgcattataggaatttcttggagtgaaaagcttgggcaccacatgctgatcccttgtggtggcggtacaacacaatgattgagaaatccattgaacatatgatggtcgtgcttgtgcgatcaaagcatgggctcatgttctactcctatcgtctcctcaactacatcgcttcctcatcttcatcgaaccacttccactgttgggccttaccaatgcacagcgacaccaaccattttgcctcccattgcgagtatctccacactctacaccgccgccttaaatgtcacgtaggcctatccgacaccacctgcatggcctccgtcagtgtatgggtcaccgtcaatagccacttcaagctgccaggcaccaggcactttctcaagaacatattatttaaattatcagatgtatcatttctcaaattaggtgtttgtttgttcacgagttcacgtaacgaatccatgtgaatattaaaaagagtagacctactttaattaatttttaatttagatttcctagttgttatggccacatgtcatatggattatgaggcttgttactattatatattttattatattaatgactcggttatttcctaattcacgagttggcaatcctttgacatcgttcaaattgtaaacttaccgatagagcagaagcaaaacatgatatgattgatggttgtgtgattggcgtgggaagacaaataggatgtgctgtgtgtggagcctaatggattctaacgcgtggggatgcttgaccatcaacgtggaagcggtgatttttagtttgggagcaatcagactcgcacgcgctgctagggtgctagtgcagaaacatgaaaatcgttgatgtacggtagacaacgacgaataatagaaacactacaaatattttatatatgtaaagataaagataaagataaaatgatatcacgaggaaataaaacacgaacaggagtggtgagacatattttcatcctttatttattatagatcattgtacttttaggaatttaaattgtttgtttattttatagaaaaaaaaagaaaaagaaaaagagatcggaaggggaagaagcgaagcaaccacagggtgtggtggtctttttgcgattagatcttttgtccttttgtgataagaaatttagattgtttatttacattataaaaaaactctcatagagactggtcttataggttccggttcatttaaaaccggcacctatgagccttttccaaccttcgcacgatgaataaaataaaaaaatgacacctttaagcattataagtgccgcttctcaagaaaaaccgacaccaaccgacacctatacttatattataggtgttggttctagcaaaaaactggtacaaatattataggtgtctgttttagcgtaaaacccgatacaaatgttataggtgccggtttttttaaaagaaccaatacctataatataaatgtaggtgtcggttctacttaaagaaaacgtcaccaataaaaaaccgactggtcaacatccttatccactcgcttctctcgatcgcggccattctacctcatccactcgctcctcacacttctcactccatccacttgcacccccctcccctctcgccctctctcgcctcctccttctcctagcagcaacgcgctggcggcgggggtggcggcggcctcttctccaacggaggcggccccttctccaacggaggcggtccccttctctttgaagcggcggtggccccttcttccggcagcggcagcggccacaaggaggcagcggcggcggcccccttctccttgcagcggcagcagccccttcttccggcagcggcagcggctgtaaggaggcatcaacggtggcccccttatccttgcagcgacggcggcccccttcttccggcagcggcagcggccccttctcccagcaatggcagtggcccccttcgccggcagcggcggcggtcccctcatccagatccggtggaggaagcgagaggaggcggtgctatgcacggataatttttgctgtgtaatttttcctcttgtggttgaatatgtgatgaagtatgattgatatgatcaagaggggaggagaagtgaagctagcgcccaggaggagggggtgtgcggcgcttgcttttttccgcgtccgattattttcgctcttttttttcgcgtccgattttttctgctatgacgaaaatcactctattttgtattaaacggacaaggaaaacaacttcaactttttaagtagtagaaattatcttaaaatacagtagaaatttaaagatacaagtttaaccttattttcaaagatttttttggctttgccactgcatcgacgacaatacctactcctaccacattctacgtttcccagcattgtttctaacagaactaatacatttatacatgttatgacggcctagctgttcatggtctgggagcagtagtaactcagcaagtcactgccttctttcatcaggttttgcttgatgtcttgaacaggaagacatcttcccatcaaaagaattaaatttgaaaatatattgtttgttttttcttagaaatattcgggttttaaattgttttgcacaaatatacggttggtatcgctcaacggatgcacgaaaatgacgtgggctgatgatactgacgattgtcgcgtgacaaccgcatgagaccgagcggtctcgcacaaccgagggctgatgatactgacggtgtcgcgtgacaacggcacgagaccgagcggtctcgcacaaccgaaaagctacaacagctgagcgagaccggctatcttgttatctgagctttaatcaatcactaattaggatgattaatcatcaattattaattaactaatatttaatcatgacaactaatcactaattaattatttttcaaaacggtgtcgctgtttggcagtgcgagaccgcgcgatctcgcgttagaccgagcggtcttgctcagttactgcgtgataccatcggtgtcgtcaacccatatcattttcgcatatttgttgagcgataccgatggtatatctgtgccaaataatttgaaacccgaatatttttgagaaagaaacaaataaacagcatattttttaatttaatttcccatcaaaatttctctttgtgcgtgcagggatatatataacaaaattttcgctaacggtcacttaataggtccgctttgcttgtaaaaagacatttatttttacaagcagaccttttaggtgaccgctagcgaaaattgattttcgggggttggtaaccaatccctcttaattatttttgcaagcgtatttttatcaaacctatcaataaaaataaaagggtaacactatgaaacttgatttttctagtagtgagaacccctcgtaaaggtatcctttagcaattagtgagtaaataaaaaattgaagttcgctaaagcactgcattagcactataatctaatcatacctgtgcattaatatttttatttatgatgatgtaagcgcgtttacatcagcgtccgtaatttcatttatgtttagaaaaaaagaaaacctggagaaaccaatgcgatcaggcgttgataggagcaagagaagcggcgggtggactccccgtcctcctcttccccaaagtcccacagcaaacttctcgcgaagaggaggaggaggagccccctttcctttcttcccaacccatacgccatatcgatccatccctggctagcaggagccagatctcgtccctagggaggagggaggaggaagaggttgtggtggcggtgatggatcgccattcgccagacagcagagctccagcgcactgcaacgcagggtggtgggtcgtcgctcggcgaaggcgacgttcgacgaaggcggcggcgggggctagctactactactgtaggatcgaatcataagaactaagccaaccagagggggtgaatggttgagataaacaaaaaccaaaaattttagcggaaataaaagttaccctcgaaatcaatggatcgcggcctgaccgaggtagttgtgccggtctgactgtctaaaagccaccggtctgaccgagattggaactccggtctgaccgcctgatcagctgccgcttgctgtcgccgccgccagtctgactgccattacgccgccggtcggaccgccgcgatgccgccggtctgaccgccgctgagatgccggttagaccgctgaaacccggtgaaacacaaatcgaagaactctcaaagtagatgacaattttattgcttctatccgtgattacaaagtgcaccaacagcactccttacaaaaatctcgaccaaactcgaaaccctaactaaactagctctcaaaagctatacaaaagcgatacaaagcaatacttggaagactcacgctccccctctatttatacatgaggtaggcagcctaaagccacgaaccaaactcatactaagagtcctaaacaccttaggaaaccctctaatataagaaagaaactttacataaccaatcgtaccaaatttgaactccttccaaattctacttcgcatcccatacacacaaaaacaataccaccattgtatgccatatggaatcttcaccaaccacgtgcatcaactctagccttagtatccttcatgatatctgaccaccacggacatcgtcttaccaccaagccgactcccgatccatcaccgcaaatactctcccgaggcatcgagtcacctacacatgaaacaaacaaagaaaccatattccgagaccaagctatctccaacttgactcattagtagcaaacaacagtattacatacgtatagtattcatctagaagccataaccatgaaacaatcacggatatccaaagaaacaactcgaaaccgaaaccgacacagtgtcggccggtcagaccgcgggctggccggtctgaccgcacacatagcaccggtctgaccggcaacctccacccggtcggactggtcacataaaataacagtgaatccgatcatcacctgaaaattgattatctccaaaaccacttcaacgataatctccaaatatcaaaaccaataatcacggataccaattgtttatcacagaataagaatcaaaacacacattgatcttacaatctctcccttgatgaacacattggcaaacctcatcaaaaatgttttggtgtttggaaaaataaaaacaaaagcggtaaaaagcacacttcgtacaaaagtacacatcgtgctcaaaaatccaaaagaaaacttctccccctttttaaaagaaagaaattcccaattgaaccaaaaattttcatattacttctcccccttttaacaatgatttcatcaagcataggaattatgttcattaatgtataagaacttagcatacatatagcatatcaagttatgtgttgcaataaaaagaagatgaacccatctataacagaacaagcatgcattaaagtataaccatgaaccaaagattttacaattaagcttgaatcaacaagcaaaattcatgatttcatacgatttctaatgcaacatcttaacaagcacataggttgaaaaataaacactaaacacatatacctattgcatttatcactctttctcaaataacctttagcacaaaacaacaaagagaattttttttctttttcttttcttgagccttattgctcatatttttctctttattccgggtacgtccctgtcgtcaagactgtttccagggattcggcacccattgttttgctcacatcgaatacgtccttgtcgtcaagactgtttccaacgattcggtattcatattttttttcatatttttttctttttcataatgagcaattaaagctatttgagaaataacaaatcaataaatcatatatataaagcatttatagatcaaaccatatgctagcatcaacattgcatatttgctcaattcaagtagaatttaagtgtcatgcatcatctcccttaaaagcaaaatctaaatctcatgaaaagactagaatacatacaagctatgctagagacaaataaaccttcaaagtattgctagcatgcacaagaaaatactatatgtataaaacaaagctctcgttttgcaatttttttttcattgtcatattattgcttgataaaaccatgaggtacaaactccccctcaaaacatgccaaaaggattcacgaataagcattaactccccctcaatataatctccaattctccccgaacaaaaatcaagaagaaatcaaagattttgaaaaagacatccaattgccaatgatatcactaagattctcatgaattgacatgtatatacttgtattaacaaaaactactacctcaaacactagcattgaaaagctaataattaagaaagtagaacaaaaaatatgtcaatccaaaagtaaattgatgttaccttgaaaagcaatcatcatctcaacattgaacgctcatggggagtatgccgccaaaatacctacgaaagaggagatgtcgaggccttcgtgttggggttagaaataagaaattttggaatccaatactgagtcacacgaccagtagaaccagtaggtacatatgcacttacaaaatcagaatcagacttacctgataaattaccttcttgcttcacaaaagtctgagttgaatttcgcgcaaaattgccccgaggccggtctgaccgtcgttgtacctgcggtctgactggacctggcaaccggtctgaccgccggttcaactgcggtctgaccgctggccggtctgaccggctggccggcggtctgaccgctggccggtctgaccggctggtcagtctcggtctaaccgtggtcctcgaattaaaacccgatttttgccaacatcgttttgcaaaagcaatttctctttcctttttctgtttatgggcaagtctaaaacaaaaaccaaccaaatgtcaatcttttccacaaaaagaacaagtgtacttctcacaacaagtttgtgaagtagatggttttgaaattgatggttttgcaacaacagaaggttttgcattcacatcatttgatttcaaagaagatgcattcaaagaagacatgatgccagcagatttaaacacagtgttcttaggctcagtttcaatcaaaatttcacctctcctagcaacacccaaaacagtaggaggatgtctagtatgatgagcataagaatcaaaacctaaaccacgattgtgtgtgctaactttagattgatcaagaatcatgttgaggttctttttaccatcagaaaatctttgcaaataagaaatctcctgagtaagaatagcacaatttttgcaagcatccaaaagacctttttgttttctacaagttgagcaagaaaacacctcatcttgtttaacaatctcttccatgtgtttaacatgccctaaagcatctttcaacttcaactcattcaaaacacactttgaacaatcttgagaaaacaaaacaccattgttttgttttgccttatttgcacacgaaacattgaccaaagaacttgcacaaaaaacaactttgtatttttttcaaaacgttctttgtcaaaattaactcatcaacaacacgagcatgtaaagcaaatccaagagcaaaagaagattccaactttttagatttttccatctcaaattccaatttcttacaattaacagaattgatatctcgcaaagcattaatttcagaaaataaaacttcacaagattgacaattatcatcattaggaatcaaagattttaatctagcaatttcagcattaagaatctcaatagtatgatccctctcatcaagcacaatagaacatgttcgaaccgttcgagttgatcatcggacatggcattaaataaagcaagaacagaaggcttcgatgaagaagtaccaacatccaaagaagtcgaggaagaaaccaaagcactagacttagaatcaactttacgagcaagaatattcatctcatgagttttcaatattgtgtaaagcgaatccaaagtcaaggtagacatgttaacagactcctgaatagatgtaactttcatttcccaaatagacatgtcaagaccatttaaaaggtggcgagaaatctcagattgtggataattagcatcataagaggaatcaagatcactcaaaattttattaaaccgagaaagatagtcatccaaagcttctccaggtttcatctcaaatttaatgtactcctttttgaaaagatcacgacgaagttctttaatattatttgttccttgatgaaaattactcaaagcagtccaaatctcatgagcagtttgaagatgagcaacacgatcataatccgaacgagaaatcccactcaaaagaatattgcgagctttgcaattttgttcaaactcagtttttgcagcagcagtattaataacttcaggaatcatataaggatgagaaacttttctccaaatatcataattctcagccataatgtaagattgcatcctactacaccaatgagaaaaatccgttccatcgaaaacatggggcttagttgtaaacttattagccatggcaaaaactcaagatcggtaaagatcgaaaagagcaaacgtggctctgataccacttgtaggatcgaatcacaagaactaagccaaccagagggggggtgaatggttgagataccccaaaaccaaaaacttttagcggaaataaaagttaccctcgaaatcgatggatcgagatctgaccgaggtagtcgtgccggtctgaccgtctgaaagccaccggtctgaccgagattggaactccagtctgaccgcctgatcagctgccgcttgctgttgccgccgccggtctgactgcccttacgccgccggtcagaccgccgcaatgccgccggtctgaccgtcgctgagatgccggttagaccgccgaaacccggtgaaacacaaattgaagaactctcaaagtagatgacaaccttattgcttctatctgtgtttacaaagtgcaccaacaactctccttacaaaaatctcgaccaaactcgaaaccctaactaaactagctctcaaaagctatacaa

SEQ ID NO: 29868 - DNA, 9980 bp, Oryza sativa
acccgaaaccgaaaccgacacagcgtcggctgatcagaccgcgggctggccggtctgaccgcacacatagcaccggtctgaccggcaacctccactcggtcggaccggtcacataaaataacagtgaatccgatcatcacctgaaaattgattatctccaaaaccacttcgacgataatctccaaatatcaaaaccaataatcacggatgccaattgtttatcacagaataagaatcaaaacacacattgatcttacaactacgacgacgacgatgacatcttcaggtggcagctgctggacaccagctactcggtgttctcgccgccgacactgctcgacgacgaccacccacacagcaaggtgtagtgacccaccccgatcccgccacgaggaagaccaccttgttcgctgtgtgtattgcatgatgaaattgcatgtttattgtggtgttctaaaattcaaattaataaattccaagttgtgatcagttttaagtctaattattttttcctgcaataattttaaaaaataaattaataattagcaccttgtaaaatgatgagaactcatataattaacaaggataaggtcgttgtactttgagtggaattcctaaccagataaatttgaatttagaaatatcaaggacaaatcaccagccggcttgtagtaacagttttagtttttttcaacatttaacatttccagtgttaaaaattgataaatatacgaggttgtatctatatatcctaacgtctcaagattgaaaattagtaaaattgccctccaaattaaagagggtgttcgtttgagtgagtactactcaaacactgtcagacctttttaaaactgtttgtttgtttcactgtcacaagtattgcagcggactccacacatgatactctatttttctgtctcacctggacttaatatgtggtcaacatattcttgcgcttcctttattgatcgccgcaccttagctaaaggtaggtacaatagcatgttataaaccagctataaacatattttaaagagataaaaaaagctattaaccagctataaacatattttaaagagataaagaaatagagagaagagcagcgggttatggatctatagtcaactgcagcacggactctaagacgtaatgtgtgtatgacaggtgggaccagatactaatattataataagcaactattgtatgaattggctatagatgatttatagtcattagtgggctgcactattaaacttgctctaacaaacattttggcaagttggtgtgactttttttttcgagaaaagacggtgtggtaatgatttgatatgaacgtacaggtaggaatgaaaacgactcaaaaaaagacgggaaccagatctatcattttcgttccatgttttttattaaaaaaatagaaatagaaaatcttgtgtataaaaacggaatagaatattattgaatgtgaaaacatgatgaatatttattggaaaccgagttttcaattttttttctaaaacaatatataaaaatttaaaattttagcagctaatagtaccactttccactttgtatcataaggataacatcacggtttaaacactttatcaagtccaatttttcatctttgagacggtaaacattctttggaaaaagttctaaattagtttttgagatattctctaagaaagtttccgaccgatttctctttctgttagatagtgctatttctgcatccctttttgtttccaagaaaaaaaaatccaaatttgttttcggttttgacactactggaaaaatcgttttttcaagcagccaaaaatagttttcgcaggcagaccgcctgtatgcaaaggcatgcggaaatagatgatttccacatacgggtcgtgggtccgccaggcgacatctccatctttgtaggcagtagattcacccgcctgcaaaaaacatttcagtgaaataaaaaaaaggcgcgccaccgccagcctccccctccggccaacggctctcctcctccatctgcggccatccccacaggcattgatgccgtcgtcgtcgcatcggcgccgttggtcatcgcgcggcgtcgggataggaaggagccaagccgccgcctctcctcctcgtcgccactgcctccactccccttcggaagaccggccggcggtggatccacacgcccggggtgagccggcggtagatccatagatttggtcattttataatccttcaaaactaaaatttttgggtattttacacatttcaaacgataatagcatggtaatggtgtgggaggtatcactaaaatcataagtcacacggtatattgttagcgtaccatgtgtaatggtgtgggttttccgaaacttattggtcgatacgtgcaaacaaaccgtttattatatgtgttttggaatccttcgtgtcgacatgatagacggtgaggaactaattacaataatgccaatatctttaacgttcacttcgtcaccaaatttacttaacctttaaaaatagtaccaagagtaaaagtaaagacacacgacttaataccgacatggaaagctcagctgcagagatgaacccttttcctcccataaggaaagatacagacggtgataagtgagagaacatttattggttgtggtgcggtagtgccaatcaataatgctcaggaagagcaaatatggaccgcattttagtgtcctctagcgcagtttaaaatgagtggtccgcactggacaaacagctgtaactagaagggcctcacactttatcccacttacgaggcatgggccctagcaacttgcaagtggggcgctgacactgcaacaataatttttctgtttccaacccccttctcacactataccgatactccaatatttcttttcctttgcagttttgacaccctgtgggacgtctacccagcgctgtggttgactggcgcgtgggtaggtggggcccaggtgtcggtgaccctggagccgaggtacgtgggcgcgggtaagccgtggcgggcggtgacgatggaattcctggccactgtacagatcgcgtcagcgtgggacccactaggtgacgcaggcctaccctgtccgatatttactgctccacgacgccccgctttccccccatccacacccgcacccacctcgctcgcgcgctcggtaaaaatccccacgatttgggagtcctccttacatggccacgcccagaaccgggagcactcgctcttgtcattcagattgccgctgcttgcaggagccagatctcgtcggtaggaggaggaggaggttggggtgggggtgatggatcggcagaggcagcagagctccaggggcaatgctagtgctactgcaacgcggggtggtggtggtggtggtggtggtaaggggggagggaacgggaaggcggcggcggcggggaagaagccgatcaaggtggtgtacatctccaaccccatgcgggtgaggaccagcgccgccgggttccgcgccctcgtgcaggagctcaccggccgcaacgccgacccttccaagtacagcccccgcgcctccgcgggcgacgacggcggtggcgccacggcgctgcccgacaccggcgcagccagcgacgccgacgccctcgaggcgggcgcggcgccgggtcgtcatccggcggaaacggcgacgttcgacgaaggcggcggcgggggcgggggcggctacgacgacgacgacgacgacgtcttcaggtcgcagctgctggacaccagctactcggtgttctcgccgccgacgctgctctacgacgaccacccgcacagcaaggtgtagtgacccaccccgatccctcccgccatgaggaagaccaccttgttcgctgtgtgtattgcatgatgaaattgcatgtgtgtgctagcttcaattcagtgtgccgctctatcccttagcctagctcatcaccacatgcctcaaatgaaattaaaaaagagagtggattcttatccctcgagcatacatcctctcgttctgtacgtatcgttcaaaaagttataaaaaaattaaaaaatttatcaagatagatcaatagatcaatagatcaatacatgatagtatatctttttcaaatatgcaagttaaaatttgacttatacaattcgaaacaaaaataaaaaaattgatgatgaattgcacgttctattcatagttaaatttgttatttttttctacttgtataagttgaatttgaatttgtatgtttgtgaagtgatatatcatatattgatctatccaactaattttttttcaaatttttttatgacttttaagtgatatgcaaaaaaaataaggggatatccctttaagggatgaattgagttttgcattaaaaaaaatgaaggcaaaatcttagcctgagctgccgctatctgtgttgtgtgtttggtactgtggacgccacacacctggggggataaattcttcttccttttttaatttcccctcgctctcttcttcttctctattgatatcaatggcttggttaattaattgtcgtcttcactgctagctcttaatttgcaactttgcaagtgatgaactgatgatgcaatgctcgtgtcgtcgccatcgatatatatatatgtatatatcatgatgatcggcggccagctacgagctgatgctagtatattaatttccagatctttttttcttcgatccgagacgtttttttgcctactactgttcctctgattttatggtcacctttttcttttctttctgtgcggttttttttttttggcatggttgagcttggagcatcggttcgccgatcacccccagtcaccaccaattcggggtggcgctgcgctgtgctgccatgccatgccactgctagagtggtagcgtgcgaaacagtaaacacactacaccgtctgtccaaaaaaaaaactctaacgattaatccggataaatgcttatccagattcattcccagaagttgattttttatgggacggaggaagtacttcgctgcaacaatactactactgcactcacctggctaaggcagtgtacacatataagggtgtgtttagttctttgggtgtaaagtttttaaggatacgaacacacatttgaagtattaaatatagactaataacaaaacaaattaccgattccacatgtaaattgtaagacgaatttattaagtctaattaatccatcattagcaaatgtttattgtagcatcacattgttagatcatggcgtaattaggctcaaaagattcgtctcacaatttatatgcaaactatacaattggtttttttccccacatttaatgccttatgcatatgttcaaacatttgatgtgatgtttttgccaaaaatttttaagatataaacaaggcctaaatcacagctagatatcgttggcacgcaccatatctatatcttaactcctaatcagcatcaacgtgctaatataatcattaattaattaattaaccagttataaaccagtatgatataaatgtataggatgacgacctcgatcactttaatttcatttcattttcagtctctaattaataatatatataagatcggcttgaaattgaaagaccactttcatcaggaatatagtggatacatgcatatagtcatgaacacatcttatctatctttgcccttcgaattcattagttatatatgcatggcatggacacaagatcaaagaaaagcaagtgttgcgagcatattttagctagctgcaattatcatgcatggccacccttcattttcatggcgaattccactgtactagagggcatcaggaatttcccccttttttgttttacccgtgaagaaactgaagaattcgaattccggtcctacctacttccaacaggagaaattgacataattaaaaacaacccatctctctttgttcttcgatcaccagttaaatgtatatatatatatagcatacacaagattgaagccttgtgacattcaaactctagaactaatattaattgtagtctcatcagctgcgggccagaagacacaatgcaatacacgagggccaggtatatatactgcaacagaagtgtaagaaagcgacaacatcgtgttggcttactagccagctagccccctacagtccagataatgatttcgttaagaacagtacatgtgaatggatttgcctctcgcactttgttagtgcttgttggatggtcaagtttggaaccgcgagttacaacttacaagcagcagcaaccataagtttcactaattttggtcttcaaggtccttaaaacactcatatacagcactaccatccaaccttttgttcatgattcttctggtttcatattttggcttgtttgatgtgttcatttttgttcttccattcttccactactagttatactactatttgctaggcaaagattttttttttttcgtaagcttgatttcagttactttggttaatttgtttttccattcttctatttcatttgtttgacaatatactgcttcatgggtgttgctttgtgctgttctgttcccactttgattcttggtcattgcttatatatattgctcttgttcattgacccattgcacttaagtttacctttcgttttgtttgacattggctgatgactcgatggcccgtgttgtgttattccttgatgttggaatgatccaaaattaaactttctatcttaattactatcctagaacacactcatataggtttaacactatacatgcatacacgcgatgcactgatgcgtgataataaattagcatattaatccagtggaatttagctgtggcttaatttgatcttttctgctcacatacaggttgtagcattgtgatatccatgcatgttgtgctagctagttgatcttttttatatgtactcaatctatttctcttttcccgatatatgttgtcccaacaatctctcatttttcttgaatcaataatgctttcccgttcaatgtttcctcttttgcttccactgtgtgtacaagtcccaatctgtgtactgcatgcttataaaggaccctcttcgatcagcatttacatcctgcagtctgtatatgatttggtctattttccttcctctttaatttacttttgagacagacattatattgtcatggcattatttccttaattctaacatttcggtacatcgtgtttacttcattacttgtctccaaattttatgcaatgtgataaaagaaattagttgcccagatgttatttacaaacacaccatccaatgtctctacttctgactaatagtaacacgctaaggggtagggtgacaccttgttgatttaaacttgttagcacctcaattagtccacagtctttgagcacatgcatgcatgagtccatcaaatacttgcattttcatacatatgtatgcattatatttgaaccaatacttttcttagctagctagctctggtgctttactaattaagatgacacttcacatgcatactattactccatccgtcccaaaatataaacatttttgaacttcgacacagtcttcgagatgcttctttgaccaacaatatctataaaagtaaaatgtttttaaaaaaatgttgcatattatgatagcttgtttaatgataaaactagtaacatcaattttacattgttgatcttgttaatttttttttttgttattaacagtcaaaattaaaaaagtttgactttgcactatgccaaaaatgattatattttgggatggagggagtagaattttagttcatacaaactatcactacataagtaaattaaaaactttttttgcatacatgttttgagcaatcttgggtttctatgcaactctcttaattagttattacttctgaattcattccattgttttcttttggatttcgttactactctcttctagagaggaagttctaaatctgttttactgtctggttctttggtaaaatcctatttgttatgttaattttggtatttcaatcaactaaatattttaacatattttggtatgaatgtttgtgggtgcacttagggttctatccttttttttctttaatacaaaatgtccatgcttttttggtaaaagaaatatattataacattgccatagcaaaagaatgtatatatttatcaaacatgttaggatcacttgtttgcttttttttatttatgttctttctaaaaacaaaattaaaccacataaattcaacaaattatactttctaattattgggtacatatgcatcacatttgatttggtcaaaatagaactactcctctatgttaatcttcatccatctagtttaatttggtactaataacatcgtttctcggtgccaactgttcagatgctttttttgggcaaatatatctggaatgaataaaggagaagaaaaaaaaactaattaaacgttgaaaaggaaaagtttatcacaaacaatcttttgtctgatcaagtgtgctggtaattaatatattcaaacaataaaattaatatgtaggctatttgagcacgtgtttatattgatataataatgttttaagaaattaccaagtatgaaatttcttttttcctaagactggcaaaagttttgtctacgtgtatattgatagaacagggacaaacacacaaggtgcaaacaatatttacagggtatgctgaaaaaaaggcacaccacccaaaaaaaacctaaggaatcttttccaaaggatataactctataattcgatggtcctggcttttgtctaggctcttccctcgactttgatcttcacttaaaaataaatgtcttagccacttatcatcaatcttatattcttccttgtatcttttgaaactctgtctactaggcttttgtctaggctcttccctcgtctttgatcttttttttttcgaaaaagaccctcatttttgatcttcactaaagaaataaatttcttaaccactcatcatcaatcttatattcttacttgtatcttttgaaactctgtctgctagttgtataagtctttttaggcacttcgtccagtcttttgtatggcattgattaagtgataagaaactcctggtcaaaaaaaaaagtgataagaaactagtaatgcaatactcagaatgaagcgatataggtcttgcgaactgtgcatagtatggggtatatatgctgccgatctatgcttggctgcttggctttacttctctagtacatgatgattgtttctgatcaacattactggctttcagtagtcattttatagtactgagaagattgcattttacctgaactctgaaattaccctacaacttgattgtgttttctactaattatcacagcacaatcttctgatcagtgtaactgaaatagcagttctttttttataaactccgcactaacttctagagaagctgaaataccagtctttttttctctttttgtgaacggactatacactgttgaagaaaccatctttggtcagtcgaccaaatttcacaatagtcccgtttccattaaaaaccgggactaaaaacgatttttagtcccggtttaaaaaattttgatctttagtcccggttagtaacaccaatcggggctaaagatgatttgtagtcccggttcatcccctgtcagatgtatgtcaggggttcgagaatctttagtcccggttgatactaccaaccaggactaaagatcgagcgatctttactcccggttggtaataccaaccgggactaaagatcgatctttagtcccagttggagttatcaaccgggagtaaatatttctctcccacatccgatcggttaagtctcagacagatatttagataagattggaacatcccctctattgctcttctcagatccaatcctcttacttcttccctaccctctctttctcccctactcccctttctcttctcctaccctctact

SEQ ID NO: 29869 - DNA, 30670 bp, Oryza sativa
tcgggcaggcggtggccgggccccggcccggttttttttatatatataatttgtgtttcactggatgtataattttttagattttgtgattcattgcatcgcatggatctaagatgtataatttgtataatctgtgatgtatttaatttgtgtgtagtttttaggatttgtgatgtagttgatctgtgtgtaggatttgtgatgtatttgacttgtgtgtataagtaacttaatatttgaaatgttgatttgggatgtgcatctcattcgattcgggagaaaatacatagattaacactagccattagcaaatcaacaacaaaataataataataaaaagatctcgaggaactgtcgcttcccctctttagtcccgattggtaacaccaaccgggactaaatattccccctctttactcccggttggtaacaccaactgggactaaagatcgagttccggttatttgaaccgggactaaagatagcgatctttagtcccggattcgtaatcctgattgaaaaatcgggactacaaagggttctaaaccaaaagtaaagagcatttctccaccagtgatagcaccttaatatgcacattcttggaaattattagttgactaactaaagcacggtgcaaaaatatacatcttctaacacactggtttactgattaccaatttcagctaaattacaatgaaatattataccgtgttcatttctccaacaacggttggattaaattttggatactcgtggcacgtttttcaaaccgctaaaccgtacgtttcgtgcgaaatatttatatatgaaagttgctctaaaatattagattaatctattttttaagtttataataattaaaacttaattaatcacatattattaccacctcattttgtgtgaaacacttaattttcaacttcgtcttcggaatattcaaacatcagtggtagtgtcattattggttaacattgcagttttttcttgaaattgacgtgtacgcacactaacaactgcaatgctgctagttgtagtgaagttgtcgtttactgcctgtgatttatgaagagcaattgatgtgctgaatctgctgatccgacacgctcactacaatgctgctagatgtacgccctccgtcacacaaaaaacgaatttagaattaaatgtgacacattacagtacaacgaatccggacagatacactgttacaaatcatcaaataggtgtcgccactataggtgccagtagtgctaaaaccggcacctataaacctttacccacctccgcggattgaaatcgcaaaaaaaggcacatttaagtaattataggtgtcggttccaaataaaaaccgacacctattatattttgtgtcagttttttttgtaaaaaaggcactacaaaaaccgacacctataaaaaattatatgcgccgattttttaaataaaccgtacccaaatcgagatgagccggcgggccccagcaggacgagataaggataagggtgccgctagtggcttctcgatctctctctcgcccccccccctctggcgtcgtcggcagtggcttctcccacggtggtgggcgaggcagcctcggcggcggccggggtggcgacagcggcggaggggttgcggcggcgaccggggtcggcggtggcgggcggagcggtggcggcggcagatcccacgacggtttcggcaacgtagcggcaacggtgattgtttttatgtaattgttgagggatctgtgatttgtgtaaaacttctgtgatttgctttgagggatatgtcttggatgaatcgatggtgacagtgtgaaacttctgtaattttgttttggatcgatggtcttggggtgacaagtctcggggtgacggggaacggctcgatgcatcggctcgattcccttttttttggattcttgggacctcaaaggtgccggttcctttgaataatcacatcagtgccgtctcctttatgccggttgggaaaaaccggcacctatatagggtttccaaccggcactgttgcggtgtactatggtagtgatatatgtctaactagattgatcatagtactataatatgttatgtccagtactatgttagttttttatgagacgaagggagtagttaacttgtcgtttactgcccgtgcagagcaatttttcttttgagaactcgtacagagcaattcaattgatgcgccgatccgacatgttcattactacaataacgaaaaccatatgtggtcatctctgtggttttcaaatggctgaagtaatgtgactgttggttctgaatcctgtataggagtatactgttttgactgagttctatctcttcacagataaaatagaacctcatttgcgtgatatattgttatcaacttattactccctccatcccattataagtgtagccataagtttctgtacccaacgtttgaccatctatcttatttgaaaaatttatgaaaaaattttagaagttaaatcacgcataaagtactattcatattttatcatctaataacaataaaaatagtaattataaaaatgttttaaataagacggatggtcaaagttagacattgaaactcataactacgcttattatgggacagagagagtattattgttaaaaaactaaagtttattagctaaaatcaaaattgtttctccctttaattaggagttcagcgttgtttctcgtgaagtttttgttgatttcaagatccttaagccattctcaacccaataattagaatggtttctatagcattaaataagttaccatctaaaataaaaaatgatatggcaactgaataaatgaggaaagagaagaaaatcacatcttacataagacatgcatggtttctatacaacatccaaaatatcatatgagataagtatcattagatattagatttaagtataaaaaagtggtgtttgtattgaaagagtagagtctagtactatttcttaacgatgtgaagtttatgaaaactatgtctattgtcttgggttgggattggccttagtactagtgctaacagtgttgttattaaatgttttctgatacatttgtatatgctgttgttggaaactcaaaaacgtatatactgagatgtgcgtgtatacatgagatattggttattgtcagagaacgacattaactcatgaatgttttcagatcagaacgtactgagatgtattatttattttggaatggaaggattacttattatctcgaccgcaaataattcctgtatcttcctgaaacttaactcatgcgaaaggtctgtttgcctcgaatgtgtactattactgttagtcaagcacataattcagataaacctcatagctagattgaagtgctattaacgggagggggtttcccccattttgcatttccttcctcggggcatttgcaaatttgccactggtttttttaattttacaagaatgccacttaatgacagttttagtggcatttttgtaattttctagtgacactcttttaataatgattcaaagcaatagtaaatttgtaattgccccttccttctattgctccagtgatcttggcttatgaatgcttgacattacaccactactacacaaactccagataactttttttctcaccagcggttaaaatctatagcctcatgccacgaagcacgtggcctcctcaggcttgtatgggccacatgtgaaaacatatttttcacggacggtacgttaataaaattatatgtattaatggtcgtatgaatatagactattactttttcttataatggatagcccaatatttactttagttaaaagttatgttacaaaaatttttagcttagcatagaaccatcataatgatcaaaatttgaacattccaacacaaaaaggataaataatcttatttaatcctattggtaaatctacatctgaagtttgcaaatttttactagattctagcatgcgatatacattaattccttattttcatcacatctttgtagctagccctataacctgagatgtcctgaaagtgcctttatataagatttacttggagatttttcaaaaatcatattattcctaagttataatattgcccaacacaaaatagattctctagctagaatgacttgatttttgagtgaatatgactttttagaaacataggacaaacgcatgcgctcacaacatttgcatactcacctctgtaaatacaaacacaaacatcctacctctataaagcacatccgaaagtctaaatcaacatatcttaaaactgatgaaatcactatgggtgtctaaaacaactagttataaatatgaatacatgtatcatacctaggaattgaagttggttggactggtttcaccacaaacaatttaatcacttctttcatagagtgcgcttggtggcccaaacagccgaacgcctagcagcgggccgtaacgcgggtggaggccgaccgttttttgggttctcaccaccatcaacgagtcgatcgatcgatgggtggagacgggaaaggttcatagcgctgcgctgtcttcgcatcggcgattcggagtggcgttcgtttgctacatcctactctacttaaattcaagtttcctaagttaggtcgaataatattgaggtgtgcacgaactgcgagagctgctacgaaaggtatacgttaaaaacatggacagcaattgtagaattaaatttgaaatatacttttttttcataatttacgtttatatacacgggtgataagatttagcaaaaatatacctattccgcgagttagaaatgcgggagcgagatgataccgtagaccggcgacgtgggaacgcggtaccacagcatgggagtgcggtaccggctcggtcgcgcagaccgggggtgcggaaccgagtcggtcccgcacaacagctgtgcacgttgctgtagcctgcgggaccggctgccggcccggccggtctcaggaccgaagcggtcccgcggtaccaagctgcggcaccgagccggtcccgtggggctccggtgccgctttccaaatgcgcgggatcgcaatctctccgcatctctgttgtgcgggaccgcaccgaaagttattttatccgccgaaagttattttgtccccgggctctagctccatgtgacatgttgaggcacaaacaaaggagagagagattctcttctctagtcccagcttttttcacgtgttgcccgccgaaagcttgttgtcgtctggttagagagactactcgtcgagtgcctataaaaggaatattacgaaacgaaaaaggcagactcaagtatagtatataactcatattcgtagagtttatcattagtgtaagcttcaataggttagtgtgctcggcaaatttcacaggccctacttctggtatgaactgagtacgcgatgattcatggtgcgtattagaggcttaccataagataatgtcgtgaattcgccaagcgttcaaacccactgatgtgttatgtaaagaaaaatatttgtaagtattcatgaagaaaaggcaggtaaatatttcgaatttatttatttagaaatttagccgacacattagaaagttttaatacacaatattacatattagttcgaatgagcaaaatataaaatcgttctactcattagcctcatcatcgaaatttcttgatgtcgtagtgccttttttctttccctttcttctagcaccagctgaaggtctgcatcctaacaacgataatctttcgggtgaatgtcgctcgcggacagacctatatatgtgccacctcaacaccgctgaaattaatgtacccgtagtcttgggtcggttgagttattggaggcggttcatcaagctgcgatggtcctatctcgtgttgtgctgttgacgaccccccaccgtagctacatggttctccgtaggacagcgtgctgccggcatatcccatcatttggtcggcagtgtacattcctacaaaacattgaatccaaagttgtaaagtacacacattctggaactaaaatattttgtactaaattataatttgtacctgttatttgtggttgcatgataggtggttgactgaacaaccaatctacttggcctaacatctccaaaaagcttggtccttgtggttgtacgttttcatttatggacatttggtacatccccctacaggtgcagcgctaatttaatatcgcaatataaagatcctcaaaattgaaagacatcatgtacgaaccagtgttgtatgtggaagctccatgccactgatcgttcatacccgttggaaacatgggcatgttatcttgaggtacagctgcaaaaataagcaaatatgtttgtgactcggtaaattacaaaatgatgaacattaacatgcgtgtttattgaactactggtaaacgttgtgtgccctgcacggaattgtgagcttccatcttctgtacgcatcggaggaaccatttggctagatcctgcaaaccgcgcaaaccctccctgccattcactagtggtacttgcatgcagaataaaagggatcactgttgtactacctgcaataatctataggtgaatattgaattcaaaaatagcaccagttttgttcggaaaacaaaaggcaaaaccaccacctaattttggtatattccaaaaattagtccataaaaatagtgcgcattgtacttttaagtccctaaattgaattagcattgggtacaacaattaattctataagttaggccacttgtacttaaaaaaactgtgcatgaaaaagagctaaatttttggacgattttcataataatacgtagagcttttggtttaatttagagaaaggttaccataactataatgattaaaaataattcgtgcacctaatataattcatatgttttcatatacatagcttatagcaggttgattagagtcgtgcgaatgctagactatatacagtagtactagatgagaagttaacaagtcatccgtgtaaaaatattttgtgaaacagtttctacttggtatcaatgttaacccttgatgccactgtgatccacctgttgtaaaaggtttattgcagttgcatgaacatgtgttgttatcctcggttcccaatgttacctcatgagttataatgccaattgaagacccaaatccaccctttgctcgttgcctgttataagtataaaaaacaaatgaaaaacaaatcaaatccctccatcactgttgggctgatttcggcccatttcctacactcatccgctggtgggctgaaaacaaaatgggctaaaatcaccaaagactagagtccaataggtgggctgattttatccactttcctacaccctcctccctacaccctcctcctcaaatgggctgaaatcagcccaatactaattgaggtattttctctgcttttatgttttcaataatttctgaaattattattacactttaaaaattatcaatatagctccaaaaatttcaagaaaattccatagggtattttagttcatggagaatttcaaaaaattaactcgcaccatgatttcttaagaaaattttattcccttgttaatttcattagtttaattgatttgcacatttaatgaatcccttaatcgacttttaatttggtatttcaaaggttaagcaaaaattaaaatattattttaatatatgttcgttggtgtagtatccaaatgtaacaaatggttcacggatacatgttaatgtattcaatatttttacatataattttccgtgcgacatagctctaaatactattcaaatttatccacgtattatgtacaataaaacataatactaaattaattttgctagagatgacagcaaatttaaaaacataatagtaattaccaaatttaaacacataaaaatataaacatgcttacctctatgtctcctatttatttctcgtccttctccgaacttgtaatttctaaatttaatgcaccacgttcactcttataaccttgaaaataatgaagatatgttaataataaatcttgcaaaatccatactatttacaacaattccaaccgtcatgcaaattacctctaaattttgttctatcatttgtcttattcactgtcaaatggtactttgaactaaaaaaattcttaccacattcaattattcgcgtggcgcggctctaattactagttaaatttccccccttataatgtaccctaaaacataatactaaaaccattctatcttcatactaaattaatatattttttactcatttctctatctcattcagatatcgtacacacaactaaagaaatttcgaaatatatacatttctccccatggcctaacacaataaaaaaatttatgcacgtcttttgtacaataaaatataatactaaacccattctatattcaaactacattcatactatatatttattatatttattgacttctaacttaaatggtatctaaaatttctaaacataccatataaccgaactatttacatgtaatatatgcacactatctaaattattacttatccaatacactaataattacatctaatacataaaccatcactaaatatatacttaataatatttatattactaatttacctctatttcttctcttgttgcaagctcatcaaaacattaacatggttcttaaaatcccagataattacctgaagtggacatttttttccccacgaagaatagatgcaggaaggatactaaacgctgtagtcaaaacgtaccaaaccacaaagtcattaccccgttcatttgtcaactcattaactactcttgtgcaagtgaacattgatccatccatttctactgctgtacgaattacatgctccctccgtaaaaaaaaaatatttcctccatcccataatataagacataatcaaacttagcactgtcttcaaaactaattcttgaatttctcatatgctataaggtttattacaacaaaattataaccataaatttaaatgtgaatattccaatgatattaattttagcaaataaattttaatttatattataatagttgttggtcaaatatttttaaatttaaattttagaatattcgcacatcttatattatgagctagaggaagtaatataaacaacgaatttgaacaaccctataagagttcaaatcccatccgatattgcctttttttctaaaaaacggagggagtatcaacatacatctattttttttaaactacggcgggtttgaacactagcctgaactttattcatttggttaaaaaaacactttacaaaggggaggcacagagggagggggaaagaaactaaaaattaattacataaagatttagcgcacaagagtgaagttgttgtttgcctctaaaaaataaagtaactaaaaactctagccaactcccccgattattagctgaaaaacaatgggggtatttgtaaattttgccactaattatttcattttgtatttgggctacagccaggacagcctcctgagccgtccgatcgcgatccggaatcgatccaacggcttcgggggccacccccacatgcgacaatccgcatcttctcctcataaagcggtcagactcgtaatcccggaaaagttttcaccttttccctcccacctcgcctcgccatgctcacctcgccctcgtctccgatccactcctcctcctcctccacccgccgcgccatgagcccgtagcttacgtggcagcagcgagaaaccatgggcaggtcaagaggcaaggatggcggcgggaggtcgttcccgtcgccggcgtcgtcgtcgtcggcgtcgtcgtcggagttcgagttcacggtcacgctgtcgccggcgtcgaagcagaggtcggcggcgcagctgtgcccggcggacgagctgttctacaagggccagctcctgccgctgcagctgtcgccgcgcatctccatggtgcgcacgctgctgctctcgtcggcgtcgacctcctccgcgtcggcctccgactccacctccaactcgtcctcctcccgcgactccaacggcagcacgtcgtcgtccttctccgccgactgcgccgcgctgctgctcccggactctgccgcctcctcctcccgccccagctccgccaccgaggacgaccgccacctcgccccgccgccgccgccgccgggtgtcgctgcctcgttcgccgccaagcgcaccggcaagcagtacctctcgtcgttcgccacccgcttctcctccgtcttccaccgcggcggcgcccccgcccccgccgccgccgccgccaacgccaagaagccgccgtccaagtcgctcgccaaggaggtgatcaagaagtacgccaagaaggtgaagccgctgtacgagaagctctcccagatccccaagaatcagagcaacagcagcggccagccgctgcagcagcagcagcagcaggggttgaagaagccgttcagcttctcgatgcgcaagaagcgcggcgacgacgaccacgccgcagcggccccggccgcggcggccgccgtggccgcggaggtgggcggcggcggcaagtacgcgcactccaactccttctccgggaacctccggttcccgcgccagaagcggtgcgcggcgagctgcccgtcctcgatgcgctcctcgccgagccactccggcctgctcaccttcggcggcgcgggcggcgtcggcttccccgacgtgccagccgccgccgcggcggcgatgtccggcggcattagcgtgggccccgtgtcgctgtccacggcgtcgtcgatggaggagctccagagcgccatcgagggcgccatcgcgcactgcaagagcacaatgggcggcgccgtgaccatgtgctcgcgcaaggcggcggcggccgccgacgagatctgcgcgttctgagcgcacgtaggattcgggcggggacgaagctaagtaaggcggtttaatcgatagcattatgtgttaattttatgtgttttgttaattaattttgtgtcctcctggtaagactattaagtatgattatggtggtaaataagggtagtttcaaggggtaaaatgatatttggagcctttggaattttgatatctccctttattccaaaaatatggaatttgcgtcggcgccctccaaacatatcctctcattgcatcaaggacaaaaatttaagtttatgaggctagcaaactcaactagtcattaattcataaggagaaaattcagttggagatatttccaaatgtcttctgttttggaattaggaggattgatgtgtatgatatcttttgctacataaacaacaattagaacctgcctttgaaagattattatatggctgggaaatggatttcccaattcgagatttgccgattagaatccatgaaagtagctggtccatctagtggagtgtccctacagacttttggagcacaaagctgccaattttctatgatggagtcttcaaaaaaaaaactttctatgattgagggtgttgatgcaggtttcatttcctggaaaagggatttgcaaagttccttaggttaattagatcaggttttggaatctgatgtggcagtctgagcaagtgctgtcattttctttttgttgtgatttttgtctcaactatcaagacaagtgtttattaagctaattctaatataattttggcttttgtactttcacatcacatggtaacttgtatgatcattgtttcaaaataatcccctcatctgccccccaatctttggtgcttcattaaaggaattatgattgttaagcacatatgttcctttattgttcccttgattttgtatgacctctccatttctgtccagtgttcaccttaattggggatcatgtacctttttgtccccagttaattagccactcattttaccttaaatcctacaaaatctgctgctcattgctacaacttaaagtgctcatttccttgcaagttaatactaattctacaatacccgttaggtagattcccctggaactagttggacaccactgcgtgccaacacccacaagaagttagcagtagcagttggaagttggaaaacgattcccttgctagatctggctcacgcaaatgctgtttctttcacatgtcttgccctttggaatgcagtatacatttgctaatcaatggagttaattacaagtccttgtaccactagacatgttgacttgactgtttaaactggggtggtgccatatgaaggggtcattaacttcagcaatcattaataagtgccataatttttctcacctaaattatggcacttatgattgcataaactatattgaatgctagtaagaggggatgtgaggacacacaaggacatgggcaaactactgtatgcatagatcatgttcagagcaaaaatatgtacatgtacttgtgtcagctcctcctgtgattagatacgactaagcgtgatcatgcttagctagctgcaggtcatcatggttgtggttaagactgttacgatggaattaacaagggttttaaggataaacaaatgaggctagccatgttgctgtggctgtgatcgtctgatcgagcagcgagcagagagagattcctgcatctgcataggggaggagacgcggttgccgagggttaggtgccacatgcgagctggtggccgcgcccaagtagcgtgaatagtaaaaggcctagaaatagttaatgctcctctttagatgtgtgttgtgtgttgacgtcttgatatttataaatgggtgagcaacctgtcgagtgttgagagtgatcagtcaacattcaatgttaggagtagtggtggtagatgcaatgcaagcaagcatcaaagtttcccagcacaagcttcctctgcagtagtaggagtacactgcacttcaatttgcaagtaattactccagtactccatatagcactacacctatactgtaaaaaagaaaacaatttcattcattttcagaagtttgttttttcttaggagggagcaggctataatactaatatcattaacctttgttgatgagatgagtaatgagcttaattactctgtccgtacttcaatttgctataataacatgtaatcttaggggcgggggtgataagatggaaaaattaacatttaaccataatcaaaacgaggcttcgttaaaataccactccacgcttaggattcgtcaaatgccatttgcaatcgaggggttcacccaaataccattttgggtcaattatccctttcctcctgtcttttgctgaccaaaacgcctctggttgaatcaattcaagtggagcaaggaggcgaggaagtagcgggcaagcagcagggcagcaacgaaacggcgcgaagcagacaggggcggcacgagcacgaaccctagctcccaggccgctgctgtcctactcgagtaagaagatggggggaattttgatggtttgatcttcttcgattcaactatgagcattttggacaacagaaatgggagaaaagagagaattgaaagaaaatggtatttggacgaaaacctctaattgagagtggtattccgacgaattccaaccgcgaaatggtcttttggtgaagcctcattttaatgatgatggaatgttaattttctctcagatcatggcctcgtggggtttttattcagaaatggaagttttttattcagaaatgaccgatattgacttgatgaatcagtactaatcagcaactttgtagttagggggtgtttaggagagttgggctaaactttagcccctgcctctagagacttatgtttttagagaggggctaaagtttagtccctgcccttagagacttacgtttttagagagaggctaaagtttagctccactttaacccctccaaccaaacatcaccttaatccttcacgaacggttagatcagaagttgtcctgactcctgacaagaacatgtccaatttctccattcattctcctaacctaatcctaatcagcaaagccctgcaacttgtggcaatagctgtatcgccatcagtctatcacacagcctgaatgcctgtgacagaacagtgacattgcgtggctgcgtcagtgcctcacaggcctaactcctagtaacacttttatttaatctcctacagtgatcacctcggtctagctagttaattagcctgcggtaatcaatgtccctgcaagacagagtaccgcactagtgcactgcgttgcaatgctctggctcgaaaaaaccgtagctaaacgcctcgtttttgcagataaactggtagggggccaagccgtgtgtgttcttttgtacgcggcgtcaaaaccaacagatgctgcctcgatgaacaaaggtttttttttctttttttttcctgggctcggagcacgatgggtttgacggtgagctggccggcctcgccgtcgtcgggggcaccaattattggaacgcccgtgtagcccagccgctgccgttgaacacggttgcagttgttggtccgatcgagctgaagggcctctttacttcgcggaaaaaaaattatatgttatatcggatatttgatagaatattggaagtggttttcgaacacgaatagaaaaactaattttcctaacaaccgcaggacgaatcttttgagcttagttaatctatcattaggacttgtaagttaatgtagcacttatggctaattatgaattaattaggcttaaatgatttgtctcgcaatttctttcttatctgtgctactagttttttaatatatatttaatgctctatgtatgtgttaaagatttgatgtgatatttttaggaaaaacaatttaggaactaaattaggcctaagctagccgtggtggttttggaagttggaaaaaggaagacctgttgtgtacttgcattgttcgcgtttgtgttggcaaatgtggttttctggaagttggaaaaggcaatatggaagctactggcatatgaggccttttatcttctttgagcatacaccctctactctagaataaattcattttttacgtgaatttgaacatagccaaatgagtacgcgaatgagcatgtgccgatttgcgggaccaatactgcagcattgccgtggaaagaagaggggcgcgtatgtttggagtctttgaatttgacgtaactcctgtgtagagtggtcagtaaggttcatttgttttgtaaagcccccaagcggtcaagccgtgatggaatgtggagtagtggaccgggtgaatctcaactttgtgatcttctgctgtacgagttccacaatccactactccttccgtaaaaaaaatcaaaattagtaaggatgtaactattcgttcatatccacttaaagtaagttttcttagacagagagagtattgcctataaactcacacttctagggctgcagtattaggccatgtttgattcagcttggaattattataatatggattattaggagtaaactgaaataaacagttattatgatagattattacaatctataagccagattactataatttggtaagtcactttaaaggtgcttttttaattattgagtagctaatagctaacaaataactaataatccagagaaataaacagtagcagcttattctatgtcggcttattataatccaacttatagtaatctagttctatagtctatattacaataatcttaaactgaaacaaacaataccttagtttacattgaatcagttcgaatctttttttttttgagaattagttcgaagcacgtgcttttattaaaatcttaatccaaaccgggaaattggtagagtagcgtctcttctaaatactatatttgagagcaatttcttatttgtcgttcaaagattcatgcgatctccctaatctcacgtgtcaaagtcacaagggtgacaactaagggagtgtttgaggagaaggggattgagaagattgggaagatacgcaaaacgaggtgagccattagctcatgattaattgagtattaactattttaaattttaaaaatggattaatatgattttttaaagcaactttcttatagaatttttttttacgaaaaacgcaccgtttagtagtttgaaaagcgtgcgcgcggaaaacgagagccaatctcccctatcacccctaaacgaacgatgcctaatgagctaggagagcgagcagccaaaaccatggcggagctaccttttgcgcgggcgcgcagagcaacgaggaagccgcgcagcaacacgtgcgcgggcgcagctgagttcgggctgatatgaagaagctactcttctcttttcgtcctaaaataaataaattaaaaatatttaaatttataataatcaaatgtatcatatttttatagattatttattttgagatgtaagaattgtttcttccatctaggatggcaattttacccataggtccggtatacgtgaatacccgacccgatgggcatggacgtgggtgtgattttttatccatgggcacgcccgtccgagacccgaagacgttatgggcaataggcgggtttcattttttacccgtggataacccatgcccgactcgatacatatgtattagctaattttgactcatttattaattcttataccatttctctcggttcatttgcgatgctaactaatattaagttgtgatgtaattcaaattatcattgataaccgataatttggtaaattattgattttatttctctttgttaaattacatatctttcaagttattcatgtgagatccattggatacccgccggacatacccgcgcccgctgggcatgggtacgggcatggagttttgcccgctaactctagtggatagggtttaggcatgcaatgtcgggtatcgggtcgggcatggttttgctctacctatgcccgacccgactcattgccatccctacttccatccataaggatatacgtacacaacagagcatatgcatattgtcgacgtttgatgtctcgactacggtatttggacagtatggggatcgtcggtgctagggtatacgcgagactgaggtaaaagagatggagacagagatttttatacaggttcgggcccctgagctatcaggtaatagccctacatcctgttggccgaagccgatgttgctttttattcaccataatcacaccagtacaatatgtgggatagcctatctaacttttgtagacatggcggtctgaaggtttgactcgtagtcgacaacagggtagccttcctcctcgagctcacgcccgacgaaatcagagaccgtgctagatccctacggccggcctctgaaggtaccggatatggtcgatccaggcatatctctgatatcgatatccggcagcttgtcttggcgtatgtaggcttgtatgttgtggcttctggtgggtgttgattgtctcttcatggtgagtgtgtgtccccctgtccttctagggggcttgtatttataaccataggtgtacccttatccaagtagaactagggaaatcaatatggatacaatccgagtagtacttgtcgtttctatgtagaactctagttgtctttccatatccggaactccctcctatatccgtaggttatttccgtataggacatggtatgtgataggtcctaccgagatttagtcaactaattatgtggtatccataaccatgatacacatacagcggcaagcttacacatgctctcatcgatgatgtcccttctggttctgggactatctgtgcatgtaaaccgcgcgtggtcgacggatccaccgcagctgcccgccgttccttccatccaaattccgaaacccccacgcgtcacgtaccacacatctcaaagcgggtccaatcccaaacaaccaagtagtacaacgtacgatcgagctagcatagccaccaaaccgaaaatccgcctaggatccccccacacggctaggttcgccgctcctcgctcgcaccaccgatcgatccacgacgccgcccacacgcagacgcaggcgccccgcggcgcgcgctgctcgggccacgtcgtcgcgggcgccgagcaccaccaagatgctcgcgatccagccgcatgtgatgcagccacccaccccaacccaagcagcacatgcgacgcgacgcgagcgagccgacgcgcaggcggcgttcgcgcgggggggagggggaggtcggtcgccgggtcgacgggggggcgcggagcgcgtgaccgtgtgacgggaacagcgggagcagcgcgaccagaggtcacatgtgggcgatcggtttttggcctttcctgtccaagaaaggtcagcagctgcggtactagcctggggcgccggctcggatttccgatggatccagcagcgcggctccgtgtcgtcgtcctcctcctactactcctgctgcagagatgctcgtggcaacgtgtggcgttgcagatcatcacagtagtcagaaggagtagtacacgcatctcacacatgtcgtcgagtctgtgccaccccccaataatgcgcatgcgtatagtacctgttgggacttgtggagttgtggttctctgcggcatttgtggccttggttcgtctaccggcccggtgccagatgacatggactgagctggtggtgactagtcgagagatgttgcaggttgaaatgaactcctgccagagttcaggataatgacgatgatggtttcggtctctgactgagcaggggaatctagattcatgcaacctcctttgacaacaatgggggtaggattgcgcatgtttgatgtcaccgtcgcagaattcacggacaagagatgctttacaccttttcctgagagctttgacgataagacaaacaggcctaaaagggtgtaggataagatgatgtgaatttctgtgccaccgtcgcattcgtgggaaagtaagagtaaatcatgagagccacgggtgagtggcatttctttcttgctttgtttctaaaagagaccgactaacctaagactctgttggctagcatttgacatcatgtatgttatggttgatcccaaagacatgatagccttctggtgcacctttctttcagtggataattattgcatttgcactatttttggtctcccaatcattgagtaaatgtataattgtggtgtttagagaaatcaacacctactgaaaggagatcactggtctatgggtacccatgttactagcacagatcttcaaaacagaaactgtcaactaaagtatatggctggaggcccagatcagtaggaaaaatctcacatgtaccataacaccatcatccgcacagtccgattcaaactagccacaatttctatttcgcaagagtacgtatcctaatgtaggttcgcagctacagcaatgtccgcaacggtttacaaaaggtataagctggttacgagccagttgcaccgctggcagcaccatcagatttactcttctctgcgttagcagcatcatcagcattttctttactcctcctctgagttagcagcatcatcagcattttctttactcccctcctttgtgctaccagcatcagcgacattttcgttacccttctttgcgttagcagcatcagcggcatttttgtcaccgttctcctttgagataggagcatcagcggcattttctttacccttctcctttggtcgagctacaggaaaatcctcctcttgttgccgttgccatcggaaatttgcggcctcaatccagcgggggtggaccaaaaacttcttgttactaacagcccagcgagccttctccgttcctagatccaaagcaacaacatgggtgaccgtagaatccacatctgtgcagcaaacggcacccaactgctcggccatcttccagatcatctgatcttgttggcgctgatgtaacgggaatacacgcgtaaacactagtttgcagccttgaagtacttcctgccgtaccctcttgatcacctagagagggatatatacgtacaccaaccagatattagccaacgatttttttttaataaaaaaacagcactaaaggggatatatttagcactctgtagttcataaccatttgaaatattgatctacaccaaaactgaattttgtctatgttaagttcttttcatattgattgtacccctagatcttatcaatcaaaaatagctttacaggtaggaatgaataacgctgtccaagcaatggtaacatcaacttatacagtgtgaaaaaaatctgttgtaatgaataccactgtacaactaaaagatataatgtataataaagagcctgcagggtaattgcaagtcttgtagtctacctgtcttacatcccgtgaagaaagaggtttttgatcatcctacaagtgagatgtacagtagtacttgattagatgagaaaaaagaactttgaccttatatattactcaggtttatgcacaatagataatagaaagttgagattaatagacgataaaactgtgataagaccatgaacttaattagcctaccggatcaaagaaaattgtgtgtatgcgctccaagacatctaaaattgtagctaaagcaccatcattctccctttcgtcctgcattgtctctgacaaagatctggcaccaaaaccaaattggcgacaactagaagcaaaataatgatatctctccattagaatcagattttctttatgtttctgccacacctgaaaagaaaaaaaccatttaggccggatacacgatgtgcatcaatgtaaatgatgaattaattcagcccttcaacatttaaacaatacaggatgaatgtttctactgctgtgtagaagcaaacatagaacagtcagagaccaaaacaaactttcagtggccaaagtaaacattaactagttctaacaaactacagacggtaattactggcagtattatcatataaaatgtttatcaaccatgttcactggattatttgcacttacatactcagtgtcatcaagaatcactgcaacactttcatctccaagaaccacatcaagacctttctggtgtcgctgagtgcaatcagagttcgaaatcacctttgagccaaaatatacattatcagggtcaagaagttttgctatttcaattgcataagccttgtcacccatagtgtatatatacatctcaaacatatcacttgcttcttttaaaaatctacggacaaatggtctcaactttgtaagcatctgcattgtctccaatgtgaacaagcttctgtccggaacaactgcatttaagcatgtttctggttaagtaaaattgtagatgactaattcatggttaggcaacagatttaggaaggatcaaaccacaataaggtaatatggaagaatgcaacctcaccattaattagaatttagtgctaagtaataatgccataacttctatcataatagaagcaactagaattgatgttagttttacttttcagtgtctgcaagaagcaaccttcaccacaaattctaaatgtcataaaaatcacatttacagtgaaagaatatgacaaatagctatgacatttccgcagaattttcatatttcaatgtacattacaggccaacttttcccttttttttaaaatggactccaaacatacaaaaggaacatctagttttggactgaaggtagtatctctgtgctcatgtttacaaaatatcaaagtttgtaaatcaatagctaaaaacttacaaattctccaatttaaatacaaagacgtacacattaccttctttagcagcagattgaattcccaattcgttttcagcagcagaaagatcaaagagtttggttgagttgatcagtgtatgatccaagtccaaaatgagtactagttttctttctcgcaataaattctttaaatcagctccacgcagtctgtcaatttctgttgtacctagcctcaaaccctgcgttgaaataattctgttaaattcagataggacaattggaaataaaaatgtaactgggaaagataagaatatatcaagagatgcaatgcttgcataatactacgtactggaaagagtgtgattttgggaaaggtaaatgcaataaataagcattacaacacttgtattatagtaaggactgatttaagtcaaaggagccttaaaaattcaaagatattttccgcttcctgtttgaccgtaccttatggatgtaaccaaaagcaactcctggaacatcttcctcatcttgtcttttcccacatctatagcaaagtccaccaaaaaacccaggatgtggtgggcattcatcaattttaacatctttagaagaacctgcaacagtgtaccatctgctcatggaaataaaggaagtcttgacagaaggcaactgggactccatctaaaagtagaactgtagaagaaactgaagccaaatgtgaaaaactgatgttcctctctaaagtccagacacagcatggaacctcaacaattaaatgattaaaagcaataacatacacccccccccccaaaaaaaaaaaaaaaaaaaaactcctacgacacacacacaagaatggggacagtaaatctgtaaccacatcaactaaatagtatataaaaagtaaataaatttttgaacgcatttagtagataatcaactaatcaagtgccccccctccccctcctctatgaagccaaatgttagtgggttggaagtgaaacaaattagcataccaacggtatcctcatctgacttcattactactgcttgatgacggtgttggtcctccactctacgccgtttggtactgcatattgcatgccgttgacagcagtcagatccaaaatacaaaatccagaaaacagctcactattagtattttctaaacaaaaggacatggattgcatgttcagccaagctttagcatatccaataaatgaaaggaaaattttctatcataccatcaaataaccatttagttctatactatcggaattaaatttttacagtatgtattaatgacactcaaatagcaccccatttcatttaaacacaaccatcaaaagtgctcttttctgtcatgttgaccattttgccctcatccgcaaaaagaaaatttccctgcattcccacagctggttcttccctccccaactcatttcagtgccaagtcacttcaaactcaccaatgcacccccaagactgtcaatgtttacccaacgaatgtcaaaggcacggaccgcacagaagataagaagccatctccaacccctaatgggtgatagggaaccaagagcagcattgaaatggcaacttaggcatattatgattatattgtagtgtaccacaaaattccagtggtataaaacaagatcagtgatattttggtggtatacaaccaatttttccttaaaactatagcgcatttagttcaccaacatataggattcttactacagcgtaagcatatttggatggccagcttattataggatcaacatatgctaatacgtattgcctgccttcagcatataaagccataggtaggcaattaagctaccacaaatgagaaaattttcataccataccagaactaaggaagttgtggtatctattcaaatcgtagaaagcaatctcatgggatctactatttggatggactgtcattcacaatttcacaattgcagataagcaaatcacttgtaggtataatgaaatgaagtgcaggctacatgaacagtacggacttcaataaaccctagaaaaaatcccccgcgatgatgatcaaattcgttgccatcagcattcgcacaactgaatccagcaaccatcgcaattcaagcggaacaggagcgaagaccctcgagcacccatctaaccggcccaatcaaacagtaaaaccctaacaggttcgaatggggaccaaatctgctcgccgtcaccgaccgtccaacaccgaaagcgcgaggagcacagagcccccgagcgcctcaagccgccgccatacccaactcgaccggctcctcgcccctcgggacgaggtgagagtacggagaggcgcgtacctgctctgctctacgatggcgtcctcttgttccacgaccaccaccacatcctcctcctcctcgtcaccaccttcgtcgtcgtcgtcggtggcggcggaggggtctccggcggaggccgagtcggcggcggaggtcagctcgagctccgcgtcgaggagcgccgcgaagtcgtcgctgccgctcgacgacgacggggaggacggcgacggcgactcggcggcgaggctcatgaccgagggcaaaggggcgagctttggtcggttggggtgggtggatgcgcaagtgttgtgtaataaatcatagggggaagaaaagctggcccgccagaagaaggcctccgtttgggcctcgtttgggccatcatctcaggtgaaacggcccatgatgccgcgagatctcccggcggcgggataagttcaatttgtctctcttaaccagtggccgaatcttatttgtatccttaaatcacaataccaaatatgtagaccctgaactattaaaaccggtgcaatttgactctctcgacggttttggagggtggtttcgttgactacgtggcggtgttaccttttctacgttctacgtgacgttgaccggatgaggcaacgcgcggggcgccgactccaacgcgaggcttcggcttgtgacttcgcggctcccgagcccagacgcgacgcttgcaccggttcctctgcaagctcactgacagcctgcgagaccacccaaactcgtgccagctcggctcggttccgatgtggagttttgagaccacagtccagggtcacgcgttttacatgacctaagttcgaaagcttgctggttcccacgcgattgacgatggattaattaaaaacttactcaaacacggatgacgtatcaaaatcttagcaaaaacatcttaaatttttataatagtagagatttactaataaaaataggaaacatatcctatgcacacaagatttccgtgcacaccaactggcaaatatcacgaaaaattctaaaaaaaatttggacatttactcataatagtactacacatatctgcaaaatctcatatttaaattcattatattttagccgtagcaaaaaagtgaaaaatctgacagatttaaggataaaaatttgtcagaattttatctttttttgttacggttaaaatataatgaatttgaagataagatttcacatgtaggtgtaaaactattggaagtatgtgtccaattttctagaattttctgtgatatttactagttggtgtacacgaagtgtccacgggaagcttgtatgcataggatatgttcccaataaaatatttttacaaaaatttggttttaaagtttttatccttgctaaaattacacccctaacgttatatgggaggctttttatgccgtggcacatatcctttggtatgctgtaataattgagcgattgataggtggtccccttgcagctcttaggagggtggcaaacgagttgcctgtaaaatagcgacatacgatattttgcaaggtcctggctataaatggccaaccctggtcattttataggtggtctctgtaaccctttgggagagcggcaaggagttgcttgcaaaatgaccggttatccttcatcactcgatgtgaccgttacaatgtgtcaatggacgtgtgccacgtcataaaaaatgcattttggaagggagaggagttagggatatagaattgtaaaacttgaaaaccagtttgttttaaaatattttaataagagtaaattgcattggagatacataaacttgttagatgggtacaatttaatgcataaacttgtgaaatgctcgtttcagtacacaaacttgtctagttagtgcgaacgaggaccaaaataacttggcaatattaattttacaaagctgatgttgattaagaattgtgacgtgcatacgtgtagtgagtatgcataaaaaaagcaatatttataaatttggtctctactttatccttcatcatcgaaatgatgaattccatatatcctgattggatttttttatcactgttggatttttttaatctttttctactattactatatcctattcttttttttattgaagatgtgtatgtctagtagcaaccttctctgatatatgtctacatagcatcctaatcaacttctaaatcaataagattagccatgcagtgtccttttcgtcttcccccgcatgcaccagacaagttcatgcaccaaaataaacattttacaagtttgtgcactaaattgcacccacctgacaagttcgtgtaccagcaatgcaatttactcttttaataagtaaaattaaaaattaaaaagggaaatccgagatctcccgacggcggcgcgtgtttcgcctgcgccgatggcggcagttggcgcggacgcccgacacgagatcgccgacgcgatcgcgcattcgcgccgcgcccaccagcagagcagaagtgcaggggagaccgagtggaggagccggttgggcatggagaccagggaggaatcccacgatgccagcgtcagacgagagctttgtcaacgacaacgacaaacgccgacgcgacgcgcgatatccccccagccttaacttaagatcgacgtcacgtcgtcgtcgccgtggagaaaacaatccccagagttggaaggcgtggagttgacctgacgcgggaggttgtgagaaactgagaaccaaccaaccaaccgctgagctgcacgcgtggttgccggagattttgctgctcgattcctgcactaccgctgctgcttccttttcgcgtgcgtcggcagctagcgcgcgcagcagcgagcttgtgctgaatacggcagtattgctcgctgtcgcgtggcgcgcgcactcgcgtagtacaccgtcgcgagcacgcacgcacgcgcattgcctcgatcgatcgagccctctcgacgggagttttctttttgtcgccggtgtgtctctccttttgtttactccctcgtgggctcctgtcaatcgtcatgtgcaaagccggtcagatagatagatagatattcagatgtttcgtcttttctcaggccgggagaggaagacaggaagagacgtcgaattgcacgtgttgtgtgcagccatgcaggtgtcaatacatgtgtgatgtgtctactaccaatcgcatgacctggtcgctcctttcctcgtttgttcaagtttaaccagtaaccacaccgacaccacgcgaggtccaattaagttcaatttcgctttggttttatatcattgatatgtatgcatggctgattgtttcgctttggttttattgagtttatgattaaacaaattaccaacttcaagcagtaccagagctagaggcactatcgaccctaggcgactaatatcgctcctaggtggctaggtgtccgatcacttcttgttgatatcgatggcaccctgcacccgatagagcaatctgcagtggagatgtaatgcgcaaattaagctagcttgggtggccgtccaactatggcctagctacgatacttcaagatttatcagattttgaggggaaaacattaaaattgtggtggttaagtatcatagtatatctattaagtttacttattagggtttaaaattctcgtgcgagtagcctttggatagatatcatgtgaggtccataaaaaaaattattaagcgctatctaatgtgaaaatgcaagtgtcggacgtccaatggacccgagaaaaatcgggcgccgcaccgcccgccgcccacgcgcgtgctccaggcgtccccaccacgctccacgtgtcccccaccacacgcgtccccgttacaacagtcgtccggatataacagaaacaccctattaagggaatccgttttatttttttccaccaacaatatttcagcaagtgaactcgtgatgtttcattatgcatgaataaaatgttgcagtgggttttttatactgtttaatattttccatcttgatggacacgtgggttgttgatatacacggggtttaagtgttgaatggcttcgaatcattcgttgcatacgttgaacaaaattgtttcatctagcgatctgaccgtgtttcacttttttaaagaattgaaacattctttcgctatttgctgaaactttatttttatatagggtaaaagagcgtctgattttttggaacccgttgtttcatatgttgtagcaaaatgtttcatgaggtaatttagttgtgtttcaactttttaaaagactgaaacattttcgatctatttagtgaaacatattctgtcagggttacggataaggtataccctctatccttggatatacgttgtatgctgacacagtatacctgtgcgtatacggatatttcctgtatatattaagaaaatctatcacgagatagaaacggagtccacagatggagggagttctactcggacaagactgggtcgttaccatatcgtgaggggtccgatatctccgagtcccacttggagatcaactgatccgcggtataaaagggaccccccgggcaggacctaagacatcgaatctcactgccaacacatacaccacagcctacgaagccggagcctacaggagccaagtcgccgggtgatctagtcgaaccaacttgactacgatctcgtcggtatcattgagttccattattccctttgtaatatgtgacttccatcatataatcccataccaactggattagggctattacctatcaaggggcctaaaccagtataatccttgtcttctatttgcttgatgtcgtattacgtagatcctcgtaccagcgtaccccaataccctctatatccggtctacgggtatcccccgtcgacatattcgatctttcaaaaatcgggcgctcgatttataggcgcctcctatctattgagcatataaaaaagggtgtatttgtactttgggtttgttggaaccatgccaccctatatttgcaaaatttgagatatgccacccgtatctcaatgacatataggacccacatgaatcgatgacatgtgggtcagggtggcatatcacaaattttgcaaaatttgtgtggcatggttcaaattgtcccttgtacttgtgtgacggtggtgtgcctccttcctgctacaaggaaaaaaagattagattttgagatgagccaagttctttaggacagatcagtatctagcttgtgtgaaatgtcggcatggtccctttcctcatttttcatgtttaaccacagtaatatccacaccacccctaaggtctaaggattttgatgtgcaaggctggttgcgtaacttaacttggtttcattggacttaccctcttcagatcaaattttctaggtggtttaaacatatagagttacgagatgacgatttgacgactccgtgttgatgcgcggagcaattttggacgctaacgtcatgacgtagaaatgatcaattttcagaatgaccttgatttcactaggttgattcacttttgtagaactgaatgaatgatcaatacagtgaatcggtaaagaaagataactattgccctaacctaatgctcggtaggaaaaaagacctaaagaaaggttttgtcagttgtgttgctaactccaatttgctacggaagtgaccctttctatttatttatttatttatagagatgactacactcgcgaaaacaaacactttgcacacgcaaaagtaaccaaagcctaaaactaaagcctgacataattttttgcgtaacttcacatagttgaaaactatataactctatcttcatttagatataaccaaaccaaattatgattaccaattgccttttcacattgtttggtcgtattctcaaatatagcgtgcgctctctctctctctcctataggaggatctctatcacatttaacagtttgttttttgaaactatcaaatacaactatattataattaaaacgtaaccctacatacattgtaattaatttgtaacatttatatacttcattgaaatgtgtatgtgggcaactggttagcagcacgaaccattgtcctacaaagcgggagtttgacttccactagcgtgagtcggataatttttctcggaaaatgctagggatcgggcgcccgccgcttcccgcgcctccgcgcgggcctccgtgccgtccccaccatgcgccccactacatgcgccgttgcaataaattgcctacatattatggaaacgctctattaagggaatccgttttaatttttgttctaccaacaatgtttcagtcagtgtactcgtgatgtttcactatgtatagatcaaatgttgcagtgaattaaaacatcctttcgctatttgttataacattgtttttatatatggtgaaacaacacctgattttttggaaaccgtttgtttcatgcattatagcaaaatgttccaagaggtgatttagttgtgcttcagctttttaaacgattgaaacattttcggtctatatagtgaaacaattctgatctatttggtggaacaacgtccgatttataggcgcctcgatttttctcctgccttgcatgaatctagagagaatacgacggtaaaaaaaaatcaaaagcgttgaa

SEQ ID NO: 29870 - DNA, 1841 bp, Oryza sativa
  unsure (1)..(1841): unsure at all n locations
ttcgtgtttacaaaatagctttgagcaactaaatgtctttaaatgctgtttactgcaaccctaacccttacattataattcccttgtactcccttgcatttattctgcatttgtgggtgtgtcttgttgagtacggtggttgtactcagtcttgctcaatttttccaaagcccagaagaggagctccttggagatgaaggcttcggtgtctagctcgtgcctgccgtcaagcgtctgtggtcgtcgccctagtcttccgctgtttctcgtttgtctttgtgtgtgctgggccttcgctgcccatgtaataagttaactatttacgcttccgcttgttaaactctgatttgtatcaacttttggtgtaccttgcctcctgggacaagaattaatgcacgcacgtaaggaatgcccgttgggttatttccggtcgtgacaccctcgttctgggttcccaatctggaaaagtccaatcccctctctaagtgggcaaggtcctccttttatatcttaaggggataccacatgcaccatctccccctctctttcttccaatttgacttctcttcattaacagacggagatttgcatcgccgccgtccgaatgaccttctgacgggacggcccatacctacctccacttccgccggaggcaggcgcgacgtgggaagatggctgtctgctgatgacttgaccattgtcagaccggtcacaaatcggtcattcttgtccaccacgtgtcagtttaacaatctgcatgttcgcccttcttcatacaatatcttgcctgtaatggttaggatgaagcctgacatatatttgaccggaaccaacgtgccatctccaggagctaacacgccggctccagctagggacgagtgcttggaggctctcgtcctgacaggatggggcgaggcgtgcgtcaaaccgcctgtagccacctaacccatgatctgaccggtctgtgactggtcacagaccgataaacgagcgtgctatactgcgatacatgcggcgtgacgcgctcgtcaaaactgcaataaatgtggttaagtgagcccnngcatgctcacctaccccatatacgtggcgcaaaacccacaaggggtcggggcgcttcggccctcggggccgagacgggagcgcccgaccccttggggagacaaagagaagggcggccgtatcaccctcgggcccgacccccccccccccccccgagggagttaggccacgtgggtgatcgtgtctgcctcaagtctctaagtcatgatactcccggtaaagaggagggcgaacacatcaccctcgggcccgacgccccctgacggtgccaggccacgtgggcgattgtgtctgcctcatgcctctagtcatgatactcccggtcccatgtcaccgacaggcgttatcttcactaactttactatcattcgccctcctcttcgccattcagatcgaagcccccatgggcaagatggccagatccacttagggtcagggttggtcgctaccacttcggaggtgccagatctggcttcctgaaggttggagaccatcagatctagccatccacacagttttggtaggcggcgacgatggtgatggggacaatgactatgacagcggcgatgagcttcggaggggcaaagcgatttcattgtcatcatcgatatttttggttttattttcacgggtattttatatcggtgatgggccgtgttgtataaactgattttttttcctcattgtccacatcggcgacgggtcacaattaaaactaacacccttcagaaataaaaatcatcagtgatgaaaggggatccgatagatgaggttttcat

SEQ ID NO: 29871 - DNA, 6538 bp, Oryza sativa
attcagatcgaagcccccatgggcaagatggccagatccacttagggtcagggttggtcgctaccacttcggaggtgccagatctggcttcctgaaggttggagaccatcagatctagccatccacacagttttggtaggcggcgacgatggtgatggggacaatgactatgacagcggcgatgagcttcggaggggcaaagcgatttcattgtcatcatcgatatttttggttttattttcacgggtattttatatcggtgatgggccgtgttgtataaactgattttttttcctcattgtccacatcggcgacgggtcacaattaaaactaacacccttcagaaataaaaatcatcagtgatgaaaggggatccgatagatgaggttttcatatcgctgatcactcattgtgatcaaggcgtccatcccccgcatataattaagggttataacttgttatgaatgaccggctccatagtagtgtataatgtcatgaaaaaaatattgctggatccatgttagaaagtattttcttttactataataattctataaccgtaaacgagacagagtaagacttatttttgacagtcaagatacgtttaatgcatgagagagtatatatatagtgcccaagtgccttcgtcccgaagtctattatgcatggtgaactggtggtgttccgagctgtggtcgcatatatatcactctcactgccgacacaaggacgatctaccaccgggtgcagtattatccatccaaagggcaaacaagtcgctgccgaaaggcgcccgccggctagctacgctagtggcagtgcccatcaatccacattccagcccctcatatactccagtactccacatacgaacaatcggtcgaaagctctaactctagctttgatccatgcatatctatccatcctttctttgatcggtcgcaacgcccagaaactgatcgacgatgcagcagcagcagcatccggcgccgggcgcggagttcgtggcggaccgggacacggcgcgggcggaggtggagcgtgcactgggcgggtacagcttccgcgacggcggcgcgctgctgctggaggacgccctgacgcacagcgtgcaccccagggacgaggccgtcggtcggtccaggcaccagcggctcgagttcctcggcgacgctgcgctcggcctcgccttcgccaccatcttctaccgggacgacccgggcctcgaccagggggacctcacggtgctccgctccgccaacgtctccacccagaagctcgcccgcgtcgccgtccgccggcgcctctatccgctgctccggcgctacaactgcgcccctcaagaccacgaagtacgcacgaacctctcctctgctttcctctgtactctctctctctcgcggatccatactttgctagtatcgattaattaaagtataaaaaaatataggactacctattatatactaaaattttactgtattaaacttactacaaacgcttccaagatatcatgtgacactctacaaatacttctaaatcaccacatggcactccaatatattgaagaaaatcctataaattatgattaaaaaaatacaactaactattgattttcttttaaatagatggacccaatgattttaaccattaaatccggtatcacacccgcacggcggttgtgccaatgaccaaacggcccggccctgggccaaggtcagtcgggtcatcacggcccgacctacacatcgggccgtcccgtgccagccaatgggctatactcacggcccaagcacggcccaatatgactcgggccgtgccaggccagcccgaaggcacgacagtccatcgtgcttaataagtctattttctctctcaactctttgggctgtgttatatatggccgaagtaagtctgttttgtattcctcttctctttggaccatgtcttatatggctgattaagtctattttggatatttctactatttttcttcttcgaccgtgcagtaccgggccagcccaccatgcaaaggcatcggccaggcacggcccaactgtcgggccatgtagtgcttgggccgggccgttgggcctcaggccttatggccatcaatagatgtgcgtagtacatactctgtactccctccaccgtccgtaatctctcatattttctaactaacttctcatattttctagctaattaacacttaatatatatatctctactattataaaaattgaaaatgtttttgccaatactctgtacgtcatccgtgtttgtaatacagccgccagcaaaaatggatctttgctggcggctggcttaagacgactgccagcgaggatattgatattcactgccctttgttttgtggcggctccaaattccgctagcgaaaacctaaaatagccgccacgaaagatggttttcgtaggagaactaggacttcacgtcatgtgagaatattgaagcaagtcaatgtaaggggcctaatgggttctgtacctacgaggagcttaagtgggcacatgagtgtgggtctcaagaagcatgtcaatgctcgaaccagggtttcacggtgcatgatcatgtttgattttaacagtattatcctgctaagaggcaggagtggtatttttacaatacttctacacagatttagacaaaatgatacatgaaaacatattgccaagtttggagcaaagatgatttttttaatacattatcttgtattaggtttatttcggtggtataactgcaatttcctctatgaaaaggtgcctaactttcaagataataataataataataataataataataataataataataataataataataataataataataataataataataataagtactccatttgtcaaaataaatataaggcaccgtacttttagcaaaatcggcattcataagttttgactaatgactaaactaatatatatgtttagtatcatgtattccatattattatgtttatatctgaaagcacttttatgtgatgtgaaattcactttttctatagcatattataaaaaataagtcaactataatgttaaagacattgaaaagctaatacacgttatattttgagggaagtagggaacagtactggtagtgatttatgactgaatccaataggcatttttatcgttcggaagatttaagtcctttctctttttccaacacttatagcaaggcaattttgtaggtgtttttgtcgttcggaacattcaactatgttctcttttctttcttgtcaactccgttctcttttctttcctccacttatagcaagataatttgtaatgaaagtccatgagctattttacagggttataataagaaaatagataagaggcacgtgcatatgcgctggcttcttcctagttgtttataaaatgtgcatgttatctatcttttctttttctatggataatattcacttttatttaattttatatgtggatataattgtattttattattaagttcatttgcaaaatttacgatgtgataagttgggatggtagattcacactgttatcatcgttagagcctttaacgacacatcgggatgtaagatttaggttttctcttcataatcttaaatttcatatatacattcaaaaccttccccatgaataccctgaaattaagaaagctttaatgacctgtttggttggagggtgtttgtgatgggaatgggagtttatgatatctagaaatttaagtctgtagtttggttgaaagacttaggaattacagggggtttgggatggggaattaagaggtccaattcccaccaatctcttacctgggggaggcctgttaattcgtgagacttggagagaattcgatgtgaaaccaaacaacggatgaggactaaaaatgtaactcccataaccaatcccaccatcaactccctccttaagactctcattcctcgtcccttctcttgccaaacaaatcgtaattggatactcatattgtgtgctaagcatttgatatgcttaaataaacattaatcataagctcaaaataatatgttgtagatcgatccataattttatttggccagttaacaactctttgcatgagatgcaaactcgctccgatcaataatattcgactttgggatgtaactaaacttagcaactcaaaggagtagtactatatacaaaggtgaactaaggtattattatggaacaactgaataccgaccaccttcgtttaccgctaaaaaaatgttttaatttacaggcggtggaaagccattttcgcacgcgtttagccaccgcctgaaaaagaattttacccaagtcatctattttacctaagtgtagcagactagcacaatcccacctcacactcatagctgatagctggagtatcaaacaatttattattttttcagctaaatatatattcaaacgaatatttgggtatgatctcaaatgagaaataataaaaaaatttcaaccacaaagtccataaagttgtaagtgaaaactatttatttttttaaatatggttgttttataaaacaaaacccaatcggggacagattcagaccaaccgtaccgtgcactttgatgattggtatgccgtatgctcttactgactatagcatttgtgatgcaggtcagccgttttaccaagtcagttgaaggcccatatagtggtgaccccattgagggtccaagggtgcttgctgatattgttgaggccattgttggtgccgtctatcttgattccaagcttgatcttgaagtactccagaaggttaattttcagccttctttcatattgtatgtttgcttttattaatgtagatatggttcctatatattgagtgatgtatggtgtaggttgcgaagttgctgtgtgagccaattatcaccaaaaaggcattactagaagatcctgagtccatgttgaatgagctagggggagaacatagggaagatttggaaatcaaaatattggcgtggaggaaggtggcaaacgtagtcgatgatggccgggagcaagcgatcacaactagtggacttggcaacggctcagaggatgaggttggaaagcttagaacaataagaatagaagaagcttaacgagcagcacagcaagttacagtaaattggcgaccaggaaccaatcagtaagtacgattactattatctcctcgagtcaagttttgtttttcatcccaacaccttgggaacttgaaatttcattcctccaaagtcagggttaagagctaaatgaattataaaattaggaacacaggaattatagaaacacagaatggcatatgtgtaaaattaggatataatggcaaaaaagaggaatagaaaatataggaaacgcatgtttggaacatagaaaagaaaaatcaaggatgggaagtaggcccacctgtcaatcacttgcaaatcttgtcaaccactatataatgaaaatggagaggattgatatttcaactaagcaattggaattttgaaaaattgcacaactacttactttagtgattcccaagtccacaacaatggagattaattttccgaatcttcttattcattgttaaaccttacattcaggcattttgtaaaatttcactatgtcgacctagctatattcaaccatatgtaatgtaggtctgctagagcggagtgaacgttcaaccaattgcttaagatacacttaacacaccatgtaaaatttcactatgtcgacctacattcaaccattgttaaaccttttggatggttcagatagctgcttgattcggtaaatacaaattttgagtcgatgtcttagttttccctgttcttcttttcctgctgcatgaggtttctttgtgccacgtgaggcatcatcctatcgcgcaactaaaatttttctaactacaggtgaactagcagcccatatatagtggctggatctgaacttttgtgggtcaggtatggaacatattcatgtattgcgcaggcacttctatgctatgctagctctgaacattgatgcctggaggtttgtttcatggcatgttcactgctagatagtagtagctgtgaaatcaatgtatggctattgaaattgatgcagacctggtactattgatgtctggtaccctggttatcaggccaagcgtgtcctaatcttgtcgagcgatgaacactatagtgtattttgtcttatgtacaatggaggtttgtcatactgaatctgtgtttgtactcaaccaatgtatatgtagaataccatgtaaagtaatattattaaagaatgtgtgatgtttgttcatatggacttactctcagtgtcctagatatgaaagagcatatagcttttcaggtgggctcagctattcatttctcatggccttgcatgaattcttgttcctgagctaaaattttccataattcatttttcatgtgtacaaactagttggcataaatactctaagacaatcaatgttcttgcttgacaatgccgggaggtgccaacattt

SEQ ID NO: 29872 - DNA, 5895 bp, Oryza sativa
acattgtgaaacggagggagtacataataaaaagtcttctgttggtacagctaaagggtctggcggaaattctttcggaactccaaatccgttttgggctgaacacttgcgaccctatggtcattcgtgttcttttttcaatttgaatattcccatacataaagtttctttgttgaatattgctatgcatttccttatcaagaatataaacacatataaaatttaaaatttgtccaagaatataagcacatccccatatgctttctcatccaaaccaatcatgcacagtcatatctcatttaatattttcacatattttcacatctcaatcaatcataaccattactcatcttgatcttaattaaaagaactccaaatgtgtttatattattagagagggattataaagtttctatattgaaaatttccatgtatataagtcgtccgtgtgacttcatcaatctcaacatacgctggtataatattttagatgtgctcataaggacaggatgtgtgtattcatgaaagtgagtatgcgctcgttacgagcttctacgtttctactgtgttattttaaaaaatggtttcaagcttttttttattgggccgaatacatgcatgcaaatgggtcgttgcacattggacgtgggttagaaacatgtccgcttcccaaatgaaaaaggtaaaaggtcgcacacatggacgacaagagattgatgtaatgcaatattttttttaaaaaaaaacaagcaggaaaaaatagtttcttcaagaaacaactcaaatacagtgttgcaacaattcaactaaacgcttgtaaccataaaaagctgcaacaaacattaatcttactatgaaaaggatatctattgcgtatatcttagaacttggaagaagaagataaatagagttagagaatatttgtttatagtccactaatggatcgatacgttttaaattggcacatactgtatggtttaagtatgtactccgtataaacatatctttctttttttctttaatttttttttcatcgagtgctctctctgatccagatacgctagattggacggcccgagcatctccaacagcctctccatcagactctccaagttaaattttggcaactttagcagaaaatagtactccaacagactctctattcagatggccaagtaaaatgactggtcaaactcctctcccaactagccaaatttggccattcaaacagactagccaaatgtgggccccaccatctctctcctctctcatgccatcctccctctttgtccggcacagttgggacatgcggcccctccctctccgtcgttgtccccatctccgcccgtgcccgccgtcgcgcctccgttgtcgtccccatctctgttgtcgttcccatctccatcgtccccatctccgccaactccgtcgtttgcgagggagcatgaggactcatcgcttgccttccccgacgcatgccgctgccgcctccccacccagtaaaaccccacttctgccgccgcgccttgccaagccaccgctgcaggagagtggcacgagggagcggcgggctgcccctgcccctttccctcgcccacgagctccatatccagttgcctctacatccgcgggtctatatctatggaggtgaactcctcttcctccgctccgccgccgtcgccgccctccatacccgcctccagcgcctgggctgatgcctcgctgctcctcgatgccgcgtgccgtggtatgccaacgcaagagaagaggaagaagggaagaaagaggaggaagaagaaggaagaggctgacatatgggtcccggtgtcatagagtcaaagtagagagagtggatggagaggctgttggagtaaataactagtttgactagccaaatcggatggagagttggttatataaatgtttggaaagtctgattttgagaggctgtcagaaatgctcttacaagttactccctctgtttctaaatgtttgacgtcgttgatttttttaaatccgttcgtcttattcaaaaaatttaagtagttattaattcttttcctatcatttgattcattgttaaatatacttatatgtatacatatagtcttatatatttaaaaaataatttgaataagacgaacagtcaaatatgtgcttaaaaagttaatggtgtcgaatatctagaaaaggagggagcacaaagcatttgctgctgtcttgctgatcacacctttcctcgtcgtggccgtccgattcagcccagaaggccagcatccaaccgtccataccgctcgttgccctactctttgctcggctcgggtgggtcccactctcagtctcagccgacgccctccttcctcccctcgcttctccgccgccacttctcctcgccctcgcgcactccaccgccgccgccggctctcgtctccgtctccaaccaaagataatggcgtctctggcccgcgccgccgcctccgccgcgagggccgcgctccgcccggcgccactcgccggccgcgtcctcggctcgccgctccccacgcccctggcccccgcccgggccgcccgcatcctccgcaggtaggcgcctaggctaaacttgtgagagttcgatgcatcatcgtcgtacatatacattgggttcatggtggcgtgcgcttgctttatgggatcggtgcaggtcggcggcggcggcgtccgcggggctggagacgctgatgcccctgcacagcgcggtggccggggcgcggctgaggtcctgcatcgccgctgactcctcctgctggagctcgctgtcccaaggtaaacgccgacaatgcttcccctccctttcggattaatcttatggatattcacatttgcaaacgtaagcctgcattggatctgttgttgattgttgcatggtgtgtgtgaattattcttgtggatgtatgcttattgtcggttcagtatagagttcctcagtgaaaccatgcaacttattaccaatccttggtttacagaaactaaaaatagaatcggttgatagtaccatcctggtttgtgcaccactcagtttgcaattattgtctgtgctgttcaaaacttggtctgcacctagaaaaattgtcgtgctaaaatccgtagttaaggtatgagttgtaagttatgttctttgtcagttagatatgaggcatcgtttttcactaaatagtttgaacacaagatatatcatccagctttacagaaagcgtaggagttcagagtactactactttagaaaaacaaacactgacatatgacattctagaagcctttgggttgtgtagttttcgcatttagctggcaacccttcctttattggttaactttgtttgatttaccctgtaatacctccatttttttatatttttcgtttgatacactaacactgatagattgatacacctttgacaatttattttcctaatatctgttgtttttttttgaaaaataaaatgatcagagactatatctgaaggagaatgtttttcaaaatacatggatttttcacttgaagggcttggtgcattttttgtactttgttattccctacatttgtgaccaacttagagcttctgctttctgttctgtgagctcttttggtatgactagacgtaaggaggcttagctgagatctatagaaacattttttgttgatctcctgctgttattgctactgtaaaaccttgctgaggtatttatcagtaagcccatagaacaattttctacaatgcttgggttcgtattcattgatttgtagacacatagacacttggtaagtttgatcttcttgagcttctctggtaagggcaaactttctttggatgagcttcctgggcaaaattttgttgaaagatgcttgcatttaaggtttgcattcatgaccaaaaactaatactacttccttttttcatgttggtaatgaattaacaaatgcaactgttgcttgtggttcccttgctctttttatgttgaaatcatggattttgttgtgttctaaaacaagggtttattggatttactaatatttgttaattggttagtatagtagactatcaagaatctagttgcgaactgcatttccacttttttttttcttgtttctgaaattcgaaggattgttgttgctgtagtcctccagtctggttaagtaaattactgaatccatgtggatagtgatacattgaattgagatgcttgtagataaggttagctcgtcttaaaaaaatattatgtttttcctttattaaaagtatggggtttctatcttttgactctgggttattataggtttaaaaaagcgcatctgatcatggctaggagctgtgctgcagtgaagcgaagacacactgagtttaaacaaattgcatttatttgcagatagttctagaactccagtttttgcagttgctccatgtgtgtactcctgttagcacaataatggagcaagcaaaaagttagttcctttgtaacaacatgcttgactctggttttcagtcaatcttgataatgaccaaatgcattcctgtttttattttgagccggagataaagcaactcgtaattgaaatgaggcaacgattgtgtattcatgacctgacttgctcttatatttggtgatataggatatgctttgcctttgtgacagagagctgcacctgaagaaatcaatgaacattattaggaattacagacattgcgttctgggctgtaacacctagataactgtgtggtgttgccttcaaacttgttttggttttgtaatgtgcttcaactgggttttttgaataatatctgttgatcctgggatctatggcccatgaattatcctcttcagtacgattgattgttgctgcgtttcccttcatttgccctgctatttgaaagttccttcacttgtagataggggtggacaaaaagctcgaaactcgtggctcggatcggctcgtagcaagctcggctcagatcaattcgaactcgtagttttaatgagtcgagtcgagctagccttttagctcatgagcttaacgagctagctcgcgagctgctcctttagctcgttagtataaaatatcaccatatcttcatgaacttagtgtttcttgactagtgcttagtcttttagttacatcaaaactattcatatttagtgagtactatattagttagtgtttattattatgttaatacataataaaatcttaaatttaaaattattaatatggtattaatgagatatagcttgttaacgagcttaacgagccaactcgcgagccgagccgagctggctcgttaaaacaacgagctcaaacgagctgagccttaacgagttgagctggatcgttatctacccctacttgtagatagcatagtacagccgatgaaaatatcatgaaatgttctcgagaccagggttcacagaactgatcaggctttgtgaaaccggtcggtattagttggtttccatatggtgtttttggtaaaacggtgggaagttgtttttactttaaaaatgaaaatcgaaaagataaatttaccctgctcgaggctaaggtcacgatttccacaacaaaattcgagggttacctaagttgctctgttctcgtgcaattttgtttgaaagtcgtcaaattttacaaattttatcatctcgttgtggttctaatgcattttttttacggaattgctaaacttctgtcgactgaaaatacaacctcaaatcttgcaaattttagatcactggatgtgcttcacgattcgtgctcttcttctccaactctggcaaccccctcttcttctcgggtgctggctaacccaaactccagcagagggccgacgaattagggtcccagggtggggtgggggtgggagg

SEQ ID NO: 29873 - DNA, 19105 bp, Oryza sativa
tcgccggctttaaagggatggccgtaggaggcgacagcccggtggcgaggcagcggcggcaccgccgaaaccgtggggtcgggagctgcggcgaggcagcggcggtgccgccgaaaccgtggggtcgggagcgggcggtggaccggcgtaggcgacagggcaaagcggacggattattaggaggaagaggccggtggtggcaccccgtcgctggagacggagaagacggcagcgcgagacaactcgcttgaggaaaaggagaggagagggagggggagggggcccgccagggggggcgatcgccggcgccgttgacgccttttggccgatcggcgaggcgggcggcggcgggggatcgggcggaggcggtggaatgggcgatgggagggagtggcggcagtggaatgagtgaggggaggggaataggaggagagttagggttaatactatgcacgaatcttaaagcatatccgacgggctaaaatttgaaagatgggaggtgggattttctgttaatacatatataaatagtctcttttttttttaatcccggagcctatactacccttgtctagattatgtagactgtaactactcttgtcgagttgatagatacggtaccaaatctaagggctcggatgtcctagttgatagataatgtacctagacgtgatgccctagtttgttcctctctcatgtctatatgcaggcaaggaccgtcagattcgaatctaagagctcacatttaccgagaaagtggtgtgatttattacactgtagtttgatcccagattttgagatacctggaaagctggaaaacagcgaagccggcggctattgccggtatgtatgtcgccggcttgcatgcagcacgacgagctcgctagctagctgcaagcatatgcatgcagctccattctcaaaatttaaaattcaggatcttcgaggattcaaaaattcacattgttttttataaaactatacttcaatttaacaatattcgccttgaaaccaacaaaaactgcatactccctccgtactcgtaaaagaagacgtttaggacaacgatacggtctccaaaacacaactttgactactagtctctataaaaatatttattgaaaattgatatatgtatacttttatgaaagtatttttcaagacaaatctattcatataatttttacatcttgaaactcaacaacttaagagttataaattgacttaaacattgtcctaaacgattttccttacgagtacgaacagagtatcatatctttatatcaggctgaacacaatttagctttaatcaatgtagtaattctcatcaacaagctaatgaacacaatagcccggggccaaaaaaaaaaaaaaggtaatggacacaaataagcttagttagcagaagtgagtgctcgatcttcagatagccatattagatatgaacatgtacaatttagttcaacttaattaacccagctgatgggaatcaaaacattactactgatttacttaattagtggattgccagtgccaaaatcccactactatttaccaatactactacgtatggatcattgggtaccactacgatcgagcacgcatgctgcagctgccgttcaatcagtagccgaagaaatctctcctacggtggtcggcggcggcagctggcggcggcggcagagccagctgctggtggtggtggcggtggcaatgaccggcggcgaagctgaagcagtggtcgaggtcgagcacgtcgacggcagccgccctcctccgcttgtaattctccttgaagcacgcctgcctcagcttcttggtcctctccgtcagctccaccgccgggttcctctccatcagcgcgcagcaattctccagcgcctccagctcccgccgcatacgcgccgccgacatccccttgctccccatctcctgcacgccatggacggacggtgcaatgcaagcaaagcaagaactgaattggtctggaggaagaagacgaagacgaggctgatcgagaaggttctaggggttaggttgatgcgtgcctggacgttgaggatgagggacttgaggctcttcatcttccggtgaggccaccgggcgacgccgagctcgcggcagcgcttcttgagcacggtcagccccacgttcatctccctcgccgccttggtgaatggcatgtagaagtacccgctcaggtcctcgaatccgatgtggtccagcccgagttcccgcccgccgtcgccgcgatgatccgtcgcgcggcttctcgtcacgccccgcggcgccgccggcggtgaagaaaaagaaaaaggcgtcaatgtcgttgcggctgatgtgatgatctttggcttctgctcctgctcctgctcggcggcgtgacgtcgcatgcccatctcgtagctctcgacgatcaccatggacagggagtcgtcgccggcgagggcggcgtcgttgcgttgcttggtcacgtcgaacttgacgtcgtcgtcctgcgtgccgaagtggtgggcgccgccgccgccgaccgccgggagcgcgatcgccgcgtcgagagtgtgctggggactgggcttgggctcgccgacgccgacgacgacgtcgcgcgcgtcggcgaacgcgtcgaggtcgatgtcggtgaagggcatcctcaggagctcgtcgtcgtggctgccgccgcccgccgtcgccgccaccgccaccgccaccgcgggcaacgtcgagacgaactgatcaggctcgagctgaaactgctggtacatgtagtggtcgacgtcggcggcggcggcggccgacgcggccaccggcaggtagccggcggccatctccatctcctcgtccctgatgacgacatgatcaaaaccgttcaaattctaggctgtaataaatccatcgagttgcagaaagaaagaaagaaggtgaagaaatgatgatgttcacctgacaacgagatcggcggtcatgcaggcgccgcctattccggccaccgcgccgccatgatcgccggcggagtgcaagagtacgtcatcgtgatcactacacgagacgattcaacaacaatgtcagtttcatgtactactacactcctactcgtgaattctacaaaaccaaaaataaccaaagcgatgatgaaatgaaatgcactgacctgaggaggagaagctgcgacgaccacgaagaagaagaggaagaacacggcggcgggatggcggcgagtgggttgagccagtcgccgccgatgctgccgccgtagtagcagcactcgtgcatctccatcatgatcgatcgatcgacgacggcagttggccactgaagctacctagcgaagaacgtactgcaaatttagcctgattgatggtatcgatctcagagttgccgatggatgctgaatagtgcgcctatttatatacacacacaaccagacgcgtaggaatactagtatactcctacatatgtggatgtgtgtgtacagtaaatcttgaaaagagatttcgcatgatgggggaaaagatggcgagatgagcaagaagcagcaattaatgtgtagatttggtggatcaattgcatgatgcgttcgtgtattcccgagccgatcgaggattgattgatcatttccactgagattcatcggcggcgcgtgcacaggataaaattaaaacgctttcagataagacgatgcaggtaataattaaccaacctgtttgcttgtttaaaaacgcacgcgtccactacctcaccatcgacggatggatggatggatggatatgaccgcctcggtaactaacgcctgcatgcatgcatgatatgatggatgcgtccgcgcttgactgacgtcgtgtgcggccgcgcgcggcggatagacgtgtgacgtgtgcacgtacacacacacatcggatgcgcgtcatcgtcgatggatgggtgatggatatgggcgaacgtgtgaacgtgcctgccggatgatgacggtgtatgccctcaatttgctgggctttagtctattgggctacagttgggcctttcgggtcagatgtgctttcggaagcatggcccggtcgacttagatcaggcccagtgataacactaactgcacattccgcattgaataagtaataagtctatcgtccgtccctcatctttccgtcgagtttgtatcgtggtcctcgaccgcgcgcagaaccgggtacaatgcatccctcatctcccaaaactagtgtaaacgatgtcctaaggaaatatggaggatggtttttagcttacatggtgcctacgtactgaccttaaaatttagaaataaataaaaattataagtgtgcctcacacatgagtgacattgcagtcttaacctcccctctctatcctattccccccatctttcttgtagagcagggacgagggggaggagcttcagtagccaccatggcgggaccgtgccgacattgatgtcagttatgcgcatccgctaggagcatcagatagtcgcacaggagtccatccccaccaagcgctaaagggaggtatggagggaacatgtggagtttgtcgagttcgccggtaaatagcatggcttctttgaggtggacccccagcggtgcagtgcctccagagctctaggaaaaaaatttcaattccgcttaagtttcttgctgtaaagttcgttatttaactgttactgctcatgtgtttctgagaagttttgagaggatggtttgggttcaagaagtcagaggaaggggatggatccggcgttgctagatgacatcacccagaggcttagtgtgacatgcggcccaattttgatggcccgtgagagttgtgtacgcatgtttagtactgcattgctagtctagcaagaatgaaatcaacttataaggtcttatccctccagtcatatcactctttgggttaaccctcttacaaaaagtgaggacggaagtgtaagtgggtgcacccgttagatgggctggattgcacggttctggagtcagagatacttatcgaggtgaagaatccatgttccatatttgtagaaggttgacctttgtgtttctctcatgattcattcctcttcctgctgagtccctttctcatctcttaggagatcttatctcatcagcccaacctttcctcacttcttgccatgcccgagcaatattttgatgttggccatcctcaaaatgtcatcttggggattggcttggtttttcaatggttaccaagtgtcatgttgtttggatgcacttgcttaatgtactatacccgatcttcggggtgatagcccactgttgtccaagaaaaatggcggcgaaggaggcgggggcgaggaagatcggaggacgatggtggcagacgacagagaggagaagaatggcaatggacggtgggacatttggggatggctcagccacaccatctcccttactagcattccactggtctcatcggtgccggcctcccacaagatggtgccactacaccatctctcttgccaccgaggatgccattcctctctccattgagagagatggagagaaaaggggggagagaaaggagggagagagaagatgggaggagagtgagaatattgtgtgggcccagttttgtttgtgccacacaaatacctaggcagctcaagtagaccggtcaacttgccatgatagcgaaaccaggtatttatattattaccggaggacctatctaacctggttttgtaagttgtgggccaagatttttggtgttgtgatttagggatgttattgagggacgtaaagtgtgcatgaaagtgatttcatttcatctcttgaagatgaaatgttatatgtacaaatataatcaagaaaagttttaggagaatttgacgataatatatagatcaacatttgaaatctgttcaaaatatttagtcgattatggctttatagggcatgccacgggcgtattcgatgaatcatgggtgggtgatgggtgagtgtggatatgcatgccttgcggtgtatgtatgcgcgtacggttgtgggttatgaacacgagcttttcctatttaaggcatcgaaagattatgctcggataaggcaccgcttgaagaactcgagcctacttcctcagtttttttaacactattcccaaaatactagataatatgttttaaaaaatattctatataaaaaatcataataaaataaaataaatatttttaaagtttgtaatagtaaataatttattatgcgctaaggcttgtctcattctatgtaccgctggaatgatatgctcaactactaattcaatcattgcagttacttcgtcgtttttcttaaacatgtttatctaactgctaaatagtgtgtatttttctaaaaaaatatatagaagtttaataaataaataaattttattttaagtatgtaataattaattaattgtgcgctaatcacttatatcgtgtggttaattagcagcttggaagctaaagtcaacgctccctaagatggctcacaaacacgctttcctacttttctctacatcgtgtagcgcatttcatttcttcattttataaaaaataaaagaaattttctattgagttaaaaagccatttttatctttggatgaaagtttgcactataacctttttaagaaatatttgtatgaaatattttgtatgcatatagatgaaattttaaacatattgatgaaagtttctctttgtcaaaatcttctactagaattcttttaaaagaaaggcatgaaatttgccttatatatattactgtattgatagagcaggagttgaaaatcagattatttataaccgggtgggagttatggtcatcctaagaccactacagactggcttactctcgcagcgggttactacactactacaggccattggtaattaggttgactactccaaatgtgcccacacgagtgcatgcatactgacacgatttctttcccccaatacatgcattaaaaacacacataaacatggaatgacacgctaacatgcaacaagacccggctatggactgaaaaccctaatggcggatagatgcgagcctcctctcccgcgcagcacagccacgtggcgcacgcggagggggggggtgcgtgatggtttctctagttttccttctggctttttgtggtttttttctttttttatcccggtttttgttggttttcctaatatgtatgtatacaaacttcaaactttatatacaaagtttaaacatatacgtatataaagtttgtataaatttgtgtacgagacgtatttttaatttttttaatacgtacgtatgcaattatggcgcgaggagtcaccggggtggcgactcacctagacttgtatatgggctttgcatatgacgtagaagcgggcttgcatcatggcgttggaccgatccataaatagcggtgtctcagactcctcacgtagttcgttgttgccgtttcagctgtacgctggtaggacatccactcgagagtttaaaattcactctcgatgtcatcccttaagcctacccaacccaaaatattagcctgattatattggttcagatcatgaccttcccttttaagttgtgtgctttcttataatcaattaccaattggccatcaccaactagagttcacaggttcctaaaaagtcaaaaattcacagatgtagagaattcaccaaattctctaccgaatgtcatttagtaaatccaaagttaggagaaaaaaaaaggaataagaagaagcagaatcagaagcaatgctgcataattttgtgtcacgacaggagaacatgaggggagagacgcgcatggaatagtttatcatcaaatcttactcgacacatgctagaggtcgtgcgagcgactacacatgctgacatgcagaggcagccattagctaggaccatagccgtttgacgaacccaacaaaagggaacaaagtcacaccacttaaattatccagcacattacgacatctctcgtgatccgccgcgatgagcgccaataattctcttcgaatctcggcagatgagatcagtccatttcacacccacatcaaagctccccaagctagccagcatctgtgagagacagataaaagaaaaaagacgagaaagaatgggtaaaagcaatctatagcagggaagaagatgataagaccatatcatgcatggcatgtctcacaagagtactatcgtgtcatgagagaaaaaaaaaagattacaacttctgttcatgggtgagacagtgcagaggacacacaagcactgtttggctttgcttaatcaagagttaaagccaatgatgtctcccaaacacgagagcatttcttaattccatgtgtaatgatgcatgcaattgctccagggggtttctcattccgagtggtggtacgggggagcacttttgatgaattaatattggtcacccccgtttgtaaatacatatcagtttgactttgactgatcatgctttggctagcagtaataattctcaaattaaattatagatttgcgatgtaaagtactttgttctctctgtttaatattataagatgttttgatttttttaagtcaaagtttaaccacatctttagaaaaatatagcaacatctacactaccaaattaatttcgttaaatcgaatattgaaaatattttgatactacatttgttttgtgttaaaaatgttaccatgtttatatataaatttgatcaaagttaaaagagtttaactttaaaaaaagtccaaacgccctacaatataaaaaatgagtgtatttttgtatagctcacaaattacatgtcaaaattatacctattaaagtcagcacctgcaagtatttatgaattgatgtagtagtaagtttgccaaggtaggggtagttaactgataaaaatattctaaaattgttaaggagacatctttgagttcttgtgattatgattgaacctgcagtcagtgtgatgactcatgaggagggccccatatgcatggggccaaatcatgaccatgcacaagattagaaagaaaaagaagcaaataaagcaaagaggagtcctgtcctccatcccaatcaaatctcagcccagctgctccttttctgaacttttgattagccccatgcacagtatcagccaaaccatctacttagagcaaggttaatagtgtcgcccgctaatggctgaaaaataaccacatcagcctcttatagatattgctaagagctaatgtatacaataaacaggtttacatcgactattatttattttttaatctttagctaacttccccatccaattttttagtcttattgccgttgtttcgtccaaccattactgcatcgcgtcagctcacgtggacccacaatcgcatgtcccaatcaaagctagcctggtgttgctgcacttgcgttgggacgtgtgtttagccggcaacaatttagtcgccgactcatgctctctctcctatttagctcattgacaaatccgatgtggcagttttatcgccggctaaactggcttattgtacttgctcttacttgactgcttaaccaactgagcactgttgtaattaaatcagtgcatggctagccctaccaacttcacttcagagctcagactggacctgtccctctgaatatttgttttggttgttccttgctgtagaggtagggatcaggctctgaatgagttgatgatagtacaagggagaattgattatcagcatggcaatggaggaacatgcagacatagcaatagtgaaactagctgagtactataactgctactagcagttgtgccatgaatattcaccagtcagcatccagtagtagcaggaggaggagtaagtagagactagagagcagcagttatcactggtctccttggcttggtttgcacgggcattattatatgtagctgttggctgatgctgccattgccaggccagcaccataactactcctggtactatagttaaataggagtatctgtcatgctcatgacatgcttgccttcttcttattctccttccctatggtcttcttcttcttcttcttcttcctcggagctcgttgaactcctcccgccataattgcatcccctattcttcgccaccaccatcgcaagaatattctttgaagtgttttgtgttgtacttgcattcatctctctgatcaaaagaggaattggcaacagaggaggatactaggatggtggaggcagtggcgtcttttcggagaggaggcgttggcattgccgggatgagcagcagcactctggaggaggtgcagatgcaggagacgctcatcttctctgataccatcaaggtcagtagtcccaaagttcagagttcaggcatattctgttcttccctttttggtttcccttcctcttctttgcctgcaaaatcatttgtcattgctcaagctttaatcacagtcaaactcaatgaaaatatgatgaaatattgtcaaattggatttggtgttgagcttattaagggaaaaaagaacaaatattgcttggctgtttctttttcagttaggccgtatagtatttcgtttcttttctttttctcgttgacattaggcaactaaagaaaatactgcatagtttgatgagatttgagtcttcaccggtaaccagcaacacgttgcgatcttcttatttcaggatctcaagatgctgaagtcgcagctgtactctgcagcagagtatttcgaactagcctacacgcaggaagatgacaaacaggagtacgtgatgtaccgattctttctttctttttttctgcactagatcatcaagcaaaaccccagctgctgctagaataattatctcaaaatgtgtacgaacaatattatttgtagggtgatgaacaacctgaaggagtattccgtgaaggcgctcgtcaacactgtcgatcacctgggatccatatccttcaaggtttcaagcctcatcgatcaaaggttcgatgaggttgacgacacaaatctccgggtgtcctgcatccatcaggtactaattttcagagttcatcacgaatagtacctgaattcagtactgcgatctagtatagttcttgaattaacaaagtgatgatcaataataataacctgaagagagcccaagtgagccaagcatgcatggacaaggaaggcctttcacagcaatcattggtgatcacagctcccaagtatcacaagaggtacatcttaccaggtaattaaatatgtatacctctccttttgttttggtccaacttgtcagcaaattctgatggcagggagtaaacaagaattaatttgtgtgagacatttcaatcccgttattcattaatcgcagcaggagatggttcaatgcctaatgctgtgcccaacttcagcgagatgaggaaggccaagaacagagctgcacagatgcaacaggtcttcagcggtaagggagcttaaattgtactccctccgttccaaaatataaaaaaaattagaatactattaatctggacagggaaaatcccttatattttggaaattttggaacggagggagcaatcatgagaattattgcaactcttctatcaatgatgagcatgtactagttgtctcgatctccttttgacctgcaatgttttgccgctgcagcagcagcagcatcccaagcaaaagccaaagagaagcaaccttcattcaggtcagtctgctatgcacaacagcttggacgtttgtccatctccagcttggaagttggtgatctgaaaaattgacaattttgcagcaagcttcggtcgatcgcccgtgcaccttcgcaacgtgcacgctcgtcgtcaccagcacagcgcccaccttctgagaatacaatacccaccaaacgaggtaaagcaatcagcaactcaccgtcagaaaaaggattcccttgaaacacaggaacttttatggcattttcataggatttagcccgattctagcaaaatttcctctgtttcaaaggaaatggtgcttatatctttgatcagatttgctcatgtttaattgcacatgctcgtttctgcagcagataagaggtcagaatcgccaattcccaggaccacgccactcacaaggtctggatcacttccacaaaagccatccttgttgaaaacttcaagtgtcagagttcaggtaaaccacacggccttgtgaatacagtccacctaagaactggaataccctgtcaataaacctgaaatatgttcatctgtcgttgatgaagatgcacacatcagagcacaagaaattggcatcagtgaggtcacaagctgacagaaacgatgacaaggaaggcgagcagactccaaagaagggcaagaagtttctcaagtcgctgctcagcaggcgcaagtccagaaaagaggagcctttgccctgttactttgatgattactgagtccctttgagagatcccatggcacagcaagaatctctgaatactttttacatcgttttcttcccatgaaaaagtttgtccttgatatgaaaaacttgtcattgtatagcataatagtaaacagcatatataagttgttgaggatgattactggagcccaagaattctggaagttttgcaagagttttgttggtagctttgtttgatcacctaatacttagcattcagcacactggcatactgccagccagtctccagtttacaatgctgagctccagatcaaataagcagcaatgtctatcaactgtgtctgtgtcttcctcggtacaattactaaccttgtccaccaaaattaccagaacacggcacagaataataacattaactaaatacatgaaagttatagagatcgtagaaccacaacaacaaaagaaactaaaataggtgctcatacatgtgtcatcgagaaatagcattgggtacagctaaataataactgagcgagccaattacatgttacattaatcttcagaaaaaaaagatgttacatcatatgatactatacataaaattcattctcttaaaatatgatccacataaatgtagagagtcagcctgatgtctagttgccaccgcctatatgtctatagcatgaatcagcaaaagagtttagcaatttcatacaagtgaaaagaccacaagagaaaatgattgtatagtatgtcacccctgctagtttacagccttgcatgttaatcattgtcatcctggtaaacaaataaacaatgctatccagatttatggaaaattttgcatttccttgtatatataatggacatgcatggacaaacaaaaatcgacacctacatgacctaccgcatacaagacgcgagttccatgccccacatccagacagctaacaggagtacctttgtatacaaatcccattaaactgttcagattctgcccagctcttactttatggctacattcttgctatgccatcccttgcaacagcaaaacatctcatgggaaaacaaaattgcagaataagatcaattgatcaaaggaacaatctgaacccaccacaacaaaaccatcgctagcatatctcctcccttctgtttgttctaatgtgggcgtacatctgcaaaatcattttttacctgcacaagtttcacagaaccatccccaccgcacgagacaaaaccattaggtaagacttggatgtctgttacagcagcctgtaatcaaacatatagatgtattagcgagataaaactgtcatatacttgtcttatcacaacatgataaaaaagtcccaatgagatcagtcaagattatatattaggatctacttagtatggcataccctaacaacaccaccaaagcccctagaagttggttgaaaaaaggtgtgccgctcgtgcaacttttgccaatggaagactagctgagaacttttggcatcccaaagcttcacatctccatctttgcttccagttaagaacaaactggtatttgggatggttgatacactgctgacactacctgcagatagaacagaagagatcaggtagaaaaaccaactcgaaaagtaccatggtaatatcacaaaacttacctgtatgcgcctttggtatatgccagatcatcccactgttgctaacaccgttggaagttccagacttagtgtcatgcattgaagttgaagatgccttaacatcatgctcgttggaacttctgtgatgcttagtctttccagtagagatgaaccgaaaatcatgcaaagttacatctccacttttcccaccagttacaatcagcggtgagatagatccacagcctatatttctatcgaacacagaaagagaacgaactcctcctgaaagatgaagtccatggtcagcctcagccatatatcctaaattctacacaaggggcattggagggatgatagcagtgaatatagctacccctttggacacgcatacatacaatgtaatccttaatgccttctcagctcaccacttacaaggtcaatgaattttctgtgtttgttatttagttttagttgaaagtgtggacaacattgtcagcttggcagggtggtgctgaagacttctatttattagatgatcaaattaaaaatttacttatgttgatcttttacagctgtcgtggccccatgtgcaataaaatttaagacaagaaggtttagtcacactatttatctcattagcatggttgttgcttaaactttagaggaaactagattagcaaattttgtgttttaaccatgtggaaatttttatgcaacaaatattgtgtggtaacattggacttgaaaagaaattaacctttgcttctttctccaaacccatgacgtagctatcctctctatcctactgacaactgtgtgattagatactaaaaactgaacttgttctcattcctatttctgcattagactactagaaaccaacatccatatgcattgttttcatgattatagttccaaatggaacaaagcatcaatcagtggaataccttcatgacacataatagaagtttgacaagtggatggtggcgccaatgtatcccaaataacaacatttgcaccatttgaactgcatccagctgcagcaagaactgatccacttgcagtcagaaatgcgacatccctgtgatcaataagaatagactggtaaggttgggagctctatcaagcaatgaccattccattcagaaagtttgtttcacgtacgatgcgtgggtgttaaagcacagggatgactcggtaggatgcacattgcttcttccacccacctcaacttgccatgtacaaactgtaccatctaatgcagcagtagcaaaccgctgcccataataatcaaattgaacagctgatatggaagcaagggcataaggtggtgggatattagcagcagggagaacaccataggtagccatggcactgtctttgccaaactgtaaaaaagaacagatgatattaatggataattaaacatggcggcaaatctagtgcaaaaccctctctaggtatcatatttactcttttgactgaactaaaaaatagtaaaaaaaattaacagatcagcaaagttcagctcttttttttttcccttccagaacagattgagcttggggtcaaaaaaattatgcgatggtacattaaattgaggtgctgtccttttagatttcctttaagtttctgtggttcctcaaccaaaatagttagcatgatatatcatataaccaaaatgagagtctgcactctgcactagatgtgtacgcatcaagcatcataaacatcaatctatcaaaaaatatggtaaagtcaagcttagagtgaaaattacaagcaccgatggttgcaatccaacgattttcctattttccatgaagggaaaaagaatttaagaatagattcaccaaggcccttctcatgtcatcaaccatgtgttctgctgaccaagattccagtcctttaaattaatgtcttcagttgtgtcaactgtttacttgcatgatccttagcacacaatattttaatttatacaaggaaaggtttataatcactgattgtctatgataaagggtaaaattggagcagcgaaattcattgccctcctctgtaaatcaaggcatcaacaataaacagatatgctaacaagtaaaacccagtccaatgtgaagtagtagacaaatttatagagtatttttttaaggaaagtttacctcccataaataaacatgagtattgcttgacccaactagcaacaatggcaaagatgggtggcgagacaatgctcttgaatggatgttctcgagtgttgctggaggatcaacgaaatcttcgaattcgtcaggttccccccacccaaatccagatgcgccgataccagcataacctggaattccaaatgctccaccaccagttaagtcccttccaggttttgccaatgaacctaaactaatagttggtccacctgaactaagatgggatccttttcttctgccaagaccaacactaggagaaaaagaagttgaagtaggtgtagattcgcaaccagcccacccatccaagggccaatcagatcctgcccatatatactctgctaaatttttgttatcttgcttgtcattccagttgaagaaaacaaggccctgaaaatggataaccacacagtaaaattgatgcacggcataattatatgttacttaaggagacaaacagtccacatggtacttcaatgaagagccccttatggagtagcaagtagattgtctgagatagaaaagacaatcataaccttcattcaatgtgggtaaccaaaaattcttacaaatatctgattaaaagatcttcgatctttctggtgtctagggaaccaacactcaatacaccccgacttaatgttaggcagctaacctcatgttacaaagaagtcgttacaccaaatacaattctttacattgtttgcataaagtcctatttatcatccataaaaaaaaccacctgctactttggttatttcatttcaaccacaaaagctgaagcagcatgccccatttcaattatatcttagtattggcactactaataatctaatgcaagaaaataacggaacacatcttcactgttggaatggatatacacattcacctcttaacaaatgggtgaatatcaaaccatttttaaaaattttacacctgttcaaagaaacactgaaaacatgtaaatctacagttttgaaaactacactttcgttgtaaaatttaataaaatagaatagttatttttcaatgttaatgaccaaggaaacacaagaaagaaaaaatgcaaaaaaaaagggggaaacaaagaggaaatgcaaggaaggaaaataactgaggaaaggtgttcactcaaacaatttcctcaaattcacagattcactaaccactagataaacaatttcaaataaatagtcaatataagtaacaatttaaatccagaatgcataaataatgaatgattgaaaaatagtaccttccgattggtggcgatagcaccttgttgctcattgatagagttgagacatattgcctgcaccgcaaaggattaaaatgcagtaaaagaaagggaagcaaaatgattagcatctatactgtcaatatgctgatggtaaatacctcaagaagttcaccatttctccttacaagttctctgggtctttcaaaatctgcaattaaacctttccttttaggttcaagagtgacttccacaccataaggggtattgtcaattgatctctgtattttctcgttgttcttggaacttaaattgtcacgattttcttcacttctttgagcaaaattattttcagactcaactaatgtagcttctgtcatagccttccaggatcgtgttaaactaatgctgtttaaaggaaagcaattcatttcttcatccacaaaagcagtgcagatatccacaggatgagcagatatttcccacaaagtatcaaaaaagacttcgatgttctcactgttagcaagctgaaaaatacttgagaactgctcatggctattgttgttggaccttggctgagataaccagaaaagcacacttgaatttgacttcttcagtactttctctctgaaaaatgaagcatgcaattttactaacaaagatgacacaaaatggagggagcccatcaaaaactttgcaacaactgaagatatgaggtccttgaattccacatcacttgcactagtttcaagttcaattctctctttttcaacgaactcagtcaaaaactgtttcatgaaagatgacaatcgagtccacaaagaaatacctatcaaatgccatttttcatcaattggaagactctgattctcacttctttcttgttgtatattacacaacaaaccattgactgtgcccccatctgtgccaattgatacaccatgaattttatcatgtacagcttgcagcaactgatctaatagtacttgaaaggactctctgttgacacaagcacctataactggactggtcatggtaagcaatgcttttatgtcatgacataaccaagaaaaggaaaactccatgttgtattcaaggaggtccataactgtaagcatagctgatgtacgacctaacacaaaagttctagtattgtcttgtttcagaagtaacctgctagtactcaggaagtgtgataaacttgccataatgtacttgcccactttaattgtgcatggagtagtattagcgcagtccatgttcagagcagaacatatgaagcagcaggagacaacatattgtgtaagaaacttgcagctctccttacttgacaccataaacatataatcaattggatggaaagcacaaccttcaagaccacaagtaccggttccaacatctgatgatatactaccccataacaacacgtacgcgagaaaaaatataccatcgttgcaacaaaaggtaaggatctggatacacaacagataatatggtttgttatgagaagtccaacaaaaagaacaaaaataaaagaatatggtatcccttatgttaccttctcagctatatcagcaacttgaagtgagaattttttatcgaatacttgtagcgctgccttgacatcacgtgaaa

SEQ ID NO: 29874 - DNA, 20491 bp, Oryza sativa
  unsure (1)..(20491): unsure at all n locations
ttatctttagttagtggtaggctgcaccgtgaacagagtgactgatttctcagcacgcgcgacagatattttgaagccatagttattttcaggtttgattcaacatcactgactacagatgctgagagccagttggacgaagcatggaaagggttcaatattccataaacaatcttcttgtctccgccatccagtgaggtgttgtcctttccctctatgcccgagttacaacataggtattcaagtgcttcaagctaatcagtgagaaagaaacaagatttagaacaatacaaaatagaatatataacattgagatgtcaacagggcaccctttacccaagcaagaatcattcatgtgataagaatacttacaggcagtccacatctgttcaaggcgcatgaagccattgctaatgaaagcttagataaatttgcagattgagcttcaccaacacagtttctgaaactactttttgtcgcaatgattgcacaatactgacccactccagggtctgcaaagacatttgtatcaccgggaatgctggattcttcaatcagtgacttgaggtggcaatcaagtaattgattcacagactgagagtagttccctaacatccactgaaaatttacatgaactttagttgaaaagctgaatgatagttcaaaatgaagaacattaaagaagaaggcagacataatgacatacttcaagtaggcttgaaagccagtggtctcctttatcaactgcttcagggagcagtacattagcaatgagattacgctccaagggccctccagatccctcaagaagtcgacaaattacaatagcaagttgttcatcttgaaggttctttgcacaaacactgatggctgaggatgtatcacctccaaggagaaaaaatgctatagcaagctcccattgatgccttccattagcacatatgcatttttcagagcagcagatttgtgtttttcttcctagatagataagatttatcccaataagtatgatgtagaatatacttctcaacattatgtatctgaaattcctctcatgtttcgtgtgcattttgcttaacaaagatacagtccaagtatactgataaaactatcttgtttctagcagaatgctcatttgcaatgccaaaactagcaagtataagttagttcacatttacaatcataatgacacaaccatgtagataagaatgttaagcataagcgcatagttaaagatgtcaaactatccaattactagtctctaccacaccaagatacctggaagttcctggagagaaactcatagagacgtttatccttttcatctctgctaatcttgaataggccaactaatacttttgttctatttaatgctatatagagaagagcacagtcctttgggtccttgcttttaagatattgcagccttgccaacttctccatctacaatgtcagacatacctaatcagcacaggtgattatccagacaactgcaaatgtgaacaatattcattacaatgtccagatatagggcagagagagaacattagaagattcatttgaatttaattcctagaatctggacactggactaaaacaatgacaaatagttcagcagttgagaaaagctaagttcaatatgatggcatctcaagaataactgtaacataatacttcaatcacgtcgagggaatcattcaatgtaggataagtggtccaaacaaggatctacattaattcaaatgctatagtgctacagaccaaattgtaaatagaaatttcagtaattgagatatagcatagttcataaactttcaatgacctatgaggattttattagtcaacaagagagtcttgctctcacacatacaaacacttatcactgtttcgaccatttgcttttagcaaaacctatgagaacataaattgttgttgagacataccttggttcttaactgggacacgttggtgtaccataaccccataccaaggtttcgcatctcagaccaacttggttctgcaggaagaacagaattaagtagatcatcctgacaatcagactgtaaggcccacgcgatagaagcagaatcaacatggaagacttcggcactggatggatcttcagatctcctaagtgcatataggcgttcgaactgcacagcaacccagaaccttaagagaaacaaaattaaaaattaatgtagataccatacaaaaatgagtagcataaacttgtacaacacttacaagcccctggattctagtaaaacaaaatatatatatagcaatatgtcactgaaaaaaaaaacagttacatatgttaatctaggagttacttttaccttctccctgcttcatcaaggcttttatagggagatgcatggctctgatcagtaattttacccaaaagatcagaaagtgcaactatctgggttctctccatgtcacttattgttgatatgctaacattcgtagcaaggagcttatttatttctgaactttgagatgtgctagtggtggtgttgatatcctccatccgaggatatgaatttgatggtgatagcaaactaaaggctgtgctacgttgattgtcaccccaaagtaaccctctattagatatgtcattagatgtcatatcggtgaagctttcagataaagggcattcaggaatattatggcatgatttaccacagaaactgcactccaacaaggtgtttgatattttatttgcttgcatggattgaacaagatgctgcagaacagtgtttgcccgtttccattgacctacgcagagcaataaaaagagttaatatcattacctgatttacacaatatgctgtggattttgtcaatcatgatcttggacttgtacaggggggtcataaagataaaatccaataggttgccaggtacagattaaatcatcatggattttgtcaatttgaagaaggcatatcaaaccaaagagcaacataacattttgccaaagcgttattatattctatcctttcaacttgacccacaccgctaatataaaaggccagaattaatttcagctagaaataattagcatttataccaaagatttcagaaaatattgaaagccacaatatgtcaaaacagaaatttactcaaaagatcatattacacaaactttagtagggttgttaatggcaccattttatcatgttgcacaaaatttagtagtgttgttacagtatatttctcgatggatgaaactaaaagataactgataggaaacggcaagttccagattatttgatctaaatatttttccaataatatctccatatccaaatccctactcataccttctagttttatccctaaatccaaacaccctaatccaagtgatgcagtcgggatttgcttagtaccgcggaggcttttatatctgtagttttactttatcattcctgggcaatctatttgtgtgcaggctttatttatgagacatgacaggaatattttataataaatgataacaattatcttgacaaactagactccacatgatagaacagaacattaaatggcccatatctcaaacaatcggctatgtcagcacaaaaacaatcggctactgttagcgatgaaaggtgcacaaaaacatgtagtgttgtttcactttctcagtatcacatgtagattaaaatagaagcttataaacaaacagactagcgaggccttgcaaaacatgtagaatctagagaaaaaatattttgagaatctaaaatagtggacacctgaataaagagactgaataagtgctctcgggtgatatgatgccacaggtccactcattttggcagctatatccgacaagttccatagatcattagaacagtgagcactgtgtttctgtagtaacattgtgttgctgtaattttctgataaactgaatctaccaaagatatcttcattaaaatgcttagtacaaggcaattcatgtatgtctgcagctggacaatcacatatctgggtactagattcattggctcttcttactaaccatgaactgaagagtgcaagatgattcttatgaacaagcacaccagttgcctttggcccccaaaggaagctagcaatgtcatgtggagaatgggatagtgcaatacagctccaaagatgcttctcttttgaattcacagtgtgtaatacattcttaaaggaagggtgcttatgagaatatatgtgcaactcattgagaaggtagactgcaagtaaaaatctcccatcgcctaaagatagccaatccaaaccaacaacagaaccttgaagcgttagtgcatcctccaggagaaaactcccatctcccatgagttttactgctttccagatatgaatggaggtggtattcttctgaacatttctaccaacagtagcaattctaccacaattggacagtgaaattgcagtaattggtcctcgatcggcaccaaacgtgcctactagttgccagatgtggctctctttctcagtatgcaaagggttatctgcaaaagacatcttccacagtttcacagtgccatcagaatacccagtagcaatgtgataacatgaagcagttcctgaaccatgctgctgtagagataatacagtattgttcagtggcgttgcagaaacacatgtaggatattctccatccaggcatgtagggaagactgaagaacctttacaaataactgctgaaaacatatcagcattaaggtaagttccatgtctcccttgatctgcagtagaaagagagctagcagaaaaaccacacaaacacatcccacatttgttttgattttctagatgtaggacaactttccatgataatgcttgaaaactcgtcctccatagacatacaactacaaagctgttgttgacaaaaggaccatcacaattagaagttaaaggtatggtatgaatgctgtcaggtgggccttctgcattactaccttcaaagaaaggaattgtgaacattttctgacatgaaagaacatccccttcgttctgaatactgactacaaaacaatcggctcctttttcacttccaaggacaagaaacctattttgttgaataacagaaggagcccaacacagacatgagtattccacatctgcctgaatgtcacacagatcaaatttgcacaaaagcttccataatggataagtaggtgcatgcaaagttgatatgagagttgataaggttgaaagagaccagaaatgtagagttctgctagaatccatggaaacagctagctctatttcacagctgtatggatggacagacacctgtttgatgctaccgttatgcccatgttgattgatagtttgggatgaatagcatgacaaacttttagcagaatcactcaaagcatgccccccagaattcaatgataaattggaggataagcgagaccaaataaatgaattatcatgcagcaaatgaagcaaagaacatgttgtaggtgggccagaagatagccctcttgatataacagcctcaacaaaaaacgagtcatctatggatttttgttgtcctgaagcagactgcgtccaactctgcagtttgacttgtttccatagagtaatccgtggataccttggtggagatacatcatcgatacaatggacagcccaaaagtttacagaagccccagggccagcacttaccaaccactcgcatttgcctacctggttgtgcccagggtcacctgaaaacaatgtgaaattgtcatcttcatctctcgatacaacactgccagtttcaattgcccatttcacagttatatcaactcccagcactccattcagagtgttgctcatctcaattaccgcaatgacactgaaggacctttgcaaaacccgatgcttctttgacttggctgcctcatcctcgctccacagccggagagtcccgtccaagcagcacgtcatgagtatctctcgcctcacttcagactgatcactgacaaacaacgacctaggtctccactggatcatggatactggtttagggtgcgcaagctcgactttctccacacccaccttggcatcattcacaatcaccagaacaggaggcacgccgccctcggaagaaggagtagccgccgctgtcgcgacgggaccctggaggaagtgtgtagcggaggcaagggactgagccacctgaggcgagcacctccacgcgagcttccaggaggattctgccctagcccacatggcaacgccctcgccggccaacagaatgccgtcgccggagcccgtccaggccacggcggcgacggcgaaggtctcggtgatagcccatctcagcacccagccaaacgatcctgcaaacccaagtccaatctccagaagctaagcaatgctagcaaaaacaacgagaggacgagaatcagaggcgagctaggacgaacggacctggggaagaggacggcgccggctggaacacggacacggagctcccggcggcggcggcgagctcgcccccgccacgtcggcaccaggagacggcggacacgggggcacggaggtcgatggcctggcggaagaacgggccatcgtcgtcgccgccgccgccgccgccgctgctgctgcttccctcgcggggaggggaggggaggtgggagacaacnaggaaggaggcggcgccgtaggcgacccaggggaggccgccgaggtcggggaggaaggagagggcgcgggggtcggcggcgggcgccggcgggatgagatgcggcgggtggagggcgagcggcaacggcggcagctcgtccggctcccccatcgcggcggccggcggcggggatcagatgcggcggttggatcctcaccgcggccgatcgtttgggcagccggcgacggcaccggtaggggacgcggttgtgtgggcctaggtatgggccttttcctggcccgttcgatgctttctcttcagattggatttacttgggccgttatccttgtccccactagaaaaacaagaaagggcccgttatagttttataccctttccagcttgtttggcaacttgaggggaggggattgggagtttatacgaggtaattgatggtgagattaagatgggaatttgatttttcatctcagtctcttatttggtagaggtggtagaaattaatagggagttaagttggagattagatcattaatgaaaacggatggctaagatttgtttaggcgaagtaaaggaggaattccctccaaattaccacacccctacccaggtattgaaaaggagagatttcattcctcaattccccatccccatcccaccaaaattcacatgtcttccaaccaaacaaaacagttaatagcctcatccctctaaactcccaattccttctaaaaactccccccaaccaaacgggccctccggccttccgagcgtttgtcaatgtaaccgatataggctatcatggatgtgccccgtgataggagaaatttcgttacgtccgctcagtttgcaatactactagccgtgcccccccgcgcgatgcgcgggcatcatccaagatctttaatcataaaagaaaaaaaaaagcatgattgaaaacaacatagcttgcaacagtgctatacaacaacaactcgatcagaaaaagaatatcacgatagaatatcacgatgttctgaattttgattgatgtaatcgtaccataatttttttataatcaatgttacactaacaatgggtatctcggtgcatagtacaattacaacaacgtgagtaaaataaacaacatttgtatttcaatacctagctgtacccaggaagaccaatggggcgatgattaattagaaggatagtcaatcaaaactgtgtcagcacatcacaggtagtaattgcaacttatattgtacatattttacaatctatactaagacggccatgaaaaaaaaacaaatagaaatcaaggtttacttctccatgatccagaacctatgaatttgtagccagttctgcagatatgagagttcaatattcttgccagcttgtcaataattagcatcaatctactttagccaccaataaaagaaaaagggaagtagatccaccttttaaccttgatgaagagcatcaatatgttcttagtacatgatatataaaataatgaacaccatgcatatcccacgtaactgttaaaaatatattttcaacggaatgaaacagtttctaattttgtaaatcatgttgagtaatatgtagcatcagtatatatataatagcttgaaattacctggctggtggtcgtagaagaatcaatgaaaacgtgtatcaaaccataaatccatgatttacaaaatatggaacaaaccattaaaatgctatcacaatatttggttatcctgttagttaaggttcaatgcttgcctcttattgtgctctttgcaatcccagagaacgaaaatggctagtgagaaactgccaaatatatatatatacatagataactgaataacagtttatgcatactacttggtgcaataaaaaatagagtagggaatgatgtttaccagtacaattaaatgatgatcatgtatacggagataaagattagacaacaaataagaattcccaaggaactactaaaataactgaaataataccaggaaataacaggtagaggaacaccaaagagcaattgccatgcagctggaacctacaagccttgaacctgaagtatgaataaaaggagaagaattagcaaatgaagcctcccatgtgaagcaagagcatttttgtgagaaaaataaatgaaatgaaatatgcagtgtgttgttgtgtacgctagaaatgttgatatagcatgatgggcatatgaatctaggtatttaagaaaaaggaaaatcacactgcacatatttgctctagtaataaactgagctgctcatagaggcacggggccatatgtaccaaaacaaagttgcttatgtgaggcaaggacgtagaatatgcatgtaattaagcgtatggcaagattatatgaaaaatagtttgtaggcgatacaatacagcaggaagaaagtgaatttgacaaaccttagtggagataggactgaacatgtaaacacaaacagaatgggacctgtggaaaacatatatgaatatattgtctgcagcttatagctagcacactaacctgaagctggagagtccggcaaaggctcctttcgtttatgctgtgatgtagttgtcgatggcccagaagagcatgacatcgtgtgaaagctcaatgaagagtgacaaggccttgctgaaacaataataatccaatgcaatatagctttagtacacatatacacaggatacaatatatctaaaggaaagtatatacatatgcaatatttggctagaagcactaacagattgataaattaagcggcagtaaatatactctcatagccgacgaaatagagcataagacaataagacaatgataaaattgattgaatatttacgaataggctggccatggtagggagctattttagcagcaaaacatgaaagaagcaagtatggtgccaataccttgatgtccccccaatgtacagcagctgtaacctctgccattgctggcttttaagacctctggtctagcatgcagtaacccataatgcaaatagctgtaaagaaatgtatatataagtggtccaatggctaaaaattttaaataggtaatgtgattcattttctacagctaacaaccaaaaaaaaagtaatagagtataaactgatcgttctatgtgagattaagagtttgctgtagaacacttcatagacattcgcgtgatatagagtatgccttgggaatggagagcacaaattataggccgaccatgaacaaaggaacatgtattagatctcagatatgaactgagtgctacctgcaagcaaagctcctgaatgagactcacaaagcaacgccaggttcaagttgtttggggacacacattatgcaacattttcaataactccgggggtgaattgatgtcgcttttcgatatttctgcactgaaatcaggcaagacctgcaacaatgctttgccttcattgcttgcaaccaaagaagtggcaatagtcgaaatgatttttgaatcaagagctatattctttgttatcatttcacgaattaacttgagaacttgggtaaggggacagagaggcagatcgggatagtggtggtggcgccgtgcttcgtagcccccacagtcaccgagcttcggcagcgacgggccaaaggaatgaatccgcaaatgtcggtgccgncggcnacggtcgggcgtcgcgtaggtatacggcgtggcgacgacggccgggctccgcgtgagtaaaacggcgcggcgactacggccgggacccgcgggacgaagacggcaccgtccgggcgccacggcgccgtccgggccccgcggcgccgaccgggtgccgcgggacgaagacggcgccggccgggcgtcgcgggaggaagacggcgctgcggcgtggcggtaggaagacagctcgtcggcggcggcgagaaaaggaggatttggggatttttggcagggagccagcgaggatgtctaggcggtggctggtgtggtgattgcgtggactaaatatagcaagtacgcagggtatggagggatggagcgatgaccgtgtggacggctggatggaatcaccagctggacatctgacggcacatgcatggcgagggactgtagtactgtagcagcatttctctggcctgagatgaatcgcaacactgttggtagtgggtcacgaaaactaaagatttgatatgattagaactcagtttgcaatactattagaatttgccgtctaattcattcatcttttgatatttaccacttaaatcatactcccttcgtttcacattataatatgttttgactttaattaaagtcaaactgtttcaaatttgaccaagtttatagaaaaaaatattaatatttttgaaaaaagataaatttattataaaaatatttaattattaatttaataaaactaattggtaatgtaaatattactatatttatctataaacttagtcaaatttgaagcaagtttgactttgaccaaagtcaaaacatcttataacctgaaacggagggagtattttttttaatttgccaccgggataccaaattttatccatgccacttcgttcataacaccatcaattcggtgagagataaaccatgccaaagacaccttggatcggagcaatgcatattagcaaagacgaccattgagacaagacttcctgcagcagtaatggtgaggacctcctaagctagaggaggcacgatatcaaatgtcaataatagcgaaggactcgagctcatgcctgttttcatggtggcaaggtggtagggatatctaccaatgctagagttgctactcaaagcaactcgtctctgcaccttcattgtgaattgaccgaaagccatcccgccatctactccgtcacaacaatgctaactttaatgtagtcctttcgtcttaccaaactgcatcgagcccctttattgctgaatcgacgagagctagttcgctatttgcttcgttacgccagcattgacttaccacaattccatcgtctcagatcaagcctctcagcatcttgacgccatcatagtccctcaccttagaccgaaaccctttgcatcctagctctagtgaagatcaagccaactgcccgagcacaatgataggagcacgagtgaaggttgaatcagttacttggcgtattggtgacgaagggggtggtgcttattgccaacctactctcaccacttcgaacgaatgttgatgtcaaggttctttagtgcgtgggtacgcaatatattacatactacaataaagtactctcaattggtcctgtcattttttttatttagtcttatctaaatgtttaggttcaattgacaaccaaatcgacttttgcaatcttctgccacatgaaatgccatgccacctgataggctgccactatctatctattatattattaaaacagctttgaaaagaagcaccacgttcgctctgggggctagaaattcccacattaatcggagaaaaagaaaaaaaaagaaaaggagagtccaagtaaaaatacaatctaaaaatagctgaaatttggaattaaataagcaatattgaaagaaggttctatataagaacccaatacgagattaatcaaaatttgaaataaaaataaaataaaatccaaaattagaaaaaaaaggagaatccaagtagaaatacaatctaaaaatagctgaaatttgaaattaaaaataaaaaatattaaaaaaaggttccatataagaacccaatacgagattaattaaaattgggaataaaaataaaaataaaatctgaaattagaaaaaaataaaagagagttcaagtaggaatacaatttaaaattagctgaaattcggaattaaaaataagcaatattgaaagaagaatccatataaaaacccaatacaagattaattaaaattcagaagaaaaaaataaaataatatccaaaattagaaaaattaaaagagagttcaagtaggaatacaattttgaaacaactgaaattaaaaataaaaaaattaaaagaacacaatacgatattaattaaaatttgaaaaaaaataaattctgaaattaagaaaataaaaataagatttcaattaggaatacaatttataaatatctaaaatttgggataaaaataaagactattgaaagaaaagactatctaaaacacatgacgagataaattaagtaacatgcctataaaagagtagagtggtggcggttgatatgtcatataaaaattgttaataaaacaccaaatagatcctaatgacgattaaaaagaggagggacgactggcaggccgtgaagcaaacgagcaaggcggttgccaggatttctaaaaagtaaaaaaaacccattgattatcatattcgatttttaaaatatcaatgcctataaaaaggagaagcagcgagcggagtgtataagagtatagttgcagagccgccaacggttgaggagacttttagaaaataaaaaataaattccaacgatagttatattcgatttctagaatcacaatgacaataaagagtaggcggcggacgggccgtagaggagcatagtggcatcgttttacgggacttctaaaaattataaaaaatgaaacccaacaagacaataaactctataaactataaggtccattttttaaaggttcggaacttctaaaaagtaaaaaaaaacaatgataatcatgttcgattttaaaatctcaatgacaataaagaaggaaggcagcgggcgagccgtaaagcagtacaatgtcaaagccactgacggtttggcgggacttctaaaaagtaaaaatgaacccaaatgataattatgttcgattttttaaatgtcaatgataataaagagacagtggacaggccgtagatagtggacaggccatagaggagtataatggcaacgttttatgggacatctagaaattataaaaacgaaacccaacgtgacaataaactctacaaactataagatcaaaattttaaagattccaaggagaatgaatagaaatagtgatagatcgtgcaagcaaataaaggaggagatgacaaaaggggtagcaactggtgtgacttttagaaactatataattagaaacacggggatgataaggtttggtctttcaaaattttaagacaatgagatagctatttaataaatttaaagtaaaatcatactaaaagatatataattttgtttgggtgctagccgcgcaattgcgcgggccacccaactagttttcctaatgaaaaccaacatagcaaaagattttacagcaaatataaatgtatatctaatcatactatcatctttttataagagtgacaatttgccactgtagttattggccgatgctaaagatgtactccctctagtgataaatatttgatgcaattgattatagataagaccaatcatttttttattcaaagaaaactatgtaagtactatttatttggttgacttgtattttcctaagaatgacttatatttctatatatttatattaaatttttaaataaaaatgaatgatcaacatcacatcaagaatcagttgaatcaaaagatcggaggaagtgaaggcaagtgcacttacgatcattccatggaattttagaggtcatacagaaatgtacttgtctttgaaaattattttgaggcagaaggatatggtaagagggactggaaggatatggtcggataaataagttctacatatatggaactagtcaaaatatattgttttgatatcataagtagttttgacttttttttaagtcaaacttcttcagatttgatcaattttatagaaaaagttagtaatatataaaacaccaaatttattttattaaatacaacattgaatatattttgataatatgaatgttttgttttggaaacattgctacatttttttcataaagttaaaaaaattgagtagtaaaaaggtcaaaaccttaaatgaagcattttgtctattggcgttgtagtaaggaacgaatatgaccctaattgttcttctcgaatcgctatagtaggatggatcaaacaggtgttacccggtcgtcaaagaaaattcaagataatagaagagttcgttctaccgcataagattcttgaatccattacaaccactatcttttgtcttttttttctcttctctatcaaaaagaagattaaaacagagagagtaacattttagaaattacttttggtgcattatctgtactacatgtgcttgtatgtactacaggcagtactggtactcactactactcagcacaacaccctagcactcgcaaacagtctcacaaaacgacggagacgagtggaggaggcaagcaaagcccgagagagggtagcgactagcgactaccgagtgactagcagcacacgacagtgacgtggcgtcgtaggaggagaggctcagcctcagccctcaagctcggttcgcggcgccgctcgcctcttatccctctccgaactgaaattaaaaaagaaaaaggaaaaaaaatcaaaattcccgagaagaagaagggaaaaaaacacacacacatacagagagaaaatatcatggcgctgctgagcccgcgtgtgccgcggctgccgctcgcctccgcctccgccgctggagcggggctccggtgctgcgtcagcggcggcagggccgggtcggcggcgtggtgccacgcgtcggcggccggcagcgtggcgtcgtcgtcgtcggagctggaggccatccggtgggggaccgccaagctgcagggcgcgcgcgacgagatggaggacgaggtcgtcctccgccccggctccctcctcgacggcttctccttcgccgccgtcttcgacggccacgccggattctccgccgtcgagttcctcaggcacccccctccctgattctcctcctgctcttcgtcatggccgctttccgcgctaacctctctccttggcgctgacatgcagggacgagctgtacaaggaatgcgcggcggcgttggacggcggcgcggtgctgagcaccaagaacctcgacgccatcaccgactcgatccagcgcgccttcgccaccgtcgacgccaacctctccacctggtcaggcccagttaggattccgctgaacaattccgattgccttctgcttagattagctactaaggccctgtttagaactccggcaaaatttttcaccctgttacattgaatatttggacacatgcatggactattaaatataaacgaaaaaataactaattacatagatggcgggtaaattgtgagacgaatcttttaagtctaattgctccatgatctgacaatatggtgctacagtaaacatttgataatgacggattaattaggcttaataaatttgtctcgcagtttacatatagattatgtaatttgttttgttattagtctacatttaatacttcaaatgtatgtccatatatccgatgtgacacgtcaaaactttacaccctggatctaaacacagcctaattcctcgcatgtttaacgctgtgtgacgtgacgcctgcttcttcttcacaggctcgagcagatggacaaggaagatgagtccggcgccacggccacggccatgttcctcaggaacgatgtccttgttgtctcgcacattggcgactcctgcttggtactaacaattccctacacataataacatgcgtatatattaatcaattatcaatttatcatatatcccgttgtcattggctagtgcatcgtgattgtgatgctgaagtgaattgtgagttttattctgctgatgatgagggtgggtcttgaatgttgattagcaggtcgtatcacgcggtgggaggcctcaagctgtgaccaacttccaccgaccgtacgggaacaagaaagcgtctcttgaagaggtgaagcggatcagagcagcaggtggatgggtgtgttttctcttccagagttccactctaatcttctaaactaccgttcttctagttttgtaaagatcatgttcacataatttagtatagagcgcttacgaaaacctgtcctcagctcagcaagtccttaacacccatgagaaaataacaatatgttgcctttccccataaagattgcagttcatttttcaaatatggccatatggaacaataatcaacaggattgacccggtgaaattctagcacattgtttgctcttctagtttgtaattcacattctaagttagtggttactagtcatactactgctgtgggcctgtggttgcatattgtccatttagacccattattatggttttacagagaataaatgggtttggtgctgtatggagtaatataatatgctgatggatattttgttcactgcttgaaatgccgatctcactcatgtgactcttctttgttacgatatcgatgtactttttgtagattgttgatggacgcatatgtggagaaatttctgtgtctcgtgcttttggagacattagatttaagacacggaagaatgagttcgtcccttatactctctgttctctgttcatacattaagcataccttttgttacattatttcgaaacaataccctgctaatttttaacttctcatggttttgtacaggatgttggtaaaaggagttaaagaagggagatggactgaaaagtttatctcacggttaagctctaatgcttttgttcttatgatttttttatgacttgttgtcaagtatttgtttttcttttgtattgatatgttccgttacatctgaattcagaaacataccaatgcagctattcttaattctgatcaaacagcgaggccatttgttcagttacatcttctcttttcattctcatggtgaaaataaaacacaatagcagggctaaatatcatctgaattcttagccacaacttaccctctactagtatgtaataacctgatttctttttcttatatgttgacaattatcaattgagttccttatcaactgttgccaagataatttgagagctaattactgaccatacattctcaattatatatctgcttactctcaagaacaaacattcttcagtattccaacttttacaccttttattggcgaatgctgctgctgcatgtcatgagatgtcttaactacacaatatgtctcttcttctgtgattatgtatgtaatcaatatctttcttgcagaataaattttaaaggagatttaatagtctcttcacctgacgtatccctggtcgaacttggaccagatgtggaatttgttttgctagcaacagatggtctttgggattacattaaaaggtatgtacacaaatctttttattgtgtagttgtcctgcttatattcgttcttgtctgcctcctgaagacatcttagttggctattcaacactttgacatgtataatttggctatcttatatagctctgaagcagtagcattagttagggatcaactacggcaacatggggatgtccaggtatgaagtttatttcctctcaaatcaagaactcattatgtttctttttgcaacttatttttaatattgcttatttttcatttgtttgtgtaggttgcctgtgaggcacttggtcagatagctctggtattgactcttgccaccttttactttgccacttatctattctcttatttataaagttaattatcaaatatgatttggtggaccctgcatatcgaaaatgctttcttaaatttcttgctttatttccaattgcaggatcgtcggtcgcaagacaacattagtatagtcatagctgacttggggtaatgattcttaacctttacattggatgtttgtttagaacgaattcaagcattttgtgcatgaacgatgttgtccttgttctagagttcttcccattccgatttcaaacgcattatgagatgatgcccatttcgcacaatttgctccttttccgtcactataatcaggctatagtggatctctttggtcttggtcagcatctcttaaccacattcactgtatcttatttcttggcaggaggacaaactggaaggagctgcctgctcaaaggccaaatttattcttggagttaactcaagcagttgcaacagttggggccgtctcattagggatttatatttcatcgctccttgcgttgcagtaggcctaggtagttctttcaagtgtgtatagtacttacagttttacggtctgcaacttctagctgcaaataatgtacattcttatagggtaaatgcataggatatccgttgaatatgtacttcagctcctgctggccaagatattaatggggctcttttttttttttctggaagatcctttgattcatctcagtaactcaccacatcgaagtagtattaaagagttactccctccgtcgatttacataagtcattttttttatttcagaaaacaaactttgtatatttgatcaacacgggaaccttgcaactggggaagctggtgaagaatgtgcgggcccccaagctcagaagacattcggctagagaactcgaagggaaaacatattcgggcaaagaagaagtcgaatgaaaaattttgtggggactacttattaaccattcttgccagctaaagccaaaagactataatgactctgaaaatataccataatgctcctagggttgatgacatagcaagagcattataggaagttcactaaagcctgtgagggtagaaatgtaatatcatatgtaagactgtaggctataaaagctggtcaaattcccgtcgcaggacaagacatttttaatacaaaagtaatcctcagaagttgtgtttgctgtttgagctcatttctaaggataggcgggaaaacttctttccagcttatccccgatctggttcgtgacctaaggtcacgacagtggcgctgtctgtggggacataaagtctccgttggattgggctcaaacagtaaatgcgacgctcgcaacgacagaaaattgtgccggtacactacatgggagcttttgcaagcgcaacagccccacttgagagagagtgggaaaaaatagtggaggaaagtgatttggtaaaagcaacggaagcacttgacaagcggtgggcagaaatggccaaaacatccacaccagcgaaaggtaatggaacaagtcaagaagaaagaattgctagcacagtggtggaagaaacagggaaaacacccctaaatgaagtagaactcgctgaattggtccaagcacaaaggggccgtcatgatgagtaaaggacaatatgaggagttgcaaaaattgcaagctctacacagctaggcagtaggagcaggaggatcaagtgatcaaggtgcaacaccaagggttggtgagaagcaatcagatcagacaaaggaagatgctcagaagggaaacaaagaaggagaaagtatcaaagccacctaggctcaagacccaccgtggactcaagcctccagtcaaattcaaaacccaccttaaatccaaattcccattcttactcaaaatccaactcaaatcccaactcctagtcaaaaccaaaatacaactcaaactcaaaatcctaacccaacacataattagattcaagctcaatttctagctcaagtccaaactcctgtccaaaatcaaattcctactcaaacacaattttctcttcaaaaccaacttcccattcaaacacacattcccattcagccacatatcccagttcaaacccaaatccctacccacatacaatatcctcaaacacaattccatgaaattcgtattcctccaaaccaaacctatcaaatcctttccaatccagatcccccaacctcatgtacagaa

SEQ ID NO: 29875 - DNA, 10531 bp, Oryza sativa
gaaatgatgctcgaacaagggtacatcccacaaatggccaacatatacaatatgcaggtcaaataccaaaccaaaccttccaattctagcccacactaccttactttcaaccaaccagagccatagatacaaaaaaaaccctttaagccaaaacctacaaatggcaccttgcccaacaaacttcaagttatcaaacatcacaaaatatagaggagatatagaccccaatgagtatttaagggtgtatgaaacaatagttgaagaaacaggaggagatgatacagtaaaagctaaaatacttccgaccatgttggaaggagttgcattgtcatggtatacaaccattcctcctatgacaatctactcatgggaacacatgatggacacttttcgagcagggtttgttggagcttatgaagaaccaaaagagacagatgatttatatgcaatgaagcaacttccaggcgagactttgaggagtttcattgtaaagttttccagagttaggtgtcaaattagacaagtggatgacgaaatgctcatagcagctgcaaaaagagctttgttgcctggtccacttcgttttgaccttgcaaggaacataccaaagacagcgaaagacctgtttgagagaatggaaagttttacaaaaggtgaagaagacaaattgagagtgcaagaagaagaagtagctttgttaggtaaaaaaacagtcaaagaacaagcaagtttcccaaggggaagaacaaaaagtggaaaacacaaacaaaccatgaaaaaagttcaaacatgattacaagcaagaacagaagaagcaaattaactatattggtgatggatcaaacaatggtgaaggattctttcggcaagatggaaaaggtaaaaaccagtggaataacccaaaaggaggaaaaagctattgggggcaatctggtagaggtcgaggccaatggtggaattctagccgtggaagaggaagatggtggaataattgaagaggtagaggacaagaaagtcaaaaagatcaaagcaaattctttcaaacatatggcccaagtggtcattccacggaggaatgttatagcaaattttgtcaaattcatggaccaggaggtcattcaatagaagaatgctggcacatggcccatttggtggaaaaacacatcaatcaatatgagaacaagtataaaggggctcgagagcaacgagcgcaaaatgctatagaagcaccgcaagttttaaagatagaagcaattgatgaggtaccgaaaagggtaatcaatgccataacagaaggatcttcattgggtattgagtcaaagagacaaagaaaggcatatgtcagacagataaaccatgtaggaacaagtaaccagtcaaacccaccaacttactcaaagacagtaatttcctttggtccagaagatgctgagggaatcttgtttccccatcaagatcctttggtagtttcggtagaaatcacccaatgtgaagtacaaagggtgttgattgatgggggaagctcggcggatgtgcttttttttacagtaaatctaattggagaggcctctccaattagtcttaaccagagacacccatgtgctagtactttaggagttttggttgctattaatccattgagcaagtaggggaaatattcctatcatctatgcttcaaataaaattttctcttaaattactcatccgatttacaatccgattacaccgttgtgttcgtaataattaaatctttacaacaagatctcacatgattatattttgatgaaaaatcataaattacttttatgatatgtctaaattacttttagatttcattaagttacttcttagacatataaaagtaaattcaataaagcctaaaagtaatttacatatattatagaagtaacttgtaacaaaaagaaagtaactttaattaatgccttttttcattgaacaaattatcatattatcactaagtaaatttgtttggtgctccatggtgcccgggctccatgatcatccaccgtctagctgctttaggattcgtgcaaaccaaaaaatgggtattaatcaaattagcgggtttaacccgttaagaaatattagcatctgaaccattccatatttcatttgcttgcatgcgttttctaaacgtagtattgaacgtgattataattacgttgagaagactaggaatatgcccgtgctaaacgctacggtgcaattcaatttgtcacacaaggcacacgttgaccgcagcccattgagaacatagcataagggcgtgaatataaatccaaataacagtttgatatgatataaatatcaaagtaatagtttcatgatgtatataacaattgttggtcatcgcgttaacgtcttcttcaatatctacatggagcgactactaaaatttaccaatggcaaagtacatatttagacacaagtgttaacatatagtatgaaacagagcagaccatgagattgatgtggcagaactatatgctcaagtggaacttaagtgtgcatgttgtgctgctgaatataaatttgtcgagagcctagtgaaaaaaaaaatcatagtatttatgtaagatgacaatgttatccatgcccattaagacatcaacaagcaacatatatttttacagagcactaaataattttatttacacactgtcaatcatgccatgtaaaagccaacaagatggtaagatcacccaaatccacatcacatacttcctaacatcaaacacacatcgcatacaattttttccatgatgtttatgtagtcatcaggaatgaggccaatccaatttggagaaagttctgtgcgactgatctagttgcagtacctatatcaattttgttcaccaatgtaactggaaagaaattggtacagctagtgatccctcaaatagcttcacttgtgtctgatatgagccgacagtacgagtaaggatataaaacagttattagtaaaacgtgatggctgaatataaaaacaaggcaatataaataataaatttcagtatacgctccagggcatataaataataaacttaagtttgcactccacgcatataaatgactcaaagtttaacagtatactgaaagttatatcagatttgagtaagagctgctagcacggttgctatcctagctaaatgtacaaagaacaatactccatgcatgtgtttagcttactatcgcatagctgttttgagaaagtcagcaatttgcctcaacattgaaactgtcacagttaatagttaatagttcacatgggaaataaatctattttcacattaaataaattaaaaacctctcacattcggtgattaaggggaatcactaagtgcatttatcaggaacatccattgaaaaggactatttgcaggaagctgtaacctactaatttatgacatgtacaagacacaatgcagattggaccccttaagttgtacaccttgcaataataacccaatatagtaaaggaatcaaagtgggaaggggcattattttcagcataggttgcaacaacacattgaccataagagattaatgtgaagcatgtaaattcagccggcattaaaatattttgcttctccatgttaagtatggtggtttggtgagaattgcagttgataattttctgagcgagtaacccagtcattcatcttggaacaacccaggttccaccatatggatacaaacttcattcaattggttatgtaacataaaatttactgaagcaatcgatctgataatacattctgaattcagtcagaagatacgaacaggagtacatgagtaggtaataataggaatagagacattacctgatttgagtaattccttctgcatgaagggtgccatgaagaaattaaacacctaatctgcagctctgaacagaaaagatttttaattaaattaaacgtggggttctgcaatttcttaccggtggtggagaccagacgacgggggaggtggcggtgcagaggttgctcgccggggttgccggcgcagagtggagcccaattttctaataagattcaagacagacaatcaaatcactcaagtacttgaattgagttctatgctggcatttaagtgctcagagcaccaatgctatggagctcctaaataaaaaacacaacagtttttcatgtgaaaaggcatataaatatgctagaacagtattaccatttatactaattatgctagtccaaaacaaatcagtacagggtcattatatgcaaagatcaaagcacccgtccagtcagtagagggttagtatatatatgtaaagtctacatagaagaatagaaaagtattaataaggattcagtggctgcaaatattttgaattcttgaatcatatagacaaatatgggtaacgagacactcttacttgagtctaataattgtgcctaatattttctcagatgattatcagtttgcagatccaacttgttgaaaaggcttagcagctttgacaaaggttcatgtagaccagttactgggaaagggtcttcagtcttatgcacaattaccgagtaaatcgacaaagttatgagaaacgtgaaaaaaataaacttcatatgagctgtattttatagctcaacagtattactagtacttctgtgcaatattgactggataatggctgcaatttaaggtcaaattttacatcaattaagcatttcacccagatcaagaccagtcctataaatctcaaataacaacaagaaacaaccaaatgctggaaaaaatggaaaaatatttgacccataaatctgaaacaatgttggccaagttttagatggctatcggtatttcgaatacaaagtccagctatgttggctttacagggaacaagtccgaacgtaaattatacagttaacccacaataataaacatacaagtgtattactatggtttccccaaaaagtgccctgtaaaatgccatggaacatatagtattcattatttgggaaagcgaaaataaacagatagttgatatgtataactgatagcatatgttcatataagcaccgatagcaccttgtacatattaaaatagcagaaacaataggtcaaactgtctttaccttcaccgcatgggaccaacgaaaatggatttccagattgaaactacaaagcggtctttttgtttgaagctatgggaccaaaagcccagtatcctcgatgcaactgtctgatgaactgacaataatcagataatgcagttacatatgaaactacaaattaagagctcacctcgtcgatcggcactgtctatcagtctatgacacaagtactgctccagttatctccttcctagctatcctgcacctcggtagcgaactgcaggcctatctgcatgatcatgaccgttgaaatgcagtgatgctattagtataacttgatactcatgaccgttgaaatgcagtgatgctattagtataacttgatactcatgaccgttgaaatgcagtgatgctattagtataacttgatactgagattttggagtcctttcatcaaccgattaacaattgcaatatgcaagtagaaaatcatgcttatttacctttagaacaacggtcatgagccactgaattaaattttctgaatctctcttccaatcttccaaatttttttctattttgtcttctctctgtttttaactttttatttctcttttcatccctcaattttttttatgctccttcccctcccttaaggctggagcttgtgactcccatcctctcgcacacgctgcgtcgtcgtcttccagccacaccatacaagctgccgcatcagagctctagctagccacaaacacatcgtcgagacgttagctagctagctaggtggtcggcaggagcaacttgctgaggagtctatcgtcgtcgccgtggcggcgcggcgaggagcagctcggtgcggaaggcgtcgacagcgacctggcagcagggatcggtggcggcgaggagcaactcggcgtggaatgcatcggcggagacctggcgacagaagggctttcggcggggggtcggtggagggcgagccggcagcggggatcggtggcggtgaggaacagatcggcgcggagggcaccggcggcgacgtgattcctgcccgaggaccgattccatgacgacggagtgggcggcgatgtaaactgcggggagccggcacctgcggggcagatcggcgaggctgccgtgatgggagcgctgatggcggagcagatttcggcgtcagcgcgtgcgggagcgggattggggatgcggcgcaggtgcgagtgggagagcgagagagtgcgggcaatgggatgtgggatcgatctcagccgtccggatttcacgagttaatctggaccgttctacgaggaatgaaagaaagagtgacgagcgaaaccatttgttgagctataggtagaatcaaggccattaattacgttgaattgatttctttgcatgtatatgaatttagacgtttcattttttctgtgtatatatatagatatactccgtatatatcccgttggattccaaattttagaatttattaaattatatgccggtataacgtcctgccgttgctccgcgctgctgcaagcttcgtcacaatgtcatttcgccgcctgtcatccgtgaggttaattagtcactgccgcattgttgccagtcatactctgcgaggttcttcgccgtcggcagtcatcggcaagctttgacgccacgacgtcgtcatcgatcgcccatgagatacgttgttgtctctgtcggtcatccacgaggttcgtcgttgccatagccggtcgctggcatggttcgtgggtaatttgtttcaatctttttatatcctgacatgtatcagttctcccttttttttcaggtttagtgtaaacaatttcccttggtaatcaagacctcaagatgggagcggatcctcctaataagttgctcgttcatcctcctagcgatcaaattcaagatcacacaatcacggcaaaattgctcatccaaatgctgagagcatgtctactgcacatatcaaccaaatgaagggtatatgccagaaatgaagtcatatcggagaactaagcatcacttgtggagtttgatatttacaagttacaaaatacagtgtaaaaattagtggcatctatcttgaaacaatgtttactgtactttagttaccacccctttctgtatttccgtatccaatccaaaaaatatatatgcacggctgcattaccgacaggatagctagaaattagttagaaatataagggcatgtataatggttgttaatagtggtcttttagcattgctaattaggaatatttgttgacatggaggaaagagaaagaggagagacaaaacatcgttgttatgcatgacaacggcttaacaacgactcttagtcactataatatgaaaatatggttgcatgaggatataaatatggaaagaatattaacaaaaggaatattttttgagttaatgattagagcatttgtcgtcttaactattgtaaagatatggtttctaaataatcttgtattgtttaagagaccatacccgtctctaccattgaacatgccctaatgttgattattcaatgtgtcattcgatcgttttctctaaatctctaccataattattgattaagtcaaaagggaaaagcatatacccaaccacacataggatgtacataacccggatcgaactcttatctaattggttttgctaatatgcacttgtatcgggattcgaaattagggtgccaatcacttagaaatatttagaaaaattcaaccaaaattagaaactctcatctcaaattttaaaacatttaactcacattttgaaaacaactaaacaattcatctaataatttgtagaaaactgttgagtaaactcggaaagaaaggctaagtggccccaagtgtgtgtcgtgggcccttttccaaaaacaatttccatgcatgggtacatatacgcaatacttttttttaaaaatgggtatataccaaatatacatgttttttttcagggaaaaataaatatacatgtttaaatgggtacatactacattccatgcatagctattacattccattattaagtataaacattttttgtatttggaaagtcctacggactaatttagttacgtgtacatagtcataccatatacttagattccatatacatcgatcgatttccttatacttagattccatatatatcgatttccttatacttagatttcgtatacttagattccttatacttagatttccatatactttgatttccgtatacttagatttccatatatatacttcgatttccatatacttagatttccatatacttcgatttccgtatacttagattacaactgcaccgtatacgtatacttggatttccatatacttttgtcccaaaatttcggagtatattaccatatacacgattgtatcattaccaaataaaccgcaactccatgatttccgttgacaaatatatggaaaccaattgccaaccgaacaacattcatgccaacttattaaatatgcagaattgatgtttccaaatgtgtgcatgcatgcaggtgttttcactttccaaaccgtatgtacttagcgggtgcaccatatagaaaaactattttacaccctgggtatagaatagctattatacaccctcctccctccaacccacctcatctacttctaagggcccaaaacccacctcccacctcagtcaaaggctagttaaaggtccccacgtcggtcaaatctcggtcaaacccgccaatgacttcccccaccaccccctctcttcttagctctcgtatcggaatgacgtagtaacgtcttgttcattgtgcagtaacaccgtgttttacttgcagtaacaaaattaaaattcagtcataatatagtcatgatggatctacttttgataagcactttttttcgaacatcatggtacaaacagtttttaaaagtagtacatgatatgagagatattacccttcaaagatttgttcttaaaaatttaactctccacaagcagtaatagtatatcaaaaggtgttactagtgcatgttttgcgttactgcaatcacatcatgtcgttactacaagatgtgtaatgattataagtttcatattaacatagtgtgttactgcaattacttggtaacattactacaagaatatggggaattggctcggtttactcgtttgttttaacccatatatttttttattcctggtttactacaatttcatcacgatgttactgccaaattaagatgcagtaacgctctatatgtactacagtaataaagttttttttactacagttcttggatagtgttactgcataaacatacggtaatgtgtaactatcaggtagtaacgtgtatctgccgtgcagtaacacttttacttttgtgcagtaacaagtatatggttagcatctaagactttgaacccatatatttttgttccaattccaggtttactacaattcaccacaatattactgtcaaaagtgcagtaacatcatatacatgcacgcagtaacactatattggagggagagaccagttttcttgagaagagggaggaagaacgatttcttgaggaggggagtatgtagatgcattttgaagtttaaccctccacatgcagttgcactatagcattatgatggaaacggttttaaaaaataatgcatatcttgtgagatattgcttttcaaatattggcattttgaactttaaccctccacatgcagtaacagaatgtgtaatatgcattaacaggggcatatacatgcagtaacatggtttgaccaaatgtataaaattgttcaaaacactcctacatcaatcagacctcgctcaaagccaactacagactttacctatggcccacctattcaatcttcatcttgtaaaaatgacatagtaaaactacaattatcatgcagtaacatagctacttggaagtggtaacatgcacctattatgcagtaacacttctacttttgtgcagtaacaagtatatggttagcatgtgaggctttaacccatatatttttgtttcgattcctggtctactacaattttaccacgacgttattgcagtaacgtcctatgtgttctacagtaacgtgttaatgtacttttatgataattttactattggagcatagtaacatgttatgagtttcgtagtaacatatctttattttttgttttacggtggtagtgaaagatattagaattgataatcatattactttctcacaaaattcttgaaacaaataatatcattaggtgaattggttagaagaatgtgctttgaactatgaggttatgggttcaagttttgaatttggcaaatttattttttattttcctagaaaagagaaaaaaatgttttgggaagaaaaaaccagaaaaaaaagggaatcgggaggagggggg

SEQ ID NO: 29876 - DNA, 26944 bp, Oryza sativa
gggggacgggatgggcggtacagatgagaaaggggagggggtatagtatagaataactattctataccccgtgtgtagaatagtctcaccctatatatatatatatattgtgctggttaatttaatttctagatagagtcatgtttttatctctacaacagatttacttcaaatgacacgctaaagttaccttcgttttgttctaagttacttctataatatatgtaaattacttttaggttttactgaatttacttttatatatctaagaagtaacttagtgaaatctaaaagtaatttagatatatcataaaagtaatttgtgacttttcatcaaaatataatcatgtgagatcttgttgtaaagattttaattgttacgaacacaacggtgtaatcagaccatagatcggatgagtagtttaagagaaaattgtatttgaagtataggtggatggtgcctcttatagatggagtagtagctggttttgacaaaccaactaccactagctatatagttacgtccctttttttatgatgatttcaagaaaatgcaaataccggaagacaggttgactagtgcaggaatacctttacaaggttttggtggacaacaagtacatgcacttggcaagatagctttgcaagttgtttttggcaagggtgacaccgtaagaaaggaggaaatagtgtttgatgtggttgacatgctgtatcgatataatgcaattcttgggagatcagcgatgaacatatttgaagcaatcatccaccataattacatacgcatgaaacttccgggaccaaggggagtgataactatccgaggtgctcagctagcggcaagaaagtttgaacttcaaggaacaacaagcgtgaaaggggtacatgtagttgatcaaaaacatagtgaatacttgaaaatgcaaaagccagtcccagaagggaaaactaagaaagtactattggatgaaaacgacctgggaaaatatatcttgcttggagaaaacttggagagacaacatggatgtatttgcttggtcaccagatgatttgtgtcagggttatggataccacatacctaatagtagctgactaaatctcggcaagacccaccacataccatgtcctatacggaaacaaccttcggatatattaggagttccggataaggaaagacaaccagagttctacgtggaaacgacaaggactactcggattgtatccatattggtttccctagttctacttggacaaggggacacctatgggtataaatacaagcccccctaggaggacatggggacacccaccatggaggatcaacacccaacacaatcaacatagaagccacagcataaaagcctacatacgccaagacacgccgccggatatcgacttcagggataagcacggctagtcccctacggtgtctccggatactgtcaggagagacgaaagcgctatctctgatctcgcagggcacggatttgaggaggaaggctaccctgttgtcgactacgagtcagatcgtcagaccgccatgtcgacaacagttagataggctaccccaaatattgacctggtgtgattatcatgaataaaagcaataccggctttggccaacaggatgtagggttattacctgacatttcaggggcccgaacctgtataaaaatccctgtctccatctcttttacctcagtctcgcgtataccctagcaccgacgatccccatactgtccaaataccgtagtctagacatcaaacgtcgacagtggcgcgccaggtagggggattttggtgcttcaggatttcgacaagatgggtttaagagatggactctccgacaacgagctactcgacgaattcggctgtggggagatccaacatgtccaagtacatcttccgacgagatcggaaccatcgtcatcaataattcgttctctcgagatcgaccaaactttgaagacgtcaccgacgcggagaacggcgttttgatgttatccatcatgaagcctcggccagatctactacctcgagtggatattcaccgacgacggcatcgaatccaatatcagggtctttgttgactcgtgtcagactcggttatcctgggtagaagcagcaaatcgcaaccgaccaggacaacagacgagataacaggaagctatggccaaatttcctgcccactcgtgcgttgccacgtcgccaaccggccgacgtcctgacgtcaggaggtgtatcagatgtccctgtacagagcccaacacctatgcatacagtgcacatacatgtctacccggacatgcatgtacgtgtgtgcatatatattggtacgtacagtgctgttgcatatgctttgacacacgaggtcgtcacaacattaacacaggtaattagtggattgattttttaaattgatctactaattccgtagatatatccggcatatatctacacaggtatgcaataatttatatgcaatttaccgtacctatttttccagtctatacaatattgtcaaatctataatttattacgtttacctagagcatgttttttatacaatatctgttgcgcgagtgtccccgatgttaaatcgactacggtttaatgctgggggctcgctctattttcttctgtataaatcatgcttgcttacggtttacataatccctgacatttacatatgctcattatatcctgatgatactagaagatccatgcagttttgagtacatactcgatatcccctgctatatatcttctcttctagaaaatatttttcaggaataattgagcactcgagtaggttgtggtcgaatacaccgcattatcgagaacgatctcgacaaacacagagtcgtcgcacccaacctaccaacgaagaccgacgacctatctcatagcgccggccatcgctggactactcgagaaaaggttgttaacggataattcctcgcgaacgtcgtcggcttgatcacccgacatgattgtgaacggacatccggatatgctacaagttgggtgcgtgagtcatgctggccacataagatacacatgtaataaaccaactttagcgcccctataggtgattaagagactcctactcctggttctcgaaccagtaagacgcactgatctctctcgcctcactttaagtggtcgagttacgactactgcctggtcctcgaccagcaatgtagcgtttctcccagtactttcactttaagtggccgagttacgactactgcctggtcctcgaccagcgatgtagcgtttctcccactacttccactttaagtggtcgagttacgaccactacttccactttaagtggtcgggttacgactaccacctggtcctcgactagaggtgtagcgattctcccattacccctgcttcaacaaagttgatgtcaggtacacaagatcgccaagtgttttacccagagatcccttaccacaatgacacctagcgttgaaacctatcctactgtccctttacgccgtcttgacaaggcctccgaggaacctaagggaacttcggctggggacgcccagagccgataaggccttgtcggatccttcaaagacgaaagaatcatgtaagatctggtcgtgtaagagttctcgccgtgtgtattaaccaagccgtgtaatcggaaattgagttttccaacctcatggctgggggctaggatcagtgcttgttcaaccgaggcaggtcaaaggtccaagagccttatcatccaagaacgattctccgacgacaaggctgggggctagggagagtgtataactcaacaaactgactgatcgaagtcggtaaaagagtagacgctcgtatacaaaatattggtctgtaaatttaattcattttcagttttccatacatattataacatgtcaccctttgagcgttcgcttggggggctatttctatctaatattcttttctgagtattgatttcaggaaaattctattcgacattgttgaagacctcacgtctctatggttttacaccaagatcgactaaggagagtatgacaaatgttgacaaggctccgtcacagactctacgccttctcgattgctcgagaacggttgctggatctcgacaaggaatacgaactgaagagatgtgtacccaccgagataaaatttcttgacttgaatccaaattctcgattacagcaagacgggagacttagtcgcatgttctgtactttcttggttggcatcggagattgactcagacaaaccctttaggtgcccacacgaggctgacaaaggaagtctaacgttatctctgaactcaccgagaacggtcacttgagctcgataacagttactccatagtcagcggtcgagaatatgaattcgttcatttgcattgaagtcgggggctactgtcagggttatggataccacatacctaatagtagttgactaaatctcggcaggacccaccacataccatgtcctatacggaaacaaccttcggatatatgaggagtttcggataaggaaagacaaccagagttctacatggaaacgacaaggactactcgtattgtatccatattggtttccctagttctacttggacaaggggacacctatgggtataaatacaagcccccctaggaggacagggggacacccaccatggaggatcaacacccaacacaatcaacatagaagccacaacatagaagcctatatacgccaagacacgccgccggatatcgacttcagggataagcacggctagtcccctacagtgtctcctgatactgtcaggagagacgaaagcgctatctctgatctcgtcgggcacggattcgaggaggaaggctaccctgttgtcgactacgagtcagatcgtcagaccgccatgtcgacaacagttagataagctactcaccatccaaatattgtactggtgtgattatcatgaataagagcaataccggcttcggccaacaggatgtagggttattacctgacaattcaggggcccgaacctgtataaaaatccctgtctccatctcttttacctcagtctcgcgtatatcctagcaccgacgatccccatactgtccaaatactgtagttgagacatcaaacgtcgacaatttgcaaggagtggacagaagtctaattgagcataatttggcagttaaaccagatcaaaattcgaagaaacagaaattaaggagaatgtcgacagacaggcagcaagccacaaagattgaacttgtgaaattgctcaataccaaggtgatcagagaagtaatccatcctgaatggcctgcgaacccggtgttggtgaaaaaggtaaataggaaagcggcgaatgtgcattgattttacggatcttaataaggcatgcccgaaagacgattttcctttaccacgaatagatcaattagtagatgccacaacttgatgtgagctaatgagttttctagactcatattccggttatcatcaagttttcatggtgaaagaagatgaggaaaaaacatcattcataacactatttggaacatatttttttattagaatgccattcggtttgaagaatgcaggaacgacatttgcaagattaatagggaaagttttggccagacaattgggcagaaatgttgaagcatatgtagatgacatagtagtaaaaagcaaacaagcatttacacatggcaaagatttacaagaaacatttgagaacttgaggaagtattcagttaagctcaatccggaaaagtgtgttttcggtattagagcaggaaagttgcttggttttttggtgtccaaaaggggaatagaagcaaatcctgacaagattgcagccattcatcaaatggaaccacgaaagaatataagggaaatgcaaaggctaacaggccgaatggcatctttgagtagatttctttctaaatctgcggaaaagggtttacccttcttcaagacattaagaggggcaaatacatttgagtggacgaatgaatgtcaacaaacttttgatgagttgaaaaagtacttgcaagatatgccaacgttagcaagcccgcaaaaaggacaacctttattgatgtatgtggcagcaactccggtgacagtaaatgcagttttggtactagaagaggaaaatagacaagtgccagtttattttgttttagaggcattacagggacccaaaacaagatactcagaggtagaaaagatgatttatgcaattgtgatggcttgaagaaagctaagatattactttttagcacatgatatagcagtgccgtcagcatatcctttaggagaagtgcccatgtacaaagaaggaccaggaaggatagcgaaatgggctatggagcttttaccttttgatttgatgtatacctcaagaacagctataaagtcacaagtgcttgctgattttgtagcagctagggtagaacaaaaagaggaaaatgaaacaccatggatagcatttcctgatggagcatgcaatgctacgggtgcaggagtgtcgtatcccaaaactaatgattcggaaaccgacatgtttagactgtatcaagccctaaatcagtagattgatacaagttcaataatctggatcgtctttgcatacgtttagacatagctttgaaggagatattattacataaagtaatagggtatttacaagattgtggctaactattacagcagaagctttagaatggcctaattctgctgttttgctatagacttaaaccatctatctaatctagacttgagaattaggttgaaatgaaactaacttatatgattgaactcccggcttcgataagaactccaaattgactctgaaaaagggggttgaagcaagggtgagtacaacgtactcagcaagctattatattattcaacaatgaatgcatgagaggtaatatctgagtggagctagctttacttgtagaaagcagagaatgtaaaagtaagataaccagcaatgttttgtaatgcaacaatatttaataaagtttggaattaagtttctaaccaagatgccactgtgagtcccaatgcccgataaccgcgagcacggctattcgaatagttttaagaatattcatactgcagtagatgtacgctttacccgtaattcatgacgtgccaaacacattagccttgtcatggcaaagcttttcggtcactaacatcagtggtacctattccctgaactctagtccccatacgctctgaacgtaacgttatcagcagcgagaggagttctggcgttcccgaggtctttagagagaactgattgtatgacaccatgtcatcgcaatcagggttcacaaacaatttgtgcacaagtcatctcatatatttacctgcgcctcggtaaatatcacaattgcccttcgcggcataaatttgcctcctgcgcgaggacttaagaagaaccactatacagaggtaccacctttgctagataacttaattagctaggtctatgcccatacgagaattgcggtcgtactcgtatgttcttcacatgtacttgcagtcttatgtcggttggaacaatactagccacccggaaatcaaccatttctaccgtactgttccaatctaagttcattatattttatgcaatctaactaggcatggctaagcaaaatctagcatatatctggtttgctatatgttcaagttatgcatttgaaatcatgtatgactaatgcatagaatagagatataagaatataggatcgttatgctcaaaggggaggaataataacttgccttgctccaacgcaaacaaatccgagattggcaacctaattatccgatcctcgaaataccacaggttgccatccaaaagataatagactctgctaagaaagacgaggaaccagattcaataaaaatcatgaaatagcaagaaagtggtaaagagcaagaagggctaggcttggggtataaatatatcctttaaagtggtatagggttctaggtagttggagagtaaatggctggtatggagtttggatagcaggttggctggggtttcatttgattaagccgatatcgaggtaggatgaatgtcggctgggatttgggtgtttgctagtcgtcattagaattggatagtatgacaactaggttaggtgtctagccgatgtcaacggatgtaacatactgaaaatttgctattttctaaatatgcatcatgcgaattcttatgtttttaataacttcctaaacctaagaaattataattagagggacctcctaaaactaacatgcataaaatccctatctagtatttaaaatctttcgtggttttattctaaaaattgatcttgttaaatcgaggtattctctttgatttgattttgcatcttaaaccttctttcgaccaaaatttcttttatttaaatttagtttaaaaatcctttttacttttatgaatcatggtccaagaaatcctccaacaatacctttgaacctaaacccaagttccccattagcctcaaatacttctccaaattcttgccaaataatttgaggctaacatcctatttatttcccttccctctcaatcgagtgcatcaaataaattccgttatattctatctctcaaaagattgcactcaaataaattccgttatattctatctctcaaaagattgcacttaaataaattagaacatccttgttttaaaacccctctgcatgtatcaatatctccgaattcaaatcctttttaaaatctagccatccaaattcctctaaatcaattatttgaatctctaggaaaattagactttctttctttctagactgggccgaaaccctttccctcctccagcccaagccggcccagccaccacagccgagccgcccttcctccttctgcagacgcgcacacgcacacgccgccgccacccacagttttgtgtgccgtcgccgcttccttgccgccgccgtcaagtcgcgccgccaccgtcgctgtgccgtgttcgtcaacagccgccgcccaaccatatagcagccgccacgtgtgagcgccgccgtcgccgaccaatcacgagcggaagccggcgccgtccctgtaacatactgaaaattagctattttctaattttgcatcatgccgggtcttatgttcttaataacctctttaaactaggaaaatataattagcgagacctcctaaaactaacttctataaaacctctctttttacttaatttcttttgaagtattccttgatttggttttaatctaaaaccttctttcgcctaaaacttcgtttatttaaatttagtttgaaaaaccctttttactattatgaattaaggtccaagaaatcttcccatattgtcctagaacctaaaccaaagcaattccaattttattggaattaattgttaactcatcctttgatattaaacctatcctttgatcttaaacctatcatttgatcctcgatccaaatattcaagttcctccttttgatctagccaccaatttaatccctatggcttgattccctcttcgggacaagaaatattattattacaaatattgtgagtaattgctcttgtgctaagagaatagactttatccttccgccccaaattcaaaacctcatttagcccatatctaattctctaaatttcataccacatattttgggctagaattctatttactctattccctccatattccctccacatactcaaaaatattcaaatctagagccatattatttatggtgttgaatattttgaagttctattttgtaacgccccgattttcgttcgggattaaaaatcattaaataatgcattttctagaaattaaataaaagttaaatcaatttaatcaagtgaaataatgggagaattaaaattttcccttaaaaatcattggccgggaatattttgcaatattctttgtgccctaaaatactctccggaattttccgtgaattttcggagctcgagaaatagttttaaagtcacaaagatcatttaaccaattaaataaaaagaaaacaaatttaattctccttccttgcccttccaccttttcgggctcggcccaaattcctccccctccttccttctctcctcgggccgccggcccagcgcgcctcccctccccaagtctgctttgcgtccctgcgcgcctcctccctcccctcaggccgacaagtggggccgtgggacccgcttgtcagacccttcctctacctccagcctccctcatccaaaccgctgtgccgccattgccgcccacgtcgcccacgattccggcctcttccgctcgcgccctcgcgcccaaaccgcatgaaatcggttcccatccacctcctctacactctccccatgtttcccccaaaaattgtgccgggatcgagctccactccgcccacgatgtcacccacgtcgccggtcattgccgccccaaatccgccacgcccggcaacggttttccctccccgagcttataaaatccatccccgggctcccttctctcgtttcccctcctcgccggcgcttccctcgccttctcccgctctccccacgccgctcccgcgcgccgccgctctccggcgagctccggtcgcctctagccgccgctctcgccatctccgcgcagcgccgtcgccactatcggcatcgccgtcccacgcttcaccccggcatccgtttcccttccctcctccaccccggaaccacttcttcaccgtgcacccgaggccgccgacccattcgtcgcctccagccgcacctcgtcgctgctagcgccaccgccgcgccgcgcaacccatgccgtcggcatcaccactccacgccgcacgtcgtccaccgctacactcccccaatccaccaccgggctgccacctccactgccaacccgagccgccattgcctttgtgagcgccggctgccgcctcccgtcgctagaaccgccgcagcactgctccgtcgccaccgccggcttcgttgccacaagcccaagctcggccaccgtttttctctccctcgccaccaccgaaaccaccttcccaccacacacccgagccaccacatccattcaccgtttccggccggcaatcatcaccgccatagccgcggtcgccgcttgccgtcacctttgtcggcttcgtcgtcgtgtgttgcacctagtctgcctcctagccctcgccatacaccgccgtgcgtccctccgcgtcgtcgacccaaggagcgccgccgcctccctccgcggccgctccctccgtcgccgcgcctctcggtgagccgcctccctcctccttttcctctttgccggccgcctcccgtgccagcgccgcgttgcgccgccgccgccgccggttgtccggccgtctgcgcgccgccgccctctgtggtcggtcgggccagccctggctgcgcccgtgcccggccaccgccctcctcagccgcccgatcggctttgggccgatccgggccgtcggttcccgtggaccgacggtggaccgcctcggtggtctcggtccacggtggaccggcgcccttgagccgctgccggtggggcccgcctgccagccgccccctctccctttcttagtgccactgacgtgtggggcccgcgtgtcggcgccggctgccccttgctgacgtcagcgaggtccatttcctttgagaaaatatttaataattgcgcaataaatcgagtttaattatagaaattcatttaaatggctcaaaacttctaaaattcatatctaattcattcgaactccgaattgagccattcaacttgcaaaattcatctaaaattgagctctacatgtttgtttagtttttatgtactgtttccttggtttttattagagtttttcctcgttttgcgtgccaacgtgtagtttccgtcgtttcggaagtccgcggtcgcgaggaaaagagttcggaagatcaaagtgaagaagcaaggcaagtcacacattccccttgagcatgttgatcccaatttataaatgttttaccgtttacaaataaatatgcatgttttgctaattacatgggatcagggtttacctatctgctcgcttgtgccatgtttacttgatatctgtcctttgtcaaccttgggtgataaatcgactagcttgtgttacttaggtgacctagctagaactatatgcttagccatgcttaattaccactagctcagtcgatgggataattgcagtattagactttctagtatcttgttgagctgcgtgctcgagacatctggccatgttttatggtcgtaattatccaactaaaatgcgactgaatggtgggctgtgggtgcatggttttgcgagtcgcacccatagcaattaaggaccggttcacgggaaaccctggaagacttacagtgcttaccacaagcgggaatgggtaactgcttgatctgaagtatagctcgaccctttcctaggcaccggtggcgagggtgggcgtgatggagttgggtcggccggggtgtccggttgtccagctgccggattcaccgcggcgcaagaggggaccgcccactgccttttgaggggtgggggtgaaaccttagcgtggtgtggatggttaggggagggttatgtgaagggtctcgtcacaatcactcgacatggtgacgtgtgcatcatgggcacatgatgacgcggtgacatgtcggtgggttgtgtcttgtgggtacagttgtgcacctctggccagagtaaaactattcgaatagccgtgcccgcggttatgggcgatcgaccagattcaccgtgattagtctcacacctaataaatcgacccaatgcactgtagttcaggtgggttggttgggcctgttcaacgtggtgtagcgttgatcagtggagattttaatgttactttaattactcaacagttttactgtttgctaaataaaatgttttacaaccgcctttatgcaaatagccacaaacccctccttgtatccccttgcacgtccgcatcgttggtgtggcttgctgagtacggtggttgtactcagccttgctattattcccccttttcagaagtgtagtgcttctgagctgaagatggagttagaggaccaaggctcagaccccagttgagttttgcctgtggagtggagctgaagccccgctaggatcgcctttttccgctgctgctgcttttgtttcggtgtgaggactaagtgcctcttctgtaagtattttacgctttatttacgtttggaactgtgtattacttgtcgttttgtgtaccctggctggtcctggacagggatttaatgcacaaaatagtctggaaatttgggctaaatttctgggcgtgacatatttgagtgcaataaataaactccctctccaaaatattgcactcaaaccaactagagaaatatttcttttggaaattatattcaaatataatttccttctaaactctctcagtcaattttccttcaaattcaaattattcaaatcctttttcaaaatctacccatccaaatcaattattcaaattaaacttcttcctttttgtcattgggccgaaactcctttccttcttcatttttggcccaatccttttaccttctatttcctcctccctctcgggctgccggcccagctaagccgagccggcccaaaccggcccatagctgagccggcccctcctcctcccgcaagcgcacgtgcagtgcacgtacacgccgccgccaactccttttcgtcgccgctaagcaagcaaaagtcggcgccgtcgtcttcttctccacgccgccaccaccacggacaagttccccttctcctctccaaaccgacctccacgatctataaattaacgatgaggtcgcccctctccctggagataaccgagttccctcacttccctctctcctctcatacccggctgccgccgccgtcgaccgatctcctccaccgtagctccacaacccaaaccctcgcgccattggctttgcctcggcgaggtgaatccgtttttcccctttcccccttttctttcatcccgtatcaagccccaccggaggtttctctttcctagccggacgaggctttgtcctcgccgttccggcctcttccctaactccctctgccggccaccaccctccttggatgcgtgttgctcggtaacaagcgtggccgccgacgtcgccgccctccagccaccggagcgccgccgccccgctcgccttctcctttctcttctctcggctctctctggaagagaagaaagaagagacgggaggaagaagaaggagaaaagaaaaagaaaaagaaaaagaaaataagatactgacaggtgggcccctgcacagtaactttcatattttctagatttaattcaaatcccaatctttagaagcccatatctcctaaaccgtagatccgattccgatgaaacttggacctaaattcatgtaaattcaaaagctacattttggtaccaaatttgcaattttaatattttatttgaatttccttaatttattcaaatgccatttgaataaatatttgatttaatcttacatttgaatttccaatttaaacttagatttgcctttcagatatttccttttattttcaaaataccctttagccactaaaaagccgccggttggaactttactccttccatggggacgtttgcgcggtctacgggcctcaacgtcggaccgttggttgtaaagcccggcaaaatcaaacctaaggtcgaagtgctgctcttggcaccccacgccttgatgcgtacagtggtcgaagcttcactattccctcgacctcatctgcacaccgcacagttagcttttaagctctgtgtgattctagccgctccgccgccactcacggttgtcggagtaacacctccaccccactaaactatacccacctcctattcttctagccgatatgctgtctatcgacaccggctagaaatgtcaccaaacctagtcgtcatactacccaattctaatgacgactagcaaacacccaaatcccaaccgatattcatcctacctcgatatcggctcaatcaaatgaaaccctagccagcctgctatccaaactccataccagccatttaccctccaactacccatagcttaaacatgaaatacgagccgatatgctatcctatttcagcatcgactcgagaactaaaccctagctactattccaccaaagcctaatcttgatcccctctccaacctagcctacgcataaaatactaaggagatagttataccccaaacctagcctttcttgctcttcatcgatttcttgctatttatggcttttattgaatttggttcttctttttctttaatagagtctattttattctgaatggcaacctgtggtatttcaagcatcggataatcaagttgcctatcttggatttatttgcattggagcaaggcaagttattattcctctccttcgagcataattatcctatactctatagctttattctatgcattagccattcatgattttgaatgcataacttgaacatatagcaaaccagatatatgctagattttgcttagccatgcttagttagaatatgcataaaatttaatgaacttagattgggacaatacgtaagatttggttaatttctgggtggctagtactatctcgatcgatataattgccaccaaatacttatgtcaaacgaacgagtacgaccacagcttttagaatggggacagacctagttattaggttaattaacaatgtggtacctctgtacagtgattcttatataagtcctcgcgaaggaggcaaacttatgccgcgaagggcaaatgtgatatttacctaggcgcaggtaaatatcttgattatattgtgatcactgtgtgtgtgtattgtgaaaacctggttgagatgacgtggggtatctcatccagttctctctaaaaacctcgggaacgccagaactcctctcgctgctgataacgttacgttcaaagcgtatggggactagagttcatggaacaggtgccactattgttaataacctaaggctgggctacgactaagatgatgaatattggcaagtcgtggactgtgggtaaagcgtacatttactgcagtaaagtataaatgaatctattcgaatagctgtgcttacggaattgagtatcgggactcatatggtatttggttagaaacttaactcaagattttacgaaataatgttgtataaagacatcccaggctttcttcttctatattctcagctttctgccagtaaacctagatctacttaaatactatttcatgcattcattatttgatataatagcttgctgagtacgttgtactcacccttgcttcaacctcctttttcatagtccatttgatgttcttgccaaagtcaggagttcaatcatataagttaattcccttttaacttagtcctcaagtctaggtaatttaaatggtttaagtctatagcaaaacagcagagttaagtcattctaaagcttctgctataatagttagccacaatcctataaattccctattactttatgtaataatatctccttcaaagctatatctaaacaaatgcaaagacgatctagatcatttaacttgtatcaatctactgatttagggcttgatacagttttaatatgtcggttaccgaatcattagttttgggacccgacagtccccttttcctccacgaggtcatcgccgtgccttcctcatcctcctccggcgaaccgaccttcatgaaccgacatccgccgcctataaatagccggtgcagccctcgcttttcccacataactgagcttcgagctcttcttctctctctcctccctatgccggccgtcggccgatctccctcatcggagcatttccggccaaatcttcgcacctataccttcgcctcgacgaggcaaacccattcccatagtttccccttcctttcccccttcgattgaagccatcaccgtcaaccccataaccggccggagcaaagttactccatcacctgttccggccatctctctttctttctccaccgaaaaccaccctccccggacgcgcgacgctcgggaacacacttttccgtcggcgtcgccgcctcccagccaccagagccatggcgcccctcctccccctcctctcgtttgctcagctggaagagaagaggaagatgacgggaggaagaagaagaaaaagaaaaaaaaaagaaaggctgacaggtgggcccatgaacagtacattttcgtattttctagatttaattcaaaacccaatctttagaagcccatatctcctaaaccgtagatccgattccagtgaaacttggacctaaattcatctaaattcaaaccctatcttttgaccccaaatttgctattttaatattttcaaataccgtttgaatttatatttgccttttcaaatattttcttttatctcaaataacccctttagccactaaaaagccgccggttggaactttacgccttccatggggacattcacggtttactatccccgacgtcggaccgttggttgtaaagcccggcaaaaccaaacctaaggtcgaagtgctgctcctggcaccccacgcctcgatgcgtatagtggtcggagcttcactatttcctcaacctccacagcacgccacacagttagctcttgggctctgtgtgatcctagccgctctgccgccactcacggttgtcggagtaacacttctgccccactaaacccacacaaacctcctatccctctagctgttatgctgtctgttgacaccggctagagaagataccaattctagtcgttatactgtccaactctagcaacgactagcaaacacccaaatcccagccgatattcatcctacctcgatatcggcttaatcaaatgaaaccccagccagcctgctgtccaaattccataccaaccatttacccttctactacccatagcctatgcatgaaatacgagatgatatgctatcctatttcagcatcgactcgagaacaactaaatcctaaccattcttctaccaaagcccaacctcgaccaatgctagccacataaccacttaaccagttagactattcgttaaacccacacatgaaatataagtgacaaatgttgcttaatctcctctagcctccaaccctttagaacctacacatgaaatgttagcccaataattcctataccctataaaggagatagcttataccctaaaccctagctctcttagccgcttatcgatcttttgttattttatggcttttattgaatttggctcttcctcttcttcagtagagtttattttattttggatggcaacctgtggtatttcaaggatcggataatcaggttgcctaccttggatttattcgcgttggagcaaggcaagttattattcctcccctttgagcataattatcctatattcttatatctctattctatgcattagtcatacatgattttgaatgcataacctgaacatagcaaaccagatatgctagctttgcttagccctgcctagttagtctgcataaaaatataatgaacttagattgggacagtacgtaggaattggttgatttccgggtggctagtactgtctcagtcgatatagttattaccaagtacttatgtcaaacgaacgagtacgaccgcaactctagaatggggacagaccttgcaaagtaagttatctagcaaaggtggtacctctgtacagtggttctattttaagtccttgcgcaggaggcaattatatgccgcgaagggcaaatgtgacatttaccgaggcgcaggtaaatgatttattgagctcaagtatatatatataattgtaaaacctggttgagatgacgggggtctctcaaccagttctctctctaaaaacctcgggaagccagaactcctctcgctactgataacgttacgttcagagcacatgaggatgagagttcatggaacaggtgccactgatgttagtaaccgaaaagctttgccatgactaagctaatgaatattggttgtcatcgatttcgggtaaagcgtacatttactgcagtaaaataaacatgaatctattcgaatagccgtgttcacggaattgagtatcaggactcatatggtactttgattagaaacttaattcaagattttaataaatgttgctgcatttaaaacatcaggctttctacttctatattctctgccttctgcaagtaatcgtaatcctactcaaatattactatttcattcattcattattgaatataatagcttgcttagtacgttgtactcacccttgcttcaaccccctttttccagagttaaattgaagttcttgccgaagccaggagttcaatcatataagttagtcttatttcaacctagttctcaaatctagattagttagatggtttaagtctatagcaaaaccttagagttgagtcactctatagcttctgctgcaatagttagccacaatcttgtaaattcccctattattttatgtaataacaactcctttggaatcttgttcaaatgtatgcaatgaagatccagattgttgaagctgtatcaatctactgatccagggcttgatacagttaaacatgtcggtttctgaatcattagtcttgggacccgacaacggacaatataacgtctagagggataagaagattgtgaaggtttagcggggtggaagtgttactccgataaccgtgagtggtggcggagcggctaggatcacacagagcccgagagctaactgtgcagtgtgctgtagaggttgagggaatagtgaagctccgaccactatacgcatcaaggcgtggggtgccaggagcagcacttcgaccttaggtttggttttgccaggctttacaaccaacagtccaacgtcggggttagtagaccgcacgaacgtccctatggaaggcataaagttccaactggcggctttttagtggctaaagggtattttgggttaaaaagaaatatttgaaaaggcaaacataaattcaaacggtatttgaataaattaaaatattaaaatagcaaatttagtgtcaaaaggtaggatttgaatttagataaatttaggtccaagtttcattggaatcggatctacggtttaggagatatgggcttctaaatattggaatttgaactaaatctagaaaatatgaaatagtactgtactggggcccacctgtcagcctttcttttctttttcttttctttctctcctcctcttcttcttcctcccgtcatcttctcctcttcagttaggagccgagagagagggagagaaaagggcgagcggggcgccgggcttccagtggccaaagtgcggcgacgtcggcggcatattgtgttcccggtcgacgcgcactcggggaggttggtggctggtagagaggaaggttaaaacggccggaacggcgacaatacgagctcagtttcggccggtaaaagtggcggcggtggtggcttatctcggaggggaaaaggaaggggaaagtaggggaatggatttgcctcatcgaggcgaaggtagtggcgcgagggcttgggcggcagggctccggtgaaagagatcgaccagcggccggcattggggaagagagagaaggatagagctcgaggctcggatgtgtatggaggaaaggggcgacctcatcgtctatttataggccgcggaggtcggtttccaaagtcggtttggaggggagaagggagacatggctatggcgacggcgacgtgagaaagagaacgacggcgccggcttcgttctcccattggtcggcgacggcggcgcgtgcacgtggcggccgcagaggagttaggcggcgaggaaagaggtgcacggcacggcgtcggcttggcgtggtcggcaaggcggcagcggcggtggcatgattgtgggcggcggtgataaagccgcttacggcagttgcggcggcgtcgggcgcgcgcccacaaaggacgaaggggcggctgcctctgctcagctgggccgacatgggccaaggagggagatgggccgaagggagaaaagaggaattttcggcccaaactaaaacaatggatttctaaattttggaataggatttggatagtttgaatttgaaggaaaattgaatgagagagtttagaaaatataatttccaaaagaaatattcctccagttggtttgagtgcaatattttagagatggagtttatttaatgcactcaaatagaaattcaaaatattcaacaccataaataatatggctctagatttgaatatttttaggtatgtggagggaatatggagggagtagagtaaatagaattttagcccaaaatatgtggtatgaaatttagatatttagatatgggctaaatgaagttttgaatttggggtgcagggataaagtctattctcttagcacaagagcaatcattcacaatatttgttataatattattcttgtgccgagaaggaaatcaagccacaggaattaaatcagtggctagatcaaaaggaagattttggaaaggggactaaagataggtttggaatcaaaggataggtaaaggatgggtcgacaattaattccaataaaattggaattgcaaggatttggtttaggttcaagggtaaagttggagggtttcttggaccataattcatgaaaataaaaagagttttcaaactaaatttgaataaaggattttagttaaaacaaggttttaaaccaaatcaagaaatgcctcaatttaaccaaatatatatatatatttttaaatgaaaaacacaaaagagattaaataccagagaggttctgtgtgagttagttctaggaggtccctctaattatattgtcctaggtttaggatgttattaagaacataagaagcggcatgatgcaagattagaaaatgacacattttcaggatgttacaaggagctgcagcagtggtaaaaacactaatgaagcaaatgctgaagtattcagttcaattagcctttccatccacaaacaatatagcagagtatgaaggagttttgctagctatgagaatggccaaagcactaggggctcgacgtttaatgtcacgcccagaaatttagcccaaatttttagactattttgtgtattaaatccctgtccaggaccaaccagggtacacaaaacgacaagtaataaacagttccaaacgcaaataaagcgtaaaatacttacataagaggcacttagtcctcacaccgaaagagaacgacagcagcggaaaaaagcgatcctagcggggcttcagctccactccacagacaaaactcaactggggtctaagccttggtcctctaaattcgtcttcagctcagaagcactacacttctgaaaagggggaataatagtaaggctgagtacaaccaccgtactcagcaagccacaccaatgatgcagacgtgcaaggggatacaaggatgacttgtggctatttgcataaaggcggttgtaaaacattttattgagcaaaacagtaaaactgtagagtaattaaggtaatattaaatctccactgatcaacgctacaccatgttaaacaggcccaaccaacccacctgtactatagtgcattgagtcgatttattaaggtgggactaatcacggtgaatctagtcgaccgcccataaccgcgggcacggctattcgaatagttttactctggccagaggtgtacaactatacccacaagacacagtcccacgacacgtttccgtgtgccgacatgccaccacgacataccgtaaagaggccgtgttaggacccttcgcataaccccctctaaccgatcgccccacatctcagggttcgcccccgtccccagcaggcaacgggcagccctcctctcgtgccgcggtgaatccggaagccgatcaaccggacaacccagccgacccaactccatcacgcccaccctcgcctaggtacgttggctagaggaaagctacactacaagcccagccgttgcccacgctggcttgtggtaagcacgataaattcttccagggtttcccgcgaactggtccttaattgccatgggtgcgactagcaaaaccatgcacccacagcccaccattcagtcgcattttagttggataattacggccatgaagcatggccagatgtctcgagcacgcagctcattctgatactaaaaaggtctaatactgtaattatcccatcaactgagctagtggtaattaagcatggctaagcataaagttctagctaggtcacataagtaacatgagctagtcgatttattacccaatgttgacaaaggacagatatcaagtaaacatggcacaagcaaacaaataggtaatacccggatcccatgtaattagcaagacatgcaattttatttacaaaagataaacatttgtaaattaggatcaaaatgcttaaggggaatgtgtgacttgccttgcttcttcacaataatcttccgaactctgatcctcgtgaaagcgatcttccgaaacgacgggaactacacgctggcatgcaaaacgaggaaaaactctaatgaacaccaagcaaacagtacataaaaagtaaacaaacatgtagagctcaattttagatgaattttgcaagttgaacggctcaattcggagttcgaatgaattagatatgaattttagaagttttgagccatttaaatggatttctagaattattaacgaattattgcgcaattaaactcgatttatgatgtcaccgagagggaagggtggcgccgacaagcgggacccacccgtcggtgactcaagggcttcggcctaccgtggaccaagtccacggaggcacgggctagcgcaccacgtggcgcacacgtggcgacgacggagcaccgacatggcggccacgtgtgcggacacacgggcggcccggatggagaccgaggccgatccgacggcccagatcgatcgcggctgggaccaatgggaggcagcagccggctgtccgacacagccagcagcggcacgggcgcggagcgcggcgacggtggcctggccggacggccaccggccactgacggcgagcggcggcgcggcgagcggtggcacggtaagcggcagaagggagcggggaggagaggagggatgctcaccaaggcgacgacggcgagacggcaatggggaagccggcggcgggctcctcggggaggcaacggtgacggcggtccggcggcattccgcgagcgggaaacggcggccgacggtcgaggtacctagggaaggaaatgaaagggttaggaagggaagaggagatgcgaggtggcgtgaatcaccagccgaaagcgagaggaaaaaccggcgacctcacctcgcatggtgaataggactccgacgatgatctgcgaaggaggagcggcgaccgaggatctccttgtccttgcggagccgagggaggcgatggcacgggtcggcgtggacgggaccgccgccaaaagcgggccggaggtggtagccggtaggcggtggggttttggcgatggttagggaaagaaaggtgagggccggggtgcagtgtgaagcgacgacgccggtggtggcgacagcacagcgcggcgatggcgagagcggcggctagaggcggccggagctcgccggcgacggcggagagagggagcgatgcggggaaatggtttctaggcgtggggagctcggggaaaggggaaaaagggatgagggaagatgagtgggccattttatagcgcttgggaagggaaatcgtggccgggaggagcggaaacggccagcgaagtagggcgccaacgtggggtggtggaggggttaaccggcgccgattttcatggggagagtgggggaaatggtggagaacgtgtaggggaccgagtccacgctgttgaatgcaagctcgggagacgggaggtggcggatttggcggtggagtgggctgccatggcggcggttggggatggagctgaggttggggatggagctgacaggtggggtcgccgggcccacctgtcggcgagggagggagaagggaggctgggagagggagggagagagattttatttggttttctttttatttaattgattaattgaactttgtgactttaaaattacttctcgagctccgaaaattcacgggaaaatttcagagaatatttagggcacaaagaatattacaaaatattctcagccaatgatttttaaaggaaatttttaatttcctcattatttcacttgattaaattgctttaatttttatttaatttctagaaaatgcattatttaatgatttttaatcccgaacgaaaatcggggcattacatctaataatcaaaactgattcaaaattagtggctagtcatttttccaagacttttgaagcaaaagaggatacaatagctaagtacttggaagaggctaggttgaatgagagacattttttggggataacagtaaaagccataacaagggaggaaaagggagaagctgatggaactggcaaaagcagcaacagcaggccaactgctggaaaattctttctttgaggtggttgctcaaccaagtaatgaaaggaaagaggtgttgtgcatagaaaacaaggatgattggagagaaccaattctcaaatacctggttagtgcacaacttcctgaaaaagaagaagaagcaaggagaatacaattgatctcgcgaaagtataaagtggtggaaggacaactatataaaagtggagttattgcccctctgttgaactatgttacaagagaagaaggtatgaagatggtggagaatatacatgaagggttatgtggagctcatcaagcaccatgttcagtagcatcaaaagtaataagacaaggaatttattggccaacaataatgaaatatacagaaagatatataaagacatgcagagcatgccaaaagtttggtcccactttaaaagcaccaccaaaagaattacaaccaataccaccagtttggccattttataggtgcggaatagatatagtagttcctcttccaagagaaaaaggagatttgcgctttgtcattgtcgcaattgaatacttttcaaggtggattgaggcagaagcagtagcaaggataacttccgcagcagtacataagtttgtttggaagaacataatgtgccgatttggaatcccaagggaaatagtatgtgacaatgggaagcaattttagtcaggaaaattccaagacatgtgtaaaggactcaatttgcaaatcaactttgcctctgtaggacatcctcagacaaatggagctgtggaaagggcaaatggtaaaatcatggaagctatcaagaagaggttgaaaggatcagcaaagggaaaatggccagaggatttgctatcagtgctttgggccctaagaactacagtagtccgatcaaccggaatgaactcctttaggcatagacgcgagcggcggcggcagcgtggtgtggacacgcgcgcgggcgccagcagcgagctcgcaagggaggagagagagagagggagagagagagagagagagcctggaagctggctcgggagagaaggggaggggaggggagggttttcgcgctcaccttggagaacggaggggcggacgatgagcggacggcgacggcggtcccgggggcgtcctcgccggcgctcggggaggtcccgaccgacaccgagcggttgccagaggccgcagagcacggggtcgtggcgcggcggcgacggaggggtcggacacgtgtgggaggcaaggaaaccagagagagggggcccggggcgcctttttat

SEQ ID NO: 29877 - DNA, 26052 bp, Oryza sativa
agttcctctgtttttctactctgaaacttcagactactaagtgagggagtgtgagtgaatctgtgagattgatcttggcgttttgcggacaaaataaaatcgcaccgtagcgtttagcacgtgcatattagtgtttacctgatggcactctctgtatacccctgtggaattgtaaagcacgagaataaagaactgttgtctgaagatacaagtggtcgtctaaagttggggattagaagaaacaacaatggccagtgggaaattaacaagagtggattctaactggatgccaccttctgacaatggtcagaatggacatattgaaaatgagaattgtgttgtttcagcaagcaacggtgatgatgagaacggcaaaaatggaatctataatccagagccaggagaatttgatcaactaactagcaatgtctatgatcttgattcttctcccatggatgcacatttttctccagcacataaggtgactcagatgatgatactgttgtgttatcacctggtgctgtgaatttcagttcagcacatgacactggcaatgtatttccacccaacctaactaaagttttaggaacatgtggggaacaaacgataggagaatagatcctactactactagtacacccagtttcacgcggtccactcaggacccgtgaatctcgcgttcgacttgatggttctcccggatgacgtgatcattggcatcggctccagctttgcccagacgagcggcactactcccatcaatgtgtgcttggtgaggagcttccggagcttctttgcgtggcacttgagcttcttcttcatagtcattccatcctcagctgccggtaagggtagttccttcctatattcccacttgctcattgtggcaattccaagtagttcatgagcaatccttcggacactgtgctgacttccatggtgttttttctgcagatcgtcttgaagccgttgcatcgcgatcctcacttcctcctcatctttttccctcaatgattggaacagaaaattgtcgacgtattcaagaatgttgcttgccatcctccagtgccctgcacaaggaatgacttgaataattaccatcacatcactgattaactactactccagcaatcatataatgttgtactccacatacagtagtagagtgcagttgacaacaattaagttaattactactccatcaaacaacagacagctgcagactgattacactagtgctaacaacaacacatgatactagttagtagtagatggatgaaacaatcagcagtattaagcaaaacagtaacaaaataaacatggcatcgcacgaaatgaaatgagcaaacagaacaatcaacaacaaggatgaacatcatcaagtaataatcaatcaggcaaggactaataagatagacatagcatcccacgaaatgaaatgaacaaacagaacagtctgattcaacaagaaggatgaacatcatcaagtaaggagtagatcggaaggaacatattaccggcaaccaagtgagcaagcagatattgctccttgagttccttgaggtccttgggcttgggcttgggcttgttgggtacatcagctggagctagtggagctgttgctgttgctggtgacgacgggtgacggtacttgtcccgaatgttctgcacccttgaaatctcatgcatgatgtccagccgggctttttccttggtctccagcagatttggattgatcacgatgaagccaggtacagagtcgtcggcggaggcttgttcgatcttggataggatgagaggcgcctccgctggaggaaggtatggcacaatgaacactctaagaggctgatcgacaggagcaggagcaggagcatgattctccgcctgaacaagagccgccgccagcccggaggcgcttgaaacacgcacaatccatccggccttcaccacgatgttgtcgacggcgtcatggagcaccttcggctggccctcctgcagcacctccacggggagcccgagcctcctcgccgtcttgcaatccttattcagacgcgcctcggggcatgccattctcgcctgcacttgcaatttgtatttcaatcaatcacaaccagaccagaggtccaaagcagagcacatatgtaaaaataatcttgcaccttaacgagctgagaacacgttaattgcaagaacaagcgcgcagcgcgtggagagggaggcgaacgagatcaccatggaatcacggtgctcgtccccctacggcgcggccggcagggcacttcattcccccgtgccgtatcaatcagcaaaatcaaaacccgaccaacagggagcgatcgatctactactctactggagtggatgacaacaaggacaagcaagcgagaacgatctactactctactggagtggatgacaagcaagtgagaacgatctactactctactggagtggatgaacaagcaaacgagcgaacaaccaaggaggagcatgactcgctcgtctcgtcgaggtattaggcgaacggagatcacaataatggagatgaaatcgtctgcctccctctgcccgggcccggccatttcacatgtactactagtactagcgcatcggcaaaatcaaaccaaaacccgatcgatcgcaacacgtacgcaacaaaccaaaacccgatcgatcgcaacacgtacgcaacgcaagaatgaacaaaaacaaacgcacaactactctccaacctcagtcgtcacactcacatgcaccagcaattatctagaattacacgatgatccagagtaatccatccggcgcgcggtggaaaacgaacgagcatgactcgctcgtcgacttccaacttgcaagcacggagaggagagaggcgaaccgagatcaccatgaaattgcggtgctcgtccgccacttccgattcatcggcgaaaataaaccaaccagaaccactaaatcacccaaaacccgaaaaaaaatatccatctcccagagaagatatcagcacatacataagcagagcaggcaaacaccaccacaacacagctcgcactacatccaccaagaagatcgcagcgaggacacagattgaattgaagaagaagaagaagaagaagaagaagagaggaggagagggagagattttgttgctcacctttcggcgctctccaatcgcttgtcacggcgaggcgaggaggaaaaaggtgaatggaacactgtagcaacaagcaatctcctctcctctcgcggtatttatacactgctcacttctgtcacgtacgggtacggtgagactgacttgtggacccacccattccgatgcaccgtccgatctcacatcgacgcctctggaacctttcatagcccgcacttttcgtgtgccatggcaagtgctgtgacccaccccaccggacggtgttcgcccatgccattgggagtggaacccacccctagccagccatctcactctggtatttatataaaactacgtacaactactactactgtactcatttctccatttgtcacgtataaaacccaactgcatcactaaaaaaaaaaagccaggaaagagattaattagaaccaactttaggtacaacatttggtaatatgatgcatatcagttaactaaaaacatcaagtctaataaccataaaaatttgacatactggggcaatgtatattggtcatagaatcaaacctcaaggttattacacattatggtctatggaacatcgaatattaacaaaactctctaaacatgatttacagacctcaaccagatatgcaacggttaagggaatattatttagtccaaagcgaaaacatgagttaaggggtggtccaaagtgaaactttgggatctcttccatcccttcttgctcctccctgaactccggccagccaatacccaaagacgctgcacgcgctcgagctctgccagcactgagtggcttgagctcagcatccatgtgtgtacgaagtgtggacggacgaacatatacaaagaaaaaactatgatgcaagctcaagcctgggtgcttgccaaagaatgcatgccaatccaacgaaattcatgcaaataacccatcacaatcaaacctcaagagtcatataatagaggctaagacgctactgagcgaaacagctcaatctcaaaacaactatcttgtcaaaccatcaccctctcagaaaagcactccttcctaagcgcgttgcaaagcgtactggtgctcggcagctgactcgagtgcagcgcaacgccggtggagcttgagcatcagaggtgtcaacggatggagctcgtgccaccctagctgtgggtggagcttgagctcaagctaggccacagtgcagcacgggaggagcttaagggtggcagtgtgtgcatcctcgggagtttgagctcgaaactcaacaccagctagcagagctgagcgcattgcagcacttctggatcccagcagctagccagagtttaggaggagatgaaagagatgaatagtgggggtggttcaagatgcaaccaaatgaaatattatcaagtccaaagtgaaaacatagctcaatgggtgtcccaaattaaaaccttggtaagaaagtgtagcccaatgtgcaatttactcaagaaaaaaaaaatgcatagcaccgttcttcatgtaagcaacgccaaacaagaattataaaactggactaaggaaaaataaactgaaattcaatagtttcggaggcaatgatttcagaggtgctttgaattacacttaaggtacctgtccaactgagaaaattgagaaatgggaatcacctttttggcaccagaatattgcattatttttgtgatccaattggctaagaaccaagatcatctgcaatgacaagcactaaattatcagactataatcagggaagtagatcatttagtgcaccagctacacgttatgcattttttcctgttttgattccaagaatggtatgtgagatgtatgccattgccataacaaagtgctcttaaatgggccgtgatgtaagcaaaatattcagctagttaggattgattattcattcaaacctagggtccatcctaccactaaacataaacaaaacgcatccacgagcaaagaaagatttagtacaactccttgggacaaactccaatctattatgtcatcagcaattctcatgtaagcaagaaaataactttcagcgccattagatcagatggataaaactcttttttttattattttcctagtgacaacaccaattagaaaagccataatgtacacaaacctggagttgaatgaacagccagaaaaagaacagctacatttcatgatagaagtactggagtacatggctggagaagccacgatctcagtgagggctggtgggcaccgatcaacctcgatgatggctagctgcagaacaagttcaatggttcaatgatggttggctccagatcgagatagatggcaacgaccatggcactggagcaggctgtggccctggtggtgcaggggcctgtgcctcgagacccaatggagtaggtgtgaatttgcgacagcctcgcggcggagcagccagatccgcccggcctcagccacggctcatcggcagccaggtgtactgttgtgtaggaagtacgcaggccttgagggagtggaggggcgaaagacactgaccagagggtcccacattgtttttcaccatgttgccacattggcatgccacgtggacaaaagtgacaaatagttaagaaaccacctcttaagaacaaaaataataagtgcaaatctaagaagggcatttggacaattgccaaacctaatagtggcaaatagttaaatttcccagggatagggggagtagtgcgtgggatcaaaggggaggtggggtgtgagggcgtgaggccgtgaaggtgaggacgcgttgctatgcgatttggatgatctggatcattcgatctgacatagatgaatagaggctgttggatttgatgaataaagtatgtaacatgtaggacttcattggtgaactatagggtagatagttataactaccctataactacagacacgaccgcatatatttgtgcgacggagaggtttatataaatatacttgattcaatggctaacacccatataaaattatctaattttttacacttgaattttgtctaaaacttgttaaatagtcatctaattgtcttatgattctaaataaccgaaacttatcatcatcgggttttcaactttatagtatttaaacaccacaccagctaccaccccttactcctttgcctcccttttaatttacttaccaggggcctatcactacttctatgcatcctcattggtaacttcaaaaatcgagctataaaagatctagatgtcaatcaaatttatcacatattataccatataaatcagagcagccagaagaagctgaggtgagggagcagagagacctcctgaagatggagcaatatatggtcctgcaatccagctcaagaagaagaagtaagtgcccaaatatttcagtttctggaggagcagctggtgcttcagcacaaggaggagaaatattcaagtgcccaattccagtaagggggtgaagctacagttgcagcaagagaatcactcaaccttcacagcttcactagagccattaaacaggtaatcaagagattaaaatggaacagaaatcatatcatggcatgattgttgtgtgatgcatatgctagtatgtttaggagctgtgtgcatgcaataattatatccattaaacctgaacaataaactccattgctggcatgcaattgaatctgtgcatatactagtagtatgtgttgtgaattatatagtatatatatgcatccttgtaaaaataagtatgagcacttcagctataaccggaagaccaaaaccaggatttaaattggagcacagtatatacattcctagttcattaagcaaggaatagttttgacgagtaattgtcagcaagttagtatcattacaaaataaatagattcccagtaagataactctagtatagatcaaccatctaattacatagcaaacagcacgaggtatcttttacgtgatctaaaagtgcatttgatttaaggatttatatctatgtgtagtttcctttataaatcataagtcatcaaagaaccgcataataaatcttgagtggaagaataatggaattaattataacttgattgtttaaaatcttcggagctttatagaagttcggtgccatcactagttcagaattgtacacagtaaaacatatagaaacaatgcagttgttggtttcatcgtaaataaattaaattgagcctttagagttatggggcaatacagtaggtttttgtagcaaatcatttaatacaataaagcaaatgtttaggacagggcatcaaaataaaattataacatatagttatcagtttatcagtagttaaactcttcctttatcaaaattctaataaagtatttcataagttaacctattgttcagtaaatcatatagggtaataatcaggacataaagacagtagaaataaatcattcaaagaaatcagtcaccatctatttgtattcaagattagatttcatgggttataattctattatctatagtgcaggtttttgccatgattatcaaagtataaaaccatgtaattgttgcattattcaatataaatcttattttcaaatctgattttattactgtgtcactaatttgagaaattagataatttcaacatgcaaacatatatatgtggttctgatcattctagtgtgctactgattccggtatttcagttacttttatatgctagcatatataaggacttaatcatgttagtgtaactttttttattatcctttctaatttcatttcagtactgcacttgcatcagaattgtgagcattcatttatccattcatagcatataggcatcaaccaaataaatcactagaaccaacagagaccaccataagcacagcacaacatgaccaagttgagtattagtgctagtccataattatccccaatgcatgtcacggcacaacatcatacaagagagaacatcacaccagaacattgtcataagaatcagataaggaagggagagtttgagtggtcaccaatggggataggacgcagccgccggagttgcgcggtggttggcaccagtcatctccacggcagcagcggcaattggagaggcggggcgacggctagggttagagctaggacgagactgagagagagggaggatcaggggaagagagaaagaaagagaagaagagagggagaagcaggggagtagaggaaggaagcggtaccaggggcaggcagcaccggccatctcggcggcggcggcggcggcggcagggagtcgagcatccagggacaattggccaagggaatcagagaggagtagggctcgcaccagtagtgaaggcctggaaaccttcctagagtccatacgtcgccagagtttggccggcggcggcacctcgtgttgagcaacgggaaccgattcctggcagtagcggctgctggagggcgaccggagttggagtccggtagccggcgtgaggaagcgcggcggcgctagagcgtgacggagaggaggagaacgagagaaagaaacaaggtggactaggtgggctcttctgttaacctttgatatgtgggctgtacatggtatggtggtctgattttcgtccttgattcgatgcaacccgtgctccaacttactaaaacggtgcaaacaacatacctcagtagttttgtccccgattttatctgacatgactcttttaactaggtcttcgtccatgtggcattgacatggtgctcacgtggcaggtttgatcttaaaaaagtaaaggagcaacctcggccttcctactttatctccccatctcttcaccggatgacaaagagggagaggcggggaggccggcgaggcgccctcctctctcccgccggccgccgccgtgccgctcctctcccccgtcgccacgccacacggcgttcatctctggtgccgagctcatgcgctccatggcggacaccgacctccgcacgctggatctctctgtgtgcagcagcctctccctctccaccggcacagcgctccctccgaacgcccttttctccgcccgcagacggctgtcagatgccatccaggagaagaagcaataaaagacaaaaaaaaaagaaagaaaaagagaatgattgataatgttttcatcgtacagtacatacttcatctcatattctttttccaaattcaaaataaaataaatctgcaaatagaatatatcaatttttaaaagaatgttaaggtgtatagctctataagatatacttctttacacatttttttccaaattcaaaatataataaatttacaaatagaacacatcatttacaaagaatattagaagagtaagagaaaagaaaaaaaataaaaaaaggcagcggtgactggtgaacttcagacatacaagagctgagcaagcagcattttttctttattagaaaaaatacccgtgcgttgcaacgggtaaaaatgtttttggattgctatacaatgtactctttggttttgtgttaaaaactcattttcttccttccttttcagtctcggcctagcccactacccctctacttagcctgtgtcgaaacaagatttcggcaataataaaaggggtggctatcaagctagaaaagtggatgggtttggagacaaagaattttatacaggttcaggccttcttattcaagaagtaataccctactcctgtccggggatgattccgccgtgtgtgttattgattgtataaactgggaaaaagaatcgtgccccgagaggcacacggaccctccttatataggggaaggagtccgctttacatagtacagtccatatccctaacggaatatgtaattacaaataaaatacaatcgtaaccgactaagatctcaggtatttccttgacatacaagttaaaaactaacccgagtcctcataaagatattatatctatatttggtaccgtatatccgattaaattataactgtcatgtagatatggggtatccataatctccacagtagcccccgagacctttgcagtcgacgaaatagccatctcagaacaaaaaacaataatccgagtgcttcaattcaacctgctccagcctgccgagtgctaaaatcaaagactgtgaagggcgaaaataaaacatggtgcatcgagtagatgcacctaattaggtgtagcccccgactatgtggttagttgaaaaactaaacatgtagtcaagaaccaagtggttttatagcgaagcacgccgcgtggtagtcagtaaaatacccagccgactgcttctcaacttgaacatatcaaggataaaaaatacaaaaagggccgagtgataaacactcaaaaggtccaaaaatagacatatttgataggaatccgagtaagaaactcttaaaatgatccaccaagcatgataaaaggaatcatggtaattcacgagtttaatagcctaggctatgactcttaccataaccaagataagcatataacatgctaaaagaatgactattaataaaccagtcatcttaaatcgacccaaacagcttttgcagcctaagaaagcttacaaaaacggtataacacctttctgtcgggcacctttttatgtgcatcataataattccaaagaattattgaatcgcgttaaaaaggattttagcagcatcgagccacatcattgtgaggacaaattgccaaagcaaaaagcgcctaagtccctagggatcacaacgggccacgctgattataatattgggctgaagtactgtacaggcctaggcccattagtactcccgataccctaacaaagcaccaaagtccaagcgtcgcttcgtcttccccgccgagactctcgacatttccccactcctcgctacagtagcaaaccgcaccgtcggagctagggttcatcgatctgctccaatccatcctcaaaaacttcacgaaatttctccccgcgtccactgctccgattcctcatccttttccagccatatctcggaccaaattaaaccatccagttcacattcatggcggaagaaagagaaagcttcgagagtcagtgggcgccctccgatgtgacggaagataatctgaaggagatggtggcacacggcgttcttccgacgaaggagatcatcgggtggcgaccggcattcggcgaagcattcccaacccccaatacgcatgaaatcgtggtatttgctcatttcttctgtggcggtttctcccttctaacctcaagatttttccggggaattctaaatttctatggaatcaacttgcatcatctgaatccaaactccatagtgcatattgccaattttattcatgcctgcgaagcttttctgggcattaggcctcattttgccttgttccgccgcatcttcttcctcaagccccagccaaacaagagcaaaccatgtgttgttgggggggctggtttccaactcaggggaaccttaagccaaaaatacttctctatgcctttcaaaacctcaaacaaaggctggcacacaaattggttttatgttcaaaaccctgagcctgctctccccgagtactcctgtcttcctacagtttatcgggatacttggaactcactgccaatgggagatgaagctgcgcaagcagtggaactgatggagaggatgataaagctaaaagaacaaggccttcaaggagaacagatcacccagcactttatcaagtgtcggttagctccaatcaaagagagatctcgcacagcctttgagtttgacggcaaacatgacccaaatcgtgaagatcctgactctcttgacttcaaggtcatgaaggaaaagatgtataagatcttctcaaatgctatcgttgtcagctattcacacttgctgccagtcgtaccgttcaatgcattcaatcctcctccaccggtatgtattcaaacgttccaaccttccacaaaatacggtcttatctgtttgttgaatcagttaacaataaaggatatcacgcccaggaatttgctttgatgaagtcggatcccccaatcgctcaacaccaatcacctcgccgccaaactggtcagggaagaggaggaccaaaaattcggtctgaaacccaaccaagtgcttctgatccaatcggccagtcagattctcgcaagaggaagctagttttaagtgacgacgaaggcgatgataccggaaagctcagagataaaggagcgaccggaagacctccgaagccaactaatctgaagaagaaaacctccagtcgtcctgtaccaaaaattagaaagtcttccaggtacaaatcatataacaaccttccttgtattaatattctctcatcatgaaaataacaccgatagcaaaacttgtaggaaaccatccgacatagatccttctaagaaagactctgacccgactaatatggaagcagattcctcaaaagaaaccgagccgactgcaaaagatcacccgagtgataatccgcaggccagcgacaatgtaaaacccagcaacgaacccacgaccgcaagccagtcggccgaagctggagtcggagttaaccaggagcccccgactggaaaccagtcggatgcagggccaagccaaaaaattcccgaggttgaagctcaaacaaacagtcctcccggaaaggatgctggcaatgactcagaaaccagatctcccgtgaagacacaagagtccactcgtccccgaccgggaatcatcataggtaaacacactatctgaaatcatttcgatccaacagactttatttgatcgcctcatctttattcatggatacactagggccaatgattggtgatgaagaagagatcctccggatacaagcagctgaggattcgcgccctcccatcctggtcaagtggtgggatgacaacatgcagcctcaaggaattgtaataaataagcaaaaagaagatgaagaagtatgcttgctgaaaaaggcgatcagccaagccacccgcattgtaaatgtaagctctttggcgcctgatctcaaccatctcgtttgccatttagtccaggcgctaattaaactgtcttgcagaggattcatcttaggaacgaagctaaaacggcaaccttagagaggttagtccctcatctcgggaccctcgaagcctccaggaatcagctgcaggagacaaaagagcttgccaggaagaatgaacatgatctgagggatcggattgctgagctccaggaatccaattttgaactgagcggctcatcaaaaggtacacacaaactctgcccaactaacttatgttgttatctttgtaatcttgattaaccagagtcaatgtagtgcaagctgccaagatatctcaactggagaagcagattcaaactctggaaaatgataaggcagaactggcaagacagagggactcagctttaaaggaggttgaaggtaccaataatcaatacctcaaaagccattatcttctatatgctgattcgttaatgtgaatctgttgatgcagaccgcaagatcaagtcccaggcacagtttgatgtcttagttgacaagatcaataggcttgaaggggccagggataaagtcactaatgctgctactccactcatccaagccatgttcttcaataacgccggtccgagtacacttgatgctgccgaaatcttcaacaagctgagagtcgctccggatacttacttcaagaacatcaaagaagctggaagtatgggagcaagtctggcgttggcgatgaccaaatccctttatccaagagttgacattgatgccattgatggctttgcaaacgggacgagcgaagaagctgctcttgacctcatcaatgatgcgataaaagccgctgacaagattgctgctgacgtggttgagagattccaagatgtcgaccttcggccgactgggtctgataattctgatgatgaaaaaactgatactgattgatataacaatgattttgatgattaatgatgatggaggtttaatttgtacaatactgatgaatttatgctatgcttggtgttccatacttagcttctgatttcttaaaagcctttgtcaagccttattgagcctaaaacccgcaaaaactattaaaaaccttcagtcctcattgactaagtcgaaagaccaagcaggacaatgataaatcaagtaagcaaattgaattgataaaaatcacactccattattatcatggtagccccccaactgaaaacttcaaggaaaagcttgaagttagcagtcaaagaggaaagatacaaacgaaatgcctaagcataaaatcgacgaaggtgttcaatattccaagaattgttgataagagtaccatcttcgcgctttagtcgataagaacctggccgagtgacttcagcaattatgaacggtccttcccacaagggagataatttatgccgatcctgtgtggtttgaattttcctcagaaccaggtcgccgactaaaaaggctcgcgatcgaacattccgattatgataacggtgcaacccttgcaaataccgagtcgactgaattaaagctgcttcacgggcttcttctagtcgattgatgtcgtctactcggccctcttcatagcgctcctcgttgaagttctgaaatcgtagtgattcaaattccacttcactcggcaacattgcttctacaccataaaccaaaaagaacggtgactggccggtagcccgactgggagtagtgcgtaaagaccaaagtacggacggcagctgatctacccacttgccagcatagggacgtagtcggttgaaaactcgtgcttttatcccttgaagtaccatgccattggcgcgctcaacttgtccattactcatggggtgtgccacggaggcataacaaattttaatgccgaagtcttcacaaaagtctttaaatgctccgccagtgaattgagtgccattatcggtgatgatccgattaggtaccccaaaccgatgcacaatgttaatgaaaaaatctctagctttatctgctgtgatcgtgatgaccggtttagcctcaatccacttggagaatttgtcgatagccacaaagatatgcgtgtaactgccgactgcccttttaaacgggccgaccatatcaagcccccagaccgcaaacggccaggacaacgggatggtttgcaactcttgggctggcagatgaatttgtctggcaaaaaattgacaaccttcgcatgtccgcacaatcttgtcagcatcagacacagctgtaggccagaaaaaaccttgccggtaagctttgccgacaatggtccgtgcagcagcatgattaccacaaataccagaatgtatatccttcaacaattgtctcccttcttccaaagacacacagtgctgcagtattcctgatggacttttcttgtacagctcagtctcatgaataatgtaaagtctgctgcgcttggaaatccgctcggcttcatttttgtcctgagggagttcttgtttggtcaaaaattttatgagaggttctctccagtcggctttaattatgcttacgcctcgggtattcgtggcttcaattgcttcttttctgggcacggttggttcataaagatgctcgacgaacacatcagaaggggctgcttcccgttttgaaccaaaattggccagtctgtcggctgcctcattgttatgtcggaggacatgggtgagctcaagtccatcgaatttatcttccaacttgcgcacctcttgtcgataagcagtcatattatcatctagacaagaccactctttcatgacttgattaacaaccaactgagagtctccacggacgattagtcggcgaatgcctagagagattgcaatccttaatccatggagtagcgcctcgtattccgccacgttatgggacgcagaaaaatgcatccacaatacgtagctcagtctttctccagtcgggaaaattaagacgaccccagctctagtgcctgtaagcttctttgacccatcaaaatgcatagtccaatattccatcttttcctctggcatgtcttcttgacactcggtccactcggcaaggaaatcagctaaagcttgtgacttgatcgaagttcgtggcttgaacgatatgtccaaagacatcaattctaaggcccacttcgcgatccgtccgtttgcctcgcggttatgaagtatatccccgagtggaaacgatgtgaccaccgtgaccgagtgactttgaaagtagtgagataatttcctgacggtaattaagacaccatataataacttttgaacctgaggatatctcgtcttggagtaggccaaaacctcgcttacgaagtagattggtcgttggactttttgaacatggccttcctcttcacgttcgacaaccaggaccgtgctcacaaccttagaggttgccgacacgtataacagcagcggttcttgcggatgtggcgaggccaaaactggtggagtagtgagaagtttcttgaagtcttcaaaggctttttgtgcttcgggaccccactggaaattgtcagtcttcttcagcagcttgaaaaagggcatcccccgctcgccgagtcgtgaaacggaccgactgagcgccgccatgcaaccagtcagcttttggacgtctttgtgggagcttggtggtttcatgttgaggatggcgttgattttctccgggttggcctgtatgcctctttgagataccataaatccgagcaacttccctgacggtactccgaagatgcacttttcagggtttagtttcatcctgaaagcacgaatgcttgcaaaagtttcttctaaatccgtgatcaggtcatccttctgcttggtcttgacgactacatcatcaacataagcttcaacgttgcgaccgatctgagttgaaaaacatctttgaatcatgcattgataggttgctcctgcgttcttcaatccaaagggcatggtgatgtagcagtaggccccaaagggcgttatgaacgaggtcttcaagcagtcggattctttcagtcggatctgatgatatcccaaatagcagtctaaaaaactgagtagctcgcagccggccgttgagtcaaccacctggtcaatgcgaggtaacccgaaaggatctttagggcaagacttgttgaggtcggtgtaatcgacacacatgcgccattgtccggtcttcttccgaaccagaactgggttagccagccagtcgggatgaaggacttccttgatgaagcccgctgctaatagcttggttaattcctccttgatcgcgtccctcctgtcctgtgcaaaacggcggagttgttgcttgatgggtttggcgtcttccttaacatgtaaagagtgctcaatcacctctctaggaatacccggcatatcggatggtttccatgcaaagatatctttattattttgaagaaaggtgatgagcgcgctttcctatttacaatctaactcagcgcctattacagcagtcttatcaggatcggagggatctaagggaatctttttcgtcttagcatcgctttcttcggtcttcgtcagcttggttgcaggcacttctccctcgcttgccgtggtcgcagccagtcagatctcttcgcgagcaagagtgatctcgtgggtttgggccatctcgcaactttctttgtcacatgtgacggcttgcttgatgtcgctccatagtgatatgacccctcgaggaccaggcatcttcatcatcatgtaggtgtagtgtgggacggccatgaatttggctagagccagtcatccgagtatagcatggtatgctgtctcgaaatcaacaacttcgaaacaaacgttttctgtgcgaaaattctcccgagtgccgaaggtaaccggaagagtgatctggccgagtggtgtggctgataatcctgggataacaccgtggaagggtgcattacttggctttaattccgtgcgaggaatctgcatatcgtccagggtcttagcgaaaaggatgttgaatgcactgccaccatcgatgagagttcttcggagcttgatattgcgaaccactgggtctagtaccagggggtaccgccccaggtggaccactcggtcgggatgatccgagcggtcgaacttgattgctatctctgaccaccgaaggtattggggcgtgttgggctgaaccgcattgatctcacgttctgttaacttctgctttctcttagactcataagccagaggtccgccgaagatgtgattgagttctttgcgatggtcttgaaaaccagtcggggcatcgtcttcatcatctttcttctttgatgtgccttgatctccgtctgagggcttacgtgcattcttgacgtattgctccgcaaattgtttgtagatgaagcagtctttggccacgtggttggagttgggatgatgcggacattgggagttcattatcttgtcgaatgtgttgacgcgggaacgttgtcgggaagacggagaggttgtcaccacaagttcttcgggcttacgcttgcgatctttgtggttgttacttccactccctcctgcggtcggcgtatccttctttggcttccaagtggtgcccgactgcttggacgccgtgatagcatcttcggctttggcatactcattggctttttcaaacatctgcttgaccgtcttgggaggtttgcgtccgaacttgccgactaggtcctcgtggcgaatgcctttagtaaaggaggcaatgatgacgtcgtcggtgatgtcggagatcttgttgcgttgctcagagaagcgtcgaatgtaatctcgaagagactctccagacttctgaatgatgttgtagagatcgaagtgtgtaccaggccgttcaaaagtgccttggaagttggctatgaagtggtcgcgtagctctgcccatgatccgatcgtgccgcggggtagctcgtggagccatgaccgggcagaatccgctagggccacaggtagataattcgccatggctttgctgtctcctcctgctgcgctgattgcgagaccatagacggtgagccaagactgagggttggtggtgccgtcatatttctcgattccagtcggcttaaagccagctggccaatccactcgatgcaaatcacttgtgaaggcagcaactccgtccacatcgtcgtcgtagcgatccggtgaatgatggcctcttgctgcgcggtgctggttgatggtgtcgcgaagatcgatggggcgccttcgatgtggggagtatggtcgttcaactcgacgctccctatatcgttcgggaggcgaacgaacagaccgttcatcatgtcccctgcttctgcgactagatccggcgccggcaatgctgaggcttggctggtgatagtcttgagatcgaagatgagggactcggctaccaatcggggtgcaggtgcttgcggagttggctgggaccgaggcagcgattatagtcttcgtctggttcaagattttgacaacatgatcagcttggttaagtgcgtcttccttgaggagggtgtcgaggagagtgattgctgcaaccgcgttctgctgggggtgcgaaagaccgctgttccatcgatgtcttgttgctcaatgagctctctcgctcgtcgccctgattccaaggcgcgttgccgtcgatcttcagcctcctttgcaatccgttcgcgatcttgttgctcacgctgtagtcgttctcgcccctgtcactgtcgctcttcctccagtcggcgacgttcagcttcttgccgtgcgcaatcttggtccgcttctcgggctcggcgctgttcctccgtttcgttgtcagccatgaatacgccgaagaagaggggcgtgtagttatcctcgaagctgtcgtcgaagttgtcgaggtcgctgtggtcgtagtggtagccgaagtcatcgtagttgaggacctcggttggttgagaaccgacgccgggggagctgaggtagccatccaactcttctgtcgagactgtcctaagaggttggagtataacgccaacctccctggatctagattggatcggggccgaagccggagctcgcctagatcttcgagtgggagatgtcttggctgtgaagacagcagccaaatcatcaggaagtttcatcaggattgagggataggacccgtcgtcttgatctggtcgcggtggagtagattgggtctcgtccgagtggtttgaagccgactcgggagagatgatcttggagtacgcctcggccgagttcggaataccgaacggtgcggggacctgatctcttcccgactggttcgaatccaagtcaaggagagagatcttgccgaagtcgttggtgatgaagttgaggctgccgaaccggaacgcctgcctgggaggaaggcgaagtcgtcgatgccggagacagaacccatcgcacttagtcggcaaaaacttgacgctacccctacctggcgcgccaactgtcgaaacaagatttcggcaataataaaagggggtggctatcaagctaggaaagtggatgggtttggagacaaagaattttatacaggttcaggccttcttattcaagaagtaataccctactcctgtccggggatgattccgccgagtgtgttattaattgtataaactgggaaaaagaatcgtgccccgagaggcacacggaccctccttatataggggaaggagtccgctttacaaagtacagtccatatccctaacggaatatgtaattacaaataaaatacaatcgtaaccgactaagatctcaggtatttccttgacatacaagttaaaaactaacccgagtcctcataaagatattctatatatatttggtaccgtatatccgactaaattataactgtcatgtagatatggggtatccataatctccacagcctgcttctctttaacctagcacaaaaatagaactataggcctaacttgcacagtcggctgccatcttcaacctccggaagacagtcccgtgtagtactatgccagaaccgatcctcccattaaatccggtcaaatttttctcgatctctcaaaattggttgagggcttttgattcactcaatctcctcttttcatttttattaaaattggagtgaatccacaaaactgtgggatataaacggtgacttttaaatagatattgaatctggtgaattaaagcggaactgaaaagataaattatatggaaaatgatgatggagtagtggagaattgatttttacaatagattggaggagaaaaagcgtgaggaggttgatagatgtggcggtggtggcatagtgctagggttcagcccgacgacggaaaaaaccgagtagattaaaaaaagaattttaaccatgtgcgcacacccttcagcttgcaaaagaatacgaataaaaaatagggacgaaaaaaatgaataaaaggaaaaagacgatggcaaaataaccggaaagaacattgaaaaaaaagccggatggaagaaaaaagagaagtggaaaaaaaaagctggataaaagagacggacaaataccaatcggtttctccgcacgactattttttttttttggagtcggcgatttttttattttttaggtcgacctttttgttttttactcaacattttttgccactttttttgtttccggtacgaatcggacttttttttccatgtttttctttcgcgttttttgtgcgcgttttcttttcccgcctgagtttttcgcctttttaaaattatggatttggaggagtagagattaaaaccgaaataaaaaaattaaaaccgacttaaacacgaatgacttatgaaggtaccaacaaaaatattttaaatttttataataactagaaaatatgcccgtgttgcaacgggtgaatgttattttaatgttactattgatatacggttcagatagaatgaaattcaccgtgggaatttgtttggatattttttttagaaaatcatgagttcaactttcatctcaaattagcatgtaagtttttttttaaagaaatttcttatacaattttttttgtatttccaaaagcaaacggacttaaaatccgactcaaacatggacctgtatttaaaaaaaagacttaaaaaccgactcaaataaggatgacgtaccaaaatactggcaaaaatatcttcaatttttataatagtagagatagagaagacaaataagttttgtagaatgatgggtctgtttgttaccaaataaaatttttcacgctgtcacatcaaatatttaaacatatgcatatagtattaaatgtagaaaaaaaatcaattacacaatttgccaagaaattgcgagacaaattttttaagcctaattacaccatgattagacaacgtagtgttacattaaacatttgctaatgacgaattaattaggttcaataaatttatctcgcagtttcctgacgaaatctgtaattttgtttttattattacactacatttaatacttggagtgtatgtcaaatatccgggggaaattgttttttccaactaaacaaaccctttgtgaaaatttcggggcaatgcgggggtgaccttgtggttggggtggggagcattggaagcggcggcggtgaccccatccatcccggacgacgacggcgccgatccctcccggcctcctccccgtcagccgccaccaagatttggatccgagtctcgcgaggaggggaaccaagccggattagtagtaggagtagtatatttcttcttcttatagatatggacggactgggacggggttgagcagcaaagcaatggacacagcaggcgccgccgcccaccaccgcaggtagcttgaccttctccccttccgaatcctctcttagatttgtaggaaatctcaaacctaccgtttcctctgaaattaacagcgacataatcttcttcttcttttaccgtttcccctgaaattaacagcgacataatcttcttcttcttcttttactcaagtttctggtggcacctgcattattacgtcattgcaaaagctgcttcttctggataacagtcaccctcttctctaatgaaaatttagaatactttttgcttggatggctggcgagaatttatcttaccatctgtcatgactaaataacaagtgggattgtaactagactatactggtgtttatcaccactaatgccagtgtttgaactcattctcaggaaaattattttattctcattttgtccaagacaaattttgttcacttcattgaacgcatgcatattctagttgtaaacttgggaacgttctagttttcactcagataggaattaggagctatttatccttttcttttcactgtcctttgataacaagttaacaacccatagatcatcccttaccttttcctcattttttttccctgtttggttacaaatgaacagaaatactaactgcgatagcgaactcttaccattgcacttcagctgttcagtgtttacgtaataagtttaagaattatattgataacatctaatctctggaatgcatcatctccaaagattcatagctagacaacttattgtttattatcattgctaaaggaatttcttgcactcttgcatatgcgccatcctgaaccattgctcattgtttctagtcttcataggtagtagcatgccagccagaagagcacacatggaggatgggatctgtccagtaaacaaaaggaggagattggcgctcagcccatgtgctgaagtatataacagcaagcggataagatcacaatgggttgattttcaatctctccctgaggtatgtacgttaaacttaggatcaactctactaaatgtgctttagggactgcctgatgttttgtccacactcatcaccaggacattctgtcaaggataatgtcaaaactaacattgaagcaagctgttcagatgagcatggtatcgagtgtgttcagaagagcttggattttccatcctgatcttctttttggcactgaagaattgtttggaacttctgatcgacagttgagagcgctgagcaccaatgggtttattgacacaatcaattttatcttgaggaaacacagtggtctaggagtgagtgattttggtgtgaagtttgagctgtggaaggagcatgcacgtgacattgatggatgggtttcctttgctattgcatcgaaagcaagggttctcgtcctgaacttttctccatatataggattgcgagaaaacagttacagctttccatgtcatcttttcaatgacagaaatggatcccactttaaggttcttcaacttgatactgttacttttggcccaactcctgacttttgtggctttgctaatcttacaatgcttactttgaagcatgtgcttgtattggacaacttccagtacttcttaccgaaatgccctgccctagaatggttggaaatcctaatgtgctcccagctacataatttgcatgtttctgaaccattgccgcggctggaatttttgcgtgtacaaggttgtgcgattaacaagattgagctccatgcccccaaactcaccacatttgagtatagaggttgttttaaagtgattattgcacttcacaaatgcttgaagcttaagactgcaagcattgcgtctcatattgaggacaaccttgagtatgttttcactgggcttccaaatggattacctcatgttgagagactacatgtgaaagtgtttgtgaggactcaggtaccttaatcccaatgcataccctccaaaatcttcaatcaagtatgtgtgtgggtgtgtgtgtgtgtgtatttgtttcagaatttccttggcgtctttcagatacctggatttacacagccccctcttaaatttatcaatttaaggcatctgatcatgaggataacctttggaagtgctaaacgttttggaaaaaacgcagttctgcagctagcatatcttttggaagctgctcctttgttagtggaccttcatttggatgtgagttattatgccatctgcaccttcatcctgtttgtagttttaaatactctgtaatctcatttttatacttaactcctgtctaatgtgcccacacttgctttatatgtctatttaattttaagtattgccttgagtcaaaattttgatactggaactgtgggggcaggccagcctattagaccacataaatctcaaagtggccatgagctgaaacacagcaacataatactactagctagtatgcgactattggcacaaaacacataataattcatactctatactattctaaaagagggcaatgccggtggtagtgaatttaccacccaccaactctattatatattgttgtactttaatattaatattacaaaatagccctatatattggttctatcttatttcaaatctaaaataaaatttcttccaaacaatattatcatgcggatataattcatatttattttagctagttatcttgaattccattgaaggtttgtacaagatatgtacttaaatcaataacaatccatagttttaccttgttgagtatcttgattgtgaagtggctttaaggagcaatcttgcttggtagttaattatagagtaaatttcagaagactgcacttttattgactaaactatcactttgctgcaacctttgcgacacttttcaaaaaactgcaacattagcattgaaaattatcacatagctgcatttttttcaggattccctgtaactgacattccgggcccacatgtcatacatatatgctcgagagagggaggaacggagcggcacgtcagcatgccacctcatggctttttttactggagcgatgccatgtcagtgcgtgttcgggcggaaaaaatcgaggtccagctgcaccatttggctcggtcaagggcacaggcc

SEQ ID NO: 29878 - DNA, 758 bp, Oryza sativa
atcattgcccctagtgtcgtgaggttgggcatttggtgaatgattgccccggtggtaagcctcctaagacatgcatgtttgattctcattatatgcttaggaaggctcatgatggtagcattgttcctagatatgtgggttcccctatactcggtggtaaaaagaatgacatttgggtgcccaaagctttggtctctaacctccaaggacccaaataagtttgggtacctaaaagagcttgatcttcttttgtaggtgaactaccacaccggtgggagccattgggtgcttgatagtggatgcactcaacacatgaccggtgatagggctatgttcaccacatttgaggtaggaaggaatgaacaagagaaagtgacatttggagacaatagcaaaggaaaggtaattgggttaggtaaaattgctatctccaatgatttgtcaattgataatgtctctcttgttaaatctctaaatttcaatttgctttcggttgctcaaatttgtgatcttagcttgtcatgtgctttcttcccgcaagaagttattgtttctagccttcttgacaagtcttgtgtgttcaaaggttttagatatggaaatctttatttggttgatttcaattctagtgaagcaaatttgaaaacttgtttagttgcaaaaacttctttgggttggctttggcatagaaggctagcccatgttggcatgaatcaattgagcaaattttcaaaacgtgatctagttatgggcttgaa

SEQ ID NO: 29879 - DNA, 18205 bp, Oryza sativa
  unsure (1)..(18205): unsure at all n locations
gtgacaggtgagactcctctttgcaagcaatcatcaccacctcattcatcaatgccaagacaaatagaatcccatttagacaaaccatgatgcggacatcactaactcggatacacacaacaatcctccaacggtcattcaaggaccgataacaagagctcgtgcgcgacaattaaatttagaggtgagctcgttcctatgttcttctttgtatgaattcgagaatagattgctacctaatgattatattgtgattaggaataatggaggggacaaggagacacttggagaaggacttagagccatggaggatcatcgaggacgtccaagtcaaggtggaggcccaaaccaagtcgacgtcgggtgcaattcagagtccaggaccagtctgcactaaaacgggcgcccaggtcgcatacgtgctcggattggggcgttctttatatgtatggaaagctaagaagataacctttccaatggttttggtcccacatccaaattttttccgagtcaatgggaattgaccgaacaagttgacgtccagaatttattccggtgctgcatcaccgtatttgggcctttggcccgtgtatcgtgttggaaaccattagagttgcgtcgagagggggttgcatgaccctaaactctatatatcagtacccgccgccatctttaggtttttgggttttgcttagattaatctgtcgagaacagtttcgccgctagatcggtttgtaagaccccaactcgtgagcttaatcattcatctgcaattttgggtggtttctatctcgttcttgtttgtgttcttcgattggcaaatagggattagccttctcagcgaggtcatccgtgtctcgatacgggtgataaccagaggagacgtggtgctgcgattgcggggctcaagagcgtgcgcgttcaagaagccggatcgatttgtgtcgcgactccgcccaaatcgttgtttatcagaacctttcggaagatcgggaactcagtgcacatcaaaccaaccctaacctaggtcattggactggcacctttaagtcttggcttgctaactgtgggaaactttttctggtagataaaaataaataaaagaacctattgagaccacacccttcgtctcacaaaaaatcaagcacatctccaaaactagtctagattcatcgctagaatttttttcttctggaacgaagagatgttatagtggcatacaacttcttcatccttcctacttctttctctcacccatctctttccctcacctctctctccaacagggcggggagcgcgatggtcgagctagccatctccaccctgcgacccccggacgaccccattggtcccagtcggtgcttcatggttgagttgtcatccttgccttgtggcccacatggctgagctcgacgtcttcaccccgtagaacccgacggccccatcaatctcatcggccttcgtcgttgtctggccctttcatgggacagatgcagtggaggctgttgggcggtttgcgggaatgaccccttccaatctagtggcacgatgacgagtagcaatagcagctacgcgatgctatgcctcagggcgtttcggcctaccagagacaaggtggtgaagatccaattccaccccacgcacccctggctcgtcgccgccaacgccaatgaccacgttttcgtttaggactggcggtctggcgccatttctctctaagtcactgtctcacatgaacccactaatacgtgggtctcactattgtcttcttgtttgactgacgtatgagcccacatattttttttagtttttaagtttgctcttttttttggatcaaactgccatgtaagtgtcacgtcaatgccacgtgagacgaagacctagtcaaataagccacacatgcgctatatcaatcaaaatactgccgcgggatcttgtttgcactggttttgtataagtcggggacgaattgtgtctggtttttcagtttaaagacgacaatcggattgatcgtcaaattaagggacatcaaatgaacttattttcgcagagaaaaatacggcccagcccaacaggacctcctcttaccaagcggccacactcccgaccaatctacaccatccgtccccaatccaacggcgacgcaaccgacaccacccccgcggacgcggccgccggtcgcctggtccgttcgagccgcctncagcctataaaaaccccggctccctctcccctcccccctccccttcccccccaaggctactcgcctagcgcccgccacctaggccggggcctcatcccccccaccttttctgctcctctccccaataaaattccccgcacgaatcgatccccccctcggatccggatcgcctcgcccaccccctttccgccgctcgtcgatcgcgatttttttttcttcgccggatttttttttctcccgatcggtggggagggctctctctctctctctctctctctcttcaccctagggttagggggagcgccgccgcatttcggtccgccgccgccgccggagtcgaggagctagggttttcgtcggtcgggggggggaaaaaggtggggggttgagattgatggaaaagaagaaggtggcggtgccgctggtgtgccacggccactcgcgcccggtcgtcgacctgttctacagccccgtcacgcccgacgggtacttcctcatcagcgccagtaagggtaagtgagcggcgatccgaccgcccgaccgcgatttgatgccgttttttttatggttttcctgctgcgattcgtctggatcgggggcggtgtgatctgatgccgccgcttttttagcgcgtggttctaatgtttgtgtgtattttttatatttttctgcggaggctatgttaatcgtgtgattttttaccgtgaaattgtggctacttttgtggagttcatgtctcgtgtattaatctagtttatgccgctgatcactgatgcagtttgggcatgattgctgtatgttgcgttgctagtcttctaatgcactatcttagtcatgatgaaatgtgttggttctatattattatttgttaatacgtgatcgtatgagtttattgtttgatatgtaatggtaggatatttgagcgtggttgtcaatggagtgtaccacaatgttactctttaacatacctagtgctgcatgttgcaatctagccggggtatgctatatttggacagccattttttctggttttaactcatatacgatgtgtgccaataagttgaggtgcgagaatgtttaacaatattggtagtcactcggtatgtgaccagagttttacaaggttgtaaattgggatagacggctgcctaggcaagtttactttgagcatgtgctatttggataggtggtgtctggccacaatatacttcctctgtcccaaaatgtagctacctagtgcagtacctagtccagattcgtagtacaagataacgtcatatcctgtactaggtagctacattttgggacggaggaagtaagtacatgttttaaacattgatcgtaacagtatagcaacatcttgccttctgtggtgcaatgttttatttaagacatctattcttagactggaagtgagctgtcaattctgaagaattaggcaggaccacctacttcattgatatttgtatgttgaactgaatcaaatatgccacagatcgttgatgcagtttgggcatgattgatgtaggttgccttgctagttttctaatgcgctgtcgtggtcatgcaatgtgttgattctgtgttgtttgttagtttggtcggaagtaggatgacagctgcactacatgatcacatgactttatcgttttatgtgtaatgggcaggatatttgttcaaaaaggagctagtcgatcggttgagtggcgcctagcaggtgcctaggtcagaccaaatagtcaaatccaagaaattagcaagcatattaaataaaaactagacttcattacactaaaatagcaacaaaataccacccaaggtagttcagctgcctaatgcaccatctaatgcctcattgccgtggctatcagaacactgcatggttgtggatagtgggtctggtgtacctcaatgacactctttaacatagctagtgctgcatgttgcaatatagctgggatatactataatgagtgggttgtatttagaggacagagccatttttctgaagtttcaatccatatatggcgggtgccaatatgttgaggtgatagaatgtgtaacaatatcggcagtcactcagtacgtagccagtgttctagaaggttgtgactagagctaagtcactgagtaagttgtggtagatggctgcctgggcaagtttactttgagcatgtgctattttgaagggtgatgtctagccacaatctaagcaatcatctttaaacattgataacagtataacaacatcttgccttctattgtgcaatgtttaatttcaggcctttattcttagactggaagtgagctgccaattctgaagaattaggcaggatcacctactttattgatattctttcaggaagtagttctttttgggggttaagataaggttatttatttgtttttcagacaatggaagaatgacattcggtctctacacctgaaggtgtacacagctgtgtcatgatgaagttttgcgacaatcgaccttattgatctataaaaaacacgacagttaaagcatccaattgattcaaagccaattaagctaccatccataactccatgatttgctccaaacatttgctcactgcaatggacactaattagtgctctttgcgttgaagtagagaccagaatcacaaccagttggagcacatgaaattactgtataggattaacatttttctttttgttaaatgcaatgtcattaggacaaagccaaatagaccaaaaaagggaggctatatagacaaattgattgtaacgtgcgaggtcatttaatgaatctgcaaataagtaaaccttatcggttatatactttgggcatcatgtgcccagggttttgagcaaatctaacatggttgggtattagcaaaacaagtggtagtatgaggacccatcatttttgtcataatagcatttttggctcattattgatatcgcttattattagcagggagttgcatatgcctagtgcatatggctgattagttggactaggcgacaacctagacatgctaagcattgactaggcagctagattctatgtagaatggtgatgcataggcacaaccacttttcgaatgatgcttgtaactataaagcaatgtacgagctatattgttcaaccctatgtgttggaagctagctgccctttttggccacaaacacctacttcatttatatttcctatgttggtaacactgtttccgggttgcttggacatatgtagaaggtagttaatgctttgttggagtggtagttaatatagtttgattaaggaggagatccttgtaaaagctgcatatttgtatccatgattcgaaacaagacaggaaactagcgtgtgttctgtcatagctgttgccttgttgccatttcatttttggagggttaggtttaattcatgtttattagtatatggaattacataattgcattatatgctctaggttttcctccatgggataatatgtatagcaagcgccaaccattcaatgctttaaatacggcataacaatcagctgctaataccttctttttgatacaagtcttagtgttgagctttggcatgatgactaatgtagtaactaaatgactttagttttacttgagaacttagtgcaaaatgctaacatttgagaagagcaccataccctgtcatagggtttgtgcgaactttgattagtattacttttggtctgaactacactgacttcactttgcaatgcattgtagaaatctaattgttttttagattgatgtttattatacaaaaactaatttgggtataaatctaattgttttttagattgatgtttattatacaaacactaatttggtaatattgtatgttttgatcttagatgggaatccaatgcttcgtaatggtgagactggagattggattgggactttccaaggtcataaaggggctgtctggagctgctgcctagacacaaatgctctgcgtgctgcatctggttctgctgacttttcagcgtatgacattcaccctatgaaatttcagtggtgtctattttaattatttatctttgacaaaaatggaatgtgcatgcattcagtgtatttatatttttattacaattttttttcatccagacgtgctacttgcaggtgtaattataatatattatagttcagttctgaatgttcatggtatctagtgtatttcttttttgcctttggaaaagaatccatcaaaaacttcagatgatgtaatatttgttcaaagcttgatttttacttaattttctctagatgagaagaaaaatgattgttatggatctagtcattaataacacatattcttaaactcgtaataaacatataagcatagtttagctttagcatagcactgttcgccttgcagaaattactgaggataaaaactgaatttgttatttctgctttcttccaaatcttgtgtttctgcgtaccattttgattcttttttgcagcatggagaattggatcttaagtatgtttcaaaatgaatataaatatcagcactgagagttctccaaagtgctttagacttgcttattttgtgttctctgctcttgattacattcatgaaataccaaaacataatggattgattactcaacataaaggttatgtggaaccaaaggaaatctgcatctcatatactccctccaaaagtctaagacattattttattttctggtttttccaaatgagttgggcatatttgtagtctctatgtactaaattaaattgttgacctgaacccaagcagccatcttaatactcattggttgcatgcattcatctagttccttggttttgtcacatggggtggatgagttaattcctccttggtcttggtgacaaaaaaaatatgccttagacttttggatagagggagtaatataaaacaatatgccattaatttgtgcctaaaagagtagaggatgcttgaagctcaattttggcatgaagatttgcatagtaaaacaattttgtaattttagcacatggcttacagattagtatgttgaggagtttggaattatggagaatttatggtgtatcctgaagttggtggttgtgcataaattagttatgaatgattgaacgtaaggtacacccataagtcatctcgtgaatgtgatctacagtaggatgctgttttgcaattctaagttgcaacatttagaattctaagttgtgatctacagcataatatatgttggttttgaggccttgcaacacaaataaataacagattgttgctgctcaactaatattctagtccttgagttagtacttacgagttatgtccattacaagtttattttgctcttataatagatgtatgttgatttttttccagcaaagtttgggatgcactaacaggtgatgagctacattcatttgaacacaagcacattgtccgtgcatgcgcgttttctgaggtaatgcttccagaatgttttaatcatcagtgctagctttgtggattttctctttctaccctatagaaagtgtatgctgtccttcttttctttgaatatttttccagacactctggactgttaaactaaggtctggtggccttatgcctgtgcacagatcatggactgtcttaatgaaaatgtatataccaaccttctgatatcagtatttaatcacttgctatgaaccaagtatttaatcacttacaattaactaagtgtatatcagtatatccatgtaactgttatagcttcttgctaccttatctgcagtatgttgcagcatttaatttcaaaataatgctgtcctttgtgagcagtttgaaatctaattaaatggccattggcgctgtaggatacccacctgttgctcactggaggcgtagaaaagattttgcgtgtctatgatatgaatcgtccagatgcagcaccaagagaacttgacaaagcacctggtaacgtgcgaactgttgcttggcttcatagtgatcaaacaatactaagctcgtgctctgatatgggaggagtaaggtgtgtctggaaaaaatatcttcattctataggaagagctgctaccatttgttcctagtttattgtaattttgttcctcttatttaattgttatggcactgcacagattgtgggatgtgaggactggaaaaattgtccaaactcttgaaaccaaggcgcctgtgactagcgcagaagtaagtcaagacagcaggttcatcactacagctgatggctcgagtgttaaattttgggatgctaatcagtacgtattatttctatcatcattataccgttgttctgtgtcatacaaaattattaaatcctttgcaacaaacattttttgctggttattttgcagctttgggcttgttaaaagctatgatatgccttgcactgtggagtcagcttccctggaaccaaaatctgggagcaaatttattgttgggggagaagatatgtgggttcatgtatttgatttcttcactggtgaagaaataagtaagcattatatatttttcattcacttgtccttcaaactttaatgcagtttttcttttcaaaatgagaacattacgttccactgttgtggcttgaagagcatttaaacatgttgaacaactgtaacatactattatttgcttagatactgacctcaaggcttgattgcaactgataatgtgtagctaaaatcctgtgttcagaagttgggtcgtacttgtacttagaatttctaacagtccttgcacatttatgataacagttatgcaggggacagtcgtttccactgttgcagtaactagcttatcgtgggaaccatgagtcactagtgtgatcaaacaaatatttttctaacttttttgccctccattaattaatgcataatggatatgaaataaataattcaaatttcaaaaagtttgacccaaagcttgtcctaaatatcaaattttatgactggaaggagtacatggcattgccatgctttttttgtcatatagttgcactagttttatttcagtcctaacctttaggaacaatttcctactttagttgctcggctctttgtacttgtattatactccctccatttccttttgtttgacgttgaactaaccacgtcatacatttggaaatagaggtagtatattgtgtaacctttttaatagttttttcggtgggatatttctttgggaaattgtagaattgttcaaatcagaaattccaattctctttaatcatactgacaaatggcttttatttcattgtaatctctgttccaattaagctgattgttttttttttaacaatgtgcagcctgtaacaaggggcatcatggtcctgtccactgtgtccgctttgcacctggcggtgaatcttatgcatcaggatcagaagatggcaccatccggatctggcagctgagcccacctaacgctgatgacaatgaggcggtcaattcaaatggcaaaccaacagttggggtaaatgaggttgcacgcaagatcgaaggcttccacattcccaaggaggaggagcagcagcagcagcaggctgaggggtaggactacaaggttggcaaacatggcagtgcttggtgcttactgggagatgattgcttgtcgatgctcctctccttcccgtttctcccttgctttgttgatgcccttggttcccgacgcaaggggggagagatcttgtcctccgtgaccaaaacggtggatttctgtatggggccctcaccaaatagacagtgtcagggtagtatctatctacagtgccaaaataaaccaagaggaaagcaagttggtagtttagtatcgttgattgcattcacagaagtgaaagtcttgtattccgctggtggccgtgatacagcagatgccattgtgttcaccggtttttgcctcccctacccttctatggactcttttcttatcaggaattgcttctttttattattgccgctgttttgacttctgatgcatctgatgctgtcgtctattctttgtcgtttcatttgtcgaccttgtccgtactatctcaatctatagacgatctcttcttccctacatctactacatgacatctagccctgtttttatcctaaatttttttcctaaaaacatcacatcgaatctttgtatatatgcatggagcattaaatatagataaaaaataaaaactaattgcacagttatgggagaaatcacgagacgaatcttttgagcctaattaatccatgattagccataagtgctacagtcacttacatgtgttaatgatggtttaattaggctcaaaagattcgtctcgcggtttcctggcgagttatgaaattagtttttttattcgtgtctgaaaattcattccgacatccggtcaaacgttcgatgtgacatccaaaattttcatttcgcgaactaaacaggatccaaactgatcacggcaagtttcctacctcaagcgaggctacacatctactccctctatcttaaaatataacaaaatataatagtttctagcttttagatttatctcaacttttttacctacattctcttcttaaccaattataattttcttcaccaactttttttaatacgtgtccaatccaaaactaattatattttggaatgaatttatgaatgcagtggtagtagctcaatcatgctgctgcagtgtcgctatgatcagtaagatcgtgcagtatcattgaccaaattacctgatctttcgttcgtgcaacactatattcagtacatgatcttctcgtcgtgtgaataattcgattctatgagcgttgtgaaggggacaatttggagttttcgacaatggcatcgttgcgctgtgcgtgcgtacgtcttcctcgtcactgcacctgcaggaggaatcgcttcacatgctcatgccatgtgatcctcccctttgcaaatacgcggcctttctgctgcgcatcacactgacccccggtatcagcatcaaccggtgccaaccatgtgaagttgctctttggattattagtggcagccagactcatgattggtactagaccgtgctaccaataccaggaggatctgatggtaaaatcccatggacatatgtctaaatttcatccggcttctgtgatggtgaatatacgatcaagaaaatatcactttttaaaattttcgccaagttggtttcttgctaaacctcatgtgttcatttttttatccgcaaaatgatttgctgtcaacgaactcgtggtgaggaagaaaggttggtcatagcagcctggatttgtttcctgcgtgctagcggcgcctcaatcaggctcacgtgggtgctagtacaggattattcattattgtaaaggcttctgttttgccacttgctaatatgataagtatactttcagaatggtccatttggttcagtctgcagaagcggtacccaaagaaaccgatttctgaggataaatctgaataattatcccttgaagtttattccttttaggacggagaacgtagtagtttggcaattacagccaagcagatgtcctcctgcagctacagaaggcagcagcagccagccacccagcccagatgcattgtgctgaccgctccagcacacacttgcattggcagcctggctatataattagatacatatgtgaatttggtgtattttcactgtagatgagcatgcacatgtcatggtatttggtgtttctgaatgatgcagtaaaccagatagtaacatccaactatttcagtattcttgaaacatcccacaagtgccatggcatgccaccattcaatatccttgacacaagactacaattactactactcctacatagcagtaatggacagcttgcatattaactacaagcttaaatgcagattttgacattcatttctccatggccttgatcattctggcagcaagtccagatctatagagaggatgttgaatgtttgcttgcacaaccacggcattcagacatatggcgacatcgcattcagtggcacacgaactcggacgaacaacccaagcaaacccaacagaagaataagacaacactatcatgttaaaccaatcaatttaatgagataaatttaatgagaatgtgacagtgctacaagggcaatcacaatcaggcaacgatgaataaacgtcacatgaagactccaattgttttctccaatctgaataaatacagcattatcagacagccctaagtgaagaaaacacaccctttttctacctaattgaatcagctacagttttctttttaaagttcccctcacagatgctacaactgaaaaccaaagaactcttgaacaattgcaaatggatttagaaccctgaagatgaacttcctgccctaccaatgccaatgcacaatgccactcaacccaccatactttttactactcttgagacaaacaaggcatttcatgtcatgcatttccaacctttgatatctttggaacttcaaccgggaagttgtcaatctcatccatccaggggttcttctccttcgctggattcactgtttgcagcgccttccagactgcgctgttgcacttgaaaccagatccaaatgcaatctgccagatcctgtcccgcttcctgatcctccccttcgcctcggtgtacgccagctcataccagagtgagctgctcgatgtgttgccaaaccggtacagtgtcatcctagatggctccatgtgccagtcagtcaactccaagttcttctccagctcatccagcacggcacggccaccggcatggatgcagaaatgctcaaatgccagcttgaaatcgggaatgtatggcttgatcttcatcttgaggaccttcttggcaaccaatgtggccatgaagagcagctgctccgacaacgggagcacgagcggcccgagggtggtgatgttcgtcttcagcgcgtctccggccaccgccatcaggtccttggagagcgacacgccgatcttgccgatctcgtcttcctcctgggtgacacagccaaagcacttgtcgttggcgcccttgtgcgtgcgcacggtgtgcacaagctcatacttggacctccggcggtcggaccgcctgttcgacagcaggatggcggcgccgcccatccggaacaggcaattcgacacgagcatcgaccggttgttgccaaagtaccaattgagcgtgatgttctccatgctgaccaccagcgcgtacgagtttgggtgcacctgcagcaagtccttggcgagatcgacggacagcaagccggcactgcaccccatcccgccgaggttgtagctgatgacattccccctcagcttgtagtggttcacaaccatggcggacagcgacggcgtcgggttgaacaagctgcaattgacgacaaccacaccaatgtccttgggcttcacacccgtcttctcaagaagctggtcaatggcgccgaacatgacggtgcgggcctccttgcgggcctcgtccatgcacgggttgggcgggacgcgcagcacggcgggagggaggtaggtgtcctcgccgaggccggagcgctcgaggatcttgcgctggaagtcgaggttggcgtcggtgaaggagccggtgaggctggagcagcgcatgaaggtctcgcgggtgcacttgcgctgggggtcgggcttgtagcaggcgaagtcgaggaggtagacggggcgggggcgggtgaggaagtagagggtggagaggaagacgaggagggtggagcaggcgacgacggagaggaggttgaagcggagctgctcccacaggtcggcgatgtcgcccggggacacggtggagagctgcacggccaccagcgccatcagcggcgacagcagcaggtacatgccgtgggagatgaggtagtggtaccccagcttcacgtacttgagcctcaccgactgctggaagtccggcagccgacgccgctgctgctgctccgccgccgccgcgccgccattgggcgccgccgccgccgaggtctccatctctggctgatgcaaaaaacaagaaaaaaacaagaaacaagaggtttaaaaaagatcgcagatttgcgccgcgagaagcgaaatggcgagatctccgagggtctaggaattgagatgagatgcgaaatcgcgaaaagaaaccagatttgcgaatcgaagagaaggtccaggcggccgcaatgcgggggcggagaaaagggggggatttttttgaggcaaagcgagtacatacataccgaggcgggcttggaggagggaaagaagggatctttctccggtcggatgcggcggcgagaggagaggaagacgactactgccttgattctctctctctctctctcttcctccgcttgaatacggcggcgagcaccacggggagggacgccgccttttaataagcggaggaagagagggaaaaggtggaaactactggaagagggggagaaaattcgccctaaatccttgtgctattttgcagtttcaacctcccaagtgtttgcattttgtttttttttatttggatgagtaaatctcacccctcaattcctctcatgcttgcgttctcaacttccagttatcttatgttttatagcaaggtatttagtgcaaaccatatatatctagtgaaaacttagaaactaccgttggatttagaaatagacacataagatttgtccacgtcaccgagagtaaaaaaattactcatggttgaatctgggagtaaaattttactttgagtgcagtggataaatctgaagcgtttatttttagatctaatgttagtttacaagttttcattatatatgtgatttgcactatatgttttttcatctttatggacaagtaaatctcaccttctattcctctgctatttacaattccgacttccaattgtgtttgtgtttcatggatgagtaaatctcaccctcaatttctcttatatttggagtttcaacttccagttgtttgcattttgtggatgggtaaatttcaccttctttgatatagcatgtagcaaatgcgtttatatggttatatggatttggcaaacaattgataactggtataaacggttttatattatattagaatatattgtttcctttttgtttgtggactgcataacatctcttcagtcttgtaacaagcaaaatcatttggaccatctaattatggcttttggtagtgtagttttgatttgtttgtctcacctcttagtttgcatggaaaacttcatgttgcaaaaggaaccaaaaacagaaacaaacacataaaaaaactcattttatgtactaccactaataaaaattttgggtggtggtgtataccataaataagatttggaggtagaggggataagattaacacgttgcaaatagtttgaaaattatactttctccgttttaaaatataaatattataggtccatagtacactgtggaaacacatcacctagttgaggtataacttcgaattccaaaagcaaaacgagtatcctaattgcaaaacaagcaaacaacacaaacaactatccctttctatgtgtgtaattttgtataaacacaaggacccaatgcctgtacatgtacgtgtaattttctgcaagcgccaggacacacgggtaaaacaacacacgttttcggctattttgtgcaccggaaatccagtgccggtctgccagatcgacggccactatctcgttgggatccaaatggacggctgggatcaacttgtatcagcagcgatggtcacccactatttttttttcggctcgcatgtggggcccacatgggctggaaacgctacattgctgaatatggggccaaaggtggggccagttgttgtcctgaaaggctggaagtgaataataatagtttttttatatgtggaaaccttttccttttaagctgaaaataattttgcaaggagtacttttctcaagcccttttcaaggtttacaaattttgaccggaattgaaccatatgtccatattgttggtctgatcttttgactgaggatgggtaaatgcaaatatataccactggacaaattttgtgtttggagatacaaaaatttggcttgtgttgtttttttactatcttcacataatcattttttttcatatcaaaatatagtcatccgtagtaaagcacgcacacctatgagctaccaaggccgagcagataagttgtgaggttgcattctcttgaggtgttgggatgaactatttctttgattttaatgggcacacttcctaagctgttaaactatacttttctaaaaaaaattagctgccatacaaaaacaatgtttttattaaaaacatccatagagaaagttttttaaaataatcaaatcaagttcataattcatatttaattaatcatgcacaaattgtctgttgtgtttttcatcctagattaataggtcaaccctccccaaaaaactgaaacaggcttaaggctaatcagcttagcgatttatctactttcctctttttagtgtgtttcaagaagttttcttaaaaatcaacaaaatctattttttaagtttgtaatagttaatactcaattactcatgtgcaatacttgtcttgttatgtgtgtaagaaaaagctcaaatcaattcctctaattaacttgaacgcagctgggggcggatccaacgtggatgttggatccccttagacaggagagaggaataagagtaaagtgcaggaggagaaaaatgaagatgagtcccctaatagattatcctatatccactcctaaatgcagccttaagtctatcctaaatttaaataggaagcttcgatcaatggctacattacagcatgaaaactacaatgaaaaaagattccatagttcataatacaagagtgcaacttacttagttgtacccatgaagaaatgcaccatcacatataacttggtagcgtcaagatgatctagctagcattgggtcaagtcaaaaatttgtcgacaccccgatcagcaatctacataccgtggtctatttgctaacctgcagagatgagatccacttggttgacagcgatgtgttttgcgttaggtgagccggtgagccatataattttcgccgtcaaacaaactcgtacattttcgccggtcagccataagaaaatcaaggccaaaaatagacgaccagccatggatcatcgagatattgcaagtgcacggaagctctcgaaaccggcacaagttgccaacgcgtacgttgtacggcgtacgcttatttggctttcgcgtagacgaaatgaaaaaaaattaacgtgcatgcacggcacatgacaacgcgatcgagcagctatcgcgttattatctctttatcgatgaagccgtcgatagcaagggaaaatatatcgtggaaactatatatatagcgaaaaactgaaaactaccgttcgattgaaaaataaacgtctgagattcgataatgttataacgagtaaaaattttacttacaaatttactcatgataagtaaaagttttactcatggtaaattttttactcataaagatgtaaacgaatctcagacgtctattttttttattcaatagtagatttcgggtttctgctatatatgtggctgcttgtatattttccctcgatagcatgtactaggacttcgactagctcaatggctgtagctagtggtttgtttagaaggtaaattggaaccatgccattataattttgtaaagtttgagatatgccatcggtatctcaatgacatgtaggacccacatgagtcaatgacatgtggctcaggataacatatctcaaattttacaaaattataatggcatggttccaattttcccttgtttagaacagtagccagtggttgtggttgggccgggtttgtgagagatcgagagagagctagctatactttgagagaagataaatatgaactactgcagagaagcgatctaccaggnntcaaagcca

SEQ ID NO: 29880 - DNA, 30780 bp, Oryza sativa
  unsure (1)..(30780): unsure at all n locations
gagggaagcgtctaaccagatggtacagtacagtcatcaagtgaaacattgtgactacactatgtgcaacatttttctgtggcgcaaaagataaaaccagatacgctgacagggggtctcaaaagacgggcggtcttagctggcagggcatgacttattcccttgcccagttgatttatcaatggtgtaacattgtacatacactggagcgaacatgttttttgaaaaaaggtaggaagaagatgatcgcccacatgggggaggggcgcctacgtaacatcgatcctctcgtttcgttacctgcgctctccttttccgaccgagatataactttccacgaaaagaaaacgagctttctctacatggagttcaactaccctactactactactactactagactagtatgattacatgctgaattgctagtgcttctagtagcaacataattaatccaagctaaggaaccatttgaatagaagaatagaaaaacactggtttattacaaagtattgtaaaatacagaaaaacacagaaataatcatttgattaatttaacctttttttcgcgaacgcgtaaaagattgcacgtcaatatatttgaagaaaaagagtttaagttacatgagccaatcagccagaccagcctattctaggggaagggagaaaaagcaaatgaaaaaaaaaactgaagcttagggagactacggcggctaaaaacagactccaagcagggggaaggggccaagccacgctagactcccaacaaatccccaaaagcggcgacgccagctaaagaccacagatggcccttagagtggatggactccagaaccactgagaccgaagagagagcggagtcgaaaaccctagagttccgctccttccacagatgcaaagagaccagacgcaccagggagtcgaagttgtcgcggaggtgctcaggtaagcaggccctggaggacggccaccagtcctagaaccagctgccacggtggggagagagggcagcccagctaggaggcgacaacacccgaaaccagacctgccgagcgaacacgcagtcgaggaggatgtggttcgccgtctcaagatcctgagcgcaaaaggggcaggccgagtgactatcgatgccacgcttctggaggagatcagccgtccagcagagctgctggaaagcaaaccaaagaaatgacctgaatttggcaggaccctttgcattccagagaagatcagcatatgcaaaggaatgctggccatagaagaatgcatggtatgccgaatgcgctgagtagcgctggtcagccgtccaacgttaaatgagatgatccttgacacccggcgagagctgtacatgaagcaccgcatcccaaataaggagaaattgggagatgaccgggatagtgagggcaccgcggatatcagagacccaagagttgttgctaggccagaagcaactgtgcgcgaacctcggagacactggggaacgacgaagaggagatctagagccaaggacgccaccgagcggccgtcgatccgttggtcagaccagaagagcatagactcaccatttcccagcaaaaagaaggtggatgccatgaacatgtcggagacggtttgctcgactggggccttcaggccatcccaataggggtgccctgagcactggagccagagccagcgaacatgcaggtcaaaccctgccaatctgaggttagggatccccaacccaccacaagttttggggcgacaacgttcgtctaggacacccgacactgcccaccatgagccgagtccgtacctgtccacaggaaggcgcgacacttcttgtaaaaggccttaataacccagactggaaggccgatcgccatagatacatggaccggaatggaggagagaactgtctggaccagcacagaatggccagccagagtgtaagtcgtcccttccaaggcaggagtcgatgggagactttatccacaagcggttgcaagctggccgccttcggcaacttgcgaacggacaacggaatgctgaagtaggtgcaagggaaatcagaaaccgcgtagggaaagcaggactgaaccaactccaggtcctcagccgagcaacggatcggggtgatcgaacatttggcaaagttggtgcgtagcctggacgcggcaccaaaaacataaagaataccctggatgaactcgagatcctgatgaatcggggagaagaagaggaccagatcatcagcatagagggaggcgcggtgttgcaaggcccgatcattaagcggaaggaaaccaccggagtcggaggcgtggcggagcatcgcattgagtacatccataaccagaatgaagagcatgggagagagaggatccccttatctcggaaagtcaaaaatctaacgagagtccctaaagcacaaacatttccctaaatgtttgggctttctagctattgatgaaatcaaaacctcattggtcaataagatatgctgcagctgctgctgctactagtaccagtaccatgtgaagaggagctactccagcaggcttcggttacagattctactcgatcgatgaatgaatagattgtcaacacaacaaccacaccgaccagacgctagaaaggagaggagcacaaggctggaataccgtgtacaaccaattaatcaaatctcgatctctcccttcctctctctctctatgttttcttttttgtatgttttttccaaatggaattctcctttgctgtgaagtgccgggtgtcccgaatcaaaataatcacacccctgtacacaacacacacatacaggtacatgcattgatcgatacatacaccagaatccacgcgaaggagaagagaacaaatggaagcaaccgagcagtggatgtgtggggctactgctactaccctactactgtctctcttcttctcttctgagagtttctgacccatcaaatccctaaaagttgtgctctgatcgtaccactagtctgttagcgagggcattttcggaatccggccctgcccctgccacgggcagagccttttgttagttgtctcttggccttttcctgtgtcactatgcacacaacggacaggggctttcctgtcttttcctagctagcaatactagtactcctacctagtaatagtagctaattggacggctgagattggcgcggccggaagatcaacggcgcgccgtactgcgggtggagcagcatcagcacggtgggggcgtgcacgtaggtgggcgagagcgcgaggtcgaagcgctggaggaggacggccatggtgagcttggcctcgaggatggcgaggctctggccgatgcacatgcgggagcccagcccgaacgggatgaaggcgagcgggtgcttcgccgcgcgcgccgcgccgctggcgaacctcgccgggttgaactgggccgcgtcgggcccccacaaccgggcgtcgtggtggatcgccatgatcgggacgagcagctccgtgtcgcgcgggatatggatgcctccggcgtcgccgtcgccaccgccgccgagggtgacgtcgaacttggcgcggcggatggtggccaccgccggcgggtacaggcgcagcgtctcgttgaggatcatcccgagctggaagaagatgacagcgagaaccaacaaggtgagacttttgtcggcgtggaattacgggaatacccccactgggccatggatatggtttggtgtgcgtaccgtcttgagcttggggaggtggtccttggtggggagctcgccggcggcatcgccgcagacggcgaggacctcgcggcgggcgcggtcctgccagtccgggtgcatggcgagcagcacggtggcccatgtgagcaggttggtggtcgtctgcttgccggcgaagaagaaggtcttgcactcctccaccatgtcctccaccggcatcgtcctgtccacgccggcattgatcatgagccccagcaagtcgttgaagccgctgtcctgcttgtctttgagctcggtggtggtcttgtatttctcgccgccgtcgccgccactgcgccggccgatgagccggaccaggccgcgcctgatctccctgtacaggccccacgacatcctgttcttcttggtcggcaggaacctgttcgatcgaattccggcgccaaccgtgagcccaatttcggcgagaatgggcgaatcgtttgggagttttttgggttgttcgtggcgtgtaccgtacctgtatcccgggacgagcaccttgcggaaggcctcggaggcgaacgccatgaggcgggcctgcaagcggaacacgacgcggccggagtcgtagctgcggccgaacgtggcgcgcgtgatggcctcctccgccaccgcctggaaccactccgccacgtccacctccacctcgccgccgccggcgcacgccatggcgcgccacctctccgccagcgccgccaccgacctgccgacgtgcggcaccagccgctgcaagagagagacagagacagagcacgtgtcagccatcgtcgtcgtcgtcatcgcgggtgcgccccgatcgatcggaggatgaagaaacagaggagagactcacgttgaggttgtcggggtagaagccgggggtgaggacgcggcggtggtgagcccacttgtcgccgtggaggctgacgagcccgtcgccctccagctgccggaccacggggtgcgcctcgtagcggtcgaacgcctcggcgcgcgtgaggaagatctcccgcaccatcttcggctccgccaccgtgagccgcggtgtcggcccgaaccaaatcaagaacgtcggccctgcaaccgcgacgaccgccattaatccatctgatcagacacgagcaagcacacaaaatccatccgtcctcaacataccgtagatcttcctccagtagtggtagaacgcgagcacccttgggagcgcgttgtgcggcgcggcgggcggcatgggcttcgcggtggcctccgccatgagcgccaccatctccctcacgcacccgacgaggaaccggtacggggggccgcgcaccccctgccccgcgaagtgcgcctccagccgccttgggcgccaccacaccgagtgcgccaccctcgccgccacgtgcagcagcagcagcaccgccgccggcacgggcaccgcgctcatcatctcctcccctgtttcttgaaacagagcacacaaacgcagagagatcaggtcgccgccggtggttgcgccggtgagtggtggcggcggttgggttgggggtttggattcgaaatgggaaggcgaggatggcgggaggaggcgggggttatatagcgaagcggggcggcggaggtggggcccaccggcccagcacgatgatctgttggtggtggctgcttggtaaattcagatgggatggagagagaaaggggggaggcgtcaacgaggtaggtgaagtgtgagaaaaccgccttcagttcagctgaccgagcttgggggtgctgacgtggcattttcattctcttttttgtagaacaacattttcattcgttgcagttgggaaaaatgagaggaggggagtgaaggcaaggcttttgcttgcgtgtgctgcttactcttgagtgatcgaaagtttgtgatgtactctctcagccccaaataaacccaaataaacgcaggcataagtttttttttcaactttgatcatctgttttatttaatttttttataataatattttttattgctattagattataaaatataaataacattttatatgtgattatattttttagtgttttcaaaagaaaaatttaaataagacgaacgattaaagttggataaaaaactcatggctgcacttattttgggacggagggagtacttattatatgtgtctactatgtacttatgtcagctttatagtatttagtgcaaaaaaaattatattctaaaatttaaactggtttatctggtttttaatgtttaacattgtttattgactattcattatattgaaaaaattacgtgattattatttatttttgttgtgatttattttaataagatctatacttttgcatattacataattttttaataagataaatagatattttttaatgccaacagtcaacatcttcaaatattaaaaaccggatgaggttttttttttattatgtgaaagaatacatacatcgctattcgcacacacccgcggatacatcttctatcatctgctaaataaatgaaggtcagcacctctcgtctctcaatttctattgaaaaagcagctgcttccttagtaagtaaaaaataaaactactgcaccagagctatacaaagagagactaatcagctacaattaggaatggtgttaatacggttttcactgtaaccatgagaaacacgttccactgtttagtgcttgaatatatatatattggaaattgttttggatgttaatgtggtagggtagttcagaccagaccacaaaacttagtatgacccagcttgtccctgcctgtttacgcaggtcagaacacggtttgagcaggccgcttaatttgggatgtcttcctcctacctacatgtcctgatatgatgtggtttcttcaagatgcccaatgattgattcttcacctgctaataataattattaactctttgaagttgtgtgttgattgaaaacacccgatcgaataaatcttttgcttatttaaattatggatagcgctgtaccgagtccagtgattaggcatcacacttccattattagaaaaaaatctcaggtgctaattaaattctaaacattgtcccagtttggtcaacatctatggtaaattgattcatatgagctcatataactgagcgtatgcgcagatttggtagagtcgtatgtgtatgatttcactcgacaggttctaaaaatattaaagacaacaaattggttgtgttcattcctaattagcgcaaagacacaaagtttatacttgtattaaattatctgaaaaaaaacaaggtttcaaaattcaaatgataagtaggaactgtctgatactactagtatgcattttcttttcgcttgtgcatttaatcaactaattgttgtgctagtactttgcaaagtgacctgcatgcaaggacaaggagctctcaacaaagagtgacccaatataaatgtgacgtgcagcactcatttaatttttgtgcgagtacgtccagctttatttttatcgatcaaaattaaatctacgtcaaaaaatagctttcaaacttttttgtaggaaagaagctaggcattattattttctgcagaagacaaacagatcttcaccatcaaaaaggtcagagatgtcgacaagcaatccttacatacgagcccacatttttccacttcaccataccgtccaagtcacgctaagatcgagcattggagattttggtttcttacgcccccaaaaaccggacgagcaaacgtaagcatcaacaaacctcttaaaattaattacttctcgatgaaaacttatcgcccactactcacttttgctgtgaattaaatgtgcatctgttcatgtgtccaaagcaacatgtttttgagggagttcgttgaatcgatcgatcgattatatgtgggcaggttttaagaaaggattaaatgtgaaggccagtacagagaatgattcgattttcagtttggacaggtaatggccgttgcaggtagaagctgactagccatcgacgaggcaggcagagccacatgcagctcgagctggcgaggcaaccgtcgcatgcatgttcgttctaatagcttccatccgcttcgtatacaaattttgacaatttgaccctttgtaaaaactatttttataaataaatcgtcgccaaaacttattttaaaactgacccttttgttcagcgtcaaatcgtgtggcgctgaactttgcgtggcacgctgacttaacctcccatccgtggtggcacggcattcaacgccaaatagcatggcgctgaaatgaacattggcacgctgacttaacctcctatccacggtggcacggtattcagcgctagttgacgtggcgctgaagtgtctacgctcagcgccacacgatttgacgctgaaaaaaggatcatttttgaaataagttttggtggcggttcatttgtaaaattagttttttcaaagagtcaaatcgtcaaaatttgtgcgcttcgtaactcttgacattttaaaaaggaaaagtctatacgtactaactttttcttactaaatttttactaacactaatgtgtcgtgctatgagtacgtgcgtctagatttttttataacttccatctaataaaatcaaacggcggctgagatgatggttagtaaaagtttatagcagtgctctttacaaaaagttcgagatctttaactatcgataacttagaaaatatactaattagatcaacatagatttgtcttacaaaatactataataaaaataaaaatatttctatttagttatatattataataaaaaacatagttaaagtatactccatccgtcccaaaataaaccaactcgtactagaatgtgcaacaaatcgatatagagtatgtttaaatttgttgtactactagattgatttattttaaaataattgtaatactccctccgggctgggtttattagtcgttttggctcggttagctgtggatgagaaaatttgtcgttggagcatttttcccacgcatgagacgagattgcccttgtgcattgatggcgttattgttcccagataaccttcttgttactccttttaacgcttcgtttccatctcatttaattttcgcatgccctcgcgcgctatctgtactgaagctgcatgggctacactcatgcatggtgccatgcaaaattgccaagacaaaaaaaaaggtatgtatctagagcagaaatcgaactcaggtcccaagacaccaatatgaatgcactaaaccaactgagagagtagttgttggttgtttgcatgctacacctaaccgtttttaatagggataaaataggaaataagaaccatacttaatgacttcttggtttttgaaatcctgtccgaaacgactaataaacccagcccggagggagtatttttgtagatcatgtccgaagaaactagcttctcatactcatagaactacacaggtccgaacaaacctctctgaactgttgacgaccgaccaagtacacgcaatgacaccaaaaaaaaaatttatcaatggcctgtttcgtttggcccagaagtacacaaccgcgcgcgatgattgaccggccggctgcatatcgctgccgacgtcaacgtcgcgagctaagctaataagctagtagccaccacacgcactatcacaaaatatgtgatgcattgtgtacatttgcagactaaaattgcctacgtctctaaaataacaccagaaactcgtggaatatataacaacatagtccatatatctgtgataactagctttcttggttgaggccgaattaatcctctcttgaccaatcatcacggacgcgtacatatatagaagaatcatacttgtacacgatatatattggacacagacgcatgcctgtaaccaccgttctgatggacgctgctagctaacctatacccgtgtctgtgtgatgaacgttaaccccgtatgtaatcaacgattctggctgtgttctttgctcagtgttatcaactcatcttcctcatgttacacgcgtacgcttttcaacatgctaaacagtatgttgttttaaaaaatatttctatacaaaagttgtttaaaaaatcatattaattttttttaaaaaatagttaatagtacttaattaatcaaatgctattaatgaatcttttcgttttctatgcgcaggagaaacgaacccagccactgtgtgtggtggagccgtacgtggatcggtggatggatcgggctaagccggtgtgtgtgggcgtgcgtacgttgcgtcgcgcgatccggcgtacgtttctgcggggggccgtggaaagaggcgcgcaccgcggaacggtgccgggagggcgcggcgcgcgggcgggcacggagcaccacggttgggctccgcgccgtccgcgcgcggggaagtatattaaccaggcatacggcggttgttgcttgcggctgccgcgagctaacttgggcgaagttgcatgggtgggctgaacgagacagagatagatagggagagagctagctaggaacattcctgtgcatgcacgtctctctctctctctctctggttgagacctggccggcctcgatcctagtagtagacaaaccagcaacgagttgtacatgcatgcatgtgtgtactttgtatatagacgacatgatcaatacatgggggtatgaaacgatcgagtaacatgcaggataccatgtattgtcgtactaggtcatagtaatgccataaattaagttatgtgtctttgctactttgagatagatttcgttgcagcgacattttttttccgggggtgaggatatgccacaattgtccacatcttctttctcttctcccccctttaacatcggacatctctccattactagctttcactacgattgtcggcatccatatcctttcgtgtccccttccttttccacacctgcacccagtggcgaagccagaatttagggatagggggtgctggcacgagacgtaagaactcaccaacgtctcggtagacaatggtatggatcttggtgctcagatcctgcagagtggcagattggcctcacccagttgccttttgttcgctctaatatgcgtagtcacccctcgtataattatatttagaattttgtggttatttgtcgtttgcactaatatatacataaaatgattgttgatatgattttggatatatttcagcacattcttctagatttatatataaaattgaacttattatagaatggagcatgtatgttccgagtccgaatttactttaatatagcataacaagaaccatttttaaactatgtcactaaatagcaccaactttactcaatacttgaatgacacgatcgacatcatttctatttattctttttagttttggagacttgcaaccatatcgcttagttacgttaattaactcaggtgaacagctagatatatgctcaacttgcaactaattaatgagctaattgtatagattagatggctaatcacccggggtttgcatgtagcgcatggggatgggggtggcttcgccactgcttgcaccaccaaactcaccgctagccgctccttcacccttgcacggtgaacatgcgtggttttgcatacactatccctcaagttactgactccacgtctctcgcctcctgataatcggtgatgtgcttcccaggtgtggccgtttatgggctatactccttccatatatatagccattcgttgtgcgcctctcgggtctttcctacctcttgcatgaggaggagctccacacttgcattgcctcgagggatgatgttaggtgtgcgagtgtgacataggcgacagaagtcgtcgtgtttcagtggtgaattcgggcgctgtgctggtcaaagttgggcgagatggtggcaggagttggacgttgaggcaaggtgagaggaggaatattagtaagaaaagaaaacatgagtgattttggtacatggcattcagagtaaaagagagttatccccctaaagtttgtggtatttcttcacaaaatgaacaaacttcatggcaaatgagcaattttccattgtttaaaatatgcgaaaattccaacaaattaaaattaaagtagatgcaacaaacacttcaaaaaggagaagacaacacaaatataactgtgtgcatgtttgattgttactacggtatatctacttgattataggaaaaaaatacttttataaataaacataacaaaaaatttaaacaagtgaatctaagatatataatagaaatcaatacaatataagaaagctttttttaaagaaaatgtatttttcggagcatgggaaaacaatccatttcaacaattcgatcaatagatgatatgataagaacggagttatacttgttttgtaaaaagaatttgcatatagcaaaggatagatcaaggccaaagttcatgggtcggcgcaccaaatcaaataccatatgtcccgaataatttgtcgaccattgttgcgctatcaaaagtactcatcaatgacattcgaatattccatatgcttatacaacatgcaaatgctaggtcaacccattaaattcctccaatatgcagcattattggacaaagaggacccttggcatagggtacttttcacttgtatatcaagtcttgctatcaaactatcaagattcatgccatgcactaactacggttctcacgtagaaaggcacgaataaaattagtgcattctccgtccattaatctcagacgatgttgcgatatgtgtaatcaatgcgttcataaggatagaatatgcttgtgtataatggagtacctagatcaatttatttggaaagcaaataaggatggtttttttacggttaactccatgtacaaagtgcttatatataatgaagtgatgcctcgaaaaactttgatttggaagctcagaattctactgaaaattaacgtattcttgtggtatcttaaaaagggggtaattttaacaaaagataacctagctaagagaagatggagaggtagtctaagttgctgcttttataactctaaagagtcaatacaccatcttttctttgactgtcccatgcatggctaggtacatttagagtgcatgtttctttactttcggaattagccaaccccgtagcatggctcatatgtttggaaattggttgaatggtgttgaacctagacttaaaagacaaatttatatgggtattgcggcaattttgtgagctttgtggcttaataggaataatgtaatctttaatggctccaatcttatttatttcatgcaggtaatcttcagggggactcattgggcaagactttggtccttgcttctcaaagaggacgatggagatgctgtctaagtttattgtagaattttggagacgcgagtaatatagttttatgctacttatggctggaattttagaagaaaaattgaagcttaccttgctatgattcttaatatgggttatatctttatgtgatgttacccatgtatcgggatgagtcttatgtaaacttcgtaccttgtgttgtcccccatataacgggatgagtctcatgcactcttagaaacttgtttggctatgtacacctcataggtgtagttagggctgtcaacaagccgagctcgagcgagctcgtcagcctaggctcgagctcgatacaagctcgagccgagcctataaaatgttcgagctttccgacaggctcggctcgagctcaatcaagctcgagctcgactaccgagcttgatttttaagtaaaaaaatatatatttcaaagataatctttaaaaaatacttaatttctagtttatcatattaatagaagaggaagaaaaataaaataaatatattatgtcaatataagacatagaaataacatatttgatctcctaatttattaaataacaaaaaaatgacatattactaggctcgttagaagctcgagctcggctcgacaaagctcgcgagcttagggagaggcttaggcttggctcttctggagctcgagccgagctcgaatcgagcctaggacgagccgagctcaagcagctcgcgagcatcgagcttttttgacagccctaggtgtagtggccgggtttaatataaatccattattttaaaaataaggattgaatatacgtatgtgtattcatctacatttatttggtgaatgtgtctatgtatattgtgtttgaaaaaaaataaaaatattagctcactaggtagtaaacaggaactttttaatatattaattaatgttagacagttttaatatgcttaacgacatcttagtactctccctctcacaaataattagtactccaacctcgttttgagtttttttttcatgtcattttttttaaaagtttaactaagtttataaaaaaacgcaacaacatatttaacacataacaaacatattatcgtaatatattcaatgttatatctaataaaactaattcgatgctgtagatgttactaaatttttctatagatttagtaaaccctaaaaaagtttaactgaaaaaaaattaaaataacttaaaatataaaacagaggtagtatcatttcaaaacccgtgcagctaacatacatatgttcgctttgaccatatttattgtttatattcgtgtaatgaaaataacatggccaaatttgttactataacaaagcttataacacatacgtgactaattttttttatttatgcaaatgaattatgtggttaaattaagttatgtttgattgacttaaaaaaaagtctaaaacaacacttatttatgatcggagagagtacgaacgaaatacatatcacttatttatacagtatattaaaatttcgtactttcttgtgcgggtcattaaaaaaaacttatgcagtattataaatagtggagggtacgctgttcagggtacgatcctgggaacaaatacttaatcatccagaaaggccattcactttaatgagtgcatgacaattcgaggaaccgttacgttggaggatcaagaacttgttcttgtgtagcagtagtattattagtaccttctttgctgacttctgacggcattatattcagcttctgtagcttgtcaagctgtaacgacgatatgcaaagcctttctacgcgctatctgctttagctttgctttcttggccggccggcagagatcagtgtgaaaagcgaccaaaatgggagaatctaatctaattaatggccattttgttgattaattgattgtttcctctcgtaatgatgcatgttagctaatcaacgacaaagaaaaactacgtcttttgactcgacgacgtaaagtaggggtgtaagtgtaaccactactacgatgtaggagtacgcatgcaccggcagcagaaaaatgcaaaaggggaaaagtttgagagagagcaacacgctgaagaaacccatctgaattacagatacgcacataagcatacagatcagatcatgcaatagcctagccacctttagattagatgtacgaaataaaaacaaattcttttttttcgtaaatttcagaaatattttggtgttcagaatttcagagcttgtttggaaaattctgcagtggttgaatatctatgttaggtcagatgagaatttgataataaaccaagtttgactatggctgatgataagaggccattagcaatttagcagttttcttttgaatcaagaggtagcaccccatttccattaacggaaatgaggtacctacgagggatatatacttgcacgcatgcacctaatgaatcaatcgaattaaacttaaacctcccaaacattccaaaaaggaagacaattaattatgattaaacataccatacactgatacagaaaaacacgcgatatattaaaaggcattggcatcctacgcgtatacgcgttatattttggtgctacagatcatgagatatatatacgtgtagggccccatgcgtgcaagcagatgaacgaccggtcgacagaaagcgcagagggtcggcacgtatggacgcagcatgctggaatatcgaccgcacgaccgacgttaattaaccacccgagtccagcgttgatctctatctgacgacacaaaaaacatcggcatagtgcgtagcagcagtatatgtaggaatgtcgtgcatttggagtcaatgatctgcctgttcaacgacagcaaaatgccagggcatcttcagggatcaagatttctggtagcttagactactcgtgattctcgattttatagtgtttgtagtacgttctgcttgcataaaccgtgttaggtttgtgtctactttaggctgctttcgtttatatgggttcccaactctcctatttttcacgcgcacacttttcaaacagttaaatgatatgtttttttgtaaaaaatattctataggaaagttgttttaaaaaattatattaatcaatttttcaagttagttttagataatacttaattatgttttttcaatttttcgtgttggaagggaaggtttcaaaccgtagggtagaaaagtattgtgtacatgaaaaatacaagaatgtgaaaagaatttagatggagaacagaggattaaaaattaggggaattttaaatgggagcctcttttgatgggcattggaaccaagggaaggattctagtacgtaggaagtaaacagtaattcattttacgtatcttgatcattttgcgcctttgccccactgcttcgcaagccaatagcgtgagtagtgagagtctctgcttcttcgcctctgttcttcactgataattgcttaatgcttagcgcttgatttcctcgatcttacaaggaagaaatcgaaaaagatcggctgcttcccctgctctcatgcatccttctagggtcatttctctaccgcaacagcaatctaaaatgttactaatttattatattattaaaggaatagaaaaaaaagtctccacgttcgctctcatggcctagaaattctcacattaatcagagaaaaagaaaaaacagagtccatatagaaatacaatttagaaatagctgaaattcggaattaaaatataaggaatattagaagaagagactagagtccatatagaaatacaatttcgaaatagttgatattcggaattaaaaaataaggaatatttgaagaggagactagagtccatatagaaatacaattaggaaataactgaaattcgaaattaaaaataaggaatattagaagtagagtatagagtcgtagaaatataattataaaataactaaaattcgtaattaaaaataaagaatattagaagtagaggatagactctatatagaaatacaattaagaaaacaaaatagaaatttagaattaaaaaataaggaatattagaagtagagtatagagtccatataggaatttaaaactaactaaaatttggaataaacataataaaattaaaagtagagtttagagtccgtataaaaatacaatttataaataactaaaattcgaaattaagaaaaacatgggaagaagagtttaaagtcaatataggaatacaatttagaagtaactaaaattcaaaatttaaaattaaagaatattgaaagatgagtttagagtccacatacaaatacaattagaaataataaaaattcagaaataaatataaataatattggaagaagagcatagagtctatataaaaatacagtttacaaaaaattcggaattaaaaaattgaaatattaaaagacgagtctagagtccatataggaatatatataatttacaaataactaaaatttgatattaaaaataattaataactaacacgtatataaaatacaatataatattacacattagtattttgtaaagttattacaaaatttaaaattatattgtcattttaatatatttgaataatataatgagaaaacatatatgctattatttgagagaaaatataatgatgctagccgcgcaatctgcgcggaccaccatgctagttaatactgatgttataagctagtcaaaaaaatactgatgatatagggtacctagcaagcaatggggtaaggttatcgatcgatgaatgcatatcataaattttcaatgaaaagatagagcgaaaggatcacgatgtaaactcgtgaagagaatgattcgtgtacattgacacgtctgaattctgagaggaacaggcatgccatcaggtttcggccagccaaggacaggtaatcaaggccatctgtagtttttaaattctggacatttttaataaaactgaataaatccaaccttatttcattactccagtaaagaaatttacacagcagactagaagagcattcgcgttgattcattcatccagtaacgccaggagcaacctcagaaacaaatactaaaccagcttcatcctactctactgaatttcttaacacggccattaacaagtctatcatgatcacctaaagttcgagtcctaatctaagcatggcctccgatgagctcagtccatcagtccatcctcgtcctcgtccgggagaggcatcgccgcagcagcagctatctctgtctcaatcctgcgcccacaaagaattttgccagcataagacgaggaaaccaacatcgcagacaattcagagaagaatgatggtgagataatcttcgtgtaggagcacgctttgcaaaatgtttaactcacttttgctgcgcgatgaggtcgatggtgacgtcggcggggaggagggccaactcctcgacgaaccgaaggttcatgtccctgcattttgcaatcacacatcacccatattcacattgtcagacagattgttcagaatcagtgtagtgttaaaatcagggtaaatgtgcaatggttgtggtctgcaacaattaatcggagtgacaacaattaactatcaattaccctgtgagcttcctggcaaggtagaggaaaggcttctcgaagttgtagttgctcttggcagagatctcgtaatactggaggttcttcttcctgtggaaggtcaccatcttggccttcacctgcctgttcttcatgtccaccttgttgccgcacagcacgatcggtatgttgtcgcagaccctgatagacagatgcaagtctcgatcagttcaagacactgaagagaagaacaatttcaggatgatttgggagaagagagagctttcacctgcagatgtccttgtgccaggtgggaacgttcttgtacgtgagacgcgaggtgacatcaaacatgatgatcgcgcaatgaccatggatactgatgaaaaaagcaggagggataagtaaattctggttctacactgtacacatgagcaaaacaaaaataattctccgatcataataacatcatggcactaaattttttgagaagtttatttatgccgacaaatctagttccagtaaggatttctactgcttcttacataacattgaagacatttctgtcacttcgagagaagatttggggattaacagtcaagctatcgaggctactgaaaacataattgatctagatcctgagtactgcatcatgttcctggattatcacatactccatttgctataagagatgaatgttttgcaactaattaaaaagatctaatagtaaatagtcaccacatcagatcaacattcagtaatcaaatttccggggattcctatgaccaatgtgatttttcatcatggctgtaaacttgcagatacaaaagaacggtttctgctgcttcttgcatacttcctccgtttcacaatgtaagtcattatagcatttcccacattcatattgatgttaatgaatctagacatatatatctacctagattcattaacatcaatatgaatgtggaaaatactagaatgacttacattgtgaaacggagggagtaatatttaagtcatttcaatctgcttaggctgctcaaaacattgccgatataagatcccgaatacttgcatgcatattcctgaattaccagacaattgctaaaagatgaatgctttgcaactaaattgaaaacattcaacagtcaccatcctgatcctatggtcaatgtggttgttcacaggaattcatcatggtttcaaattcgcagaggcacaaaagatatgattgaaacgtctgaatctgacgcaataaattcttactagtatccatcacggaggccgccgaacttctcctggccggcggtgtcccagcagcagaaccgcaccttgccgcggctcgtgtggaagtccagtggccgcacctccaccccgatcgtcgctgcaaacaaacagatcaacaacaacaacaacgttaacaccttgccgcacgatgccacgatcgatctctcctcctcctccttcctcccaatccgacacaacagaatcaagcgggatcgacgacgagatcgcgcggtggtggtggggaagtgagccttacgttcgtagcgcttctcgaactccccggtgatgtgcctcttcacgaacgtcgtcttccctgcagagcaaaaacgggttgattaatcaggacgccgggatgcaaccgccgatcgaggcaccggaggagaagaagatcgaagaagaggaggagcgtgggcggctcaccggtgccgccatcgccgacgaggatgagcttgaaggaggggtaccccacggccgcggggtcagggagagcctgcgcacgcgacatcacatcacaaggaatccattactaatcaccacaagaacaacctcacaacaaatcaatgcggatcatccgaaatcccccaatcactcgcgatcgagacgaatcaacgatcccattatccaaaccccagcagcaagcagacgaatcaatcgaaacaaacccaccaaacaaaaaacatccatcacagtagagagagagagagaaccgcaccattccgaaccgagaaaccttcgcgagaaacctcttccgatcgatcgatcggcggcgacggcggtggtggcggcggcgacggcggtggcggcgacgaggcgggttggggcggcgaggcgagacgacggcgaggggttttatacgggcgtgggcgcgtggcttgcttgggttggacgcgaccaaccgccacgggggggtttagcttgaggtctaagcggcttctccgtagccgtcggatgtgcgcgtgggcaccgtatccaccgtacacgtgtccacctggtggaggcaacggtagcttttaccttacgcggcggagccgtttggggaagagaaggtggaggttagcttcgaattgacgccgagagatgtgggtaaacgcgagcgtcgcgccacgtgggctggccgctgactacgcggccccacatggcagaggcccaccaggagatccacgtgaatagatggcttttgggccaggattagtggacgtgggttttgggccacatgaataagggctcattttagatgggcggttcaagcccggcccatccatatggaccacatctggaccgggattggtatcatcacatgttaaggtgaactttctttaaaaaagaaaagaaaggtttgtgtcaaacgacacgagagattagctgattagggagagcgatattttatatggtggaatataaataaagctcgtttagttgctcggttcaatattggtctgtttgcaagagcttatggcagctcagcttttcatctaaaattctaagaagttatagtcataataagatcgagaccaacttgagcttatggcagctcagcttttcatctaaaattctaagaagttatagtcataagatcgagaccaacttctcaaaattttaagcttcccaaatatggccctgtttttctttcaaaataaaaactatttaatttgtcccccggatctaaaaaagaaaaaagggcgtggaaacagatagaaactcttgaatgaaaattgaaaagaaatgtagccccatttccgcttcggaaatggtaagatctttggcgcaagaagaaggggcgacccatattagcttgttaacgaaaacattctccattgtgatattggcagtttgatccaatatgggcgtaagttggcaacttatcctgatctacaaaatctgggctaaattgtgcacacacgagcagagggtggaaccaatccagtgaacaatatgaacttacatcacaccagcgagagattgatctaaaccttttcatttcacatcttgataatccaatgaaggaattctataactttaaaagaagctactgtaagatgttgaacgtttcccttctcgacatgttttaaggaatttacagcgatcaatgcatcgctggcgctgtttagcttcagctgtttaggcatatgacagggatgtcgagatgagagcttccttcacttccagagcttgcgcagggacatgttcttttcggtatccttcttcatcaccttcgccaccgccatcaagaaatcctcctggttgacatgaacccttctctcgcgaagggcaaacattcctgcttccgtgcagaccgcctgaaacccagaaaggtgaaaatcaaggtgagtaacttatgtacagtgatatagctgatagcatcaatatggagcacaacagatgcaaaatggagtgcattgtcatgcagcactaaaacaatgagcagactttttcatggtatttagcagttctcatataaatgttggttgtaccaactatatggatcaaaattataactgggcctggatttgtttcagttcatgatatttgtatcagcttgaaatgagaagtattttagaaaattggctcataagtgtcaactatacacaccttaagctctgctccagatgccccattcatcttctctgcaatctttttcagatcaatgccacgcatcaagttcatttttcttgaatgaatcttcaagatatcaaagcgggactgcaggagaaaaagatgcgattaagtaactaaagaactgatgacgagatgaagtagcatgaactctgctgcttgcagaaaaaaaaaagaagtgattgccacttacatcttcattcggatttggaaattcaatcttcctatcaatgcgaccaggcctcaggagagcttgatccaaaatatccatcctatttgtcgccataagaaccttaattttgtttgatgcttcaaagccatcaagttgattcagaagctcaagcatagtgcgttgaacctcactatcaccacccccagatcctgactgcattctagcagatccaatggagtctatttcatccataaagattatggatggtgcatgctctctgtcaaaattcaaaccaaagacgtcagcctactgaatagtgtaaagcaatgcaagcatccttcccaatgaaggattttcagatcccattgaatatatggtaaatttcaatgtatcatcaacagaaaatgtttacctggccatcacaaatagttcacgaaccattctggaaccctctccaatatacttctgaaccaactcggaacctgacaccctaataaaggtacagtcggtgtgatgagcaactgcccgagctagtagcgtttttcctgtacccggaggcccgtaaagaaggacaccctgcaaaaatcaaaggtgaatattttccactaataatgacagttgataccaaacaaaatgcaaactgataaacaagttctaacctttggctgggcaattccaagactttcaaacagctcaggatgcttaatgggaagctcaataacctctttgatctccttaatctgctgatcaaggccgccaatcatatcataagtagaatcaggaaccttctcaaccttcataagattaaccaatggatcaactttgctgggcaggataagatgaagcatatagctgtcatttcgaagagcaactcttgttgaaggcgagagctttgtaatatcaatacttttatcgacatcaacaacatattttccttctgggtgcacctgaaagattgcaattgatcaattaacacagaaagatttaccaaatgtttgatagaattactaaaaatttctgctctcataatacccacacgatatcgttgtgttagtgcaataattgcgtacattttaaagctattatcactatagtatgtcatatgaagtgaccatatagcacttcttcaagatctctatttaattgactgagtataaataattgcatctgcacactatagagtaaaaatatttctgctatttactattcgcaatcatacttttgtaaagctccctttcgggtgctaccaaaacaaatcgcagcttctatccaaatttaaaatatatgcagccatgatctgactaaaagaaaggtctcaccaacaaaatattatcttccccgattatctccaaagcaacactcatgtgcacaaatactaaaacacagcactaagaaaaggcaagaaagcaaaggatatgtaccttcactagaaccttggacttgcccataaccttgacaacctcaccaacatatgagcccggttcatggagcaccttcaactcttcccccagcgttataactgcaacatcaaaatcgcaaggagggaaaataaaataaaaatattagcacattataccgcaaagcacgaatcccaatacaaagaaagtctagaatcctactatcactacttcattcaacggcagaaacggggacgacgaacatagaaaccacataaaagatagaagtcttgatacaaaatcaagaacctctgagggggggattcacacgagacgggaaactagggttgcgagtaaacgcggcaagattaaaaccaaaccacgagacggattcgactgccccgcgcgcggggggagggggtcgtcgtttaccttgggaattgaggacgttccgctgggcctcgaggcggctgaggttgtccgtcccttggcggatctggagctgcaggtcgtggatgcgcgactggtagtacggccgcagcccgtcgccgcggaaggcgctccccttcgccccgtggccgtctgcccccgcagccgccgccgtcggcgcggaggaagaaggccgccaagacgtccgccgtcgccattgcttcgagttcgagggtttcgtttcgtctcgtctctttcgtcggaacgctgatcgagctcgcgttttgagagggccgctctcgacctgtgtttcgttcgtgttgggcttcgtgggcttttctcagggtcggtatttattgatgggctgtcacgccgacttggatgcgcagaggattggaaccccgatctccgtgcggttcgttttcgtttgggagaagtctatttgggctccgaatctgattcgtgttgcccaaatagaaaaccggatataacaattccttcaattattaaaacgatatgaaatgatttctaaggtagtattaagggtgatattgaatgaatgatgtggcgtctatatgacacccaatcactagataaaactaaaaagtactccctcattcctaaaatgtttgatgccgttgacttttttaaacatgtttgaccgttcgtcttattcaaaaacttttgtgaaatgtgtacataaaagtatatttaacaataaatcaaatgatagaagaagaattaataattacttaaattttttgaataagacgaatggtcaaacattttttaaaaagtcaacggcgtcaaatattttgagatggagggagtagatgtgagacccatatattagcactctttattcttctatcccctcttttttttcttttttttttctaaataaactacgtcggcagggtcacaagggatatatcataagagcagtggggcttgagccttttatcgtacatacatgcacggagggctatatagttttatatagttttgtttagtttgtttaaacccctgttattatttttttctgtatccaacactgcacgtcgttattgtggcgcacactcaccatcatatagaaagatcagacgttgtcgccatggtactcagtatagaaatggtactcagccgacaaggtgcgtgtcacccatcaggatagacgaacgggtatacttctacaaatatttctgaagatgggttactcctgcaaaatctctatacaaagaatgaataatttgaaaaaaaaagttgttggctctcttcagaaatactactaaaaaagatcataaaagaagtcccatgtggctacatcagcaagccatgtctaagctgacgcattagccacgtggagcagtatgtcacatcatttgataaactaatagataaatatacattagtgtacacaataaaattagcatgggttagcaaatatatttatcttagctaattttcttttcttattagtgcgattaatttaaaaataattatgataagatattattgttaaaatatatgtttatggccaagcttgagctcaaactgagcttgcttaaaaaaaagtggaatagcaatggctcgaacacggctcgagcttgagtggagcttgatggtcaattacgagcttgctggatctcggcctacttctaccctatattttttttcttctaccctataatttaccaattcatcttactcatccttcactcttatctaccctatctaccttataattcaccaactcatatactcatctttcactcttatctaccatataattcaccaactcatcttactcatctttcactcttgtacaatcttgcattcatcaacgtggtcaattttttctaggacgagcctaccgctcgggcgcccgatcgatttggagtaaaatcggcgtccgatttacgtgcaaaactactttaaattgaattttctcttaaattacttatccaaatcatgatccgattgcaccattaaattcgttgcaattaaatcttcaaaacaagaccacacatggatatattccgacgaaaaaaaattagcttattattaaattatttttaaatgttgcacgatgtttcaccaggtatatcggaattgtttcactaagtagatcgaaaatgtttcactcgtttaaatcagttattgttttaccttatataaaaacaatgtttcagcaaatagcgaaagaatgtttcagttcactgcaacatttgatctatatatagtgaaaaattataagtacactaggtgaaacatttttcggtgaaacaaaaaataaaatgaattcccttaatagggagtatctaaaatatgtggttttttttgttgcaatggaatatttcggttcactgcaacattagatctatacatagtgaaacattgtgagtacattaggtgaaacattttttgtggaacaaaaaataaaccaaattcccttaatagagggttttcaaaatatgtgggtttttttgttacaatgatagtggaagcagaaaacgcggtggaacctagagcctgcatgcacgcacttagggggagggcgcgctgggggagccgcccgatccagttcccccgcgccggttgcccggatataatcattctcattttttctatgttggatcaattaagcgaatgaaatctacttgttggtactgtttgtaccctttttatttggtagtatgatattaattgataagctatttaatatcattttcattttagtcttggtagcacggttgacaaaaataattatcggtcggtcagtacttggttctgtggtgatgagtcgtgagtcaaatagcatctaaaaaaggattctgcctaataattttcggaatgatgtcctgctctaatatttacccccattttttttatcccaggtttgacctctgtatttgagtgctgtctataattcattaagctacttttgcttacccttgtctgtctcttttgattgctgaaagttgatgtcctttttaaggccaagaaagagttcattctatctttgctgatgttggcactgaatgatgccattatatatgacaaggtatggtctctaagtggcttccttaatttacaactgaaccctgtccatatctctccataaatggtctaatgtaattaatttaactgagtcagtcagtctaatgggatagaagcactacaatactgtgtaatgcgtggagactatgaatcttttaagtttgatttttttatgttttctatggagggcatactaccatctatgtaatgtgcgaagacctatgaatcttaacatgtatttccgtaaccatctgtttagcttgctgcttgaaaattgtttttttcttcagatagaaagattgcaaatttatttcttgctgacatatgctatcctctgttttgatgcatatgtttcaatttcaagttctgcctctaaaattaaactgaacttttactatttaatgactatggagtcctgatagctgtcaaaaagttaaggtgttataaaaaatgctacctgaactatagggtgagatcagaatgtttaggtcatactgcttcattaaaatttcaaagatgtaaagaactactgataatgcattaggggatttggctaggatttggagaagctggttcttgtgaggatttggtttttcctttgaatctggtgaaatgtgataagagatttggctaggatttggatttctatttgaatttgttgacatgttatggagattttgctaggatttacactgatattctcattttgaaatgcctctactcaaatcctcccccccacccccgctcactaaaaccatgcaattttggacatacgcttcctcgtcgatattaagtagtgcatatcaattgttcctatatttaaataataggatgtaatttcactttgaattaaaatatacgtaatttcctaaatattatttatgatattttgttactttgcttagaaggcttaattatttttttgtgcatcaggacatgaatattgtatgcgggagttcataacctctcaaaactagaaaagaaacccgcgcacgtgcgcgggcaccttatttgttgtttatagaaataatgttaatataattaagtcatatatcactatatgcatataagaaattatagatatgtcttatataatacattaagctcactatattaagaatatttatatatttagaaagaagagttgattataaatatttaggtatgtatgtagtggagattaatgttttatgtatgaattattaaaatggcatctgcaacaatgataattagtaatggtgacaataggcgagtttacgtgtaatctaaacaaaagttatttttgtttgaatagaagaaacattttatcgtttattaaagtctacggtctatttcacgacatatatctttttaattataaggcgaaatctataatttattttatgcatatagtgagatatgacttaattctattaacattatttcaataaacaataaataaggtgcatgcacatctacacggccttcctttctagtttgttttcgtcacctattgttcataatgggtccatcaatttaaataaaaatcgatggtgagattacgtagtgccacgtagcagtctaagagtgcttgtagaagtgcaacgtgaccatatttgtgaagcaataaataaattttattttatagtatagaaaattctattttaaaaatatcgtctatttttccacgatggttctcacatgtacatatatatttttgtttaaggttttatatctttttataccgtacgcacgtacctttttttcaaatgaacaataggtaaaggtttttttttcccatcgtacgtttttccggtaaacagtacgtacgtctttgcttttttttttttcaaatgaacacgtaaaggtatactttttttcccatcatacattcatacgtttttcgtattctccttttttaggtaagtaatcggattctgtgtacacacagaaagcataaacttattttaaataaacgatacactaatttaaatgaaaattgacggtgaaattatagaataccacgtggcaacctaggagtgctggtaggagcgtcacatgacggcttaggagcagaaaattaatgaacttttagtatataatagatagatagactagaaaaatacccgtgcattgcaacgggtaaatgctaaatgctattttaattttattattgttatacggtttgtctagggtaaaattcactctgagaattcgctcggttattttttcagaaaatcataagctgcagttaggcttccgtatttcatctcaagttagcatgcgagtttttttaaaaaatttcttatacgaagcttaaaatccaactcaaacacggatctgtattttaaaaaatgaacgagcttaaaaaccgattcaaatgcggatgacgtaccaaaatatcgacaaaaacatcttcaatctttacctagaaaagatacccgtgcattgcaacgggacaacctaaaattaaatataaagatggttatagtttatttttgtgatgtgagatctttaagaaacacatattcttcattgaatgttccagtgccttaatatattcacctgacctcaccacatcgaatgagatcaatcgagaagggaggaaatgcaaatagacaaggagagaatagcgtcgtccatagatagctaagcgatacggtcgtgtggaagaagagagacagggtgattatatgtcagcagaggaagttggcgccatatgtggagagagcaagaagagaggagaatattacagtgataagcggggatgtgccgatgacagatgaagatgtaccagaaattaagaaaataaaaaaaaaagaaaaatatgtgctagctatttttttaaaaaaacattattacatatgcaacgggtgtatcagcgaaagaaaaataatcaatagctaaaagtggtttagcgaaaaatgcacaacacaaaagtcacatgaaaaatgtatgtgttgacaaaattatcaaatttaccatacatatataatatctcatctaatatgggttataccaagatgattggtgaatgtagagaataaanntaatatgaannaatcgtaggcangtggngcatgcaagagcccaagagcatatgnctatgccgtgtgtccaaagagaaaatagctgtgatggagtagagaacacgctgtatctcgagaagacgggcttgcatgtgcgaagccgaacaaaaccgcagatacgagaa

SEQ ID NO: 29881 - DNA, 26442 bp, Oryza sativa
  unsure (1)..(26442): unsure at all n locations
gacgggnaatgattgccncctcgcagnagcncatcactcggagaggagcgtggctgcgatgtgcggaaagccggaaacaaaaaccgacacgatacggagaaaattaatcggatgacgtatgaattttttttttttgacaaaaacaccttgaatctatctatctatctatctatctatctatctattatattattaaaacagctttaaaaggaggcaccacgttcgctgtgggagctagaaattcccacattaatcagagaaaaagaaaaaaaagaaaaggagagtctaagtagaagtacaatttaaaatagctgaaattcggaattaaaaataaggaatattgaaataagtttccatataagaatctaatacgagattaatcaaaattaaaaacaaaaataatataaaatccaaaattagaaaaggaaatgagagtacaagtaggaatacaatttaaaaatagctgaaattcgaaattaaaaataaggaataataaaagaagagtccatataagaacccaatacgagattaattaaaatttgaaataaaaataaataaatccgaaattagcaaaagaaaataaaagaagagttcatgaaggaatacagtttaaaattagctgaaattcagaattaaaaataagcaatattgaaagaagaatccatataagaacccaatatgagattaattaaaattgagaataaaaataaaataatatctaaaattagaaaaaattaaaagaaaattcaagtaggaatacaattttaaaacaactaaaattgaaaataaaaaataaaaacattaaaagaacacaatacgatattaactaatttttaaaaaaaattctgaaatttgaaaaataaaaataagatttcaattagttatacaatttataaataactaaaatttgtgataaaaataaagattattaaaagaaaagaccatataaaacacatgacgagataaattaagtaacatgcctataaaggagtagagtggtggcggttgatacgagatataacaattgttaataaaacaccaaatagaatcctaatgacaattaaaagaagggacgtcaggcatgccgtgaagcaaacgagtaagacggttgcctggacttttagaaagtaaaaaaaaaaccccattgataatcatattcaatttttaaaatctcagtgacaataaaaaggagaagcagcgggcggggtgtataagagtatagttgcagagccgccgacggttgacgggacttctagaaaataaaaaatgaattcaaatgatagttatgtttgatttttagaatcataataacagtaaagagttggtggcggacgggctgtagagggacatagtgacatcgtttgatgggacttctaaaagttatgaaaaatgaaactacaagtccaatttttaaaggtttggaacttccaaaaagtaaaaaagaaccaatggtaatcatgttcgattttaaaatctcaatgacaataaaaaaggaaggcatagggcgagccgtagaggagtacaatggcaaagccgctgacggtttggcgggacttttagaaagtaaaaatgaacccaaacaataattatgttcgatttttaaaatctcaatgacaataaagagaagagatagtggacgggccgtagaggagtataatggcaacgtttgacgggacattttgaaattataaaaatgaaacccaatgtgacaataaactctaaaaactataaaatccaatttttaaaggttccaaaaagaatgaatagaaataatggtagatcgagcaagcaaataaagaaggagatgatataaggggtagcaattggtgtgacttttaaaaactatataattagaaacatgaggatgataaggtttcgtctttcaaagtcttaagacaatgagataactatttaataaattttaagtaaaaatcatacaaaaaaatatatgattttgtttgggtgctagccgcgcaattgcgcaggccacctagctagtttttataatagtaaagatatggtctcagattatgtcatacttattgactttcactgatgaaatgggtacatcttatctgatttgggaacacagtaacacaatattcgattgtcatttgtataaagctgatagtatgcgccgggtatactaattgatttttttgtggatgggtgcataaccgcagtctacaggtcatcagcagatgtatcaacgaggggagtctgtcctaattttttaacgggcgcctcaatctgcatatcaatggccttttgaaaacctttaaatcttcaaggataggaagacaactgagcttccaaaataagaggatgctcncgtgctgtacgctaagtgatgatgggaatttgcacaagggctttgagtaattcatggtttgttttctgactgatgtgatgagattaattaagccatatgtatttgtcccttctgatggccatcaacaactcaagtacttttgccattgtgagctctagcatcactcattcatgtatgttcttggttgttttatgcacactgcctaaggccttaattagctgtatttgttatacttagattatacatgtcagataatggggaccacttcattccctgtcttgccaatgaggagcgtggattattttactataaaagtattgcctggatttctcgatgtactgtaaaatagtatcgcttgtgtactattttgtcgagaaacatttatgtattttattacgctggtattacctgactactaactgaaaattgcttgaggctatcccggtgaaaaagtgaatgctaaagctgattgcttgttttcagtttcgaattgtatatgcaaatgtgtgcataactctctctacaagtttgggggtcttcagacataaactgtagcgtgtatttctattataagtaatataaggtttcatggtcgtttggcacttaaattaaacactacaaagaatttgataaattcaacactccgagcaatatagataatttggataaattaaatactccatatcagaattgagtaaacaaatacacgtacttaccttcctcgccacatattaaagttttctaaagtttattgtttttacatcattctaagcttagttgtcaaagcatatattgtcttttgacatcaatatagtcacatcgttagcacgtgcatattaactagcactagtgaatcacacaagcaatacatcgacgtcaaccacgtagaactgtcactcgtgcatcgatgtatattttgaaaaatgtacattaactaatgtttgtagaacttacattgaggcatgatggagagggactaatccaaatggctgagatgtggcagagaggaaaaatctctagctatgttgcatctcctttggaaagaaaagaaaaaagtcaggttgttccatttgcacccttaaattttaattagtcattataataaatgcacttacctaccaggttgcttccatcgaatcctcaggctttaattagtagtatatgtatgtatatgtaaatacaccacatactagtttttttattactctaaacacattttaattactctttactccctcctttctactcagagagtaaaatataaggatttttggatggatgagatttacaaatctataggcagatatgatatgtcttgtctatccaaaatcacttatttccttcgtcttaaaaaaaaagacaatctaggtggggacctcttctgtgtccaaattcattgcactagcaggatcatatctattttagattgtcttttttttttaaaggtgggagtatatttaggatggagcctggagtgaccttggaaacccggtaaggtagcaccaactggcagctgttatgtatactaggtccctctcagtctctcaggggtcccctttgttaacaatatgccatcgatcgagttcgtaatagtatacagcaaatgtccaacacattaagaattaatctctctgcgcgcctccgcctcttcgatcgatcgacgcaattaaaaacggggaaagtgagaatgtggaggtcgttggataacgtaccagtgcaaacctagctagccactgcacaggaccggccggatgatcaaattcattgttgttgttgagctcgcctaattaataaagcgatcatcccgcactaagagctggtttaatagtatagccagtaacgggctacagaaactccaactcagaaaaaaaatattttctcacagtctattctctctcattgaggatattgggaagcgtgcaaatggtgagaaaagtttgcagctgcagcatgcatggacgatgattggtcatgatgctttttctacggctgcagcccggcgatagattaaacgccagctactatctctcttctattttctcactcttccacgtaggatttatgttagatgaatagtacacgctctaattattgtacctgctctaattattccagatcacaacttggtacacgttccgtctcctagctaggcaccgacgcacctggcactgcagcatatatgaagccttatttaattagcttgtatatgagctgtgtgtatatatgaaagtctttactgcgcctatatatatgcactgctcacagcgcatgactgcatgtctctgcatgagcagctagctaacgcatagtatatagctgatccaatggctgatggggcgatgcgctaccttggacggaggatcaacaacgaccagcaacagggtggacgcggcgccgtcgcgtggattgtccaccggcgccggctgctactcgactccggccgtgccatgatgctactcggcgccatcgtcctcactagccgccagctgatcatcaccacgagcagcggggccacgcacagcgtcgacgccgagctgtatcatgcgtacgacgtcgtcttggtggcgttcctcctgtggctgctcggcgtggcgctcgcgacgctgtcgctcgtcgcgccgcgcgcgcagctcccggggctcgcgttcgccaacgccgccgtcgcgatggcgctccgcaaccacattcttcgcgacctctagttcctcattcaccacgcgccatgtatgataatatacttgctccgtctctaaatatttaacatcgttgacttttttaaatatgtttgactgttcgtcttatttaaaaactaatgtgaaatttgatgcttgtgaattcagtttgtgtagtcttttgttgcgggtggggtaatatctggggaatgttgtgttcctgtgagatgtctgcagggtgtgcaaatgttcctgagagaaccagtgctctgtgctggcgtttgttttacgttctgttcgtagttttctttctgttttttataagactctgtatgttgttttgggctttcttctaaagtcgggtcaatgaaaatttgatttgcttaaattttttttattgtgaaatatgtaaaactatatgtatacataaaagtatatttaacaatgagaaaagaattaataattacgtaatttttttaataagacgaacggtcgaacatgtttaaaaaagtcaatggcgccaaatatttagggacggagggagtatatactacctccagtttttaatatatgttgccgttgactttttatcacacgtttaaccattcgtttattttttaaaaaatacgtaattataatttattttattgtgaattattttatcacttaaagtacttttaagcatgatttatatcttatatatttgcataaaatttttaaataaaataaatagtcaaacatgtgtttaaaaatcaacatcatcatctattaaaaaacggaggaaatatttaaatatgggcttcttgctaattagccccctgatctactcgtttcatacttccaaaattcaagtcacatgccggtgtactctaataaaatactccaagtgccatgtttaattttctctgtttagctacatgtaaacaaacttatgttgtttccattatttttatgcctttcaagaataagtaccttcaactactcttcaactcttacgttcccctcgattacttcttatagtttgtctcctaataacttcaaaatcaggtaatatccaatatatatactctctcctttcatatttatttgtcggttttgatccagagtgcccgatcaactttaatcattacttttaattggtgtcaaatcgaataggtttaagtgtaaggtattagtaaatcacttgagattacaaacaactttgatgctaaaataaatatttaaaaatattgttgattaatgcttgttacttcaaaatcaaaactaacatttttttctgaatggagagatgtgacatcatagttcaattaggatgtggttttttggttcatgagtacttcgtgcactttattagtgccacagctgagaaaaagttgttaacgcgaaaaacacgaaggccatgaggcgtgtcagtcagtttgattttgcatttgacaagatgaataaattgatgatcaaaaagctgatgggccaataagtcgatgtagcaatactagccaacgtcgacaaagttttgaacaatcggctatatatctaatgtagattctaacatttaaataaagacaatggaagaacttgaacaaacaatctaatcagccgatgataatatgatgaagtagacgtccaatgaactaatcgaccgatattgatatacaatattaaatataggcttaatggttaaagcatacattggttggaagtccgacgtaaagataatttattagctagcactctgataaaacgtactacctccgtcccacaatagttgtctttctaggattcaaaatatgtcccaatatacttgtcactacaaagtactagttttcccattcattccttcatattcaaatttcttccttttctacccttaaactactactccactcctaaccatacaccatttaatgtggggtattatagtcttttttttgcaaacattagtccatactaaactacctagaatgacaagtattttgggatggagggagtagcataaatctataaacttagcaagacttaaattataagcagtaatataagatcgaacctaactaaaacagttttagattacgtctgatcaaataagttagataaatcgatagatctatgttaacgtgatggatataacaaatctatttaaaacaacattatgattgcagagatatatcgactaagacagaaatttggacctaaccgagatagtcccaactatactggtacgtctttaaacacaatgcaattaaagatagcattgagatatcatgtaggcaactataccaaccgaatcataccaatccaaaagatcgaagcgatgcagccttgaaaaatgccaatataaccgatacaattgcgatgcagccccccgacaggtgccaggttctgccaatgataaaacctcggaaaagagggtggcgatgtgccgaaaataatatggaataaggtcaaatccaattaatgggaatgtgattatgtttaaaatatggtcataattcggtatattttaatccaaaatagcgataataaacattacattcgcaatgtgatttgatttagtgacattgctagatgtaacaaacatgagcatgctttttataatataagcattaacatagacaggacaatgcaataacattgtgactaacagtagaacaaatggtaacagaaaagaggaatctaacattagaacttgaagaaataatgtaagaaggttataccccgagaatggccctctgataaatttatactcttaaaactatcagaatttttattttttgttatgactaaaatataacaaatttgaggttgatactttataatcctattaaaagtatttgtataaattttttggaaaaatttgctatatgatatcaaaaaaatgtgtaattagctgggagacaccgcaagaacacgtatctgctataggacaatgtaaaaaactggtaattagctgttggacatccattggattattttattatatccagaggaattggagagagaagcagctatgttagtacgagtctacccttcgatttttttctttttctttattcttccttattcttttctctctctcattctttatctttctctctctgctctttctttagtgagcttgagggagagggggagcgttggcgacggcgccgccaggtgcgggccggtgcaacacctcggttggggcggcgctgcgcgggtggccaggctcggcgggcacaaccacgctaggagtgtggcggctccgggtcagcttcgggaggctagaccggatggtgccaaggtggccaccggtggcggcacggcgaggttcaagttgtcgccgcgggcgctcttcttgtgcgggatctttagcaccttcacgtacctggcgtcagctcgatggtggcgcccaacaactatgtcgtggcggggatgagtgggacatgggtggatcgggcacgccgtgcaacggtgttgtggcggtgccgatggttgtggaggtagtagcgtcgccggttgtggaggcggtggcaccggcggtgaagctgagtagtcatcatcaggagcagaggaggcaacaacatcagcaacagtgcagaggagcgtcaggctgtcatcgtcgtcgtcttcgtttttggtgtgagcaggaggtggtggtgggggtacgatgtgatgagcgcggaggagaagttcccggcgggggaggtggtggcggccctgcggatggtggagagggggatggagtcgacaaccagggtggtgccggtcgccatcgtcaccggggttgtggtgtctgtgcaggagccgacgatggcgaggtttgcggcaaaggtgctgctagatgtgggggcccacgttggattcatttgagccaagagcaaacttgtctttaatgattgtttctctctactattcccccgaaaataataaaataatgtcacgaatgtccaacagttaattactatttttttgcgataccctacctaattacatgttttttggatctcatgtaccaaattttaccaatttttttctagattttgtttgataaaattttttaatccatgtgcatgatctgtccaccaagtatggttaatggacaatccatcacttttatcaattcacccccatccccatatacgctctcccccccttctcctccccttctcctccccttcttatcttcctactacaccataaatttttaaaaaataaaaaaacaaagttgaaaaaaattatgtatagaaatactatttataaaacatatttgaatttaaatttaaatttaaaacgggtatgtaaacttttgacttataaactttgggtctataaactttaggtgtataaactttagatgtatagaaatactatatataaaaaatatgtgaattcaaattcaaatttgaatcagatataattcaaatttaaatttgaatcgggtatgtaaccttttgacttataaactttggatctataaacttaggtgtataaactttagatgtatagaaataccatatataaaaaatatttgaattaaattcaaatttgaatcggatatataaacttttgacttgtaaactttggatctctaaactttagatgtataaactttagatgtataaactttagatgtgtaaaattgggatgtataaactttaggtgtataaatttactaaaaatagaaaagtaatatggtaaaaaaaaggaaaccacatgtaggaagtggtaatcgatgtgagggaggggaaccgatcgctcaccgatcgcctcttaggactttcagtgtgcacaggatatgtttcagggtaagatatagaatggcgcgtgacaatcactttcaagatggatcttatgtaagggcctgttctgtacccatatggccgatggctataaaaccacagccgctgcactgcaacattcatagcatagtttttctacaagtcactgtagatacagctacaaccacagccacaagatgatgaaccgaacaagccaagggtaaatgcataatggagcggacaagcagtgtctagcgtggttctgtcccctcccgctgattgcgtttatatgtcgtatgaaattgcgttgtatatcaaattttttttcttctaatatattgacgtgcaatctttttacgcgttcgtgaaaaagaacggataagcatgagtacattttgtattttttacacttattctgagcacaactgtaatttaattattcaaaagtgtccaatcccaagtttagctatttcgggcaacactctattaactcaatagccacacaagcgctgcctgcagctatggcagatgaggggcacgagggccagcggccgatctacagcccggtgacccgacgaggcacaggatcattgggtaaacgtgcaatagaaattgaattttttcgataagttaaaaacaatttatttatagtaaaacgcatgataaaataagatttacttagaccctgaatttttttctggatctaccactatacgaggcaatgcgctatctcggatgcatcaaccagattgagatcctctgcaatcgacttcaccatgcctttatcactaatatatgggtccgacgacacatcgggcccacatgtcagtgacaaaagcacggtgcattgactgcagaggatcctgatcccgcatcaaccaccacaagcatcgtcgccgcgccattgcaatcaccagcggctgctgctgctgctcctcctccagctcggctctggctgtaccttcacgctgcaatgcctgtccacgccgagccctaccgtcctcgtcgtgctcctcctgcggctgctcggcgctgcgctggccatggtgtcgcttctcgccgagcgatgcgccccgctctcgctgtagccaatgccgccattgccacggagccgcgcagttacctgtttgttgctagcctcttgcctcttgtagttcagccatccgccgtttccagcgatcatagttctctccgctctctgctgtcttgagtatgaaaatgaaaatgaaacaaataatatgccatatgaagtgtacacatagcagttcttgaaggttctgttacgagcaatagtgagagggaaagagagataggaagtttcagagttagaattggaaagaactgggttagaacagcgaagaactcggacttgatttcagagagaatattgtttcaatacagttcaatcctccacacacacatgggcttcctatttatagactcagccacactactggacccaatcctttcccttcacacgcggattgtcgcgtctctctcgcttgggccgacctgtatcagatggcccacttggcttgaaccttgtcttcgcgcaagaagatgatgtagtagcttctggcgtcacattcctcccttcttgagaaccagcttgaccccaagctggcgctgccggaaacttgtgacgcaactcctcgaaattttcccaagtaatggctggagaagatgcaccaacccactcaacctgaacttgttcaataagtttggcacccctctatcgaagacatcggtccagcaccttattaggaacagcaaattgaccaagttcagaattcaaagtaggaagagatggctgcactttttcagctggagccaatgctttcttgagttgtgtgagacatgaacaaccggatgaatgagactagtgacaggtagattcaacttgtaagccacactgccaactctctgaacaatttgaaatggtccataaaacttaaaggacaacttccgattagcccgtgtcatgacagattgttgaacatagggttgcagctttaagaacacccaatccccaacagcaaacgatctttcagagcgatgcaaatctgcttgatgtttcatacgctgttgagctcggagtaaatgatgatgaatcaaagcactcatattattacgatctgtcagccaagctgccaaactatctggagcatcaacagaggcaatggataacccaaaatacgaaggtttatgaccaaaaagagcttcaaaaggagtcatagcaatagcagagtgatatgaagagttataccaaaactgagcaaggcccaaccaatgtttccattgccgtggacaagtgtgaacaaaacaacgaagaaatgttttgagacattgattcacacgttccgtttgtccgtcagtttgaggatgatatgatgagctcatgcgcaattgagtaccagccctcctgaacaattctttccacaatgcactagtgaacacgcgatcccgatcagatataatagcacaaggcaaaccatgaatacaatgcacctgatccatgaacagttgagcgactgacaaagctgtgtaaggatgtcgaagtgccaaaaaatgtgcaaacttggaaaacttgtcaacgatgaccaagatcacattgcaagaagctgataatggcagacgttcgataaaatccatcgagatgatctgccaagcatgatcaggaacctccaaaggttgcagcaaaccaggcaatttaacatgttcagattttgctctttgacaaatatcacaagtctgaacaaatgagtgaacagattgtctcaaacctggccaagcaaacaactgtttcaccctctgataagtggccaaattccctgaatgaccacctacagcagcagtatgaagatttgctagaatctgttgctgcaaaggaatattatcgccaatccaaattcgtttcttaaagtacagaatctcagactgcaactcaaaattagcatgatgcttcccattgtttgccaaggatttgagaatacactgggtatcagggtcagtgacataacctgaaggaacatcctgaagccaggaaggaatgctgaccgacaaagcagaaacctcaacagtatgggccggcaattggcgagacagagcatctgtagcattattctccaaacctttttttatatacaatgcgataacgcaagcccatcaacttggtgagtgccttttgttgccaagttgtagacaaacgctgattctccaaataagccaaactgcgatgatctgtcctaataacgaattctgcatgttgtaaataggaacgccagtgatccacagccaacataatagctaaactttctttttcatatgtggaaagacactgtgcgcgaggaccaagagctttactcaagaacgcaacaggaaggtcaacttgcattaaaactgcactgattcctttgtcagatgcatcagtttcaacgacaaattgtttatgaaaatctggcatagctagaactggggttgatatcaaggctgattttagagtaagaaatgcttcctcatgaactgatgtccaaacaaacaactgtcctttcttcaacaaatcagtcaaaggtttgcaaatgatgccataattacgcacaaatttgcgatagtatcctgataaacctaagaaactccgtaattctttgactgaagatggtgtgttccaatttttgacagccacaattttctcttcatccgtagccacaccttgagcactaatcacatgtcccaaataagctaattgaggttgagcaaaggaacacttagattgtttgactttcaactgatgctcagtcagaatttgcaagacacagctcaaatgcaattcatgatctgccaaagtctgactatataccaaaatgtcatccacaaaaactaggacactttggcgcagatgtgtggccaaaccagagttcatcacaccttcaaatgtagccggagtgctagtaagaccaaaaggaagaacgcgaaactcaaaatgaccatgatgtgtcttaaaagctgttttgtgttcatcattaggatgcatttgaatttgatgataacccgaacgaagatccaatttagaaaaccaacatgcaccagctaactcatccaataactcatcgattataggcaaaggatatttgtttttgactgttaaagcattgagatgacgataatcaacacaaaaccgccatgaaccatccttctttttaaccaaaagaaccggtgaagaaaaaggactggagctatgtttaatgatacctctgtctagcatgtcagcaacttgtctctcgatttcatctttttgcaaaggagtgtatcgatatggccgaacgttaacaggctgagttcctggaattaaaggaatggtgtgatcacaatcacgagttggtggaagtccttgcggttcgtcaaacacagcagcaaattcttgtaacaattgctgaatgttagcaggaattggcatggactgacttccttctgattccaaagcctgtaaccgaaccaatccttcaatggatcccgacaagtgaagttgatgtaactcaatagcagataatactgaatcagaagccacagatggaaccactccacataaagtcactagctggtcatccatatgaaatcttataattttctgttgccaatcaatatccatgggactatattgttccaaccaatccatccctaaaatcatatcataactttgaagtggcaacactttcaaagtagaagtaaattgttgaccttgaattgaccaaggtactctagccaattcagactgacattgaagtgtttgcccattagccacctttacttgaaaaaatacatgcaactgtaacagatctaacaaatgagaaactacagatgaactgataaaactgcaagaacagcctgaatccactagaataagcacagcataaccctgaataacatcttgcaagtgcattgtttgagccacagtagtgccctgaatagcatgaaccgacaatgccaacaaaggagtagtatcaagttcatcagatgaagaattaccattgtcactgtcatcttgatgaagaatcgcaaacacttcctgaacagcattcaattgcacagagcctgaacatttatgagatggagaccatttatctgcacacaaatagcataagccctgtgctctccgaaaagccttgagtgcccgcaccttgtcagtaattaaattggacttgatagattcagaagacaatttagcagcaatggagatgattccacttttgatggtggtaaaggcaatggataagctcccttaacatgctgcacattatcccccactttgcgaaattccttcggcttctgagtttccaaccattcctcctgtaaacaagcaacggcaagagcagtctcgagatcgcggggtcgttgtaacataacagcatgatgaatttcagatcgtaattcctcagtgaacctatgcacaatcgtaagaggattgtacataggatcataggctagcaactggttcatcaaatcatcaaatcgctcataaaactcttccaccgaccccatttgcttaacctgctctatctgacgaattaacatctgatgcctatcacgatcaaattttctatccactgctaaacaaaattcagtccactccccaaaacgcaaatgagcctttgaagaacgcaaccacgatgctgctcttcccatgaaaaaaatggtggccacacgaacccaaagcataggatgagtaccataaaccccaaaataatgctcgcatctcatacgccaattctgcggatccaccccatcaaactgtggaaaatccaacttcggcacccgatgattataaccccgctcctccgaaactccaatctcatcccgagaaaaagaatccatagcagaacgagaattaaaaggagaacaggtcgtacccgtgaccggaggtagcacagaaggagtaacaactcccagtgctttcccccggtgatttgtggcaacgcggtggacatctgggcccgaatcaccagccgacgttaatgcgatgaacgacgcgggcgtgggaagcagaggaagaggtctatcaacctcgtcgctccgcctctgtgctgatgaagctactacacgcgacatgttcgacgaattgccaaactcgccgcgaaatttttccaggatcaccacttgattcttcagctcgttcatcttagctcgaagtcccttgactgctgcatccacttgtggtcgccgactggtcatcgcttgatccaacttgagcaccaccgcctgtgtctcgtcctgcttcaacaccacggcgtcgatggcgttctggattccctcgagcatcttctcgaattccccagcttgcttctccatggcgtccacttgaagttgcaaccgagtctgaaactttggcttctccgggatggaaacggctctgataccaagatgttacgagcaatcgtgagagggaaagagagataggaagtttcagagttagaattggaaagaactgggttagaacagcgaagaactcggacttggagagagggggaaaggattctgggatttcagagagaatattgtttcaatacagtttaatcctccacacacacatgggcttcctatttatagactcaggcacactactggacccaatcctttcccttcacacgcagattgtcgcgtctctctcgcttgggccgacctgtatcagacggtccacttggcttgaaccttttcttcacgcaagaagatgatgtagtagcttctggcgtgacaggttcctgcttaattcactgattactaatgatcgcatctgcagattacatagggagaaaaacaacatggctatttactttcagcatatcatatttctgtatagctcagctcactttcggatgatgccgaaagaaagcacagattctatccaaatttaaaaatatatgcatacatgatcagactaaaacaaagaacaaagggttcactagcaaaacatatatgtttttccaaattatgcccaaagcaaaactgatgggcactatatagtaagaaaaggtaagaaagaaagggatgtgtaccttcagtggaacgttgaacttggcaataaccttgaaaaagccatcatcatctgaaacgtcttgaagcagctgcaactcttcccgcaacatcctaactgcaacgccgaaatcacaaggaagaagaggagtacattatgtacaaaagcacaaatttaccgtatacaatcacagaaatatgtttgctaagtcgctagtaatctcaatacaaaagaaaaaaagaggctgttagaccattactacttcatccaacagcgcgaaacacacggatgctgaacatagaaatcatatacacggatgctgaacacacggatgcgccgcttgtagtacagacgcagcgcctctcctccgccgacgccaccgccggcggcggacctccccttctccgccagaagcggtgcggaggagggctgaccactgggagatggccaccttcgcggcttcgccatcgctctcggttcgatcgctcaccccgctgatttttttttgagaagaatgacggcaggagttctgccggaatttaaattagggaaaaaggccgaagcccagcaaagagtttaccgagtttacaggggctgtaaaagagatgaaatacagcttaagaagtaaagcaaatcaggggggcttgaaagctaatttgcgcaaatctaaatcttgcttgataaggtgtgctacatcatttactgagaggcaagaattttgaaaaattcttctgtttctttctagctagatgttccaccaagtagttagtagcgagcctctgataacctgcatttgaactttgcttcccgaatggttggttccattccaccaagtttcaacgtcgggggggggggtgtgaggaggttaaaggggtcaggttttggaactggcagattagactccaagtttgcctggtaaaaacacattcactgaacagatggtttgtgtcttcgaaggcgcaagtgcaaaggcagcaaatccaattacatggccaatgtcttcgaagtaaattttgcgcggtgagagttttttgatgaaggactagccatccaaagaatctcattttgggctccgccggggacttccagagtgaaaggtaatcgagtttaccaaaggatccttcaaactggtaaagatacacacttctggctgtgtaggtaccggaatcagtccaattctaggtaatgttatccggttcttgggatagcaaaaccatatgaattaagcctcctagatgtacaagctaatgaatttcctccactgaagtaaactgtctgaaagaggttagccatttattgtttgtgagttcaacttgcacagatctttgttttctctttgccaaactaaagcatcttggtgcaatgtcttttgggcagcgattttgaagccagatgtcatgccagaatcttgttttggcgccatttccaaccgcaatagtcgttgcagcttgaaagagcctatggtcagaatcatcacaaggcaggcacatgcccactcaaagcttttcttcatccttccaattgaaccataaccaacgaaggcgcaatgccctggaaaaatgctctagttcgagaagaccagcacctcccagaccctttggtttacatacggtttgccagttgatcagactatctcccgggtttgaatggtctggatcttcacccttccatagaaaagatctcctgaaacgatcaattcttttgaaaacccactttggagcttgtaggacagtaagatgatgagttggcatagcacttagaatagatgaaactagggcttgacgtccggcagaagtgaatagtcgccctttccaacctggcagtctagacccaatcttgtctattaaaggaaggaaatcaattttccttagttttccgagatgaagaggtaggccaaggtatctgcaggggaattgttttatttggcccggccatccaacaagaagattttgcagatcaatgtcttcgcatttgatggggtagatttcagttttgttgatatttgtatgtagcccagatgcttgcgcaaagcatacctgaatatgtgaaagggctgacaaatcttcttggttcgggcttgcaaaaaccgcaacatcgtcagcatatagtgagcatctgaatcttccatttcttaccccaaggggagcgaggacattaacattttctgcttcttttagaattcgatgaaaaggttcgatagccaagatgaaaagcattggggatagcggatcaccctgtcgcaggcccctggcatggttgattttttgccctggggacccatttaagagcacctgggatgtggaggtagagaaaagattagcgatccaatttaaccatcgattaccaaaaccaaattgtcgaaggatctctaggaggtaggaccagttcacagtgtcaaaagccttcgctatgtctatcttgatgaacaagctttgttttttttgtcctgtgaagcaggtttaccatgttttgcacataaaggaagttgtcatgaattgctcttttgtgaacaaaagcgctttgattttgggaaatcatttcgttgagccgaggggctagtctgtttgccatgatcttggcaataattttggcaaagctgtggatgaggctaatgggacagaagtgttcagcaccggaagcatcatctttctgtgggataagacagatataggctaaattcaagtcagctaactgcgaggtgttgaggtgcatgaaggatataattgctgctagaaggtcatcttttattatgtcccatgcagctttgaaaaaagctccaatgaacccgtctggtccaggggccttttcaggagtaactcaaagacagttcattttaattcctcttctgtggcatcttcttctaactcggtgagatccaagacgggtaggttcaaacggggccagtttaggcttactgtccttggagagatcgtccccagtctatctttaaagaacctgaaaagctcttcctctttgtcttgatgagatggctattccggaaggtgtttggagcgaatggatataattttttctccgtcttgaatttgctttgatatggaagaattttgagtttacatctccttctttgagccacgttaatctcgatctttgcctgatttgtattttattaaggactgaaaggcccagaaatcttgatttaggatttgacagaaggtgacgctcaccatcgctcagcagtcttgtttcttgagctatctctagacgaaggatgacttccgatgctattgctagctgtagtttaatgtcccctacctgagagcggctccatcttctaaggtcacgggctaggcgacgaagtttcagacgcaaaatcacgagactattcgtggcaagaattggtttttgccaggaactttggacttcctccaagaagccagggatacggagccaaaaagattcaaatctgaaatttggaaaatttttcctttgttcatttccaacaaggaaaatgggggcatgatcagaacacgctgaggatagaggataaagacatgaatttgcaaacaaggaatcccagtccgtagtcgcaaaagcacggtcaattttggtttgagtggggtttgaaccatcacctacccaagtaaagcgccgacctgggagattcagctctttaatttggattttatctatgagtcccctgaaacgctgcatcattcttctgtttaagcgatcgttgtttttgtccgaagctttataaatgaggttaaaatctccaatgatgagccaggccggtttcattaaagattgaaggccttctaattcagcaaggaaagcaattttttcagtttctaattgcagcccataaaccactataattgaccattgttgagcttcttctcgcatagttatggttgcagagacagagaaacgtcccagatgaacatcagagattgaaaagaagttgtcatcacaggcaagaatcactccacctcttgtgccttcagctggtaggacagcaacctgacgcgcaaaacgttggccgagagtgtttagaattatttggtcagacacaacagcaagcttggtttcttgtaagcaaacaatagtagcgctatgttgttgaatacagactttcacgaaatcttgcttggccttgacattcaagcctcttacattccaattgaacagatacacattatcctgcgacatagagtaaatggtctactatcacagcccaattggcagaaacacagccagcgcagctggaagaaacacagccagagagggggtagggggtagatctcatcagcaactctaattcatagtaggcaggagaagcagcaagcaatatagtgcacagatagcagcaatctaaaggacaagtacatctgaagagctaagtctttaacagtagaagatatcttgtcatcgatgagcaaaagcttctacttctagtcggcaagagtcagccacagtggcgccacagatgccttcttggatgccttcagcctgatggccttgcatcctcccttctccactagatcagcgattgtcttcagtgaagctggggagagcggcttcttgtatcgctgcaaatacaactttttgacgttatcatcgaaagaagcagaatcattcatgataccgaacttttttgaaagaatttcttgggtgaaattttcaaattttgcatttgcacgtcgtttatagagcagccgttcactgtgacgctgagcagaggcgatgacagggattttcaccttaacgcgggaaggcttcctcacattcacatccggagctgggagaagaggtggctggatcgacgttgcgatgtcattgatgaactcagtgatctgtgaatcctttgctgcagccagaggtgtcagagttggagccgatgccggtcttgcaaaggatgtcacaaaaacagggaaggaaacacgaggagagtttgtatccggagagtacatagagtgattcaccgccgcctcatgaagcatgggatcgagatggctctccaggatttcgagcacatcctctcgaccctgcaaagacaggagagaatcagcctggtgagtagtctgggccgacgcagaggtgacaatcaagacagcagcagcatctccatctggactcgggttgtggagggtggttgggagtttgcatggagaggccgaagcaggggtagaggatgagaggggagaaacaggcgtgtgatctacacgagaatcagactgggagggaaaaggaggcctcacctcgcttggttcacaagaatggtgggagcggcttctatggtcatatcgttccttgtctcgcgatcttccccttctttcctggtcgcggcactggccatcgcgccggtctggctcacgattccgaccggaagagcagccactgatcctgtcccagagtgaacggcttctatgacggcttttggagtggtcctctctatcatcatcgtcatcgtcgggccccgggcaaggtctggctcagctctgcaggggagagggtactccttgaagcggataccatcatcctgaacttcatagtcccatttgtaagcacgagccttgcgggtgtggaggtcttctagagtatcaacgtggaccaggacattgtaggtccagcccttctttggctcggaaggtagggggttgcggaggggatctagctctggcaaggggatgtccgtgggcagtccttcctcatcggcgtcagtgatggcgaaggtgccaccacggggaatggcccttggctcgcccgtccacacccacatgtcataggtgcggttgtagttgccgcgcctagagtactcctccacatagtggatagcacatttgcggccaatcaccttcgccgccgcttcatcagttcgcctgtgcatgggaacgccctcaatgcagagccgggcacggtagcggtagcgagctgggatgccatgcaggctttcatcccaggggcggaaaaggtataccctgccagaaggagcagtgagccttggctgacggaggatggcatcacgatcactttgatttgagcaggtgatgaagaaaacttcggggtggaatttggtgaactgaatgtcagctctcctgatgtggaaggcagaacgcatgtcatcagcaaacactccaatttcaaccttgtccccaagggccccaacttgccaggctaccagggagcgggcagagaaacgttctctgtgcctctcgatttcaccggtagcagagatgactacagagtcaagcaggggtcgagcagtgagatcatccatggcagaaggagcagagagggatttgggggggaagtggaggggagcaagttctgggaagtttgctgtggagagaacaggagggttaagcggggttttatagcctgggcgcttgcgacagtttgaagccagatgacccgagttcatacggaaccagcagcggatgggttctgtgcaggcagaaacttgatgtttggtgctcagacagcgaatacatttaccatccatatgcttcaggaacttctctcttcgagattgaatgcgatcctggttgttgggtgatttgaaacctggagatttacgccaccaatgcttcggtctgacttgttcccaattgctttcagcgaattgaaggcgatcagaagtcttcgacaggactggaggattttggattagaggagggagatcttgatgagacaagacgaggcatcgagttcgcgttcacgttcgccccgctgatcaagttcgcgttcgtgttgggctgggcttctttctgggttcgtggcctcgaggggttatggcctctctcaattctcaagtgactcggatgtcaactctcaagtgactcggatgtgcagacaggtggtgggttggagtcggatatctgatgataatgcggttcatttccgtttggtacagccgtaactttagcttcatctttttcgaggctggagctgaaccaaacagttttagctccattgaagaaaggagttatactgattggaatgctcttacagtaaaaaaaacaaggaagtagagctggattttagacagttctacaactacactctaggccctactcttagagttaaatttaggagttgaaactctaccaaacggataggtaattggaattttggatgatggtcttttaaaaactcgattgcaggaataaaattttacggcttgaaacttacaaaatgattagaaaagatagcatgtctgagcgatttgtaaaaaagtgaacaaataaaaatctacaataccactaaactattgctttattttgcagacattgcttaccattgaaaaaataactaaccgtaaataagagcacccatgtcaaatatactatcactgataaaataatcaatcgtaaattcaagcacacatattagtatagtactttaactcgattggatagaagaaacctaactaatttaagctatgcctcacacaaaaaggtataaattttttaaggcttcttttttttttcttgcgtttgctagtttatgcttttaagatgtttatactttttactcccctcattcactgtttaaatacaatgggaattagtgaaatcaatgagagttcaaacttcgaaacactgaatacatgttattttggattgaaatcaaatcgaatcagtcaaattcaaatatgaggaggaacataggcattcttcctttcttcagcgggcaccattgaattcagatactgcttcgcctaagtccctgtccaagacttcacattttctgatggtgatggggaactctgaaactataggaggaagaataaaatgaagaatgcagaaatgaatagtaattggtgttttttaattcttcttcaattccaccttaggatccaacttcagtccaaatccaaagtaatgcaactgccactagatcaggctagagcttcaaattcaactccaaaaacctccgtaaagtggcacacacagaggaaaaatccaggattcgtcactgcccatcaacatctgctttcgcctcccaattcctgctttcttgaaatctgctttcgccgaattcatgccttcttgaattatgctttcttagcctcccaattcctgcttttcttgtgtacttgtgaattgtgggtgactacgactacgagtgctataaatagaagagaccaatagagtgcatcagagaaaagtactcctagaagacagccacacacactgagacacccaagaagttgcctccgatggcggattgggcgatgcaccactacctcctactagccaaccagcaacgccaccgagccctcgccgacgtcgccgtcctccgccgccagctgctcctcgactccggccgcgtcttcatgctcctcggcgccgtcatcctcatgcacctgctcgccaccggccgcggagcatcgtccggctgcatccgcggcgccgaaccttgcgtcgccctcctcctgtggctgctcggcgcggcgctcgccatgctgtcgctcgtcgccggccgattccccgttctcgcagccgccgctgccaccattgctaaggagctcggtgatcacctgcttggtgatcatcttcttctccgtgcttttgctctggagttgagtacggattgcgtgtattgcatccttgcattctccctacatgttatgctttcgaaacatcatctttttttcagtatagttcaataaatttcagctcatatttgtcctccaagacgagttctccatcaaacgaaacttagggcatgtacaacaatctttattagtggtctctctattgccatgcaagtaaatttgatgacatggaagaaagagaaagaaatatggttgttatgcatgacaacggctcagagtcgactcttagcatttattagagcaaattttgttgtatagtggtaaaagaaaggaaagaagagtaagaaaaagtatttttatgcattaatgattagagaccatattgcctctaactgttgtaagatgctagtctctagataacatagagctcatatctgactctacctttgtacatgcccttatggtgttccgttgtttgggccgattttatgttggaaatgtacagatttcatagtattgtgtttcttttttcggaattgctaagcatctgtcgacagaaaatacatacccaaatcttgcaaattttgaatcaccggatgtgcttcgcgattcgtgctcgaggtgcttcttctctaactccggcgacctcctcttcttctctggcgccggcgaattagggtcccggggcgggttggggttggggtggnaanccaaaataccctcactcataatatatatttttctgtgcttctaaggtattatttcttctctaataaacaaattgtattacgcttgaaacattattcatcttggtctattctaatttctctctagttctcctttatgttctttctctcttctataataaattagcgcgggtcggtagtttatttttattttacgtgttcatatttttttatactcttcttagaatatacttgtctcgtacgagcaactaaaactctgtgggtgtagctgttttcatttctaatgttgaacattatatattatccttcctcatggtatgtaatattatttcgttgtggcgttacataataatttctctcgaggacgttctgaaaattttacatacttctcttggtagtgataatccatctatcatgtccgccgaaaca

SEQ ID NO: 29882 - DNA, 19971 bp, Oryza sativa
  unsure (1)..(19971): unsure at all n locations
ttcggggtcttaacccatactttgaaacccttgtcccacgtaccaggactcttccaccattggtcattttgtaacacgtggtttgacaaagggaccaactagtgacctcttttaaatcaactctaaaaatttgcccccaagggatagggggagtcgaacccaaatctggtacagtgatctactagagttatgatacattgacaagtgctactaagttctagtacagtggtaagtactactagagtgctgcaactgctaggctatagacccgttctagttctaaagaatggagtatttgatttgttgttaaaataaacaccaccaaatttcactattatttttttagaaacatggtacaaacgtagatgcccacaacatgtacaccctatcttatgagcacctctaaaaaattgagccggtatatattgaaattgacaaagtcaccatgggtgtcttgctgtcgacgagtacatcgcttactactaaaagaataattcactgtaagcattattattattattacgtgtcaagtctagaatttgaacttgggtaggctgtttccactgcaagaaatctaactagttaagctacgcttacttcacattattattattattacactactactactattactactagaaaaaatgcccgtgcgttgcaaagggtgaatgctattttaattttattattgttttatggtttagctaggagggaaaaaatatccgtgtgttacaacgggtgaatgttttttttaatcttattattgtaataggttttagctatgatatgaaaaacactgtgggaattcgcttagatattttttttagaaaatcatgagctgtaattaggagtttggctttcatatcaagttagcatgcgagttattctaaagacatttctatacgactgcttttgtatttcaaaagcaaacgaacttaaaattcgactaaaaaacggatctatattttaaaaagtgaacgaacttaaaaccaactcaaatatggatgacgtaccaaaatatcggtaaaaacatatttaatttcaaaatatcggtaaaaacatctttaatttttataatagtagagaagagattattattattattagaggtagagagaagttgatctatgtttggtttgaccacttacgtagtttcttagattttgagatagtacgagagttggtttcaaagtcaccgaatttttgtatgtttgcgatgattatagtacgtttggcttttaaaggcattattgttaagagacgccgtgatttaggaattcatgataatggacagacgtgaaataatggtgatgtacccgtagaaagtcctctgatttctctaaaaaaaaaaagaaagtcctctgacgaacgagtctcggattcgattcggttcgttcggatagggccgggcccgtccagacagctttgacgcgccttccctaaaatttcgccttttggagattagcgtcagtgagattagtttacgatacttgccccggcgcacgtcacgatatcggcatgtcacataccgaacagcttacagctcacccgtgactaaaatgtgtacgtgcgactaaataaaatgtacatgtactgtacgcgatctataaatacaaagcggaagaagataggtgcatatgccacccacacaaagcaaaccaaagtcatcataagctgatgatggcggatcgggcaattcgttacctcctgcgcggcgaccagcggcggggccttcggcgtcgagcccagctgctcgccgccgccggtcgctaccaccgccgccgccgtctgctcctcctcgactccggccgcgtgctcatgttgctcgccgtcgttgccctcctgcacctgctgacggccgcctgcactggccaggttgagttctacgtcgtcctcgtcgcgttcctcctgtggctactcggtgcggcgttcgccgtgacgtcgctcgtcgccggccagttccccgttctcgccgccgccgccgccgcgaggacgctccgtggctggctgcttggcggtctatgaaattaccgtatattatgttctgaaaccgtcgccgccattgctatggagctacgaaatttcacgcttcaataagaaaaggaggaattggttagtgatctctctactcttgtcatcctcaatgtccagtgatcatcttcttccctagatcgctatatatttcaataaatttttgttgtacaatgttccatttatgcaaggaaagaaacttacgatgttccactgtttgaacggattatttcacgctcgaaatgtacaaacaacgaaagtgctctgttctccgcagtttactttttttaataatggaatgaaataacatcccgacctttactcaaaagagttacaaccaattattacaaactagcactctgtaaaaaaggaaaccaaactagacaaaataatattattccagtctattggtaaatccccatccatgattggcaaacagttgcataatcgttgtttcaagcttacgacatgcaacaattaggaaatctccatcttcatcacacttttgtaactgtgcccacagacgaagccaatatgttggcttgaaaatgacctgcatataagtaacagtaggtgatttgtcaaaaaaaaccttatcattcctactcaaccataaagcctaacacaaggcagaagctccaagaagtattggtttgctctttttgtttacgactccctgaagccaatcataaaaaatatgagatatgctagtatgaatatatatataaaccaaaagaaaactgaacggctctccaaataaactttgcaaaataacaatcaatgaacaaatgtccattttactaggccgttttatcattaccaggccgagttctgatgataaaagagaatacggcccaacccgccgagaaaattcttaacgagcggcccacattaaaaaactttgatgtttaaattaggaataagtctatttgtcttccctcaacttatgccccaggttaaatcgtatccctgaacttaaaaccggctataacccatccttcaactcccaaaaccattgtaaatcgcctccccaagtggtttcggaggtggttttgtcccatgtggcatatttgaccccgttgacccgcatgttagtgaaaaggataaaaacgaaaaatggtaggcctactatcagtggctaccgccgtcgccaccccccacccttatctcaacggaagacggcagccctcagcaacatcatcttcgccttgaccttcattagctatcgagcaggatgaagggggctcgaaacaacccgattaccttacatgatggcccgaaccaccaatgaacaagctgtaggcgagaaagaagcaaaagcacgcggcaagcggtcgagcctttgagaagcctagggaggcagagatagagtcaaattgcgttttgtaggaaggaaatgagctgagccgccggggatatgtcgctgccgcccagctcgccacactgcctcccaccattgccttgttagtgccgtcgagaagacttggaggaaagatagtagatagagaaggaatgagagagggggacgattacatgtgggtcctagttgtctattttaatttctttgatgggtaggctactatatatgtagacgctacatccgagaatatcacggtcaatattgtcttgggggtcatttttacacaattttaatagttggaagagtcgttataaccgattttatggtcgagggataaatattaaattttttactagaaagaaaagaagagagaaaatctcagtcaatcagagagagaaaagaagaatctaactagaaatacaattcccctgaaaaattagaaatacagtttaaaatatttgaaaagaagagcccatatgtagaatatgatatagattaattaatagaaaatataataaaataataatttgattaccacacaaactccaagttaactaaaattaaaagtacaaaatacaataaaaactagctcgcgacgctagaaattccatctctttggacaatagaaattcccacgttaatcgacacctttgctctagaggctagaaattcccctgttaataggagaaaaaatatataagggtttaagtaggaatgcggtttaaaacgcagacactcacaacgcacgcgcactcacccctgtgaacacgcgcacgcaaaccctacccctatgagcatcttcgaagactggaccggcaaatcctggagagattgacaaagtcaccacaggcgcctcgctgtcgacgggtacgtcgcctaccactgaaaccacaacgccattaaatcctggaaaattcgctcccatggggagtcgaacccaggatctcatgtgctattgaggctcctgtaaccaccaggttacaggccctttcgcttgggtcattaaaatttaaaataaaaatataataaaaacttgctatgaatgttagaaatttccgtgttgattgaaggaaaaacatagagagtttaagtaaaacttaaaaataactaaaattcggaataaaacataacgaatattgaaataagagtccatccagaaaaacacgagattaactaaaattcagaataagaaatcaaataaattcctaaattcaaaatataaaatagaacaaatgttgcaattagactccaatacaattaaaaacaatacagctagatgttattatttctattcaaattagtacacttatatattccttaattaccaaccaacgcatccatgaatacaattgcaatcggctcctccaatagtatgatcactgtggctgctcaacagagagatgccgttgtgtcatctcttgcgtctacatgcatggagttcaaggagggagatggagtggcggcaatagcaggtcgcttggcgggtgcctcaccgcctctccagctctccccgacatggcaactgtttcgcaacgcttctagtagacaaagagttggctggaagaaaggatgactttgttgccggttcctaaacttgcgttgcgttcgagcgagagagaaaggtggcagcagtggatctggtggctgcagagctgagagagaggggatgtcacactacaactgctctaccaaacatctaggtggtggcgagagagaggatcgtgcggggggaggggggtggttaaccttttgcaaatgtggcttaggtcgaacgatctatcatcagtttatctttctttacttctagctcacattaaaagccgcaatgttatagtataactacggtttttaatacggttgacgctgattcttttatggctatttttataggctagaaattctcacgttaatggataagtgtttctatggtagtggataaacaacaagtaatcatatctcaatgaccttttaacgggcttttttttgcagttgatcagttgttttggtggatcaaagcttatccttttacctatatatgttactcaggattattcattatttcaagttattgccaatgtgaggtaatataaaatgtaaggaaatcaagaagcacaaatgcgcgggctgtcatgttagtttagattatcaggtaaattatttacttgattacagaaacaaagtaaacatttaaaaaaataaagttaacaaataactaaaaacaaatggtaatgcggtatctctgattttacttttcaaaacgtgagcaaatgagcgggaaaagccttaactgtattgagaaaaaaaaatgaggcgtttgcgaaggggcgaagtttgtgtgatgtctcaatcgcttagctcggggggggggggggggggggcgtactccagcgttttgtacgtatgtccgatgtcttcatttgtaaaaagacaaaaaagaagaagaagaaataagaatgtatacccacccaatgtctccattaactcgatccatattggaggcaaagctataaatataaatataaatncaatggttgcaccggagagcagcgcaagattctgctcaaatcagacaaccagcaacactgcaagctgaggcgttgcgctagccacacacgcaaagtgcgtacgtgcaatggcagatgaggcgttggcgctacgacatcaacaatcggatcggacgacatcaccgccaccgccggcagatcttcctcctcgactccggccgcatcttcatgctactcggcgccgccgccattatcctcctcacgagtagcgcaagctgttggattggatgccacgcgcagccacgccgtacgtcggcctcgtcgcgttcctcctgtggctgctcggcgccgcgctcgcaatgctgtcggtcgccgccggccaattccccgctctcgttgccgccaccgtggccattgctacgcagctgcgcaattacctccttggtggtctctagagactctttctccaccaaccgtgcacgcatatatatgtgtcatcttctttttctgagctcagctgtagggcagaatacgcattgtatattcgattcttgctcatttatataggatgctacacctatgtattcgccatactgtccaatcgtcgttctcactgtacttcactaaatttcaatttgtactagtccattgaaatggtgttggaaatctagggactaatcggaatattttgatccaagatacattatactaaacatgatatgtgtgtaatacagtgatccagtgatagtgttaaacattaatatgctaataataataataataataataatagcatcatttagtaacatatttaattttaaaataaagagaaatacccggaaattgctctggatccagagacggtggcgttgtccttcccagtcccaccgttctcgttcccgtttctcggtgttgactttgctggtcaacatcattcgaagcaaagttgttgatggaaaggaagtacagatggccgtatggcctgaggcccgatggcccgcccaaggcccggcgactttggcccggtctagacacggcacggctcgactccgatcgtgcccgtgctggcccggcccaacagccgtgccatgcttgggctgctacctcggcacgctgggccggcacggcccaacctgaagttcagggatgcgatacagacttattctcaaccatatgtaaggcacgtcacaaagaatagggatgaaaaatagacttattatatgagacggctcaaagagtagggatgtaaaatagacttatttttagctatatatatgtcacaacccaaagagaagggagaaaaaaatagacttattttaaagaaggcacaatgggccgcccgtgccttcgggacggcatggcacggcccgacttctgatgggtcgagcctagacttgaggtgcaacccgtgagccatcacggcacggcccgaagtgccgaccgtgccgtgccgcccggtcaccttgggccgtgcctcgcccatgcctgggctgggccgtgtcgagcaggccttatgggcatctataaaaggaagcagtgccgacggtgatgcagagaaagcatagagcagccgcacgaagaacgtgcgctccaaaaaaaagtgattgtccacctactcgtgtaggtactctggtggacgtagttccaaaggcctgctcgtcacgaatacccgtgcaggcaggtactcaggaccgaggaacaatcgaagcagcatagaggcagaagaacaggaggtgtccacccgagagaaccagacagaagaagggacagagagaagactgatcgagcgtcttgtctcggctagaggtaggagtaaagtcacacgcgagagatagggggcattacgacgttaaccgtgcttgatggtgtaaaacaatgtatatcttatcttctagttagttgtgttgctagctagataatagggtagttgagatggataacatccgttgttaacaacctgatcatatccttttgtaagtgccacgtcaagggctgttcttgacaatataaatacaatcatgcggccttctctgggaggtgagaacgtttccaactttacatggtatcagagcctctctcttctcgccatggtgagttcctcctccacatctgtgccggctgcactcggtcctccggtgactgagaagctcaccagggacaactacgttctctagcgtgcacaagttctccctgcgcttcgcggagcgctgctcactgactacctcgacggcacggctgtggagccggccaagatgaggaccaccgtcgacaagaacgacaaggagatcgtcaccaagaacccggactacaccaagtggatggctcaggaccagcaggttcttgcctatctgctgaattccctgtccaaggatgttccgcaacaagtggcgactctcgacacttcggcgcaagtttgggatgccctcaccaacatgtatgcatctcaatcacgcgcacgcatcaccaacctcaggatcagcctcgccaacactaggaaggggtccatgaccactgcagtctacttttccaagatgaagggactggctgacgatcttgcgtcggttggcaagcccctggatgacgaagaactggtgtcgtacatcctcgtgggcctcgatatcaactacaatctgctggtttccaccgtggtaggtcaatctgatccaatctccttaagagatttgtattctcagatggttagctaagacaaccggatggatcatctccaaggaggcggacaaatccaatcttctgccaacgccgcctcacgcggacgtggcaacagcaacgacaacaacttccgcggtcgtggtgccggcggcaatggaggtcgtggccgtggcaatggcgaacgcggtggaggtccacaaggaccacgtccggtctgtcaactgtgtggcaaaactggccatacggtgctctagtgctggtataggtttgatcaaacctatcagcccgaagagaaggttgcagcagcagtgaattccgcctacggcatagataccaactggtatgtcgactgcggtgccaccgaccatatcaccggggagctcgacaagctctcagttcgtgagaagtataatggacagcatcaagtccatacagccaacagcacaggtatgaacattagtcatattggttattcagtaatttcgaccccaaacaaagatttacatctgaaaaatatcctttatgttccctctccaaacaagaatcttgtttcagcaaatcgcttagcctttgataacaatgcattcgttgaaatttaccccaagttctttaacatcaagtaacaggcaacgaggaagctgcttcttcacggcagaagtaaggggcggctttatcctttggctccagcacccggtagtccaagtcctggtgattcaagtctcaataagaatgccttgagcatcatcaagccatcttcgactaggtggcattatcgtttaggtcatccagcttttccaattgttagtcgagtcattaaaagttttcagcttccttgttctagcgagtccaataatgtagaacacatttgtgattcttgtcaacgggccaagagccatcaattaccataccctaaatctctgagttcatccaatgttccgtttgctcttgtattctctgatgtttggggaccggcgcacacttctgttgggcgacatgattactatgttagtttcatcgacgattttagcaagtatacatggatctatcttctcaaaaagaaatctgatgtttttcaagccttcctaaactttcaacggtatgttgaacggcagtttaaaaccaaaatactcactatgcagaccgattggggtggtgagtatgaaaaactaaactccttcttccagaagataggcatagctcatcatgtctcttgccctcatgcgcaccagcaaaacggctcggcagaacgtaagcaccgtgacatagttgagaaaggtcttgcccttctatcccaagcctcggttcctttgaaattctgggatgaagcctttcttactgccacatacctcattaataggttgcctagttctgccatttccttcaaaacaccgcttgaacaactcttctctgaaaatcctgagtccagtcacttgcgcgtgttcgggtgtgcctgctggccaaacctgcgaccatataatcatcgcaagctttcaattagatcaatccggtgtgccttccttggctatagccctctccacaaaggatacaaatgtctggagatatctactggccgtgtttatatctcgcgcgatgttgtctttgatgagacagtcttttcgttgcctccctgcatcccaatgccggcgcccgtctccagcgagagatttctcttttgccttcttatttgctatccaccaccgatcaagggggagaaattactaatgatcatatgctaacatgttctactgaccctacttgtggtgatcaagcaacaggagcacagattgctggagaaaattcgatgcaaaatggtggaaatccggggcaaaacggtgaagatttgatgcaaagctcacatgaaatcatacctggatccgtgaccaatcaaacttcaatgtcagatggctcaggatcccaagggggccagagctcaagccatgcagccagtagccatgcggcagcaagcggaagttcaagccatgcagcgaacaaccatacgacagcgagcagcagtagccatgcagtgggcagcagcaatcattccagctcaggttcacatccaggatcttctgcgcagtctgctccagcacagccaatacaaccagaaccagtcaggcatcgtacccggttgcaaagtggtataactaaaccaaggttagatgttgatggaactattaagtactctttggcttgttctacaggtgaaccaacagatgtgcaagaagcattgggggactcacgctggaaacaagcaatggatgaggagtacaatgccctggtgaggaacaacacatggcacttggtgaaagcaccacaagataagaatgtaattgattgcaaatgagtatataaaatcaaaagaaaagtagatggtactttagacagatacaaagcaaggttggtagccaagggcttcagacagaggtatgggatagactatgaggacactttcagtccagtagtcaaaattgcaacagttagacttgttcttggtattgttgtctctagaggatggtcactaaggcaattagatgttcagaatgcctttttgcatggtattctagaagaagaagtttatatgaaacaaccaccagggtatgaaggtaaatcaaccttagtttgcaaacttgataaggctatctatggattgaaacaagcatctagatcatggtactctaggttgagtcacaagttatttgaactaggctttatctcatcaaagtctgatacttccctgtttatttataatagaaatggaataaccatgtatatgttaatttacgtggatgacattattgtcacaagctcttctagtgatgcagtcgcagctttgcttaagaacctaaggtctgatttaatttgctttaaaggacttaggtgagctacattatttcttgggtatagaggtgaagaaaatacctgatggtatactgttgaaccaagcaaagtatgctttagacttgctaactaaagttggtatgaaagattgtaaatcagtttccacgccgctagctgtgacagagaagttgatggcacacagaggagatcctcttggtaccgaggatagcactcggtacaggagcattgtaggaggattacaatacttaacactcaccagaccagatttggcttttgctgttaataaggtatgtcaatatcttcatgctcctacttcagaacattggtcagctataaaacgaatattgagatatatcaaaggaactgttgatgttggtttgcactttaagaggtctagttctactctagtcagtgccttttctgatgctgattgggctggtagtctagatgacagaaggtctacaggaggttttgtaatttactttggacctaatattgtgtcatggagtgctaggaaacaaccaacagtatccaggtctagtaccgaagcagaatataaagctatggccaatgctactgctgagttaatttgggttcattcagttcttgaagaattgggagtaaaaattgctcaaccacctgtgttgtggtgtgacaatttaggagcaacatatttatcatcaaatccagtctttcatgcacgaacgaagcatattgagattggttatcactttgtataagagagagagtagcaaataagatgcttgatatcaggttcattggatcaaaggatcaaatagcagatgggtttacaaaggctttgtctatacaaagtcttagacattttatgtacaatcttaacttgtccaagttatggttgagggggagtgtaaaacaatgtatatcttatgttctagttagttgtgttgctagctagataatagggtagttcagatggataacatccgttgttaacaacctgatcatatccttttgtaagtgccatgtcaaggttgtttttgacaatataaatacaatcatgccgcctcctccgggaggtgagaacgcttccaactttacagatggcacttcatggcatcatcgattaccggagtaatgtagccattagtaactgtcggtttcgcttttgctcataaaaacaaaaacggctgaaaacgagcattccgtctctgacgcggcgccctcatgccacggtttggaccaccgctcgcgtgtggcattccaaccactagttcaatggttcaaccggttaacaagtgcacttaatttacaaactatttaagttaaggtcttttcgtgttgatttttcatgcggtattaatctccaacattaatcgtgagtccttggaatttattagcattaatttagacatgggccatttagttctaacaaatggatcgtttgcttcctgtataaaagaaaatgttttcgaaaaaaaaatttcctctactatagtacttattacgctcattttaaaatatgagcatttttaccatctttaaggaagtaccaccaggtaccagtatctcgaggtaccacttacatctcaccgttgatttgaaaagggtacgatggtcatttaattcaaacttttccgtccgctactctgcaatgtgtctgaggtactaaaaactcgccgccgatgcacatgctgtgtccctgccgccaccacagcgcatcaactgatcggcaacacctgattcgcgggaaactcattcctaaccaactgacctccatgcgccaatccaagccggggttctctattgccatgaaaaagaagagcgaggtaatcttcatcgccataggcgagagcaggatgagcaaaaaaaaaaagaataataatcactagtccatggcgatgcatgagaaagctaatcaatattgccataagagagagcatgagcgggcgttgctaactggcgtgcgcgcgccagctgccccccggcccacaaagcccatcagcctttttttttctcttttattcgcgattttttctttcttttttttacgattttttttgttttttctggttactttttttaatctttagcacacttattttttaaaaaatgttttcagttgaaagtttttaaattttaacttgaaaatttttaaatctgatttgaaagtattcaaatctcgagttgaaagttttcgaatctcgagtcgaaagttttcgaatcgaagtcgaaagttttcaaatttcgagttgaaagttttcaaatctgagtcgaaagttttcatattttttcaaatcttaacttaaaaattttcaaatctatacttgaaagttttcaaatctcgagttgaaagttttcgaatccgatttgaaagttttcaaatctcgagttgaaagttttcgaatctgagttgaaagtttttgaagttgaaagtttttgaatctcaagttgaaagttttcaaatatgagttgaaagttttcaagtcgaagttgaaagtttttaaatcggagttgaaagttttcaagtcggagttgaaagtattcaaatatgggttgaaagtttacacatatatagaaaaatcacctattgggccgtgtggaccggcgcgtgcgcaccgccacgccaattaggattcctgagcatgagctccctgtcttcgtgaggttcaggcagcaaaaaaaaaacctaaaccggcgtcgatggaccaaacatgaactacctgtctttgtgaaaatacgaagaagcatatggatgggtagggttgcaaagaaccgtgcgtgcagctgcggcgctgatgttgttgctgggtctcaaggtcctgccgtcgccggacgccaggagaggattggtcaaggtcttgccaccggcggtgagggagaacacatccaatgccctcatcgatccctgctagggctgcactaccgtgcttcatatgatttggaacggtcggatccagcgccaaaatcccgcaccgcctcctcgtagctgacggtgaggtttaggtggagctcggttgctcagaggagggaagatgaacgggcagaggcgtcggccgccggactcctgtggcttgcgggacgaaaggcgaatgcaaaaatacaattttagcccttgggcggctggtactgcacagactgatggacggtaccaacaggtaccgactctttctcagtggttcgattataacagatcaacggttaaaatttggtacctcctgtaccttctcaaagatggtaaaatacctcttaaaatatattatcgagtgaattgttgttacagattatctatataaattaaacaaatatttgataatcaaacttatggtacacgtaatacaatataagaaagtattttgagaaaaaaatattttttttgaaacatggaggaaataatccgtttcaataatccgataaatattcttaaaagaaataaaaattaaactacttatgtaaagttatttattaagtttatttcttaaaatatttaatctctccctgtaatcaagtagatgagttgagataatctaaatcaaaataggccttagctccactagttattccatccaacaaacttgtggaatttcattgtttgaaccaatataattttactctagatatgcacagattacatggccctgtttggatcctccgggctattaaatagccctcccaaatcttgctatttatgagtattaaacgtagattactgataaaacacatttcataatccctgtgctattttgcgggacgaatcgaatgaggtatattaatccatgatttgcaaaatagattaatatacatcgaccatagattaatatacatcgttagattcatcttgcaaaatagtctatagattatggaatgggttttgtcagtaatttacgtttaatattactaaatagtaaattccaaagggctatttaatagttcggaggatcaaaacaaggacatagtagtagtaactttggttttgtttctgggaaaaacagcaactctggtactccgttcttggcagtttattgggctgatctctgtcatttaccaagccgacgtctgatgagcaaagagagaacggcacaagccgcacaacccggcaaatagaaaaaaaaaagtccattttcctccctcaactaccgagtttgattaacgtccctcaacataaatttcgttatcgtttttggttatatatatgtatatatagaggctcccataattatcgatcaaaaccaagtcattttaactcccttcgtggtttggacactggtttcatgacgtgtagaccaggtcaatcactgctaatctacgtgctatttatatggcattatctctactattataaaaattgaagatgtttttatcggtactttggtacgtcatccgtgtttgagtcggtttttaagttcattcgcttttggaaatatagatttgtgtttgaatcggtttttaagttcgttcgcttttagaaatacagaagaagtcgcgtaagaaatcggtttaaaaaacttgcacactaacttaagacgattggactcctaattgcagctcatgattttgtaaaaaaatatctaagcgaattcacatagtgaatttcactttagctaaaccgtataacaataataatattataataatccttcacccgttgtaacgcacaggcattccctctgttaacgccatcagagaggagagaagagagagaggagaggagagagggagggagagagagaaaaaaaataaaggagatggttgaaaaattttgaagtggtgaggagggaaagagagaggagtgaaaaaagagtgaggatttttatatgtggaccacttaatcattcgtatgcgaaaatatatttttcatgcggctatttaagagaaccgcatacgaaaatattcattacaaaattaatttgaaaatatgagaacttcgaatcgaattttataatactaaatgaccttatttgaaaacaaagttgtagaactcattgagatctaccaattttcttttgaccatttctccatccaattttaattgaactatataaaatttgaattttaaaatataagaaattttttaaaaaatcaggtagtaaaatgatttcaaatggaaaaattgtcaacaataaagttgtataacacatcaagatctacaacttctgttttagtcgtttttctatatgactttgtttaagcaatttgaatttgaatttcaaaatatgacaactttaaacaacattttctaatactaaatgatttcaactgaaaaaatcatcaacaacaaagttatataactcatcaagatctataacttttattttgcttatttcttcgcccgacaaagtcatagtagcattgttcacaaaatttacatatggttttataaactataagagagatatttaaattttgtaaacaatgttactattattttgtcggatgaagaaatgaccaaaataaaagttgtatgtctcaatgagttctacaacttttatgttcatgactttttcagctgaaattatttattgcttcaaactattatttgaagttttaaaattcaaaatttaattgataaaacaaagtcacaagaaaaaatggccaaaataatagccataagaacacaataacataatagagcatgatttttgaatgatttaggaaaataataatccaatttggagtccatatgagtaagataaactagttttaaatttttagattttattttcgcatacggctttttaatacgcccgcatggaatgagataaactagttttaaatttttaaattttattttcgcatatggctttttaatacgcccgcatggaaaaatcgatttttccatgcgggctcttaagtagtctgcataaaaaatgagctcatttttatatgcaggcctcttaagtggcccgtatgaaaaatcgattttttcatacgggtgtcttaaggagccgtatgcgaaaatccgctcgatttttctaacgcggcaagttatggtccgtttgcaaaagttatggggtcttgtaaagaaaaatcatttgtgtagtagtgaattgtacacataagtttctgcactgaaccatcttaattcatccaacgtctaaaattgcaaggtggatatacgtagacacaatcttattcatatatatgcatatgcatattattctcgtgcgactggtcccatatattgaaaaactaatattgactaccgggctaataatatagtcgtacgtccgactatttgatcaggacaggcacggccttgagaggcacagcaagcacattggcagacttgaacttctcggacacgtccacgtcctccgctgtcatgccgccggggagcttccactcgaacgtgtgcagcatcgacgcaagtatgaacggcatgacgcgctccgccaacggcagcccggggcacagccgcctcccggagccgaacggcatgaactcggcgtccttccccctgaagtccagcagcggcgccctctccacgaaccgctccggcacgaactcgtcgggcctctcccacgccgccgggtcgcgcatgatcgcccacgcgttgaagagcaccgtggagcccttgggcaccgcgtagccgccgacctccacgccgtcctccacggcgaagtgcggcagcagcagcgcgcccaccgggtgcagcctcatggcctccttcagcacggcctgcaggtagggcagcctcgccgcgtcggcctcctccacaacctccttgtcgccaagcacatccctcagctcagctcgcgccttggccatcacgcccgggttcttgagcagctcggccatcacccactccaaggtaagagccatggtgtcagccccggcaacgaaagcctcgaacaacatgtcgagcacgttgacccgatcgatcttgccggcagccatgagctcgaggagtgagtcgaggaaatcgttatggcttggcttgttgtcgcggatgtgagccaaacggcggtcgatgatgtcgcccatgatggagaacaccctgttgaaccgcttcgtcgtccagcgccgcaggccctgcaggtccagcggccggaggaacgggtagaagtcggagatgttgggcttcccgaccaccgagatgatgtcgtccaccacctcccgcaggtcgcgagccatctgcgagcccatgtcgacgatgtcgatggagaagtaggagaaggacacgaggttgaggaggcccgtgtgcatggcctggccgaggagcacctcctcgccggcgtgcgcgcggaggtaggccatgaggtcgcccaccttccgctcgcggatggggcgcacggcggcgaggccacgcggggtgaagacgtgggagccctggatcccccgcagggccttccaccgcgggtcggagctcgggatgaacaccatggaccggtcggcgaagccgcacgcgcggaaggtgtccggggtggcgcgcgcggcgaggtggcggtcgtacttggtgtacgcctcgatggcggcctcacgggaggagatgaccacgttggtggcgaggccgagcttgagcgtcatcacggggccgtggacgcgcgccaggtccctgagcttgtggtggaacgacgtgccgccggccaagtggaggttgccgatgagcggcagcggcgtcgggcccgggggaaggggcttgcctcccgcgtggcgtcgtcgcagggtggagaggtagaagaggacagcgacggagagagctccccatagcagccacacctggctattctccattgttgcgatgaagctgtggtgcactactggtatcgttgttcttaatttttctacctggtgatcttgtcgctgcgcccgcagcttgtatttatagatcgagtcgaagtttagatctaatacacccttattgcatggcgttttttccatttctcatcaaaacttgaaaggtacacaatactagaaaaagtattttttttaggcggccaaaagtgatttttgcaggggggaccgcctacagcccaacgactgtcaaaatcgatgattttcatagtcggggcaatggtccgcctgcaaaaatgcgttgaaaaagcaaaaaaaaaatcgtgggcgccgccgccacgcgcctcgctgccaccgccctcccctggccggatctgggaggggatgggatgggaggggagggganccncnccnnncatccncnnccccgccgcccccaacggcctccccccnccctcctcccgccggatctggcagggaggaggaggcaaaccttcacccgggacccttttcgaatctatataacagccgcaccggctttgttaactcctccactcgcggggttgttaaaatcctatctccttttgcgaggaaaaaacaacttcttaggccctttttcctccgtaaaatattttgccttcgttggttagaaacataaaacccccgcccgccgggtaacacataataatctatcccgttttctctgtcagctctagacttatattcttgggccccgaatcacacgaaaaattatccccctctagcgagcagggtactttattactttcaccggtgggcgcgattataacaaaaaatgttcacgcgtcctcc

SEQ ID NO: 29883 - DNA, 1253 bp, Oryza sativa
ggcaccgacaccgcggcgggaaggacgtgggcgggcctgtttccggtgggcctacctgtcggtgcagtgggcgggccgcgtgggggtgggattgaatgcgcgatgggccgtgggccagggacgctgcaggtgggcccgcgtcgtactactatttgtttatccgcgctgggtggagatctttccgttttggcccttcggcaaatccatattccacaccacattgctgccatatacgaggtggtgtttgacatatacggagtacgaagttgaggatgaagttataaaacgagaaagctgattaattatctcttaatactataaatttaaaaataaatttatttgataagtattatattcgtctaaaaaatatatgaatctaaaactagatatgatattttctagtataatatatctagacagcaatgtttagccgtttgaaaaacgtgccaaaaaatcaatgtaaaatcatcttaatcatttacagcaataatgcgatatttggaggacggattcgcagagaccctggatccaaccatttttggtctaagatttggccgctgatcagtttgtaattagtttaatccgaacgtacggttgtctgattaattcctcttctccgaccggctcgctcacacgcacaaacacggcacactccactcactccactagcccccaacactgctactctcggtgctcccctcccctccccgcgctagctgtatgccgcctttataacgcggcgaggcagccagcttcccccaagcccagagcgacgcctcctcctcctcgcagctccgcgagatccacccggagcccggcaatcccaggcgaggtaagatcccctcctccattgccgtcgcgcttgctcttcttctgtgtcggtgctagtttggtgtggatctatagctcagttttgtttggctcgttcgttcgtttggttgatggtttatagtgattcgttttcatggggacgatggttaatttagtttagtttgcgttcagctcgggggacacagatccgggttttgattcgagctagcgtgcggggtttccgcgtgtggtcgggggtgttttaatgcacgcgcttgattggtgtgggttggttgtttccatgtttgttcagacaaggggagatttgcttgctagggaagatggaaataatcgatttttgcgtgcaatggaatgcatataattttttccttttttttggggcattgttcaattggtgtcactgatgggcagatccagtgtct

SEQ ID NO: 29884 - DNA, 2255 bp, Oryza sativa
cgccgctgcgccggccttcccatcgccgtccccatcatcgccgagatcgacctctacaagttcgatccatggcagcttccccgtacgataatcctcctcctccatcctcccaatcatcaccaccatcaacgccgtcgtgaattgattgattgatttggtttgatttgttggtgttgtgtagggatggcgctgtacggagagaaggagtggtacttcttctccccgcgagaccgcaagtacccgaacgggtcgcggccgaaccgcgccgccgggtcggggtactggaaggcgaccggcgccgacaagccggtgggctcgccgaagccggtggcgatcaagaaggccctcgtcttctacgccggcaaggcgcccaagggcgagaagaccaagtggatcatgcacgagtaccgcctcgccgacgtcgaccgctccgcccgcaagaagaacagcctcagggtaagcaaaaaccacacccaagattccatcactaaattcattactaaatctgtgttcatcgtgattattgattaatttagtcacctaattattcgcccaaaaccgcagctcgattcgaacagctggtggtacttctagatggatactactatttagatatttgatatatttattttgcaacttgtttaatcagctcatttcgctttcgaaatgaattgggaggataagcttagcgtggcccacggctttgggccgcagaaattaattggagacgttggctcatctcatctctagggccgcacctacgtggtgcaacttgcgcagccacgatcgaatcgttcgagcgtgaaacccattgccgtcaccacctcgcctcatccctttcagggaccaatcggtttttagccctacgcgccctgcgatcgcgacgcccacgatagctaaatcccgaaagcaaataagcagtaatcggacagcgactcgaccgggattagttaaacaatggcttgattaattagatgctggaatttggagccttctgataagtttagggcctgtttggcacagctccagctccagcttcaccccttctggagctggagctcagccaaacagtttcggctccaccaaaacggggagtggagctgggtggagctttctcacaaaatgaactagagttgtggagttgggtttaggcagctccacaactccactccaaactcaactcctggagttaaatttaggagttggagctgtaccaaacaggcccttagttttgcacttggtactttaatttttttttgagtgagtgtaaatttgtttctaaactttgtttatgaatttgttttgtattggtgcagttggatgattgggtgctgtgccggatttacaacaagaagggcgggctggagaagccgccggccgcggcggtggcggcggcggggatggtgagcagcggcggcggcgtccagaggaagccgatggtgggggtgaacgcggcggtgagctccccgccggagcagaagccggtggtggcggggccggcgttcccggacctggcggcgtactacgaccggccgtcggactcgatgccgcggctgcacgccgactcgagctgctcggagcaggtgctgtcgccggagttcgcgtgcgaggtgcagagccagcccaagatcagcgagtgggagcgcaccttcgccaccgtcgggcccatcaaccccgccgcctccatcctcgaccccgccggctccggcggcctcggcggcctcggcggcggcggcagcgaccccctcctccaggacatcctcatgtactggggcaagccattctagacgaccaaaaaaaaaaaaaaacaaccgcattggcagcaatggtgtcactgaacaccgtgcaggctagctagcttcatggccggtgaactttgactcaggcgagccgccggagttgactcaaagataattaaaagaagtgttttaagtggattggattggattagacagaggagatgaggactcgagaaaggcggcgatgagaccgtggttggggggaccctggcctggactgaacgacgacgaggcagcagcagaaagatggtgcaattgcatcgggtggcatgtcagtgtgtgtgtatagtggcatgtacatagtacatggtgattgattcggtatacagggggctagctttctgtttctgtttcttcattggttaattattactcccattataaggtcttcttcagggttgctagcttaattaattaattaattagcccagtggttgaagtgtaagtcaaaattca

SEQ ID NO: 29885 - DNA, 505 bp, Oryza sativa
  unsure (1)..(505): unsure at all n locations
acaccagcaagagaacaccaacggttgtgcaggatatcatcatcaagaatgacaagaagatgatcacttcaaatgctacatctcctggttggggcaggacagaaaacccaagtagaagcaccctgataggaaggaagaaaagcaccgataacatcagcaaggaaaccctccttcgcagtgccttgttgatgaccaaggacaaaacccgagatccaacataggagacatagctcatcaggatggcgtctataagtcccaggaaaatggtgccaaacaatggataggtgcaaatatttgtgtccccaactggcatggatgtccggatgaagtatttagcaatctttttccttccatgtgtattgntctcatccttaacaaatgttggcccaacaaacacgagaagagcctgcacgaagaacaccggaacgcagaaaaccaacatgtagcctatggtcttncaattccatctttggttcaaagtgcccaactccttcttctgtaacga

SEQ ID NO: 29886 - DNA, 1136 bp, Oryza sativa
cgacaaagtttgataaataatctctaatcgcgtagacggcgccggcgccggcgatggcgtcgccgggcgggaaggggctggtcgcgtgcaacgcggccatctcccgctgctcgcgcgcggggctgcaccggcgggcgctggcgctgttcaccgagatgcgcgcgcggggactccgcgccacgagtacaccctcccgccgatcctcaactccgccgcgctgctccgcgccccgcccgcggcggcgctccacgcgctcctcctccgcgcggggctcgcgtcgcacctccatgtcgccaacgccctcgtcgacgcctacgccaagctgtcccgcctcggagccgcgcgggcggtgttcgaccaaatgccgcgccgggacgtggtcacctggacctccctcgtcaccgggctcgcccgcgccggatcccacggcctggccgttcgcgcctaccgcgacatggtcgccgctggggtcgccacccgacgagttcgccgtctcgggcaggctcagctcgtgcgccggctcgaccgcacttgagctgggccggtcggtgcacgccgcggcggtccggtccgggcacgagccgttcctttcggtcggcaactcgctcgtgtccatgtacgccaagaccggctcgctccgcgacgcgcgcacggtgttcgacgcgatgcgctcccggtgcgccatcacgtggacggcgctgatcgtcgggtacgcgcagaacggccggggcagggagtccctcgccgtctacgccgacatggcccgctccggctgcaggcgggactacgtcaccttcgtcggcctgctcttcgcctgcagccacgccgggctgctcgacgccggccgcgcccacttccagtccatgcaatccgagcacggcatctccccggggccggaccactacgcctgcatggtcgacctgctcggccgcgccggccgcctcggcgaggccgtcgacctgctcgaccggagcccggcggccgagctggacgccacggtctggaaggccctcctcgccgcgtgccggactcaccggaacgcggcgctcgccgagcgcgcggccgggatggtgtggaggctggatccgacggacgccatgccgtacgtcatgctgtccaacctctactcgcgggcg

SEQ ID NO: 29887 - DNA, 894 bp, Oryza sativa
gacgaccctcgggtgccgcctgcggctgcaccacaatgccgccgttgtgccatagcagctccaacagctcgttgtttgtgctgcaaatcaccattggagcaaatgcacataggtcaggtcaggtccaagtaccattcggtaataacaggaaagacgaatccgttcttggcaacagccgtagaccacctcgaggctttggtacccagtagaaatcacatgatatctggtaggtatcacctgatacctcacaaatatcaccttctgcgtgacaaaaatcgcatgatacttgataggtatcatctgataccttacaattatcacctgatacgtggtagaatcacatgatacctgataagtatcatctgataccggttaggtattaggacctgataccttacaagtatcacctgatacgtggtagaatcacatgatacctgataagtatcatctgataccggttaggtatcaggacctgatacctcgcaagtatcgcctttctatgtggtaagaatcgcatgatacctgataggtatcatctgatacctcgcaagtatcataaaaacgtggtagaatcgtctgatacctgatatgtatcatctgataccggacttgacacctaaccggtatcatcccgttcaaaaatgggattccgttatatagcagccctctagggaaaaacctaatattaaataattagaagggggagccttcgaacctaaatcatctagcccaccaccttgtgaagctagctggaaaaatcactggacggtagaaatcttctctacgatccgaccctaattaattacccaacacgcattggattgaattgcatttgcacccaaagagcgcgggacatgcatgcaatgcagtaagtaatatgagattctgaatctc

SEQ ID NO: 29888 - DNA, 2143 bp, Oryza sativa
atctaaagtttagagacccaaagtttataaatcaaaagtttatatatccgattcaaatttgaatttaaattcaaatatttttatataaagtatttctatacatctaaagtttatatacctaaagtttatagacccaaagtttataagtcaaaagtttttatacccgattcaaatttgaatttgaattcaaatattttttatatatagtatttctatacacctaaagtttataaacccaaagtttataagtcaaaagtttacatacccgattcaaatttgaatttgaattcaattttttttatatatagtatttctatacatctaaagtttatacacctaaagtttatagacccaaagtttataagtcaaaagtttacatacccgattcaaatttaaatttgaattcaaatattagtttataatgttttgcttgtgtgctttgtttgtcgcgtaggtcggccgtttcgtcgatccgcggtttctcgaagacgttgctgaggtctcatcagttcgagagcagggcaagtcatgcaatacgtttgatcatattgtacccaatttacaaatatcccacatttctattaaatgttgcattcttttacaatatcatgtgggatgggtcctactactcagccatatattgatttccttatgccattgataacttgggtattaaaatgactagatgttggtttaggaaatgcttagccatgcttagttcaactagtacacaaatgggggtcacattattacatagactctgactattggcatagctttagattggtgccaccgcaagggtgtcagttaattaaatattctgaatggcgggctgtgagtgcatggttttgcttgtcgcacccatggcagttaaggaccggttcacgggaaaccctgggagacttaccgtgcttaccacaagcgggagtgggtaactgcttgatctgaagtatagctcgaccctttcctaggcaccggtggcgagggtgggcgtgatggagttgggtcggccgaggtgttcggttgtccagctgccggattcaccgcggtgcaagaggggaccgcccactgccttttgaggggtgggggtgaaaccttagcgtggtgtggatggttaggggaggtttatgtggagggtcttgtcacaatttccccctttgcagtatcatggtgatacttcggggcatggcgacatgtgtggaatcgtgtcttgtgggtacagttgtacacctctggccagagtaaaactattcgaatagccgtgcccgcggttatgggcgatcaaccagattcaccgtgattagtctcacccctagtttagcttaatgaactggtgtagttcaggtggttggttgggcctgttgcaacgtggtgtagcgttggacagtgattggttaatattgattaattactacagctgttttactgctttcaactactgttttgaaatgcctgctttatgcaaaagaacccctagcttcctttggttatatcctgcatcatacctcctcttccggtatgacttgctgagtacagtgggtagtactcagtcttgctctcttttcccccacaccagagttgaagttcttcttagttggagccgtctcagagaggttggtttcgtcgctgccgtcaaggtttgcctgtggagtggagtcgcccgctgctgaagtcaagcttcccggtttagctcgctttaatctttcccgctgcatttgtaatcttttatatttttgtaagatgtgggtctgtatgtcaacaattgtcgtttgtgtaccctggctggtcctggacagggatttaatgcacattcagcttagaaattctggttcgagaatttctgggtgtgacaaatagataccttgatgacccggtcaaaacttggccatggcaaattaaatcccaactttgaagggatggaatggccaatcatggacggccggtgagtgagaagaggatggtgccttgcccttgtcatgctctgatcatgcagttggcctctggaccaatggagaaaatgcattgccatggaaaggagatgagaagggtgtggtacactagtagtagttcagaggacggccggcattgatgccatggaggagccctcaatgatcaggcactcgtgtgcgaagaagaaagggga

SEQ ID NO: 29889 - DNA, 1024 bp, Oryza sativa
agccaacaaggttttgacaaaaaggtactattgacgatccttcaatttttgccctttaaagggatataagatttgcaatggattattggtatctttaacgggtatatgatttttactacccttttggtcttataaattgcattactaccaagtagagtcgttatactgagaccatattgccgttcctgtttgtttgacagaaaatgccatactggaatcatggaagaacaggagttggtagaaactaaccttcccaagacataaggcaagaacttcactgaagtcaagccatacaagtagttcccaagagagaaaggtaataggggactaagccgcagcagagtaacaaccttaaatccattttcacctattgctttgtcaattgccagaaacttcttgtttccttcaaccaatttgagaattcgctctctggcaaagtatctagcaataagaaaggccactgctgcagctagctgcacagttggcaaagcacaataagaaaatgcagctgaaggcagagttaacaacagaatgctgttgatgtggatttacttactgtcccgctgattgagacaataactgtaccagtaatactaccaaacaatagacctgctgacattgttaatggtatcgctggaatcgcaaggacctgaattcaaagaaaatcatagtattattatgaaggtgaagttccaatccagatgtcaagaatatatgacaaaagcctgtacaaatggttgacagggctaaatgtagatcgttagtttatttcagagttcaccaatatcaaacaaagaaagaaatggatgccctccatcaagaagtggctttatccaaaacaaaagtgcctattgcctactcactcatattcaaacattttggcacaacaaatttacaaagtgtgtgtgtgtgtgtgtgtgtgtgtgtgtgtgtgtgtgtaactgaaaggcaaaaatatcagccttacactatcactgtaattgactagctagtttaggtgaaaattatagaaacgaagacactg

SEQ ID NO: 29890 - DNA, 1315 bp, Oryza sativa
tagcacaaagagtatcaaaaaagaactccttttcactatagttgaagtttgtacaggaggtttacaactacaacattgccatcagattgcttgctagcttgacatttccccaatgaattcaacctttttgtctgatgtgtaaaacttcttaactacatcattcatacttggtctttggttcctttctttctccaaacacgacgtaccacctccagcatcaacgccacctgtgagtaaacgaagctaccattcaacctacgatccaccaagctgattacccatgtccgatcaccaatcttcaacccttccctgatcttccacaccaactgtctcatcgcaatctccgcatcaccaacgctatccgtggccaaatccgccattctggcccctctaaccagctccagaagcacgacaccgtagctgtacacgtcaaccttttcggttatcggaagactcgaaacccattccggagccatgtaccctctggtccctctgatgctaaacgaggcgggatcatcgagatccctcctctgttgcatcttcgcgagcccgaaatcgctgatcttgggctcgaaatcctcgtcgagaagtatgttctctggcttaacgtcgcagtggatgatccagtcgaggcactcatggtggagataggccaaacctttggccacaccaacggcaatgttgtacctttggttccaattgagagtctccttggcgccaaacagccacgtggcgagcgacccgttgtccacgtactcgtacacaagcagccgccgccggcggtggcgctccgagcagacgccgcggattctcaccaggttcatgtggttgatccggccgatgacgctcacctcggtctcgaactcgtcgtccccacgctgcggcgtcgcggccttgagcttcttgacggccacggcgcggtcgtcgccggcgccggcgaggacgcccctgtacacggagccgtaccggccatgaccgatcacgtccttgaagttcttggttgccttcctgagctcgccgtaggtgaaccgccggaaatggtcggtgaccaccctgtacccttcctccgccgcccattgctccgacgtcgccggccggctcctcgccgtgaaccaccacccgaaggcgatgaagcagagctccacggcgaagaacgccgagaggaacccgtagtagtagcgccacgacgacgtgtccggggaggcggccgagaaggagaggagaacctcctctgttcgcgcggcgtcgcaggcgagattaacggcggcggcggcggccggggcggcggtgtaggtgtctgactccgccaccaagt

SEQ ID NO: 29891 - DNA, 1105 bp, Oryza sativa
cgaggcacgccgccttgcatccgtcgacggagatggaggagaagaggttgaggtcggagccccagaagtctgtttgcggcagccgcgcgaagcccatctccggccggccaccgccgccgccgcaggtgaggttgaacgtcggccggcagcccttgccgcggtcgccggcgtcggcgggaacgtagcctggagggcacgagcatgccggccgcggcgtgtacacgcagaggccgttccagccgcagaggccatggatgccgcacggctgggagaaggccatccaagaaaccgaccaccccccgtcggcgtcgcgcaggctgtacagccggaggttgccgtcgtggtccagcgtcagccgccgccacgtgacgccgccggcggcggcgcccgtgtcggacgcgacgaacgtggtgttgtcgctggcgaggaacctgccggcgtcgtcgagcacgccccggcggctggcgttgtaggagatcctgccgttggcccagctgctggcgtcggggtccggccagtagatgttggagatgtccgggccgtcgtacgccagcgagaggaggtagcggtcgtcgaaccggagcgcgtagtggctcgtcgggtggagcacgtccgtcgtggacagcctcgccgtcgccgtcaccggctgccccggcagcagcgtgtcggtcgggtagtcgaagctctgccacaacacgtccccgccatggcttgtcacgacgaggttgccggagtccgtcagctccgcggcggcggcggcgccggagctcgagttggtctgccacaccggcgtgccgtcgtagtcggcgagcacgaggcggccgtctcgccgcagcgtgagcttcgaccccgcgccgtgcaccggccggtcgcggttggccgtccaggcgacggtccggccggcggaggcggcgaaccagatggagacggtgaagacggtggaggagaggttgtagaagccgaacgcgaagacgccattggaggacacgaggatgtcggaggcgcgttccgcggagagcgattcacctctttgaaggcggctgccgccatgagccggagaaagaagaagaagagcagagaacaagaacgcgaggagcatgatcaa

SEQ ID NO: 29892 - DNA, 1459 bp, Oryza sativa
  unsure (1)..(1459): unsure at all n locations
cttgatcgcggcgtggcagtcgccgcacacccggaggttcttgtacacgcggatgggcgcggcggctggcacggcgaggaggccgaacgcgacggcgagcctttcgccgtggtgagccagcccccataattgtcacactaaaaccattcagaaaagtactcatgattaccctgacaggacgtgcaagcggttttgcagcttgttctaccatgctcagagccactgcaaagaaaatccgtgaggactgggatgctcgtggattatttacaatctaaatcataccataaatgtatggtaaggggagacaaaggaaacaggaaaaccttttccaccaaagctgtgaccaaccagcacccgtggggttagcctgagctgcactatctgttgcattttggattaattagcataaggtgacagataaatgggaaaaaggctgaggtgaactgaaagctactaagatataaaataacaagaaatgaaagcccagtcccaggaaaaccttttggacaatgacatggcctccaaaatatatctttgactatgtttttctgttataatatgtacaataaataaaaacatttttacttttattatagtatcttgtaagacaaatatatatatattgtttagtgcctttaaactaaatattttaaaagttattgataatcaaagttacaaacgtttgacctaaaccttgtcctactaaggctgtgttctaaactcccatttcccaacttctatctcctcattttttgcgtgcacgctatccaaactgttaaacattatgttttttgtaaaaagtttctataggaaagttactttaaaaaaaatcatattaattcattnttaaagtttgttttagctaatatttaattaatcatgcgctaatctgccgtttcgttggaaaccttcactcacaaactcagcctaagctaactgacatgtgcatggcggcaaaaaaggtatgcaaagttctcaagcattttgagttctaaccattctctcaatgcaacaaaggcatataacacaactacccaagcacatgcatatatattttgtgattccatatattgatatttgatatcagtgccacagacatatttaactcagtgtgtagataatagaagctaagacagaaatagcagtaagacgaaaacacaaaccagctttagaacatcaagagcagttgaggcaacagtatgcggtcctcttttcttaattgacgctgaatctccatggcaacgcaaatcaaccaagaggaactgcatgaggaaaaggcaggtacagtttctttctttatgctgtgaaataagtcagattgcgagcagaattttagataaagtaacctgccacatcggaaattcctgagccagcctctttgcaaaagatccttcaaatcaacacagttaattaattttgtgattaaatgcatttatacagccaaaacagctttaaaatg

SEQ ID NO: 29893 - DNA, 2011 bp, Oryza sativa
agattaacaagcaaaatggtctccacttgtccatgtttccgatgcaagattacatgtgtgcgtccaactaggaagattcttccaaagctaaaacaatttgtgcgagaccaactagtaagtttttttttctaagaaacacagcataaacgcagccatacaggcatccagaacacgcacacttacccctatgaatgtacactctactcatacgaacacctccagaagattgcatgccttgttctagtatttcttccattgcgtcgttaggtccacacttgctcaaacgcatagtaattttttttcaaaaagaaagaaaaaataaatttgaaataaatggcacggtcgcagcagatgtctgaagaatttcgttaggaatttgggatcagagaaaggacattagaaggccctaatttgttttgagtgctagctgctgcttatgacgttcacttcgctttgctcctgtttgtgaagagtgtgattccaagagacccatcctgtaagagaataaaaagtgacacaagacggcaggcccactaaaattatgacagatcccttcaagccacacagatcacatgattgcagtactggcagcaccaggcaagtaacacaagtggtcgagtacccatattaccccaacctaaggaatcctatgttctactactactacaagcacaaaaaacatgacaggaaaaacaactgcagaggggaaaaattgccggagaagggagggtagaggagagcttgtagaaacaggacaaatgacaatcacaaaaacaggagacaattttgtcccagttgactatgcccagcaacaggggctttggataccaggcagtgtgcatctggatcatgctaagcactctatgcagggggaggaaattgtaaacaagctcacctgcccactgatcgatccattttgaaggagacatccccagatggacagatctatgccaatgtcaaagcatgtagggcaggtgagccatggaactttgcagagtacgagagcagccaatgagataaacatagtaaagattcatcttttagccatatatgaagcctcaggcccctcctccagctctctacttcagtatatttcatgggacatatattctaagtgggcaaaaattgatttgaattgagttcctatattgacttagtttggtcaaacatttgcctaatcttcattgctcacctgttagttggatagggatggagggcagactggcaagatggtggtccttgcttagcatatgctaccactgtatttcccccaaagctatttataactgacagcttcttcttggcagacctttaattcaacacaaagaagcaaatataatatatacttgcatagctgtcatggagagaagcagctaaggaatagaggacaaggctgaggcccattccagcctatgccatggtggaatttattagctaagatattattgtggagcagcaaaaccaaccaaaagtgaattccaactcagcctttccagccaatgccagatgcacagctcctcagcctttgcaacatccagctacatgccactttgataaatgagatttgagtactaaactaatgatgagtcaagctacttggaaactttacaaaaacctttgattgccacaaaactgttatcattaaggtagtaagaggaagaaagaggaagaagaaaagggagaacatagtagaagggcaaaaggaacaggtgaatacttcttagtatctaggtacttccttgagagggagcatgggcattgcagcacttggggatgaacctgaaggtgagggtgatccaatatgagcaccactacgagaggagaatccaatttcatcaacaccatcctgctgaagttggtcttccctgatcatagtgcggaaagatatggaaccacgcttcgttgaagtatctgagttccgttcaatttctcgaaagctctggttggctacaagcgatgcaccttcatagtagtaatcatcataaggaaccatctctgttatttccctctg

SEQ ID NO: 29894 - DNA, 1005 bp, Oryza sativa
gggggcacgtgccggacacagagtgggcgctgcagcactaggcgccggaggggaggggagatggggctggctcaccacggcgagaggctcgccgtcgcgttcggcctcctcgccgtgccagccgccgcgcccatccgcgtgtacaagaacctccgggtgtgcggcgactgccacgccgcgatcaagatggtcgccgaggtgtacggcagggagatcatactgagagactccaactgcttccatcacatgaaggatggttcatgttcttgtggagattactggtaactggagcttagtacgattgtgttgtctttgaccatttttggttgattcactctataggcaattaggcatgtgcataagagagagaaccagcattgcattccaacgagcatctgggagtcctttgaaaaattgcttgaatttctagtagatcagattgcatcaaagatgacagtgatgatgtacaatgggctagtatgctagtatcagaaggccgcattttactagagaatcctaccattctattcatcgatctcctttacagcatcctgcaaataacatagttaagaacagttagaattggctttcgaaaaagagaaattgaaacccaaagtgaccactaacgaaataagcatatgttcaaatactgccgaatcccatttgttcagtatgtgtgatagatcatagcaagtcaatacctttgcaagtcgtgttacatatgtagcagcaatggctgtgaataatagcccgatgcccagtgtcagtagctggctgtttcctcccaaaccgatctctgactcatcttgctgtcaaaatgagagccattcatgtttgacgtaaaaaaagcagcagtaagaaccatatgttatgatttcaatagtcaagccaccagataagcatttcaaggatagcatgtgttctgctgctatgcaattatgcaaatagagaaggaagacaagcaagatcattcggtaatgacatgaaaaatctctcctcacccca

SEQ ID NO: 29895 - DNA, 1785 bp, Oryza sativa
cgcccgcgccggcgacggcgtacgcgcgcccggatcactgcgccggcgcgacgacggcgcggcacgacgagctggcgcgccgcgggatgtacggcgctcacgcgcatgccgccggcgcgaacgccaggacgagcggcgagcggcagctcgtctgtgccgaggagattagcgtggatgacatggagatcctgatgtaatcacgcagtgacaaaatagcaaaaaacaaaaattaagattggtattaattggctgatgcaataataaagttcaaaaaacactgataagcaattgagaagatgctgtgttgaccatgcttgcggccaggaacgcgccagtagccgatagctgtgacgtcaagagtgactgaaagttccataaccaaagtggggttcccatcgatgatttttgcctttccatttggtcatttgtttctatcagaattcatttctgtcatatagaacagctgctgaaacacttccactatctgcaacttacatactctccataacacgaatttgacgttgctgaaatttcaattttcaaatttattcgctgcattcatcgcagacttggcagtaattctggtattacatggcctggttgtgaatgtactgcaggtaacatctgctcacgtcaaaaccggtagactctcgagtgtagaccaactcttcagagagtatgacaacggcaacaacgcagtaattgtagttactctcgccaagaacagaacaaagtccaggcctccagggcattcagaaacgttgaatagttgcacacttgcactgaaagtctgaaatttacctgcagttctgtcagaaagtccactatcattttttttcaacccttttgagttcctgtgtcttcctttcacacagtagtttaattccatagccgttgctgtgactgtgaattaatgaattactaatcaatagggggattagacgagtagtgaggacaagtactgaaacgaacgcgggtattggcacgaaataaaaaggcgttcgtgagtgagtgcaggattgtggcgcatctgaagtatctgcttctcactgtcgcaatctgaatctccctacctttgtgcctgacgcgtttagcttaatcttgtgcaatacacgtttgactagaaaagcaaaacattttaatgatttaatctctcgggcaatagttgtactacttgccacttaagccttgcttgaacagtcacttagagagtgaagtacagtaaatatcagtaatcacacaccatgaacacaggactgagcattatgaaaactcggtcaaatgagccaaggcaattatctcaatttcggatttttatgtggcacatagaaaattgatggaagcatgtaattccagtaattattcacagcccacaccgttctatcaccagtactccataatatttgttcaagtaatacagaggacaaagacgaccacatgaaactactactaggactgttcaattaccctggccagtgaccgggcgagattattcccaattatgtacaaaccaagcacgtcaattgtgccaaactatgctagcaagcaagaattttcacgagccatcttcctttggcttttgactcagttctgcgtactggcctcccatcagcttcaatatctcagtccataggcaagaaggatctgttgcaagggagtcgcttatcaggcctgagctacaggaagtgacatgccagtatccttgatcaatctcgctcaacaactggtcgtaatcccaggcagagtacccaacatagaagtttaagtcctcaggcttaaccgcgc

SEQ ID NO: 29896 - DNA, 2460 bp, Oryza sativa
  unsure (1)..(2460): unsure at all n locations
caaccatcaattcttcattcaaaacaacaataatgctagcaaaaacaggtcacaagttgcatattattcctaagaaagttccagcatgaaatcttacttcatctgtataactataataattactagtacatatggtagagaatggtaatagtgagggggcagtgctggtggatgatgacatggatttgcacgtttggaacacttacttcatcacctcctaatgtaatctgacattccaaacaattatggcatgagcaagatagccaaagcttgggttcaacaaattctaatagatcgtgtgcacatagtatgacaatcactgccagcactaatatggtgtttgggattattaaatagtgttctcaccagatcttgcaaatatatatatcacgtccatgctgcagcttctagtagatgcaaatgaccttcgtgtgagtagctaactggagctgcctaaatccacaaaagtatacagcggtgagtcagttcacaagaatatgaaacaataagaccaacgattttgcactggcccaaagtatcgaactcgtggtgtgcataaagaaatagagtgctaactattgtaacctgccatcgattggcagaaacaaattcagcaagttcttactatgataagcggtcgttgattggcaggaacaaattcagccagtgaatccatcacggtgaggtggttgctgctggtgctgaaactgaaaacataggggatgcgcgcgggcaaagccgccagggaccacccgttcaacacggatgatgcactcatgccagcgccgcgcggctggaccggatcacgtcagttgacaacatggggctctttatggacaatttcacaaacacattgcatacaagacgagatgctggagaaaaaaacgacagcttagggtggtgataggtgttaccagcgtcttggctccagccgttcgggacggggcggaagttggaccacttggaggagtttgccttgccgaggatggtggcagcggcggcgcggaggccggccgtcacgctggcgtcacgacagacgacgaagccgagagcgcgaacgacccggccgtcgttttcagccggtcccgcgtcacgatgttgtccttgaggatggggacgccatggagcggcccgcagtagcggtggctagaggcgcgctcgcggtgtcngcgcgcgccggctgctggagcgcgtcggagttgacctcgatgacggcgtggagaagcgcgttgaggcgcacttcaagctatttatgaagatagccagactcaaatagaccaatagacgaggaaccgaagatagccagactcaaatagaccaatagacgaggaaccaattgagacagtagagcatggtaaagtcaaataacatagaattaaattaatggatgtgtttaccatttaatacgtttgatcaagaaaatatataatgttttagacaagttccaactaaattattataactttaaatataaatgaaaatgatagtttgcacacataacaaatgatacatgtacatttttgttttgaaagtaatttcttaatctcataaacttattatatttctataaatttatattttataaaagaattgtgatcaaacttccatctcaaaaacaagaatgtagaattaaatctcatgttatatatataaacaaaatcaaaattaccttaatttaatacttacatgtggaccgatttttttaacttatgggctctcgtagttttttgaaaaagaaataccgtactattttttatgagcaatttacatgaaaatacttcccgccaatctcgattttccgtctagagactgccgccaaaatttcacatctaacgaaccggctaatttatctccacattttcagctcacgatataataagtaggggtgaaaacggagcggattcggacagataatagctataccatatcctaaacctttttttaagcggatgcggagcgggtgcggatgacgtgcggatgcggatgcggagcggattatttcggacgtcggattcggtgcggagtcggtgcggactcggttcggaaacggacaaaaagttgtcggatgttaagtttgtattcaatccgtacaacaagagggcggcaatacaattagccgcaatacgatggcaaaacaacatatgaacatgatttcagctctctaggaaaaaccaaccaaaacacatcaataatataattttgcttaatataacacatccatcaaaaacataatataagtgttcagttcagcagttcactgtgttgcttaaaatttaaaaatatagtgttcagttcagtagatcagtagttcactcatcaatacgacacgcatgaggcaatgaggcatacagctatctaggcatacagcacacagccacacaacacagtagcacactgcatacagcacacaatacactagttccatacagcacactgcttacagcacacaacacacaacac

SEQ ID NO: 29897 - DNA, 1367 bp, Oryza sativa
  unsure (1)..(1367): unsure at all n locations
cacatcgtccagccaacgttgggctggagactccgggtcatgggcgacaggcgggtgacgtaggagcgcgcctgcagcttggagcgcgccctggggcgtgctgccgtcgccgtagacgaggaggcgacgctccccatctcgccgcccttctccacctcctgtggatgtcgaagtcgcggatccttcagccctctcgagcgccttctcccgcctaggactttggcgtggagggggcggtggagtacgagctcgacggcgtgggtttggctccccgtcgtcaccgctcatactcggggagaggtcgtgcgcctttgctggctcggccattgggctgaacaggaaaagcttggcgcacacgaaggagtgcgagagctcagaagatcactcgcagagtcccctacctggcgcgccagatgacggagcgtggggctcctcatcgggagaccgcgctggcccccctttgccggttcggccggggaccctgggtgagactctaagctcccaatctgtggaaggttcgcgagacaggaagcacacaagacgccggcgatgtatacaggttcgggccgctgagaagcgtaataccctactcctgtgttttggtggattcgtgtgtgaaggagctacaaagtatgagccagcctctcccttgttctgggttcctaatctggaaaagtccagtccaaaaaaacctcccatctaagtgggcaaggtcctccttttatatcttaaggggataccacatgcaccatttccctcttttttgtggggacttcccccaccttttcataaatggacggagatttgtatcgttgtcgtccgagtcaccttctgatgggacggcccacaactacctccactttcgccgggagcagatgcgacgtggaatcgtggccgcctgctgacgacatgaccggagtcagaccagtcacgtcggtcattcttgtccaccacatgtcagcttagcaatctacatggtggccctttttcacacaatatcttgcttgtaatggttaggataaagcttggcatatatctgatcaggactaagttgccatctctgggaggtaacacgctagctcaagttgggaacgagcgcctagaagccctcgtcctgacggaatggggcgaggcgtgcgtcagaccgcctgtcgccacctaacccgcgatctgaccggtctgtgactggtcacagaccggataaatgagtgcactgcactgcgttacatgcggcgtgacacgctcagccaaaccgcaataaatgtggttaggtgagccncactgtgctcacctaacccatacacgcggagcgaaaacccacgaggggtcggggcgcctcggccctcggggccgaggcgggtgcggcc

SEQ ID NO: 29898 - DNA, 574 bp, Oryza sativa
ctttaggaaaacattcaaactattgctttattattatatgatgaactgataagctattaagctctccagacaattaactacataattcccttctgtatcaataaattgcttatggtcatgaataggttttattttcatgctaactgcccagctcatctttctagtaaataaactacaggaagaatgcttctttgtgttagagagagatcagcttctgatagtcacaaccactcttcactacaaaggcagttcaatcacgggcatggtcagaaaattgatgatagtggatctggaaaaaatgctcatggaaatagtctgacatgtgggttgtaagctagtcgtcggaccaaagttttgataactttggtggtggatgagctgcttatgtttctctaattcatttgagtacggattcaatatctgagccagtaacgaaaaagattagctctatttcttttgggtgcctgaaggagaaacttacaaaaaaaaaggtttgctctgttaaagtactaaacaatgaatttttggtctggacattcaaacaaattcaaaaaacttattatttcctaacgat

SEQ ID NO: 29899 - DNA, 942 bp, Oryza sativa
tgattaactgaaaaaacagtaggtaaattaccatacccgcttccatctccagtgttgccaatggtcacattagcagacttagaagtctgccctgcaggtgccttcatccccttgcgttgtggacacttcctagccagatgaccaacttggccacacacaaagcaagtcctctcatcctgattaggattgttgttgttcttcttctgcttcttgaagttggtggtctgctgagctttgtatttccccttgctcttgttctgggccttgtgcacaacattggcactggactgcccaccatcgcccttagacgcggcatctttttcccgagctttctcctcaacatcaagagacgcaatcaacccctcaacggagtattcctgtctcttgtgtttgagtgcagtaccgaaactcctccaagatggaggaagttttgcaataatgcacccggccacaaatttgtcgggtaagacacacttaaggagttcgagttccttagccatggtttgtatctcatgagcctgttcgactacagaacggttgtcagccattttgtagtcatgaaactgctccatgatatacagatcattgctagcatcagtagcaccgaatttagtattcagtgcatcccacaactccttagcgtcggtcatatgcatatacacctcgaccagacgatcgccaagaacgctaagaatgcatcccacaaagagagtagtggcttcctcgaattgcttctgctgttcagcagtaagaactccttcaggtttgccagtactcacccagaagcatttcatagctgtcagccacagagtgaccctgatctgccatctcttaaaatgcacaccggtgaatttatccggcctcagtgcatcggcaaaaccagccatagtaaaatcacagtgcctataataaggtttttggattgttgagattatgggcata

SEQ ID NO: 29900 - DNA, 1502 bp, Oryza sativa
ataattttgtggattaacaagtagggtccatgagtcattctcagagggaagttatagttatgggcacactgcaggcacagcgaccacgggccatccactagtagtttgatggcgccgagaacaagaggagacaccgggctcatggcggaggacggtgatgatgcagcattgtgatggaaccgctatgtccatggaaaaggggacagcaacaacgctttggcaaccgtccataaggagaagatagcagcagcggcatgagcccctagaaataggcgctgccaacaggacagggaggatttggccaaagtcgacctcgcggcaacatgtgtttttcccgactttaggaggcagcgaagcaaggaagaggagtagcagcacaacggcgtcttggcgttggtgaacaacggtgttgcattatggagtgttctgactgacaacgatggcacaactacgagtgggcgatggcatggaagaaagcagcggcgctgatgttcattcacccgaggcggcattggtggatgtgatggtatagcatcacatatagatgaccaaaaggcccgcccggcacggcccggcccatgcacagccaggcacggcccaccagccatcgggccggcacggcccgatcggcacttcatgccgggctgtgccgggccggcccgaaggcacggatggtccatcgtgcctttttttaaataagtctattttccgtccctcctctttgggctgtgacatatatatagtgaaaataagtctatttccgtccctcctctttgggctgacatatatatatagctaaaataagtctatttgacgtccctattcttttgaccgtggtatataatatgtctatttttactccctattgtttatgtgtcgggcctggactgcggcccatcatgccgtgctagcctggtcgtgctgggccagcccaacgtgccggtggaggggcccaggcacggcccggtggttggccgggccagcacgggcccaacccctgacgggccgtgccgtgcttgggccgggccaaaacaccgtgccgtgggccgggccgtcgggcctcgggccttttggccatctatagcatcacaacagcaagatgaagagtcccagtgtgcacgaataaaataaaataaaaattggagggcaagcgctgctgtatagggaagccagagcagagagcatctcagcatgcgcgagcaaaagaaaaggattgcagaggtgttgttaaatatatatagaggagaaaaggggaaaagtacgagcagccataagatggagagatggtgaaaacagagctaaccgatcgacggtgatagtgatttagtttttgataaataaaggaggaaatgattataaaaagtggaggcagtgcaggtccttaccaaccacgatagtggagacatggcagcaacaatatgtgctagacgacgaggcagtggcgtctttatgtgcacacgacagcaacccgacatggaagaacagaagagcagcagagtgat

SEQ ID NO: 29901 - DNA, 520 bp, Oryza sativa
cccgtccaaggccacacggatcggtggtcttctggacggcaaataggaagacgcgctcgtctctttcctgcgggcaaacgctgacgtcttcgcatggagaccggcggatatgcccggggtccccagggaggtgattgagcaccgtctcgccgtacggccgggcgcgaggccggtccggcagaaagtgcggcgccaggcctcggaacgtcaagccttcatccgcgaggaggtggcacgacttctggaggccggattcatccgcgaggtcatccatctggagtggctggcgaacccggtggtcgttcccaaggcgaacggcaagcttcggatgtgcatcgactacaccgaccttaacaaggcatgtcctaaggatccttaccccctgcctcgcatagatcagattgtcgactccacagcggggtgcgaccttttgtgttttctagatgcatactctggttaccatcagattcgcatggctagggaggatgaggaaaacactgcgttcattacccccatagga

SEQ ID NO: 29902 - DNA, 1653 bp, Oryza sativa
atgcgtgcatggcgccgctcgctcgagtggacactcgctctacctccgctccatccccgtgtgctcccccctcaaggcatgtcgcagccacgactctgcccacgtcgtccgtgtggcggccgcagaggcaagctctctcttcccccacccgcggcggctgccgtccccaccaccattgccgccacaactcaccgccatccccaccgccgctctggccaggtgaagagaaaggccgggggagagagagataagagagagggggaggaggaagaagggaatgagagaagatgacatgtgggccctacatgtcagtgggtaccacaatattatttttgtgaatggcaaataagtcatgcacattcttttttgattttaatgccacataagcgtcacatcaacgccacgtggaatgaagacccggtcaataccgtcaagtaggtgccacgtcagcgaaaccgctctctaaaaccaccaagggagataaaatgcaccggttttaatagttgggggcccggtatatgcgaaacagattcagccattagtgaagggagtaaaagtaaacttattctgaagaatttgagttaagcccagtgcgtatctggacccatatctgccactgttcctttttgttttgaactccaattttattgggcctgaaattagtaggcctacgatatgctgtgcataccattatacacgtgaaatgtcattttcgtactactgtagtactttacaaatatttttgaaagtgaaactgatcctgagtttcttctgatatttccaaacctccctgcgttgttctcatcctcaggccctctaaataacaaaatgttgcaccgcagtgatgactgcttgattaacaacatgctagtatatggttatttagctttatttttccaagaactatgtttaagctttgcactatgtataaattttataccataatatgcaattatccacaccatattatcagctattcctacatctatctcaacggtcaccaattctagaaagaaaaattctccgatgatcgatgatcatacacccggtcgtgcccatggcctacgcccactggctgtcctctccgccatcgccacgctgtcgccgccaaaatccaccgacatggctcccgctccagctcccaccactgccaccggcctcccgtacgcctgcagcaccagcaccgacgccgtcgtctggaagtccttggacgccagcaggtcgccgatcggccccagctccggcgactcgctccactccgccatccccgccgtcagcccggaccccccgggcaccttcccgacgacgaacaggtccttgttccccatggcctccacgctctgtatctcccccaccatctcgctcgcgttgaacacgccgcgctccctgtactccaccgtcgcgccgccgccctcgttcgccctctctaggaagtcacgcaggcacccctcgtcggccttccgctctttcagcgcgtcgaactcgcttgcagtgaagcttcctcccttctggacgaaccggagcaatgtcaggtcgatggtcgggttcctcaccatgcgcgtcgcaagcgccgccacctcccggtcgtcgctcccgccgaagaagagcgccaccacgcggtacccgccacccggcaccgcggcgaggccacgg

SEQ ID NO: 29903 - DNA, 647 bp, Oryza sativa
tgcgcgccgcgagggagtcgaggctgtgcggcaggtcgagatgggcgcgcacccagtcgaacagatccgcgagccggccgtcgcgcggattcgcggcgaccggctgttccacatactgcgcctggccgccctgccggtgcggggggacgacgagccgccgcgcgacccggctcgcgacgtgcgcgccgtaacgcttgcggagcacgtgcagacagcagtcgaggccggccgcggtgccggccgaggtctcagggtgccgtcgtcgacgtacagcacattcgggtcgagtttcacgcgggggtagcggcgggcgaattcgtcggcccatgcccagtgggtcgtggcgggacgcccgtcgagcagaccggcctccgccaacacgaacgcgccgaggcacaggccgacgagctgcgcgccccgcgcgtgggcggcgcgcagcgcgtcgaccagagcggcgggcggcgcttcgcgggtgtcgcgccaggtcggaacgacgatggtatgcgcgtcggcgagtgcgtcgagcccgtaaggcgccgtgatcgtgaagccgccggtggtggcgagcgggccgggttcgagcgcgcagacgcgcaggtcgaacgggggcaggccgtcgccgccatgctcgtcgccgaataccacgc

SEQ ID NO: 29904 - DNA, 537 bp, Oryza sativa
cattcttgtctcaaaattttgatatgaaagatttgggagtagctgatgttatcttaaacattaagctaattagaggtgagaatgggattactctcttgcagtcccattatgtggagaagatcttgaatcgctttggctacattgatagtaagccttctccaacaccttatgatcctagcttgttgcttcgcaagaacaagagaattgctaggaatcaactggaatactcccaaatcattggctcgttgatgtacctggctagtgcaactaggcctgatatctcctttgctgtgagcaagttgagccgatttacttctaatccgggagatgatcactggcgtgcgcttgagcgagtaatgcgctatctgaaaggtactgtggaattgggacttcactatactgggtatcctgcggtactggagggttatagtgattctaactggatctctgatgtggatgagatcaaagccactagtggatatgttttcacactgggtggtggtgctgtttcatggaggtcttgcaaacagacaattt

SEQ ID NO: 29905 - DNA, 1031 bp, Oryza sativa
gcttcacgttgcaaacagtgggggaaaccaccattgcgatctgtcctccccgggcaacgcacggtgggtggtcggtctggtcgaaagtgagggcaacctccgaccaccgcgcctggcgcgtcgcctcatgagtaggggccgcggccagaagctctcgcttcatggccttgaggctccggcgataaacgtgagcacacgctcccccatcgacagtggcaatggtggccccaggctcttggaaacctaggtcatcatcgccgtcatcgatgtcctcggcgggggccttctgcttggcctcacttcgccgattgccggaaggaaccgccggggacttgccctctcggcgctcctgcctcctctcctcctcccacttcctcgtccgctcagccaaacttttgactgcacggcagtccgcgaggtcgtgaagggaagtgttgtggacggtgcaccacttgccggttgggcgctccctgctgggagcgccggcctccttctttttgtctcccgcaggcctcccctttcgggtggcccgcggagcgccctcgacggcgaggacatgaccctcgtcgtcggtatgggctgacctcttcttcctcctcctatcatgccgccctgtctgagcggcggatccgggggcggccgaagctgccacaccggaaccggaggggttccaggtccatgcctcctccttacgagccactcggtccgcgagctgaaaaagctccgcggtagcctggggctctttggaggcgatcttttcgagcatgcggttgtgccgcacaccccccctaaacgcgtaaatcaccgcgtgtgcagggatgcatggtatggtgttacggacttgacagaaccgctgaatgtacgagcgaagtgactcatcatcccttcgctgtactgcgtgcaagtccgcttcctcacctgggcgcggatatgtgccttgaaagttcatggtgaactgtggcacaaatcctcccaagagtggacagatgcgggtggcaagttcattagccaaccccgcgcctgtcctttca

SEQ ID NO: 29906 - DNA, 646 bp, Oryza sativa
aacatggcacaactatgcatgcacagttcaaagattgaacatgatatttatgctacgccagcaaaagccttgctcacagctattattgattttagatacagattaacagatatggtcggatttgtgcttatccatgattttctgcagatgcacgattgcacgtagcattaattttatgtcacagtcaaataaactaaaagtttaggagctggcttggttccaaaagtttaatttgatgtagtctaagtttccgttagatatgttgttaagaaccagattatgtatttgtatgcaatattatcattgaaattgaccatctgaaattcataccctttaactgttacttatgattatcagggtatgtgtctttgcagtgtggctggaggtagctaatttcctttttctgtgcagattaccacatttaatatttcgttggttgttcatgggacaattgctgagaatatggactttatgaaggttacttactcaatacattttcttagaatataaagatgtatagcattgatcattaacaactgttacttgtgcacctatcaggatgatttaaatccatatgctgttccaagggctatgggcatctaccgtagactggagagccctttagacatcactactagtactatca

SEQ ID NO: 29907 - DNA, 19205 bp, Oryza sativa
tgtctgtccgtatttgtctagcggagtctttttgtttatctgcggaaactacaaaacaaccatttttgtcggtccttcctttgtttcatctgtatgaaatttgacttatgaagcatagcatattatggtattgcctatgaataaaatgtgccccgataatagtgtgtttgaaaaaaagcataactataatataatgtcattaaccaaagtctgtgattcagagaacaatactactatacatactgctatcatcctttggttgaaggatgaattgtatcaaatattgtcgtagtgttagcacgggcatattactagtgttactaattagataacatattattacgaatatagattaaatatggcaaaatataactgaagtagctaacatattattccagatgtagatgaggttgtgtctagttgtagtattaagttgctacatttttggacgaatttattatattttgggatgaagtgggatggagagtacaccaccgtccccaaataacttaagttctatgaacttggacaaacaattatatacattcgaagcaaggattggttttttgatgtagaagtaaaagtttgtggttggatcaaacatctagggccgggaactgtcctgcccctctcctctcaccgctgcatcagcattttggggcacataaatgagaggattggacttgtgaatgcctcagcatttccaaatgcaatccttttcgagccatcgtggctctcgaaaatactgatcctccgaggaaaagatttgaataatccagaaaccagtttgcacctcaccaacttgcatcaacttgcatgatgatagtgctgaatcttcattcatcagagtgtggctcggatctttctgtattgatgttagattgcaaattgtaaatatattactgaattcaagttaatagaagctattgggatcgtgtaggctacgatagcataaatcaaaattttctatcacgtaaaccaggaaccatgcaagtattagatcatagatcgttaccactcgacgcgctgtgcagtggaagaagacgctgagaagtcgaaggaactctcgcgaagtagcgcgcgtcgatgtagaggaagtagtagatcgcaccggctcgaccttctcctcctcgtgtgttctcctcgccgtactcccacggcgatcagcaccgcaaaccagcggcgcctctaccggtatccacatgtacagggacggaacgccacacgcagatgtgctagcacccgcgcgcggctagggttttgctcggggagggaagtgacggctagggttactcacgtgatgcaatacctccgccggtcacacccctcacgaatatataggatccatcactcgggcctccaagacccgtaggactcctattcggatccttatccgaattaagctcatattggatctctatccaatccccttattccggcccattaagcgtgcgaccctgtaggttcatatatactcggctgtaacccgaaaactccttttcggtccacgcgtcaacagcggcccctagcagaacgtattgacccaccgggcatacataaagatcatatcggctgaacctctagtgtatacttgtatgaacccctttgcctcatgatatcgattaagctcaaggctagatatgtgccatcctctaatagctcaatcattcactcgaacctgttgatagattatataacttgtgattgactcctcaatcacctttggcatggccatgcacttccataatctacaacatcgaggggcccagagatatctctccataggaggggcaaatcccatcttgattattcatatcccactacatgtttcatagcatacccgaaaactatttttataactacccaattacggagtaatgtttagtagtccctaagtaagctactacacatgttgagaaccatgataatctcaggtttaaggattcaacaccaacactcaatgagatcactgatgacacaacacatatggctcttgcagtatctcatgttgggtctatccaacaacatgttcaccaacatgtgtccacattattaatttggtatctctataccatgatccatgagacatgatcatcaattaatacatgtgctgatcatataaacatatttgttccacatatgatatttgatcagggatcctttagaaatagtaacaaacaacataaagagtatcatgaaagaatcacatattcattaaccaataatgagttatctatttcaaggaacaatgtcggataaatatgtaaacatagtatgtgatacaatcatctctatgattgtctttagggcatatcactaacagaaacttatagtatttttttttctaaaatccactgcaattcaagattgctgttatccttttgtggagcgagccccatcgtttctcctacatgtggttataagccataactcttattagtcataaaataatttgtgcgtgaaacttttctatgagcgacttaaaaatcaatttcagaaaataaactatgatgaagaaaacattaaaattaactccaaaattaagttttaaaatctaaaatttggttgtagccttgtaggtgataacttaaaaaacatcgaaatccttccctatgacctgataacttgaaaaatgctggcttcctagttcctactcatgcacagcacaaccacagcctgaccacgagaaagacagaaaggaccttttcaagttttcttcacttcttcgaagtagccacaaggctagaaacatgaacatgccgtcactgacacctctcactttcaagtgattgcaactggggaaaataataaaaaagaagtcaataaatccgtactacatttgactgtgcttttggtaccaataattctgaaaagggagaagagattaggaggattcatgggaaccagcagctgcacatgcagctaaggtttgactggtgtgagtgtgtgcatgaattcatgatccaaatggtttgaatattatttccggatccggttcaattcgtcatttgcttggctggtgtcgctcatacgtagcacgctactagctggctattcgtttcaacaaaggcttggcaatattcaaattaattacaaataatttgtgccaagatgagaatatatatatggactgctacattgacaaaatcagcattgctatatatgtaggagtatatagtactagtctttctcatcatgaatactggaaaggaatttgtaatttgaacgcaagttttggtgaagcatacgtgggaggacgcagtcatgatcaaacaaattaaacgagacaacgcatgtgctgccccttgcataccgcgcacatgccatactagttaaataaccacgagtctactcgcttgattcatgtatgcattatatctaaaacattttttatttaaaaaacattttacgttccattgtcattttaagggatttatttgttattttcattccttggctccggaggtagtgaaaagtcgacctgaaattactttcaataaacggtctttataactaaatattttgggtttatactccgtggtccatagctaatataagtgacaaacatactattcgatcccgtccataataattatcgttttacacataattgaggttaaactttttagaactttgactatgtttaaaaatatttgctttacaaaaatagcagttacattacatgtatagattaatcttaaaatataaatattctttatatatctcataataaaaaataatagtaaagtttttttatttaaagcgataattattatgaaactatagggagtaccattttcttccagcatggaacatacaccaatttatttttgagaaacagaaaacctacaccacggcatcccgtggagacgggatctcctctactactcctctccctccaaatcatccggatcccctcctcatacctcactctcctcccccaaatcacacggcactgtagccctccccgtcacctcctcctacctcactctcctcccccaaatcaggcggcactgcagccctccccatcgtcgtcgcccaccgctcgccagagctggcggccaccgccgcgggggaggtggcgacggtgaggagctcggcggcgggcgcggtgagcgagagggagagtgggagcgaggcgcagtggagccggaacggggtacggttgcggcaacatcctccatggccgtgcctcctcgacgccatccctcccccacgtcttctcctctttttgatgataccctctgataccccacaagtattaggcttgataccttggtcccaaggtctgatacctaggtaccacctggtatcttaggtaccgggtatcaggtatcggtcgatacctagtcggtaccaaaggtatcaggtaccaggtaccaggggagcatatgtccctcacctcgccgtgcctcctcgacgccatccttcgccgttgtggccctccctcccccacgtctcctcttttttgacgctaccctctgataccccacaagtatcaggcttgataccttagtaccaaggtctgatacctaggtaccacccgataccttgggtatcgggcatcaggtatcggtcgatacctagtcggtatcaaaggtaccaggtaccaaccgatacctaaggtaccaggtatcaagtaccaggtactaggggagtacacgtggacagaagaaaggaaaagagaaagtcacttaaaatatcccgttgcaacggtatcccgttgtgtagctgccctctttgagaaaagcatcaacagtgtggtggtggagcatgactccactcatcagggtttaaattctggtatccataaatattacgtatatataagtgagatcttaaaataaatttggcgatattaggtatataccgttgattttccgtcttttcaagcatgtgttacgggccgatcatattcatatgtgtgtaagtgtggtattgcgggtgtagagatgttgtgcgttcgtacgtctaccatcacagtgaagtcgcaagaacacagacagggaaaaccggaaaaggatagaggaggcagcgagccagccacaacctatttttgtcacgaggagaagaaagcccagccctccttgaccgttcccaaaagctgaccgttgccttcctcccctcgctgaccagtcaaaccacctcctccacttgtcacttccactcatcacctcgaacctcgagccgtgggccccacatgtcattggaacagcgtgtgtctcctcttgtcgcatttggaatagtcgtcgttggtttcttgccgccttgaccccaaccaccagcgtcgtatataaatcccccctgcacaggaaagctttcgtcacgaaacaaccttgcgttgagcttagctttagctgatcgaatcgagaagagacgtaaattaagcaagcgatcgatcgaactgatctcgtcggccgatcgattgatcggatttggttccatggagaggggttgcaacggcaatggcggcggcggcggcggcgtgaaggtgaccttcatcgagacgcagttcgtcacctccgacgccgcgggcttcaagtcgctcgtgcagcgcctcaccggcaacgacgcagccgtgccggcggcgccgccacagaggccgcggccgtgccgtgcagacgggtggaggggagccggcggcgcgagcgcgacggtggtgaagcgggaagccgtgccgccgccggtggcgccgtgggtggatgagatgatgatgctgtacgagacgtgcgacctcgccgagatgttgcgcgtcgacgtcgtcggcgcgagcggcggaggacggtgccacggcggcggcggatacggtggttttccatgctgatcgacggccggcgatgagctcagtccatcttcagttttggatgctctctgcatgttgttccattcttttttaactgagattatctgtatattgctccatgccttgttgtaccctgttttatatgtttggttgcgaccaggccatgtaattccggttctaatcatgaaactgaaaaaaaaaacaaattgatagagccgatgaatcaaaggattttggagtcacaacagggtttatactttccgaaaaggccgaaattttggtaatttcagtgggcaccaacatttcatcgatttcgaaactttttcacaaaattatggaaaagaataggaataactatagttagccatatgggccgctcggcacggcacggcctaagcctggtcaaacccagaccaagatttgtcaggcctatacatatcttacatatggttgaaaagtctatttcacatccctgaagttcgtgctgtgccgaggcataggcccaggcacagcccaacaaccatgtcgtgccggcacgggcccgacatcgatcaggccatgtcatgcttgggccaggccaaaatcccgtgccttggcccgggcctcgaccttatggccaactataggaataacaatatccatgcaatacggactagcgattagtgtagattaacaaatcctccaaacattttattgagaaaactctaaatactagtaaatacgaaagggagatgggtcctctccctcatcacctccagctataatgtggagcctggaggtgaaggcaggttttacctttccgtatttaatattaaaaccatccttgaccggtttattgtataccgacctaaaaccgataaaaactaatagctttcagtcaacatcgtaaaaataccaactaaaattgacactactggtttcgtgaaaatcgatcaatttttgtgaaaaccgctcggtggagaaggatcagacagaaactgagaccgaagtctgaagataacttttttatcaaatttttttcaagactaatgcttggtagcaggagcaggtggtcttctttcccgcatcctcttcgccacttatattgttcgactcttgctaacaagacaagaaaaaaatgtacttacaattataataaatgaaattgcacaaaggattatagtaatcggtagctgagccaagcacaggaaattctcttttccgtttctttaataagcgacggtctttgacttttcgacatatgtctgattattcattataagttgttttatcattaaaaacaattcaatcgtatttataacttatatatttatacaataattttaaataaggtaaacagttatacatacctataaaaattactccatccgtttcaggttttaagacgtttttactttggtcaaaagtcaaactgttttaaatttggttaaatttgtagaaaaaaatagtatcattttataaatttattattatatttacctataaatttagtcaaataactaaaacggaggagtaacgacattaattaccgttgctcttaccggatcggtgcgaagccgccgagaacgcagagaagaataggataaggatacagtgaacctcctcctcgcacgaggcagggagtgagccttgaccgttcccagaaaggttgaccgttgtccgtcactgaccaccaacccagtcactcactggatacgaccagtcaaaccttgtcgctaatgctaaagcttcaacccaccagtcacacatccagcgaaaaacccacaccctcacctccacgtgggccccacctaacctggaccccacatgtcattcggatagtgcaggcatctgtgccgtatgtattgcattcgcgccgccgccgccgcgcgctctgtataaaaaccccatcggcacgggaagatttcgtcaccagcaaccttgagttgagagagcttttcgtcgattcgaatcgaatcgagaagaaaaggggaaagggtcgcaactgatcgagctgatctcatcggtcgatcggattcgattccatggagaggggttgcaatggcaatggcggcgtgaaggtgaccttcatcgagacgcagttcgtcacctccgacgccgccgggttcaagtcgctcgtgcagcgcctcaccggcaacgacgcagccgttgcgaccgcgccgtcgctcgagaggccgcggccgtgccggcggggggtcgacgggtggaggggagccgaggcgacggtgggggtggggctgccggcggcgccggcgccgtggatggatgagattgagatgatgatgctgtacgagacttgcgacctcgccgatatgctgtgcgtcgatgtcgccgcgggcggaggagggtgccacggcggcggcggccggcgatgagctaagccgttagttttggatgctctctctctctctctctctctttcctgaaattctctgtatattgctccatgcctcgttgtaccctatgtttggttgcaatcaggccatgtaattcccgttcaatcatgaatatgaatattgtagccgatgagtcagaggattatggagctagatataaactgagatacgcgagattttctctattttagtgcagtggtaagaggtgtgtgatttcaacccttaagttccgtgatcaatcctaaatacactcataatttctttataaaaaatatttgaagggacgtctcttcctccaaatctcgtttttgaaattagaaagatctccaaatctcgttcttaaagtgataaaatgggatacaggtcattaagtagccaatcaagtttactaacgagccaactcacgagccgagccgagctatcttatcaagataatgaactcaaatgagtcgagccttaatgagcccagctgacttattgccttttgaaattctatgtatatttcttcgtttcatgtgtaggccacacaattttggagtcgcagacacgtgcacttctttcatttgagatttatagaaaatgagatttagctactcaggacaatctgtttttcacaattacatgaaaaacagacaggcgcatacaccaccacacacgcaccaccgcctcaatatcctcagatatgttcttgtcacctttgacaagaggttctgctcttcccttaaatcacatgcaagtgtttgcaatcgtaatgcagtgtgaagttcgtttacttcagaaatgtaaagaaaatttcttgcctgatatgttcccattattttcatcaagatgatgcaactaaggaaacactgaatctgaatggtgcggactgcaaagacttacatttagtagacagcaaaacttactaccagagtgcctatagaagcttcagaaggaaataataatgtttcctacagctgggtatgattgcgatgtcactgataatgaagttgaagttgagtcacccgactgatcacatctcacactgatcaatcttgctcttgaccagctggaaagctggattcacccaggctccgcagctgcactgcattcctgcccagtggaattgtcccaatcggctgttgcatttcctgcacgcgatcttccctgaaatatatccttccaccactgcaatgcataatacattttattagaagaaaatatatcagacgcacaacaccaaactagcagaaaatacgtttgtgagcagagtggttcattattagtcctaaaataatttgtgcgtgttctgagcgacttaaaaaccaatgttgataaataaactatgatgaagaaaaaacattaaaattaactctaaaatatatcagacacacacaacaccaaaaaagaaagaaaaaaaaacattacagcatccaaggtaggtaactaaccaggttgcatccacttcaagggctccacaaagaggcaggtacattcgggttccttctcatccacatgatactttttgcgcgtcgcgaagcacttctcaccacgaccaactttgtgggtaacaacatagccttcagtagcgacgagtgtgcgacatcttttgcagcggtaagtagtgcctggatcagtggtttctaggtcaccataagttaccccatctgtgtactggtttgtttctgcagggtttggattagccactggacttgtctccagctcagtttgtactgctggtttaatatcagtttccgcgactttgtcctggcttatttccgcaggcttttgatcctccatggatcctggcatctcatcaacctctggttctgactttttctgttcaactcccaattctagcgcctggatggtttccatctcctggttgatttgctcacccctgcattagtaacagttaagacacaagtggtgtttctacagtgcttggtaatgtgcaaacataaataaagtccaagctttgcaatgttgctgttgagatattcatttatgtgcaaacataaatagtgacttttcaattcaaaaagaaaataccgtttctataggttgcagtgaatagtaattactcataaatgaagaacacaactgtattcagtattggaaaggcaaacatgatcacaatgtgctcacttgttatggaccagcgctatgggagtagatacgggtggcgcacacgcgaagaagatgcagcacccagagtagcatagcccggttacaattagataaaagatatataattagtaccaattccctaattttggtgagtatcctagtttatctactgttgcctaaactatcaagattgcaccgtgattaaggattactattccattaagaaattcaggaaaggacaatctgccatcctatccagcagcaagatttcggcctgatattaaactcaatagctacaaggattataaactcaatgattggcgaaaaagtaaaacaaaatacgattaacgaagcagcacgaaaccaaatattagcagcagcagcagcagcaaaagattgacgtatataataataccttcacatcaggactaatagtagtaatccaaccaaattctggcccccagctaattaacacagaaacgattgcgggctgactattattatatacatatatacagaaaacaagggttcgtcccagagatgaagacgccaagaagatgaaatcggagcagggaaatccaggattcaaggtacataccctagatgttagatccgaccacccaagcggccgcaagcggagggctccttcgtcgacaccgcggcgcggcagcggcggcgacggctacggcgacggcggcggcggaatcgggagcgctgcgcctacgtctccacggcggtggttcttcttcttcagttccgcttcagcaggggacgaaatattagtgaaaacccaagtatatggacacgcagcaacgcaccttaactcctaatcggaagcagaaacggcccaagcccgtgcgatagttggccggcccattaacgtcggtgcaccttttactcagagtaagtctgtttttcctccctcatctctaactcaagggtataacgcttttcccatctttgaaaacccttctgaccatgttcacttaatcccaccaacaaggggattgagaggatgggaggggaataattccacacctattcaggtatggaattaatcccttttaatctcctccaatccctccttcacgctcggtggttttagaaagtggttttagaagcggtttctaccgatataacagtttgaccatgattgacccattgagtcagcagatgaaacccacgtggtaaagactttcttcgcttctcatcttcttccccgtctctcttccaggagcaaagagaaaagcgaggcatgatagagttattccttaattcgtttcatcctcggttggtcatgactcatgacgtggatccatagcaggataacattaccacatatgggcttgttggcctccatctcaatcagactaacatgatcatgggactcaacatatactggagctgaataaattatggacaagggcacatcagatgaattttaagaaaaaaacattggaacttcattgtgcagtctccactggaaagaaattccatggatttgacaagtgatatgcactagcatagtagcatacaagtacaagaacaatgtatcaggcaattatcaagaacatatactagcaacgttctataggctattttcactcagaatgttgccaactaaaagacggcactaacacatcggctcactcagccatatttcacaaggcctcatacatgccacaccccatattctcatgcgccctaccatttagtctacaacaccacgatcaaaactccagggaggctgctgcatcagtgaagcatcaattttgctcctgcaaggtacactgttactccaaattgaaagtccgaatgcaaacagcagcggttctgagttctgatccttgtgtttttccaccgtttactgtgaaccccttggaatatgaaaaggagtttctgatacactgaaaacaaaaagagagtttcagtgtggattgtagagtattttatcagtgaacgtaatagcaagagctggtatagtgtaaatatcagggaactaaattgtcgatacataattaaacaatggcgacagttagatgagactttcttttcttgctaacaaagaattataataaaccacattatagtttttaactcaatcttaaaatttgcacggagaggatggtcaagtaagcaattacctaacaaggatgaccatgattttcatgggctgaacttgtgaggtaaacaacagggaattctcagtttctcacatgttgcggacattgcgatggctggctatgcagtcttatctcacctacaaccagaagaaaatacacaatttgtcatagagcattctttgagacatcagttaaattttagagataatagtatatcacgttataattagaacaaataatctatattgtcaagtaccacccttgagttgtatataaaataaaatatccatccattttgagttgtatataaaataaactatccatccatttttaaagtttctactacatagggcatgcccacaatattttgtgggcatgtgttctctaataaggctgtaccatgtccattattatttcaacctaggattaaatccaaagtttaattcatagcattaggtttgactactcattgcattccacgtatgatcaaatcactcccttcattagtgcaatcaattttgaagaatctgttgaagagcacataccaccaaaacacacatttagtaattatacaaagtgccaaaaagttataccaaaaagatttaaatgaatagaattgccagtctacatgtataccaaatggatgaatggtgctcaaagagttcactaaaaccaaactgatggaaataaacaaaaaggagaagataaaaaaggacgtagacaaatttcctgccttttgcttttttttggaatgacagaaatgtcatcagcaagggaccaaatacaacatctggttccatagtgtagtggttagcactccagactttgaatctggcaacctgggttcgaatcccggtgggacctcttttttggtattgccatagtcctcaaatgggatctatatagccaattgcttgcagggcgaatacatgattcatgcgttgttatacatataatagttttgttcaccatgtttttgtttaatgcggtgcatcaacatgtggcatatctggccactttaatggtatcagaacctattgatcatttgatcttctcagtatctcaacttctccaaacagcaacctttagtgacaaaccttccatcaacaccattaccatcaccaataaatcagacattggtactcttggccttcaacaagctattttccagttaagagttgtggtttcatgctagatggtaatgacaattttggggtgaacataggcttttaaactcatgattgcagatggaggcaaagaaggatagggagaataagagaaattagtcaatacactataataccatggaagcagaaaaccatggctgacactaacacacagcatttgataaaatatcgcatggaatacataaaaacacagtctaagggcctgtttgggggagctttagattctgagaagcagctgtttggtagccagcttctgagaatctggaaaagctctgaaacccagcttctccagcttctgacttcttagttcatttttcagaatctataactacagattctcaaaagctgtggactgtttggagcagcttctagcagaagcagcttttgggaaaagctgcagctgggataagctcccccaaacagggcctaagagtttgttgaacaggcaaaacagaaacaaggaaaataggctggagcagcagagcttcctatacaatgaaaagacaagaaaatttcaggatgaagttgggagtattttatcagtgaacaagcattaaattgtcaaaagatagctcaacaatggcaagagttaaacaaggcatgtttctttcttttctttctaacaaagagttacaataagacacgatatatttttcacttaatcttaaaatttgcatggagaagattgccaagtaaacagttaaacatgttattgttgcgggtgaacttgtggagtaaaatactagaaattctcacatgcttgcaaacatggtgagggctagttttgtggcctacctcgcttgcaaccagaagaaaacacacaatgtgtcacacagcattatttcagacattaaatttcagcgagaataatatatcacaatatcaattagaacaagcaatcaatattgtcaggtacaacccttgagttgtatataaaacaaaatattcatccattttgaaaggagctacagtactacacaagggacatgcccacagtatacgtgctagcctcattagattgctctatattcacaattttgtcaacacatgattaaatccaaagtttaattatattagtatacgctgcattctactatgacataatcactctactcacaaacgtacatcaggtgcaatcaaacttcacaagatattaaggaaatcagtggtgaacattatctctcattctcttggaaaagcatacactgtcaaaaattacacttaataattatacaaagtgctaaaaagttctagtaagcgtttcaaatgaatattacgttttaccaaatgtatagtcttcacgtatgctaattggatgcatgctcaaagaaaacaatttcactgaaaccaaactgacaataacaaacaaaaaaaagctaaaaaggaaatagacaaaatttcctgctttttactgtgcttatggaatataagacagaaatgctatctgcaagcgaccgcatacaacatctggtcccatagtgtagtggttagcactccagactttgaatctggcaacctgggttcaaatccctgtgggaccttttttggggtattgcatagccaattgtttgcagggccaatacatgattcagctgtaatcaatataatatacgagtactgctactgtggtactccaaactgataggccaagtggtattgctctttttcctcaaaatacaagacaaatagaggtgggcattcggtctagaccgaaaattcggtctggttagttctttcaaaattggaaagcgaacacactagcatagatttctagaccgacagtttggttaaccgaaaattcggtctcggtcttcagtcggaccgagaagaccaatcctctctgtggcgtgcaggatggcatgcaggcagtcagtatcgatcgggaaaagaaaatcaagaagatcaatctaaagaaaatcctagcaagatgcaaagaaaaaccccataactagaactcacagatcaatacatcatctgctcctcattcttctggccaacagatcaagatgcggtacgtggtggcaagcagcaggcggcgacgggtggcttggtggcggcctgcaatgggcagcggcggcgggtggtggtggtggcggtcgggcgcacggggcaggcggccgcgcggcaggcagttccacagtgggacgacaaatgatggagacgagcgcaggtgaagctcatggaccatagatgacagctagggttgtggtagagtggggacttgacttttgattagaaattgattttgggctgacaagcttaggccatgaaaaatgggctattggactattgggtcactcggcctgaccctgtgcttttatggagttcagtcacatcgggtactcaagcaagataaacgaacaagtgaaaaaaaaagatcagtctttgcacttctctgaccgaactatgaaccgatgaccgacatttcgggtacttcggtctcggttttttatgcccacccctaaagacaaacaaaagtggtggtgggttttggtccttgtgtgtttttcaatgtctactgtttaaaggccagaggaggctttgaactttttttatatgaaagcagattctgatacaatgaaaagaaggacggaatttcaggatggagttgacagtattttcagtgaacataatagcaagagctggaacaggtagtgtaaatatcagggcactaaattgtcaatagataactaagcaatggtgacagttagatgacatgcttttttcttgctaacaaagaactaaaataaaccacattataatttttaatttaatcttaaaatttgcacgtgcaagatggtcaggtaagcagttacctgacaaggttaaacatggttttgttggggtgaatttgtgcagtaaacaactggggattcgcacatgtttgtggacatagtgatagctggatctgtggccttatctcacctacaaccagaagaaaaaacacaatttgtcacagagcattctgtgagacatcagttaaatttccaagataatagtatatcacgttataattagaagtaatctatattgctaggtacaacccttgagttgtatatataaaataaaatatccatcgaattttaaagtagccactgcatagggcatgcccacagtattttgtgagcatgtgttctctaattaggctgcgccaagttcacaattacttaaacctaagattaaatccaaagtttaattcatagcattagatttgactattcgttgcattcacatatgatataatcactctgttaattagtgcaatgaaacttctccgaagatttaactttgaagcatctgtaagatgattattacagaaatcaggggtgaatattatctgttggagtgcatgtaccatcagaagtcgcatttagtaattctacgaagtgccaaaaagttctacaaaaagatttaaatgaatagaacttcttaagaaatgtcagtctacgtgtatgccaaatggatgaatggttctcaaagaggagaacaatttcactgacaccaaactgatggaaacaaacaaaaaaagaaaagataaaaaaggacatagacaaatttcctgcctttaccttttttggaatataagatagaaatgtcatcagaaagggaccaaatacaacatctggttccatagtgtagtggttagcactccagactttgaatctggcaacctgggttcaaatcccggtggaacctcttttttggtattgccatagtcctcaaatggggtctacatagccaattgcttgcagggccaatacacgattcatgagttgctataaatataatagttttgttcaccatgttcttgtttaatactgtgcatcaacatgtggcatatctccctgctttaggggcatctgagcctattgatcatttaatcttctcactatctcaacatctccaaacagcaatctttagtgacaaaccatccatcaacactattaccatcaccaacataaaaaaaaatcaaaaatcatatacatagcactctttatattccagacaagacacttgtggtttcaagctagatggtaacgatatttctggtgtgaatgtaggctttcacactgatgattgcagatggagggaaaaaaaggataagagagaacaaaagaaattaaccaatgaattatctatgctacgtaaaatgttagtagtggtggtggttgttctgtcacaccacccctagcactgacattaaattttgaaatcacctatttgttcaataaggaaaatcataaaagcggtacttggactaaatatgtgcttaattgacttaataagctagaaaccttttattttccattgcaacacgtgggctcttggctagtaatactatgaagcagaaaaacatggcaaacactaacgcgttgtatttgataaaatatcccatggaatacattaaaaagcagtctaacagtctgttgaacagataaaacataaatgacgaaaataggctggagcttccaatacaatgagaagacaacaaaacttcaggataaagttgggagtattttatcagtgaacgagcactaaattgtcaaaagatagctaatggaaagagttagacaacgcatgtttctttttcttttcttgctaacaaacagttataagccacattatatttttcactcaaatcttataatttgcatggagaagcttgtcaagtagctacctaagaaggttaaacatgacatgcccacagtattttctgtgcatgtgttcacctcattagattatttcaacataccattagattactatgcactgcatcccactatgacataatccctctgctcacaaacatacatcagcgcaatcaaactttggaatatttaattttgcaaattctattagatgactctctctctctctctctctctgagcatacacagtcaaaaattacttttaataattatacggagtgctaaaatgttgtagcaaatgatccaacaaatatttaccttttaccaaatgttacatgtatgctaattggatgcatgctcaaaggaaacagtttcactgaaactaaactgatggaaacaaacaaaaagagttcaaaaggacatggacaaaatttccagcttttcactgtgtttatggaatataagacagaaatatcatctgcaagggaccacatacaacatccggttccatagtgtagtggttagcactccagactttgaatctggcaacctgggttcaaatcccggtggaaccttctttgtttttttttaggtattcccgtactcctcaaatgggatcgagatagtcaaatacttgcaggatcaatatatcaaacatgagctgttataaatataatataagagtacttctagtctgctactgtggatgttataagagtaccgagcagctgacagattgacctgtcagtagtagtgttattgctcttttttctcaaaatacaagataaacagcagtggttgtgagttttgatccttctgcttttttcatcgtttactgtttaaaggcaggaggaggctgtgagcttctttttttatatgaaagcagattctgaatttcaggatggacttgggagtattttatcattgagcatagttca

SEQ ID NO: 29908 - DNA, 13242 bp, Oryza sativa
caggcatcatttcttagtagttctttacttaaaggagatagacctttctccaattgttatgtaaccatattataaatgtctggatgtagtagggatgttacacacatctgtttaattgtttttactgccatacctccattcttccaactgcaaaaattcttctattaggcaaattcaaccaagtgaaaatggcttatacatagcactccacatgatggagagagaataaatccccgagttactatcttaaatcttaaaaaagaaggaagaaacaggtattgctcaatcccagtgccatagttgaaaaaagctggaccagacaagcagttttaactggaattggtgttgtgctcagtctgatctgctaagaccactcatgcatatggaacactttgaactggatagaccaggcagcttcactctgaaccaggcaacattccagaaaatgctggtggacctgaaaagcatggctatagcagagaatggggccaaagcaaggcctaacagaacatccaggcacacaacttgtatcaactatcaagcgaaaaaaggatgaaggggttcaagcatgggtcttcaaactgaaaacgtcaccactaccaccccaccaccatcaacttgcatttgaaatggaacatacactataattcaaattccgtgaactgcagttaaaccggaactggccatcagactaacttttcgtactatgcccagtgcaaagaaaatgtgtttccagttagcaggaactaagaattaaaagctttgtgacaaaagaagatttgaatggctaagacaaacatttcaatcattacataatatgtattcataaatgaggttaaaatagtttctcatgtagccatgtatgataagtgtcatgttttgttgtgttttgcaatgggtaggatccaatgatccataagaaagaatttgaaaaggaatgaatgagtctttggggaacaaatggcatctccaatttgaatcatggcatttgatctaggacaccaaaatatcgtggctttgctgagacaaactgcatttctgtaactgtgaccctccccatcctatcctaggtttaacaatgtagccaccatccacaaggtttttgagaatgtgtcgcacaagtgttcaagatggctatggcattcagctactacactgtaggagtacaatgaagcaattcatcctcatgagaatgtttagtgtcaaacaaaacaagattttcatgtatggtagaaagggttgtcgggaactgtttgcgcagagagcacaggctcatgcacataattgcacatgaagtgaattagaagtatgcactaaaacactcatggggatgtgcttgcgtgaattggtcgtattatcaaataccaatttgagatgaagttattattgaaaatactcacgaagagcaacaatcgagctagagctagacaagatttggatcagtggagatattttgaacctttctagctatgagttaaccgtcatcgactccaatgaccccaacgccttctgactcaggccaaactggacaaacatactctcttgtactaactaatgatagttgaagccttggaggcagcattctgaaaggcagacgcctagcctcctcatgccgaggtagcttgcagtgctgacaccttcaacttcaagccttactcacctagccgatttatccaatctatacggctgattaccaggcgccagtcctccaacagacacacctagggccttagtgaatactagttggatgtgatgacagatgtcacaaacattgttaagcgatgcaaagtgcattccaaatgggggaatgcttaccataatatagcgctgtgatattaaagagaaatgtgagcagactcatatccacctgcctctaggcataatatgaactgacagactggacaggtggtatctttgttgtgtccatgaaggaatattaaatactctttccatcccaaaatacaaagcacccttattgttagaacagtcaaatgtgtttttttactaataattaaagtatatttttattgccacgcatgtgatatcattagattcgtattagaatgtactttcatatgatattaatttcttagttgtcgataatgtattacaaaataaattaatggtaaaaaagattcaaagtatactcctggagactctgtaaaaggctaacacaccttatattttgggaagcagggagtatatttgaagtttcttttaaccacagcttaaccagtgttcctccggtcagactgtcagaacaacaaaccgagagtctgacctgatgaccagtctggcttttaatgctatggctccagaaaccataacacagatagaataccctaaccctgtttggacgtcagtaaacacaaggggccctgcatctagtccacaaacatgataatctcttgtttttctgcttagcttgacacactaaaaccatcaagtttgtagcgttgcctgaaatataattgaccccctgaacctaggagagaaacccacaagtacctcttgtaatgtgaaacaggataaggacccgataaaccaggatagggcactgactctgacccttgatttgtctactgggaggcgtactcttgctgtagacacaaggctctaaagcaatctagaagaacaagaggaaaatatgaaacttcttttctcagtgcatctttctgttaccattgctcattaatataaggatgccttcctatacagccatctgaacaattaatggatagaaacttttgaggaacccaataaatagaaattatcttttaggattaggaaaactaagtgttaacatatggaagcataacaaactggaactaatcccttcctaagaaactacaaattctatttctccaccttcccaaattccaaatcttgggctatacataacatgtcagcttgttaaccacaatttcactcccatcttatgagttacaaattatcagatgaatcctcgaccatctgagtttacagagaaaggaaacacaaagacttccccattgtatgcatctcgtaagattttttacatccattcagttgaactgtgctttcataaaatcatccagtttggcttacagctagatgtacatgccaagtagatgccctcccagagtcccagttctacgctagagggtggtaagtcttaaaatcagtcagcctgactatataatcaattaagagtgggtaattaactagttcagattaacatattttatgagttgagctttaccatggtatactcctggtacgcatgcttacgaatcaatatattcacattagcatgtcagataggaacattctaaatttctcctaaaacatacagagatgtgaatacatacgatttcacacggagtatagtataaatagtacttaactatattgatttcacagaaataaaaatgtctatgtttgcacaagaatggatttatttgaataaccaccagcaatattggagaaacagactgccatcaataggatcattgagacataaattaaaagtaggaactcaataataacagaaaaaccttaaattaactcactaggttagattatagtgaaacaaatacagcaataagaacacaaaaactacttaataaaacctacctacatttcaagatgaattggcggcatctgatccatctgaagaggagctatcactgtctgagtctgccaaaaagaatattaattgattacacactaactcaaatgtctacagctggtagatatatatactgtaaataccaaaatatgatgagcaaaaccaagggcagaaagaaatattaccactagaagaggatcctgtatcactgctggagctgctagagctgctcgatctacttgcattttgtccattattatcagcttgttctggcacagaagtagctaatttctcatccacaatcaaatctgctcatataagaaaataagtaaattatattgcttccataatccatagttcctggcaattgacttggacaattagatgaagtacaaaatagagcagatctaacttactttgctttggagattttacaccaatattaggctcttgactctgcaatccaagaaactgtaactttcagcaccaatcataaaattcaattaactatatagtgctacttatagaataggaataggaatgattgaatgcccatactggttgttgtggggcaacatgttgtgcatgcaactctgcatcctgccttgcaagcatggctcgctcagccttcctcttttgcttgctcaggttcttcttgtagttggccacaaatctatcaagttcccaaagtgtctcagtatccatgctatctatttcaacctcaatctcatcatcatgctgtctaacagacagattcttgttcttaatgatctgcacaacaacatcaagcttctccggtggcaaattctgaaggttgttactaagcttccgcttctcatctattgtcatatctctcttatccggatccttggcctttggtttcttcatcgatggagtcctggcactataagtgggagtatgacttaatggccttgacttggagtccaacaccatatggtgttttacagaatctgaccgatcaaggaagcgcacgtcaattggtggaggtggaaacttatttggcaatggcggacatgaggcaaggtactgaacctcagcctcaatttcgggccactgcgcctcaaagattcccaacaactgctcagccatgaaatgcacatcctgccccttgggattataggtcatggcattatggaacgtcagccgtacatcatcagcaaactccctcgggttcctgtactggccatgcgtgagtcgggtctttatcgtgccaagatccattgggtgcttgataatagcaaaataatcatgcaaaccaagcgcaacagcatctacaggcttgttaaacacccaaccaaatttgtgcttcattagcctagaaagcagcgacatagatttcttaaaagcatgagagtatagcctctgctcagcatcataaccagcaccatgagatgctaaggaacgatgcttcttcttgtggtgcttgggtttcttacgaccatgtgaatctgaaggcggaaacttatccttggcaagcaagaactctgaattttgatacaactgattcgcctttggtgtccgcttctccttctcgaaggactctgtgtgagtcactgacacggttagtggcccgcgctgcatcactgagcggaccggaacaatagcaccagcaacttgaccaggtatgggcgtcacaggatcagcgagtgcgaactgcgagtgcgcatacccaacaggaagctgaggcggcggcaccaccacaggcaaagcaagggccgctgcagactcagccgcgatggcctcagcggccgccttcagccgcttggaaagcccacgcacctggtcgagctccgacgcaagctgccgccgcagctcgctccgcgccctccgcttccgcgccttctcctcggcggccgcccggacgtctccatggccgttgggaacggccccgccgtcccgattaggccccgcggagacgtcgtcggaagcgggcgcggcgggctccccctgctgcgcgggggcaaccggggcgctcggcggagggggatggggggaggaagcgggcgcggcgggcggatcaggccgaggcgccgcaggcccatcctcggggcggcgaatcgacctccgaatcgaggctagggtttgcgcgagggggctggagctagggctagggttcggagggggtttagggtttttgcgtgggtacttgcgccggtacaccctgatctccggcgcccaccgcgacgtcaccggcccctcctccaccgcctccgccacggccggggccgcggggctcgccgcgggccgctcctccccgccggcgccggcgccaggaggggacgaggccatgcataaattaaaccctaaatccggtcccccccctcccgcgaggccccggatcgatgcaggcggccgccgcggcgagggattcgcgcctagccctgccggaatccgccggggtcgactcggattggagctcccgcggcttggctatggctatggcggtggaggtgggggtgagctgctgcgacgggggtgggtggtggcggcgtcgggtcgggggggtcgtgtgcgcgatctttttttttttttcttttcgtcgtttttatttttgttggtttgggttggggggtgaggtgacgaagagagggggggaggcggtggcgcacgtgtaatcgtggccgttggaatccgatggatggatattacggcacggcaagcgaccccttgggccttggaagctggaaaaagcaaggggccgtgacgtcatcgtcacatactaacagtcacatgcgtctgaagctgctgctgctcagcttgggttcgttctcaaactctttctgcctcgtattttccctttttcgctcgtctagatatgggatctatctcataaatacgggatctaagatattaaatcttttatttaattccatatatttattattcaatatcctacttttataccttttcataaattaaatcgtataatctaaacggagaggcctctccgtttagcgctatcgcgcgacgcgcgtggcagccgtcgatcggcgcgcgggcgacgtggccttcatccggcacgcgtgcgcgtcctgaccgcgggtcggcttgtcccgaccgcgagtcgcactttttccgaccgagagagagagagttggcactgttcaaaaattcctgtggcgctcgagagagagagcggcggagagagggagagagcggaggcggcgagaatctccggccaaatccctgccggagacgtcgccgcggcggcggtttgggaggggggaaggttacggctgtttcgtcctgtcgcgccagcggtggaatcaacggcggaggcggcggaatccgcggtagaggcgacgttttcgtctcatcgtgccggtagttgtgggggagggggggagggaagcagaggctgcggtttcctctccaccaaatccggcggtaagctgcggcgtgcagaggtggttgtggttttttgcgccggagagagaggagcgatccatttttgtgtgtgatttttatgccagcagaggtggaggggggagcgattattgtgtgtgttttttgccggtagaggtggagaggtggagcgatttgtgtgcgttttttgtgccgggagaggtggagagatttgggcattttaactgcgcaaatcagtgtgcgattggggcatttgttttttctctagctctatcccctcatttccccctctctcttcctcatccaggggctagtgctggtggtggatctcgggctctcttttgctgcgccctctctgcatcctctcagagagcacaagtggtggtggatctcttgctcaatttgaaggtatttctattttttttctctattttggcatttgcacatttgcttgcacaggccatgagtcagatttcatgttgtagcctcagcataatgaaaacttggtgccattatactaggatttctttgtgcccctttgatagcttttttagggttccatgcttcatttacaatgtaaacccagtgtgatttttcttcagttaccatgttgctaattgtagatgctaatattcagttatgttatttgtgtacattcagagaacagaggttttttgtgtacttgtgctgccatttttttaccaggggttttgtgtgccctttgatagctctaggtttccatgctttcatacacagtgtaaatatgggtagctacataggtttcaagtcgtaacaaccaacatggattgaatagatcaacatcgatctgcagagatcgacgtacattcagagaacagaggctgcagatagggggggagcatgtatgtgcatgcatgtatatgcagcatgtaattcaataaatcaaatgttccttaagcaacacatttgatttattgaattgcatctagtctagttaaaacttactttttcctatggcatgagtaatatttttagaacaatgaaattaagtttgcatttttttcttcctactagttaagttacttctaaaatgtactgacttacttctaaacacataaatattacttcctactagttgttaagttgtaattggttagtttttgttgaaactaatatttaaaatgattttccagtgatggctaggaagaaatcccatgcaacgaaaggcacgtaacgaatcagagtcaagtcagaaaaaaggggtgtatcacaacgtgggaagaagagagatcacggtggagatgatgcaacacaacctcctccaaaaaggagtagaacaaaggtattgaaacaaccgtctatctttctacccttgaacctgtgtttttgctttttttatttactgcactacactttttttatgctgctgcactagacttttatctgtatttttctagaagtaacttaactagttttagaagtaacttaatattccataaaaagtaacttaacacttactttttttgaaacggtatttttgatgttgaatatggacttggacatgtgtactacctatagttataaccggatggttagtaaatcagaatgatccagtattgaataaaatttggttaactaattcctgtcacattatgtgagattgcatgtctatccttgttctatgtacccataatcctttttatggtagaagtatgaaatgcaaccagtttttcgaaatcaatccagatttatgatgttgcaatccagtattgaatgaagttttggtttgcttcagaaggagtatgactatgtccccatacaattgcactacatgttagaaaacttgtaaaatccaagtggaagtgtttttgcctttttttaatgcactagactttttttttgctaaaggattgaatcatatgacttttatctgtattttcctagaagtaacttaacatgttctagaagtaacttcatctgttgtcaaaaataacttagcatgttctagaagtaacttacagtacaataccttttttttggaagtaagtcagtgtagtttgggagtaagtcagtgtagtttgggagtaagtcagtgtaattttggaattaagtcagtgcattttggaaagtaagtcagtgcaatttttggaagtaagtcaatttttggaagtaagtcagtgcagttttggaagtaaataccatgaaataggacagtaactttttagacatttacagttacatgcctataggaagcaattttttctcaatttgacatcagtggctatagttatgttttttttcacaattttgttttgatgcagtactagaagagaaagcgaggaggcaactagggggaacgcatcatgttgggtgcacatacaaggtacaaaatgaattaagaaggtgtaactcttagtgaagtgttagaagtaggggtgaaaacggtaacggtaattaccggccgaccggcgttcgttttcgactttctaccggccgagccatatggaaatgataatcgaccgaaacaaaaatggaaatggtaaaaaatatggaaatgaaaacggaaatggttttgctgttataccgatcgtttccgtatttaccgtattcttgtggaaattaccgtttcttataatatggtaattaccatattctaaatatgtcgatatttatagagcatgtctatacttgacccgcagcttacatattgactgactcttcaatcaaatctctaacttttgtacatggctaaaatgaagttaatttataatttatatagtataagcttgaatttatgtatacatataacatacttatgtaaagttaaatatatgtttttatagtttaatgtatccgtatttgttacctgtttccgatctgtaccgacatgtttccgtccgtattgttccgtttcaggttttccgatatttccgatatcgttttcgtttccaaatttaccgtttccgatttcatttccgagaaaaatatggttacggaaatggttgagactgttttccgatcgtttccgaccgttttcatccctagttagaagtaagtttctgttaaaattgctctgagagcctactatggaatgtgaattcaactttatgtgaaagtaacttgcaagttcctaggaagtaatttactgaagtgttagaagtaagtttctgttaaaattgctctgagatttttgaaacatcactactcatgccttttgctccaactttttttcctagcagcacatacaaaggaaatttggaggtatgagggaggacattaatcaagatggaagacaggaaacaacattacaactcatttcttacaaaattgcagcacagtttcatagaatatgtttatcagagaagacagaaaagatctcaaagattctaggttagtttctatgatttttttggatggatctcaaaaaaacagaggatgaacttcatgtgtacctgtgatatatttttttggatctactttactttcttctcctcctccgagttgatggtttcgtcctcctccccttgttcgtgctttttttctgatttttttccgccatggcggctgcgtggggattgacgctgccagttgtccggacttgatgggttggaggggggaaggaggcgcgcagcgctctgtcctagctgggcccacgccagctataccacgcgaagcgagagccgtgcaaccgtggtgcacgcgcgggctttccttttttggcaggggcgcgcgttcacgtggttgctttttctggcaggggcgcatgtcgcgtgataggactatcgcgagaccggtctcggtctagtcgcgtccaaattaaatggctttgcagtttcaatattgaccaatgcatcccatctttccatacttccaatcaatcgtcgactatgatgttacattatatttgacattatgatatttacaatccgagttatttttctctataggcatgtcttcgtttcggataattatttttcttatcttaattgtatttaagaccagcaataaattcaataaagattggggattagagttgacgttcgtaaagtttaggtgtttgggctttgagtaagaactataattggattatgcttattgactcgaaattggatcgggtgtcaagtacacctattcgaatgttccctctacttaaagttacttttgttttaagccaaatatttcttatctttgatcattgatatatacaaatccatatagtataacatgtgaattacatattatgaaagtattttgcatgataaattaaaaatataaatcttatgatgataagctatatgaatttatagaaatcgatggtcaaagatttcagatgtctgactcgaacgaacttcgaatgataagaaatttgaaatgaaaggagtataacgtaagcatggaaaagcgctgaagtttaatctggcccatctcgacaacaactttgactaagggtgtgtttagttcacgctaaaattgaaagtttggttgaaattagaacgatgtgatggaaaagttggaagtttgtgtgtgtaggaaagttttgatgtgataaaaaagttggaagtttgtgtgtaggaaagttttgatgtgatgaaaaagttgaaagtttgaataaaaagtttggaactaaactcggcctaagccacagcccgttgtagacctgacaaagtgacagtgatcaaaattacagaaagaagaggcactcaaaaaggaaaaaaaatcccattagttgggatttgggttgaatagtggtgactggtgtagcaaattagagtgtgttcttagcgtgtgtttagttcatgtcaaaattgaaagtttggttgaaattggaacgatgtgatggaaaagttggaagtttatgtgtgcgggaaaattttgatgtgatggaaaagttggaagtttgaagaaaaaatttgaaactaaacaaggccttaagtctaagttcccaacctcactatctcatttaccgcgcgcacgcttttcaaactgctaaacggtgcgtgtgttgtaaaaattttctatagaaaagttactttaaaaaaatcatattaattcattttaaagatttttaagctaatagttaattaatcacgtattaatccattgctctgttttctgtatcgaaggtgagggttcccaaccatcactaagaacacagcctcaattaggggacagtgcttggcccattgatggtaaacaagcatttgtttggaattgtgaacaagaaaaaactgaaacgaacttgtcccttcacatgaagcctagctagttgagtgaaactgaatttcgacccatccatttgtaacaacgcatgattaagtggtttgtgtcgacgtttgatgtcgcgattctggtatttgcatagtatgggtatcgttggtgctaggatatatgcgacattgtagtaaaagagatggggacgaggatttttatacaggttcgggcccctgaattatcatgtaataaccctactcctgttggccgaagccggtattgctcttattcaccataatcacaccagtacagtatttggggtagcctatctaactgttgtcgatttggcgatctgtagtattgactcgtagtcgacaacagggtagccttcctcctcgaatccgcatccggcgagatcagagacagcgctatgtctctcctgatggtagccataggcaccataggggactagccatgcctatctctgaagtcaatatctggcgtcttgtcttagcgtatgttggcttgtatgttgatcttctgtcttgatctattgttccgtgtcccctctcctcctagggggtcttgaatttatacccataggtgtccccttgtccaagtagaactaggaaaaccaatatggatacaatctgagtagtccttgtcgtttccatgtagaactctattcatccttccttatgcggaattcctcctgtatccgaaggttgtttccgtataatacatggtatgtggtgggtcctgccgagatttagtcaactactattaagtatgtggtatccataaccctgacagtagcccccccgacttcaatgcaaatgaacgaattcatattctcaaccgcagaccttggagtaactgttatcgagctcacgcgaccgttctcggtgagtttagagataacgttagacttcccttatcagcctcgtgcgggcacctatagggtttgtctgagtcaatctcctgatgtcaaccaagaaagtacagagcatacgactaagtctcctgtcttgctgtaatcgagaatttggattgaa

SEQ ID NO: 29909 - DNA, 7297 bp, Oryza sativa
  unsure (1)..(7297): unsure at all n locations
cgttttctctttttccgacttcgatcagtcagtttgttgagtcatacactcttcctagcccccagccttgtcgtcggagaatcgttctcggaggataaggctcttggacccttgacctcccttggttgaaaaagcactgaccatagcccccagccgtgaagttggaaaactcaatttccgattacacggcttggttaatacgcacggcgagaactcttacatgaccagatcttacatggtcgtttgtctctacatgatccgacaaggccttatccgctctgggtgtccccagccgaagttcccttaggttcctcagaggccttgtcaggacggcataaagggacatgaggataggtttcaactttaggtgccgtcgtggtaagggatctctggataaaacacttggcgatattgtgtacctgatatcaactttgtcaggagagaggtaatgggagaatcgctacacctctggtcgaggaccaggtagtagtcgtaactcgaccacttaaagtagaggtagtgggagaatcgctagaccactggtcgaggaccaggtagtagtcgtaactcgaccacttgaagttaaggcgcgaaagattgctacgatttactggtttgagaacccgcgggtagaattatctctcgaacgccaaaggaagctgcggtgcgagagattgctatgatttactggttcgagaaccagcgagcgagtagacttatctctcgaacaccaacggaagctgcggtgcgagagattgctaccttttactggttcgagaaccagcgagcgagtagacttatctttcaaacactaatggaagctacggtgcgagagattgctacggtttactggttcgagaaccagcgagcgggtagaattatctcttgaacaccaatggaagctgcggtgcgagagattgctacggtttacaggttcgagaaccagcgagcgagtagaattatctctcgaacgccaatggaagctgtggtgcgagagattgctacggtttactggttcgagaaccagcgagcgagtagaattatctctcaaacaccaatggaggtgctagagttggtttattacatgtgcatctcatgtggccagcatgactcacatacccaacttatagcatatctggatgtccgttcgcaatcatgtcgggtgatcaagccgatgacgttcgtgaggaattatccgttaacaaccttttctcgaatagtccagccatggccggtgctatgagataggtcgtcggtctttgttggcaggttgggcgtgacgactctgtatttgtcgagatcgttctcgataatggggtgtactcgaccacaacctactcgagtgctcaattgttcctgaaaaatattttctagaaggcaagacatatagcagataatatcgagtatgtactcaaaaaaaatgcatggatcttctagtattatcaggatataacgagcagattaaatatcaagcattatgtaaaccgtaaacaagcatgatttatacagaagaaaatagagcgagcccccagcattaaaccgtagtcggtttaacatcaggaacactcgcacaacagatattgtataaaaaacatgctctaggtaaacataaaaaattattgatctgacaatgttgtacaatctagaaataggcatgacaaattgcatataaaatattgcgtacctttgtagatacatgccggatgtatctacgaaattagtagattaatttaaaaaatcaatctcctaattatcttgttgcgtactcgttcgatatcatgtgatctgacatcttttggtacgccgcggagcttgaggcttgaatgatctcgataggccaagttgttgacgacgatggttccgatcttgtcgaggcacgtactctggtcaagttagatcctccatagccgaagttatcgagtagtatgctgtcagagaatccatctcttaaacccatctcgtcgaaaccttgaagcaccaaaagatcccttacctggcgcgccactgtcgacgtttgatgttgtgattccggtatttgcatagtatggggatcgttggtgctaggatatatgcaatattgtagtaaaagagatggggacgaggatttttatataggttcgggcccctgaattgtcaggtaataactctactcctgttggccgaagccggtattgctcttattcaccataatcacaccagtacaatatttggggtagcctatctaactgttgtcgatttggcgatctgtagtattgactcgtagtcgacaacagggtagccttcctcctcgaatccgcatccggcgagatcaaagacagtgctatatctctcctgatggtagccataggcaccgtaggggactagccatgcctatatctgaagtcgatatctgacgtcttgtcttagcgtatgttggcttgtatgttgattttttgtcttgatctattgttccgtgtcccctctcctcctaggggttcttgtatttatacccataggtgttcccttgtccaagtagaattagggaaaccaatatggatacaatccgagtagtccttgtcgttttcatgtagaactttattcatccttccttatacggaatttctcctgtatccgaaggttgtttctgtataagacatggtatgtggtgggtcctgccgagatttagtcaattactattaggtatgtggtatccataacctgacagtttagatctagtctagtcactgtaacacactaaaaagaaatgtgtttatatcagggctaacttaggatgccatcgtttggccaattatggataataaaccaaacgtcgtattagtgataaaaaataatttatgaataaaaactaatgatttaaacgtcaatgttaaaagagaaactattataaaaaaacttaaaatcaactttaaaaaatttaaaatttttggtatcagcatatacgttacaggaaaaaaagatgtggcccttaaattcaacacgttgataccaattgttggaacatttattaatgcgtcggtcttacaaacagcagtgcatatacacacagaatccccatgctgcacgctctttcctctatgaaccagcttttagggtattgaaaagcaaaagctagcacaaaatacatatagtactatactagttatcattatttttttgaaagatcaaaacatttactgtaattaactgagcagatggaactcacttcagggagactaaaacaagtagccgacagatataaattaagaaagaagcctattaatcactctataaactcgtatgcttttgatattgtttcccgaatctgatatgcagatgctgctagctggccctcatcgtcgacgacgaactgatcatagctcagtgatgctgagggttgggccccccggggctgagcctcttggacccctcgtaaaccgtctcgtcaatctcttctccatcatctcgctgccgcggcaatactgtttcgaccgccgtgccgctagtcctcgccgcggccggcgcagctggcggcggcggccgcggcgggggttgactgacgacggcggcggcgaccatgtcgtgaagccggcgatggtgatggagcactgggcagcggtcgccggagacggagacggagacgggagaggacgagccggtgacgaggaggaggaggaggcagaggcagagacacgagagggttattagtttcatctgtccggcgctggtaattagtgatggtgttgatacatgtttatgtagaggtttaagctggcctggaaacgtctatttatagtccaaacggcagtgctgcttgacttgtcaattacgtactggtttcatttttttgattcacaagtatatattttttttaaaaaatgtgttcatcctgtagtatatactacaaaaagagcccaaattatactgtttttattcacaagcagaagtattacgtgcaggcaccatacggagcatatacaatgttctttcttcttttcccctttggcagatttacaagctgacctaactctcaacattttacagcggagcatttagagtttggtgtgttgatgtactgatcgatgtatgtgtatgtgtgtcttttagttttaggagtataattgaaaagagaaaacgtttgaagtttattttgttgttgtttcagaagttaaaattgctttcctaaaaaaaaagagagttaaaattgcttgcatgtatatatgatctcttcatggttctaactcaatcaggtaagacatgggagtgtatgttgagagtgcatcacttcaagttaaaacgcttcaatttcaattacaaaaaaaggttaaaacgcatcaagtagtgtcaattaatttcttgttctatcataacattccactaattccctgcgctcgctggataaggccggttaaggccgtctgtcctttccctttttgacatacacattacctttgaactataatgaaagtgttctttttgacaaaatgtttgacaacgctaaagatcaaagggccaaagcaaaaaaagcaagcaacttttcttgtcacttgtcatggacaggacaaaatgtcataccaatgggccggtttgtttttttatgggatttgatactgaacactcaggtgctttttcatgcgaaaattagtttatagcataagaagatttgacgcgctcttttagctatagcatcaaagttcatgggcatattttaaaaaccaagtcaaagtccattgtggaaaccagccaaatcaaatcacgccctataaaaatcaacccagggaatatatatatttcgggattaatgtaggattttagagtatttttaatttttgaaaataattaagaacccggatctacatccaaactatacatagccgatttagagtattttgtgggagctaaattaattcatatgaaaattctataaaatcaaggtacaaagccactctatgatggaaatgcttattacattaactaggtgaaaccccgcgcattgttgcgagaatttagtatgataacaataaaaaaaataatgtgtaaaatagctagaaaacatcagattaagtaaattaatgtggtttatgataatttaaatttaattagtatgtacaatggtgatgcaaacgtaaaaagtaaggtgttatgactttatgaaagaagaaaagtagggagataatttggaccgtagattaatcatctaaaggataaaacaattgatgtgatataacttaattagagaaaaaaaggagaaatataatttggaccatagattaatcatttaatcactaagtgaaaatgaactatataagtatataggatatcataaaacataaaaagatatacattgaaacattatgtgaattatgttggatgataatttcacatgtttgtattggaaaagctcttaaattataaaaactataaaagatatagcatgtttgcataatgtttaaatgtgatgattattagtggatgatgatgttgcaccttgttaattaatggatgatgatgtggcatcttgttagtggatgatgatatggcatctttgcatgttaagcttaagaagttagtgggggataactttatagtaagataggattccatcacggtgcgcttgttttgatcaaaattaagggcaatttgctatgcatgatctatagatctagttgattgccagacaatccgacatacctgccataaccgacgtgaaacctaacaatgaaataggccaattatctcagcaggaatcgcatgatcatgctcacattacaatgtgtgctatgctgtattgtaagcactacccgattcggtattgcaattgcatgtcatcttgcattatggcttaatgtgtctcatccaaaagaagaggaatattttgcatcaattacttgtcggttgtcctgttctggcggcaacaatttttcatgggtcaccaaaattttaggagattcgccagttattaaacaagcacctcctctcttttaactttttagggttaagtccgatttacccctcaactgtcctgaaaattcaatttaaaccataaagtgctctaatgcgagatgttttacacctctgagcttttaaaacagtatgaactagactcccacacgctttactgtagaaatttgtgtatgtaagatatgtgataaatttgtacagtgatgaaaatataaaataatttagcaagcaaatgaaagatgcaaagccgagaatggaacaggtcgattatcaggtttttcccctacttatcgatctatttctaaaacccccgttaactctggtataagaaattttttttgacgtagggtataagtacatcgactaactaagggagcattcgttccggtgagttaggatgagaaagcacattgtagtccgcgcgtatgcttcccaaactactaaacggtgcatttttggcaaaaaaattctataggaaagttgctttaaaaaatcatattaatccattttttaaaatttaaaatagtttatactcaattaatcatgcgctaatagctcacttcgttttacgtatcttcccaatcttctcaatctcctatctctcaaactcaccctaagtactcctacctatcaacttgataagataagtcgtctgacaacagcaggcagtggtaacttgatcaattgagcaacaggtgcaaaaattcctgaaaatacatacaaatactccatctggtttcattttaattgatgttttggacaatgacacggtctacaagatacatctttgaccttatttttctattataatatatataataaataaatatatgtttacttttattatagtactttaaaagacaaatctatatatgttgttctagttcctttaaactanatatttttaaagttatcgatagtctaagttataaaaatttgacctcaaacttgtccaaaacgtcaattaatatggaactggaggggtatctgcaaactgtaaagcaatgacaaaaaaaaaacgttgatatactacaatatatagtgaatggtttgtactttcagaaaagaaggtgtaattcaatgaccgttaccattcgaaaaccatccattttaccttacacggtaatatatatatatatatatatatatatatagtacacactattaggtgtattatatatttataccttaacagagcttacctttttatgaactaaagaaatatgcaaaatgcaactttgatgctgtgaaacagtaaagggaaggaattaatatccaacagcataaatagttcataagatactcaaggacagcaacaatactaaaagttggttaacacaagttctcgaaaggctttaat

SEQ ID NO: 29910 - DNA, 6319 bp, Oryza sativa
actagttgactgttcaaaagaattgagcaatgccttgaaacaaaacacttccttctgagatgcttaaaaaagaaccaaagtatcatctgcatactgaatcactgggaaaccctttccattttgttcatttattggcttggacaacagacccagagagcatgctctgttaatcacactctgtaacaactcagcaccaagaacaaaaagcatggggaatgagaatccccctgtcaaacccctctcctacatttgaaagaatttccaggaacaccattaagcagaacagaggtatgtgctgaagtaaaaatcatgtgaacccactgcaaccatttgtcactaaaacccatgctttgcatgatagaaataagggcataatgctcaatagaatcaaaagatttttcaaagtccagcttcaacagaattatctctctctttgattgatggcattggtggatgtactcaaaagaccatgccaaacaatcctggattgttttgcctttgataaatccatattgattttcttgaacaaccttgagcattacaccctgcagatgatctgccattaatttgtttagcactttcaaactgatacccatcagagagataggcttgaaatcattaacagtttctggagagggctttttgggtactaaggttataaatgagctattaagcggttgcagatcagtatagcacacatgaaagtgtgctgacaacctataaaaatcctgagaaatgatgggccaacatttcttaagaaaaaacccattataaccatttgggccaggagctttgtctggtggaattatcttaattaagctgtcaacttcttgggtagagaagtaatccaccaaacaatccaaaattacagggttaggaaaaagctccatcagattaaagctcattgaaggagagagagaaatccccattctgctctcaaagctttgaaaaaacatattagccttctggtcatgcaaagtaaccacttgaccagagtgatcataaatttgagagatggaattcaatctgaatctctctgtggcaattgattgaaaaaacttagtattctcctctcccaacagcatccatctattcatgcatctttttttttccaatagagctttttaaactcaagaagtttaatagtttgcagcttgataatttctttgaaattccactcataaatacccaaaggcctatgttcttctattaagtcaagaaagttgagcacaacattacagttaaccaggagagcagttaaccttgataaattcttactccatttcagcaaactcttcctcaactttcagcttaaaactgatacacttagctgggtcctcatagccaggatccatagaccaaaccctgctgacaagataaaaaaaaccctccatttcaagccagtagttttcaaatctaaaaattggggacttcgggatttctgtatgtatcgattttaactacacaaggaacatgatcagaaatattgcgagctagaggaagcacaatggtgttggggaaggccaaggtccaagaggggcttgtgaaaacccaatcgagtctctccaacaggggattattctacatattactccaagtgaaatttctacccttcaaggggattttcaacagaccccgagaactaataatgtcattgaagatgataatgtcattcataccagctcctggcctatttctgtcatcaacagatgtatagaaattaaaatcacccagtaaaagtctgttttcagtcggcccaaaagattttaagccaagaacaaagagggaacattctgggccattgcatgggccataaatgcaagtcagggtccaagcatcagaagattgccttgatacaaaatttactgtgaccgaaaagctgtttatatcacctggagttcctaaaaagactttggaaacccaaaccactaagattccaccagaagcacctctagatggtgagaaagcaatcaatttactcgatgccattatacatcattagaatgaaaagaagtgatgctgaaaaaagacattggaaaaaaatagagtggatccttaaaatgttatgaaaccagcatctcattaattaatttatacaaaggccaacataattctcattcgaaacaaagaaatcaaattggtagataaaaaatttgggatcataatcttccttgccattagagaaaagatatgtgccttgagaatttgaaagataagaatgtatgagctagaaaaaaaagaggctgacctcccaaaagtcaccagagcttcaatcactggaaaatgttgaacctcttcaatcactggtgaaataaaggtcaatctgagccaaccaacgatcaaaacaaagaatgaataaatatgaaaaattaaattacctacctcaaatcaagaaggcaataaagcttatgtccagtgctagcacggattgacttaatctaacgataaggcagctgaagttctcaaacgaatacagcagttatcgaggacatgagtaatcaatttcaaccgtcattccgtagaaaggatgactcccaaaacaaccaaactctcccactccaaggctaacattggggaagcctttgaatggctctaggagtccaacatcgattaaaaggcatggagtttgtgtggattttagatgcgtttcaccggtaataagtaaaggacgatgatgattttggcacgacgttacaggcgcacagagttaatgtcttcatggcagccacgaaaactacttgttggtgggtgtcgacggtttccaggaggtgtggcaacaaagggagaggaagaggagtgaggcggcactccagaccgtcgcttccctagctgacgtgcggtggggattgtgtggtagagccatgggagtactgctgcacacaatcgcatgggagccatgggagaatcaaagggatgacgtggcttaacaatcgctcaggaaattgctaataactacactaagtggggatcacttgtatagtattataggattacccctctaacaatgtattagtaatggttttagtcctcggtgtcatacacttatatgtggtttaacaattggcattctaatagcttggtgggctgcacccatcatcctctaccaacactatatttgaaggcaacggggctcgggaggctctgttgaggctgcggaggcgcttagcaaaagtggcgaagatgttgaggtggcatcatgcctgaggggctgaaaggggtagaatccgagctccgtcaagggatgtaggtggaggcggaatggtcgatgtgttggtccgtggtgtggcagaggagcacaggtcaccgctgctaaagactactcgccgagcttcgtcaaggtccacggatttgatgggatcttgctctcctccctgaccttctcgcttcttcctcttctccccaagctcatatgctcacacttccatcctccccaagatcggcagttgccatgcaactcctccttgacctttgatgcgaggaggttgtagagtctgacaaagtggatgcagagctcgaggtccacaggaccgtgcgcctcgcatctcctccatgtcctactcatcaaccgcatcatccgccattgtctcgttgatctcgagcactgcctatgcctctagttccacttctgcctttgctaagctccacatctgccactgctgcctcatcgaggtcaagctccacgctcgccgccgccgtgcctccccaagcaccaccaccactaccgcaagttactctccttcttgagggtcatagccgacggatggcctcccgagtgtcatcgctgccgcaagttccgctcctccttgagtgttgccgctccccgagagcttcctcctcaagttttctctcctccgctgctcgagctcggcgctctccatctcctcttgcctcgcccctagatcaagccagcaaagtgatgaggaaaaaaatggaggtcaatgacaagtgggctgtaccaatatcttaccacatcattcgccatattggagtgccagatgggacaagtgggaccgaaaccaccttaaaacaggaggatggggataatgtgtccggattaaataattgaatggtgtaatttctcttgatgagctggtacatcacaacactaaactcatatgatgatcagtgcagcatagaaacctatagagcatgcccagagaatcccaaaatgaaatccaatatgtcggtgatatggtaacaagggttccccgtattgtggacaaggggtagcttggcaccacaccatctgtttcccagctccagagggtggccgcaattcacctcaaatgtcacgtgccaaccctagccttgtgttaacagtgaaatttggtaagcccggagtagtcatcggctgagagtcagcatcggcttcgaagtcctgagattagccgatgagaattgtcaagtcgtcagttgccggattcttgctatattcggttaaggaaattgatctactaaaagaagcttatccagagactgagttcaaagagaatgcggcatggcaagttatctattaattaggaatagtttgttagtttccttttatctttaggaaagtgtgtttagtgtcctataaggactttatcttttccttttatctttaggaaagtttctttcttgtccgacaaggacttgtatcaacccatgggtataaatatgtacacccggggtctatgtaatctattgctacgatcaatacaattcggcgcatcgccacccttttacttctacttttgtttttatgttccggcaaaacttggcacccgacgcagggctgcatcgtcttcgatctccggcgaagggataagtccaatgttccgccggtccaggcaattgtatcgtctacgttggcgtcgttcaaggctgcatcaggacattcgacctcttggattgctctggtttggatgatatatttgcctacctatttatcatatgtctctgttaatctagtcttagcatatcaatttagctctatcggctgcttctcgttttagggtttctgccggtatcggctaaatcgcgttgctagattagattagcttagacatctaccaccctgaaaactcagtcaacggcttggtcgtctagatattatgtttcttttcatatttagtactgcatcagttaagtttgatctactaagtcgtacttagaaccataatctctagcctgctctttgactcctaataagggtttcatcggggtttcagccagtgagttatctggacgttgcatcggctcataaggattgcatatacatataagttggatttagccgatgacaacaaaggtttcactgtttaatctaatcttgtggatttcatgacatcagacctccgaccgatgtatgctttaaccttcggatcagtgcttattatatcatatcaatgctagccgattggtttatactagactatattatagttatattttattatcaacagccaattgcctttatatcatatctacattggacatatagccgattgcttaaaccctatcgctatcggctggtatcagcattggctattatcggctatcggcaggaactactccatcggcttgtcagccgattggctgttttgatctactatttgcatatcttgttagttgcaggatcaaactgactggcacgcccgcatctcactaagatttggacctgcacaggagctaagcagatctcccaggccggtatgttcgattttttcatcaacaccttgggagaaagtttgatttggagttgggtgcttagggtcccaagcatgtcagggtttagggtttagggtttaattcctactagtcacatcaactagaatatatgtaaaagaggaaagggtgaactctaatggattaatatgaaaatacatataattagaggtagtagtttatccttgggataaatatgatacaccagcatactccggggtgaagtgctgcttgcaaaaccttatttgtaagggcattagcaataccaatactagtgcatcgcatgagaaaatcatacacactaatttgtcacttttattttgaaacaactgaacatattacatatacattaatcatatttcgttttacatgcacatgtttctgaaactgctaaacgatacattttctataaaagtttcaatagaaaagttgctttagaaatcatactaatatatttttcaagtttgaaataattaatactcaattaatcatgcgctaatagctcaccttgttgtgcgtatcttctcaatgttcttatttcccctcctcccaaacacaaccttagccattggatcaacaaggcaaacggcttatatattggtgtaccttgaca

SEQ ID NO: 29911 - DNA, 13284 bp, Oryza sativa
tttggatgccatccacgctgaaaccggcccacaccagcaaaaccgatgccggcgggaggagtccgagagatggagatggagcaggaccatccactgccttagtccctaaccaatggtgggaatggcagcggcggtggaaaatcgggcgatggggaggatgacgacagtggatccgagggtggggagggtggcggcggcgtatccagtggtggggagggagatggcggcagatccgacggtatatagggattgcgtcagcggcggatctggtggcggcgatgggaggtggggagggtgtcggtgacggcggggatgaaccccgagcacatgagatgccagcgtttcggatggatttttctttggatttattttgtcaatttttctttttagtcggagtacggcttaggcttaagcgttcacatacgaaaaatacaattctttgcatgggactatctaaataacaacagcaagtttttaagggaaaaactttcaaacctaattatagtataattgtaatataattttactataatatatgcaactttatatctaatttatatagggattacaatgtaggtacaataaaactatagtgtaattacattgcaattacacagttacctttgaaagttttttttgcctaaaaaacttgcgacagttttttaattagcaataccgtttttgcatatggttgctctacccgtatgcaaaaatattttttgacatctgggtgtaggcggaccacctatatatctccgtatggatccgcttgctaaattcgattttgacagtataaaaaatattttttaagtagtgtaggcgcgccataacacatcctagctatagccgatggagaatcgtcttccctgaacttgttgatgacggaagtggttagcggcagtagagctggaaggcagggagaggcatgaccacatggagaaaggggatgcctacattttttatcccgtgcagaccaatcaaatccactaatataataatataaggtcctattcagattatagccaaaataaatcttactaaattttagcgttgtcaaaatattggcaagatacaatattatcaaaattgtagaagtatttcttatgtatttaccaaatttggcaacaaactaaatatagatatttttttagcaactgtgccaaaaaaatggtatggttgaaaatggcgtcaaactgaaccggtcctaactttttggaagatttactttgtttctacaggacaatatcgatacacgtatagatgtttttattcacatataatatctatattttactagttaattattcaatttttatcgattacaataattttatttcgtaccttacttctttcttatcaacgatcaacattactctacttaatttgtaatacttccaagtacgttaacataccgtgaaagttctcatcaaatacatttgacttgagggagtagaaagtactataatttgtatagtacaatcatatcgtacgtcctcggcaagaaagaaagaaaagcctttatcgtacatttgaattagtgatgctgatgcgagattaattacgtactaattagacgcgcgcagagcacacaatccgatcgggctatgcgtcgtgcaaaagcaaacgcggcatcatcgatcatatcgttctatatgcaaacgcattgctgtgttgttgtgtgcttcgaaggccgtgcatgctccacgcgactaattaacgatctgctcattgatcaccttgatcttgcttacgccatatagtacataatgtaactgtatatatagagctagcttagctagggtttcgatctgctaattgttttttttctcattaacaattgctgcgcacacgcaattatcttgagaacaaagcaacatcctgttttttctcgtttagatggatgcgttgcatcgtgccatgcgatcgatgcatggaattaaaataacccttttattaatgaattcaaattcaatttaagtgatgtacgcagtgatcgatatatgtaagggagagtgatgatagataagggagagctgtgtagagatggtactctcccagttttgagtgatctccaatcaaaagtagcattgcatataggtcggttcttggcctgcagcatgcttggaatgcagaaatttgatagtgcaaaattaagaaggatgaaatccaattttagtcattatacggttgtttttcaacctcaattttcaaaaggaacagttttgatttactccctaaactttgagcgtagtccgatttcccatgaactacaacaacaaacattcgatatctgtgaactttaaaaccggacgaattatatctccttgctatctaatcaacaatataagaaagacaatttatataaaaagatctatctagacacacctatcattcattatatatatatatatatatatatatgtatattcttttctctttcgactctctcctccatctcttagggccaaccaaaggcccacaaccgaactcccctcactcgagcacacaccttattgtcatcggagtgtgtgatcatagatgcctcaagctacacctacgcaatctatagctattaaaaccggacaagactagtggttcaacccaaaaaaatcacaatagctcagtccagttcgatctagccctccactcatgatgtggccatgtgggtgaatcaagaatgcatgtttggcagtgatggtgatggcaaggtgccttctaagcagatgagaaagcagaaagtacatccaagcgagggagtggatgcctagggcagcatgtttgaaggaggaatcagagaggagagagaggatgaggtcaacaacaggtatgccagatctaactctattttgcgctgcatgacgtgttgggcaggggggattgcttgtagaggtggtgatggcaaggtgcttttgaggggcgatggtgaagtgcttttgaggcgcgggagaagtttggagtatttatatgtgggtagagataacttgtccaagtaaaccacgagcagcccttgtgagatacgggtagataagacactgtctttcttggatcaaagtccaacatcttctatttccgttgaagggttttccgttccgttcttatctactatacttttatatttactagaaaagatgctcgtgtgttgcaacgggtgaatgctattttaatcatgttattgttatacggtttatctaggatgaaattcactttaggaattcgcttggatatttttttaaaaaaaatcatgagctgcaattagaagtctgactttcatctcaagttagcatgcgagtttttctaaagagatttctcatacgactccttctgtagttttaaaagcaaacaaacttaaaatctgactcaaacacggatttttatttccaaaagcgaacaaaatttaaaacccgactcaaatacgaatgatgtaccaaaataccggtaaaaacattttcaatttttataacaatagagatagagatatctggtggctataatccaaatatagatccgtaagaccgataaaatccatcttctaccatatgtttagtgttttcctatgcgattttttttcgggaatgctacatacggggatcctgtcggcatgggatccttcgtccttcttgcctatccaaagagaagcgagagctgagcgcctgagccgtaaggaggaggttgctgtcgcctgtctgtgaggaccttcggcacggttggggaaaaagacctgctcggcgagaggaggacgcggccaccggcgacgagccctacacggtgagctcctgcgacgtcgaggacctcgtctgtgtcgtgtcgaggcagcggtgcgtcgcgtccgagccgccggtgggggatacatcaacgaagaaaggaggggcgtcgatcggtggccggagctagggaacggagtaactgcggtggccggagctaggaaggggaggggcagtggtggtggtagctgcatccggtggagcgagcggctgcggtggccggagccatgggagggaggggtggcagttgtcggagctaggggagggagaggcggcggcggcggtggtagccggagccgggaaaggagcagcggcggtggttagagccaggggagggagggcggtagcggtcgttggcgtcggcatcaggtatgtccagcttctgatacctagttgaaatcacatgatatcttgtaggtatcgcctgatacctcataggtatcgcctgatacctctaaagtatcactttctacgtggtaagaatcacatgatacataataggtatcacctgatatctcgcaagtattatcttttacgtgataagaatcacatgatacctaataggtatcacctgatatctcgcaagtatcacattctatgtggtaagaatcgtatgatacctgataggtatcacctgatacgtggtagaacagcatgatatttgataagtatcacctgataccggttaggtattagtctattaggacttgatatctaactggtatcatcctgtttttgaacggattccggtatatagcagcttttttttttcaatgcacggtatattcatcagctggttggttatttagccaagaataaaaagatagaaaaatgttcttcctaggcccgagggccgagagctgttcggtatggccgggtggacgcgttagcccttagcagcttattgggcctgaaaagccgaaacagtgaacgtcgtacggcccattaaagcccaggcccaaaagagcccacccacctcctctcttatctatgggagacgcgctctccctctcgcctcgcggtcgcctcgctttctccctcgccaactcgcctaccctccccacccccgcgtcggcggcggcggcagcggcagcggcagcgacggagcctcgccggcggcaagcgtactcacccggtaaccctggctcctccccccctccttctccgtacctcgtatgcgtgttcttctgcgctcgtgcgtgcggtgtctgccgccacagaaaaccctaggtccgcctgcggcgtgtcagcgagctcgcccgtcaccgcttagatccgcgcgggattcggcggtttcgcttgctggagatgccttgacgagcggtttaacgagatagggaatgttctatttgtttttaccccgtagctgcaaggtttctgaatctcagatcccctcctgccatgtcggggttgaaggctagggttgttgcttcagagttgtcgtgaattagtcatatatgcagtaaattcttggttggagctggatacgtgggtggttgggagtaattgctattttctagatcaacttaatatgctggatcttggtgttatatcgatgtattcatttgtttgttactgtgttctataccattatcgtatccttagatccaaaggataaaggaaagtcatagttcgaaatttgagctgcaattcaaaatttttggaacagtgtttacaactcagatttgttgactgatgtgaatagcgcatgaacttgcaaggtgcatgattcattgggctatgccaattttgatttggtagtttttaatcttaaatcctttttaacatgatgccatgcttgtgtttgaagacttctttccatgtacttgaagttacctatgggtttttttgttccctatacttttaaattacgctgtagtatattattcttaacaaaaaactatatctgtgctgacaagtttggcagttattctttggttgcatttgtcttcttatcgctaatgttcctgtatttacgtgtaattgcagacaaaacaatgaggaggtatagtccaccttatcgcagtccaccaaggaggggatatggtggcagaggaagaagtccccctaggaggggatatggaggacggaaggaacagggttctggcagtctcctggtccgcaacatccctttaagctgcaggtactggaactgtataaccgtagcacctttttccaatgactatattcttaatgaaataaataaatattccctctgtttctaaatatttgacaccgttgactttttagcacatgtttgaccgttcgtcttattcaaaaactttggtgaaatatgtaaaactatatgtatagataaaagtatatttaacaacaaatcaaatgataggaaaagaattaataattatttaaaatttttgaataagacgaacggtcaaacatgtttaaaaaagtcaacggcgtcaaatatttagaaacggagggagtataatatttcggaggttgcagatttattcaatttgactggctctcttaactctggcagagcggaggatcttagagttccttttgaaaggtttggacctgttcgagatgtttacctgccaaaggattattataccgggtaaagtgttgctaatgactctgttgattggtttgttgattggcaatcgccaaaaaaatgtttgttataatgttaggatagtaaatgtagatagtctgtatgcttctctgtattgtcgctgcaataagcttacaagcttttctaaagttattcaatagactggaaataaaaaaaatcacaacggaggtttggcgtgaacattttccagcttcagtgtggtatcaattactgcagtcaccttttcatttagctccattaattgaaatgcttgaatcatttttttaatctgatgatgtgtttagtaatttttttcatgtcactagagcatgtaattcactaatgtggtaacccatatttttgctttctttctcctacgcacttaatatcataagaagtttttccctgaaactattcccagggtcgtactggattgaagtaaatacgatgttgaagaatgcttttcaatattcctaacaattgatttgtttggcaagatagagtcttgtccgaatgaagaagttcttctatgaagacaagatttgactcattgagaaaattaatttcacgaagagaagataagagagttgtactgggtggtgcatgcgaagataaaagtgagagaagttgatttcaagttctatcttgacttttcgcacattcgggaacttgaagcgaatgcttctgtgaagatgctctttatgaggatcaccatacgtagtgttatacaagaaattcagataatagagcctggacatctaactgctttttgcaacacttgcttcccttttgctggaaatgttcgtaagtttttaactgtgcttcactgagaatcatagagggtacattgagttttgaactgtgatggtaacatggcagacacacactacacatgaacattttgcaccttcttatttgttagttttaccatcaattttcctcaaacaactgtctcataaaatatacatatacagggaaccgcgagggtttgcattcgtggagtttgttgacccttatgatgcttctgaggcccaatatcatatgaatcgtcaggtggtttttggccgggagataactgttgttcttgctgctgagtcacggaaaaggccagaagagatgcgcagtagagccagagtcaggtattgttcccattactgcttgaacgtgcggcttaatattctgttttgtgcttgtttacaatgactttgtgtggttgctttgcagagggtactctgaccatgaaggccgtcgttcatcccattacggtattctctcatttctcatcattcatgatcttgtgcatttctaaatgcacatctagaatcttgtgtgctctgtaattatgcttggaatacttgtcccttttgctgcacacataaccgtatgtttcagatttcagattagtactattggtcaatctcaagtttttgttaattttcttttcttaaatgcatgtaattttctaatttattttgttgccacaccgaattactgaggcatccatctgttcttacagggaggtctcgttcacgttcgcgttcccgctctccccgttatcgtggtcgtccacggtcaaggtagaccaattatagttcctgtttactttttgttgctatatgtgattcctaagccattatcttcattcatgattctctcacttacatgttttctttaaaggtcatactctcctgctccaagacgacgagatgactattccgcatccccacagagaaaagacacacatcgtgcaaaatctcctaggcgtcagccaaaagaacatgaagtagacaagaagcggagatcctattctcctgccaataaagatggggaccggcgtgatgctgataatggttatgaaaagtaagttcgagtgcttcttacttccattgctctttgcaatgcaaaagttctgcattggtttgcttttctcgcctcaaaaatggttgaaagtagcatacgatagacttttagtgtatgatattccagtaaagattgaatggctgttgtgccttgctgttggattaggggaaagcattcgaatattttccgcatactcatgtagtcattttggtcgtatgtgcgttacttatgggatatatataaaaatataccccctccgtcccagaataacttaatctagtacctgtccagattcatagtactaggatatgtcgcatccagtattagattaacttaattctgggatggaggtagtacctacctcatgaaatgccttcttgggtttctggtcatacactgaaagcatttatattcacaggaggtcgccgccagctgacagcgatggatcccctccgcaccggaggtcccccaggcaatcctcaggatcgcctccaggatcccgctccaggtctgccgacgggtctcctgcccgcagtgactaacagaagaacactgcgcacgctgtgctacatcctctctagcttcttgttggtcagaccggaccagtttaagtaaaaacccttttgggcttgttgtaaaacttgtaatgctagcatctgtcgtggtttggtagcggaggacttggatcgtcaccattgtgtgtgctcgcttctcagtggatggagacattttgagtcgtgtgtgatgaaaccttagacttgctgcatggcattgtattgtgttaaacttatccgtatgccttgtgtattcttgtgcttgccatgtgctcatgcgcttgaattgctgtgcacgcggagtcgaactatgccgtcgacttcttttggaactcttttcgccttaaaatatactacctccgtcctaaaacatagcaatagcaatttttagctatgaatctgtagctaaaaatgcttacattttgggacggagggagtagtaaaatattattgaattagataacatattatcatgaatatagatgaaatatagcaaaatcttctaccctataattcaatgaatgcttttactcattcatcatgtaacacattcaatggttcaaaatcttataatctaacgcctcagaatcccccacgtctcctcctcccctccccgcacccatctcctcacgccgctctcgctttcgctcctctctctcccgcgtctcccactgcccagcgccgtatctcctcctcgcgctctctcgccctctcgccgtcgtgcgccggatttttgaaagaatcgacgcgctcctcctccacagttcgcgccacgcgcccctccgtaccacgaaaaatcgccgcgccacgcctcccccacatcgccgcgccggcacccaccatcgtcaccgccgcccattgctctccaccacgcccccattgcgccgacgccctccctctctttcaggtcgccgcccccgctgattccctcgcgattcccaaccctaaccaccgctaccgccgcccctgccgctcaggatccccccgcctctcctcctccccgccgccgacgctgtccccccgcctttcctccttctgcccacctgccaccgacgccgccacccctggcagtgactcctccccgacgccaatgccgattcccccgccgtcgatgcctactcctatggcagtgcggaggactgctgcttccctgcccccatcaggtgtgtgcacgatttgtgtttgttaaaatgcttatgtgaaaaagctgggggtataaatgatatgctgcagattatcttttcctgttataggttgatcaataatggtttccctaattcaactttcatattgctgaatcttttggtctacattgatagctgatgcattgtttgtcagaaacctgttgaatgggaggcaccatcataattatatgatccagcattatgaagtaaccatcaactgatctgagcgtgggggtaatttctaaccctcacctctgatgtttgatgaatttcattttcttttttgaccagatttcctatacaaatataatttcaaatgcttgagtatatagcatattgttgattggaaatataattcctgacaattgttggtcatttaaaaaatataacaaatatgctcaaactatagcctataaaaggcacaacagaagaattgatgtagctggaagaaaaataaaatcaccctctgctgctttgtcacgagataaccagtaattaaccatgcagccaaaaaacattgcatcgataacttgtcatgtgagcatatttactgtataatttgcacaaaaaattcatgcttcatctattggaaaaagaaaacccattagcattgatatagttcattgtttgcatatttgtcaaagcacaatatttatgtacactatcacttggagttgatcaactgtacatttgtttggatttgattagttttaagacattttaagcgaaatttatattttcctatagcaactgattgcaatttttcctgtcacattttacaagttttgactacagcatcatcggtgattatccattcccgtatcactgtgaacagctgctactgtccttcacaatctcattctctgaaggtacaaccagtttcttcactattcccttcttaactttgctagctatgggatccgatgttcttagatttttttcataatggcgttcctatttggattgtcaagttttcagaattttttagaatgggattcctatatttaccatgtatttttgaataagtgacgatgtttcttaggttttataagtgtgagtttatcactggtgatgatgttagtcatatgagcactgcactgttaatctgttatatgtactgtaaattggaaaatataaatttgtatcactgttacatgttaatatttatataaaattcgacatttgatacgcttgatgaaaagcatgcgcagaagcctttgagtgcacaacccgaacgatacccaattgataaaaagcatgtgcaacctgcaattgttcctgataaactctctattgttcatgaaagttatataaatcggatcaagcatataagcttgctcttgtctgatggtcatttaaacaaaaaatctcttgacatgattttataattgaatagtatcgtataagtttgaatgtacacgctgactgaaatttcaaaaagtatgagaacattttttgtttcttctgacagatgtaagtttgtttggagaacgggacattacgcgctgcctcctccatcgatgctgtgctgttccactgcctcaagcgtcaccgccacagtatgccccatcttggtctgctctgccaaaaggtacacaaatcctccgcccccacccctctcccattctctttattcccaatccctgctatgtctcctctatccctattagtacccgctgattgttgacatggagaccctctcccatataagcaaggagaccatctctccccaatcctattcaactttattgttgacatgttagctaccttgataaatagagccaaaacacaagggcaagtagatggtctcattccgcatttgattgatgggggactgtctatattacaatatgccgatgacacagttctttttatgaatcatgaccttgagaaagctcagaatatgaagtcggtgcttctagcctttgagcaattgtcgggtctgaagatcaattttcatagaagtgaactatattgttttggcgaaacgcttgagtatagagatcagtatgcccaactcttcggttgctaggttggcaattttccttttcgatatcttggcattccgatccattgtaggaagttaagaaatgcggaatggaaagaagtggtcgaaagatttgaaaagaaattaagtagctggaaaggaaaacttctttcgttgggagggcgacttacactgattaactcagtacttagtagtctcccaatgtatatgatgtcgttccttgcaatacctagtggggtacttaaaaaacttgattaccttcgatctaggttctattggcaaggggatggccataagaaaaaataccggcttgctaagtgggacatcatctgtcgtcccaaagatcaaagggggctgggaattcatgacctcgaggtaaagaatatagcgttacttagcaagttgcttaccacagacggaatgtggcaacagttgatacgtaataaatatttgggatcacaacctttatctcaggcttattggaaagcaggagactcacatttttgggctagtcttatgaaggccaaacaagatttttttcggtttgggtcttttcgtattagggacggctctcaaataaggttttgggaagataagtggttgggtaatgcctcgttgagagatcaatatccttgtctctataacatagttaggcataaacaatcgacaatatcacaaatctttcaaacgaaccctccaagcttttcatggagacgagatttaattggagcaaaattagctgcttggaataatctattgccttgcatagctgatttggtgttgacgcaagagcaagatgaatttcgctggaatctcacccccaatggggtcttctcggtcaattcacattacatagctcttgttcatacgggcgtcccgaatattaatagacgtatttgaaagattaaagtaccgctaaaagtaaaagttttcctttggtacttacgtcggggagtaattctaacaaaggataacctagctaggcgaaattggaaaggtagtaaaaaatgctgcttttgtcataaggatgaaaccattcaacatttgttcttccaatttcatctatctcgtttggtatggtccgttattcatatggcctctaactttcaacctcctcgaaatgttactcatatgtttgggcgttggcttttatgtgttcctaaagaaatgagaaatctgcttttgatgggtgcagcagctctttgttggtccattcagaaacggggttatttttgataacaagttagtgtcttctcctttacaggttattactctagttacccagtggctgcgtacctgggctatcctccacaaaccgggattgcgggatactattgcg

SEQ ID NO: 29912 - DNA, 942 bp, Oryza sativa
aacaaggggaatgctagaatgttgcgatggcacgctgaagagcgtcaacaggacggcatgctgagacaccccgccgatggttcgcagtggcgaaacatcgacagaaaatttaaagaatttggaaaggacgcacgaaacatacggtttggtttgagtacggatggcatgaatccttttggagagatgagcagcggccatagcacttggcccgttacgatgtgtatctacaacctcccccctggctatgcatgaagaggaagtacataatgatgccgattattattcaaggccccaagcaacctggtaacgacatcgacgtgtacctaagaccactggtcgaagatcttaaacagttgtggaagaaggaaggtgtccccgtgtgggacgaggacaaataggaggagtttaacctacgagcgctgctgttcgtaaccatcaacgattggcctgcacttagcaacctatccggacagtccaacaaggggtacaaggcttgcactcactgtatggatgaaacagaaagtacgtatcttaagcactgtaggaaggttgtatacatgggtcatcctcgattccttgcagcaaaccacccggtacggaagaaaagcaagcacttcgaacataaggccgaccaccgtacgaagcctaaacatcgcagcggaaaaacagtgtttgctatggttaaagatcttaaagtagtgttcggaaaggggcctggaagccagcatatagagagcgaagatggtcacgcggcgatgtggaaaaagaactctatattttgggagttaccatattgggaattcttggacgtacgccacgcaatcgacgtgatgcacctcactaagaacctttgcgtaaaccttcttggcttcctaggtgtatacggaaagtcgaaagatacactggaagcacataatgatctgaagcatatggaacaacgcg

SEQ ID NO: 29913 - DNA, 15154 bp, Oryza sativa
cttccagacaatgtccgggcaacaataacaaaactatgtgcattcatgaacgcaatttcgcagaaggtcatcgatccggatagattagaagcccttcagaatgaagtggtgcaatgtctcgtcagttttgagttgatatttccaccttcatttttcaatataatgacgcatctgctttgtcaccttgtgaaagagatccgtattctcgggcctatgtacctacacaacatgtttcctttcgagaggtacatgggcgttctgaagaagtatgttcgtaaccgtgctcgtccagaggcaagcatcgccaagggttatggaacagaggaggtcatcgaattttgcgtagaatttatcgaagaccttcgcccaatcggggtacctgaatcacgccatgaagggagactacggggaaagggaactctcggaaggaaagcaataatgacggtagacaacaatttattccgtaaagcccatttcactgttctgcaacactcttcattggtagctccttacatcgaggagcacttggctctagttcgcgccaggaacatcggtaagtccgatgcatggattacacggcatcacattgatactttccccgcgtggctacgacaacatctcatgagtaacgagtcgatcaaccaacaacttgccttcctggcgaggggaccgtctgggtcgatcgcgacattccagggatatgagatcaatgggtacacattctacacgagagcccaagacatgaagagcacgaaccaaaacatcgctgttcgtgtcgatgccatgggacacgatggaacaactgccacgtattacggtgccatcgaggacatatgggaacttgactatgatcctctcaaggttcctctgttccggtgccaatgggttaggttgactggtggaggcgtaatgattgatgacagtgggatgacaactgttgaccttaacaaggttggatactcggacgaaccttttgtccttgccaatgatgtaacgcaagtctttttcgtgaaggacatgtctagcaaaggaaagaagggcagagggcctgatgagcctaagcgtcaagtggttctcccaggcaaaagaaaaatcgtcggagttgaggacaagactgatgaggattacgatcagttggatgggcaaccccctttcacggtgacgattgaccctagcatcctcctatcaaatgaagacaccccttactcacgcagcgatcacaaggagggaacaatagtgaggagaaagtacgtgcggtcaaccgtcaccgccgatgtaatgccgtaattattgtgtacacgatgtaaactattttggatgtattgattatccatataaatcaattgatgtatggcatatgttaattacgcacgattattagaggtttcaacaagtttaaatcatgtatatgttagttatatgtgatacttacaatttttaaaagttttaaatcacacaggtggcaatttcatatgtatgttaattagagtttttaacatttaatttactagcattcatatgctaattataattgactagaggatttttaaaagttttaaatcacgcaagtggcaattttatatgttaattagagtttttaacatttaatttactatcattcatatgctaattataattgactggagaatttttaaaagtattaaatttaatatatttttaaaactatcattcatatattagagtttttcacaatttaatttactatctttcatatgctacttatatattactattcgaatttttaaaaggtttaaatcatgcatgtggcatttacatatgttaattagagtttttagcatttaatttaatataattcctacgctaagtacatatgatgattacaatttttattaattttaaatcatgcagtatgtacattaatatcttaattagagtttttaccaatataataatatcattcatatatatgctaagaatatatatatattggaatttttattaattataagtcatatatttgcttattacgatttatccacttaatttattacagacaaaaataatttttcgaagtaattgtcatcaatctttgtactttaaataatgttaatgcattaacttctattttataaacacatatgtaagcgaaaatcatatgcagtgctataatctttagtcccggttcttaaccctaaccgggtttaaaaagaatttcgaaatagcgggaaaagatatttactcccggttgttgagaacaaccgggactaaagatcttttctttactcccggttgggtgcgccctcgtcttcttcaccaacacttaaacgttttcggccgatcgatctctctcggcctctctccttcgccgccactgcctagggcaaatccccgcgccgacgccgccgtatctcgccgtcgtctcgagctcgtcgtcctcgccgccgcctccgcctcctccgctgccgccgcatctctggggtgagagccgccgcatctcccttcatgcatctcgatctctccgatctcgatctctctccgtcgccttcgacgccgccgccttcgacgccgcgcaacgccgccgccgcatgccaacgccacgccgccgccgccgtcgccacgccgccgccgccttcgccgccgcgtgcgcaatgccgccgccgccacgccacgccgccgccgccacgccacgccacgccaccgccgccacgccacgccgccgccgccacggccccacaacgccacgccgccgccgccgtcgccacgctgccgcgccaaccgccgccccgatgccgccacaccgccgttaacgaacgagaacgagaacgatcgaacgaacgagagcgagaacgaacacgtgaacgtacgttgccgcgacaacgtgaacgagaacgagaacgatcgaacgaacgtgaacgagctagggaacgtgaacgagcgaacgaacgaggacgaacgttaacgtgaaatgcaatatatatatatatatatatacatgtatatatatatacatgtatatatatatatacatgtatatatatatatacatgtatatatatatatacatgtatatatatatatatatatatatgttacttcgcatttatcctaatacattttttttatcttgcagaaaagacgtgttgtcggagtcgtccgtcaagcctgagtggaagagctagccctagaaggaattggagcaggcaagtgacgtaataatataaatgattgttatatttgtaatgcaattaattaagattattagacctgtaattagacttatcatataagattgtgtagtgttctaatattatttgagttttaatataagattattttattgcaaattagacttagtatgacattattgactacggaattggtgcgactcctaggaattgactattgtagtcttaattaaacttagcatatacgcacgaaacacttagcatacattactattttagtcttagcatgtaatattatttgagttttaatataatattactttatttgtaattagacttggtatgtaattattgactacggaattggtgcgacaagtagcaattgactattgtagtcttaattagacttagcatatacgcacgaaacacttagcatatacatgactattttagtattagcatgtaatattatttgagttttaatataagattattttatttgtaattagacttagtatataattatttactagctagggttatataatatacgtcacctagacttagcttatatcacgatttgtaattagacttagcacgtaaggttgtgtagggttctaatgtacgacatttacacttagcatacatgacttagattgttaaaacataaatgtctcgtgacttagcagatgtttcttgtatcaacagatggctgaccgcgatgaggaacagatattgtacgatacaatcgcggagggaagcagccagtactggaatgaagaagaggggaacgaggatccaaaccagtacttgaacgaggaagggaacgtggagagggatgcggaggggaaccagcaggggcacgtggaaagggatgtggaggggaaccaggaggaggaggctagtggtagtcaaccctccgttggacagaagagggcacgcgggcaacgaggtgcagcgaagaagcttgagggtcggcacatcataacggaagtggaagaagatggacgtcctagtgccccggccgaagccgccaagaactatgtacgtcacagcggttgggttgtgcgggataacgtgcctgtcagtacggtgtactggcgaagaacaagggcacgcggagatcatgagagctttgtcccagattcggagaaagagatgctgtggaccacaatgctcgagacattcacccttcctgcgggtacagaggacaaagtgaaaaggtggactctgaagaaaatggcagaacagtttcagagcttcaagggagatctgtaccagaagtatatactgaaggggcagacaccgaacttcgacacattcccaaagctaagggatcactgggacgagttcgttgcatataagacaggtgaacaagggaaggcgatgatggaaagaaacaaagaaaatgccgccaagaagaagtaccatcaccacttggggtcaggaggctatagcgtcgcgatgccgaagtgggagcagatggaggctagcttgattgagaggggtatcgaaccggcaacagccaattggccggaacgatcgaagttctggtactatgctcacggtggaacgctcaacccagctgatggctcactggtcttcggctatcagatacaagaggctgcgcgacgattaacagatgcagtggaagcctcctctcagggcacgttccgaccagacagagatagggacgagctgacactcgccctgcagactccagagcatccaggacgaactcgagggaaaggggtgattccttggaagattgctttcaaggaggacatccacacgtacaggagtcggatgaggagcaagagagataccgaggcgaagattgcagacctagagttcccggtatcgagctacgaactcaacatgcaagaggaggtggcaaggaaggttgatgaacgcatggccgcacatcggtcccatgatccccagccgaccattcctcctgcaatggtgagcccgtcaggaaaccgtagcagctgcgcctcaacggggcaggtaggatcacagagcatggacgccatgcaaacacaggacgaatcgacctgtcccgttgatgacatcactcagcggacaccatgtgagctgcatattcctttgaagaacttatcaataaaggtaagatttagccattccgctagttgctgcttatatatgttgattactaataaataatctctcacaacatgaaggtggcgtcgggcatggccatcccaacggacccttcaggtacttaccactgcaggccgattccagcaggatactccaaggtcgaagttgagttggtcgaaggcgcgtacgaggacctcgagctggattaccctggaggagacggtgagacgcatctacgagacacatgccatgccattattctatggcgcaggcggtacatcatcctccctgggcgacaagcggcgtctcgtgcaccatctcctccggctccgccatctcctcctcaggatcctgcaccgtctcctcctcatgctccgccagcaccatctccacctcaggctccagcatcgactcctcaggatcctgcaccgactcctcctcgtgctcctacacctactcccccgcaagctcctcttccggcaccttcaaagtcaagggcccccccagctccaccgcttgcccacataagggcaacaaagaaggcgaaagttgacgccgccaagaacaaggacccggggtacgattgcacgcaagaggagcttgacgcttacgttgcatcagaagtcaagagacaattcaagcctcgaagtccagaaaagaagattcctatagaccccagtgtcaggaacttcttcagggggtatgtctacatctgtcaaggaggccatcaagctatcggactatgagcgaacgctgaagaaagcatcttctggaaagtccaaaccagtccctcagcttggagagcaaccaaaccaggagatcgagccgttggtgaccagtaaagaaatgacgatagaacaatttattactgacaccggtctaactacggatcaattgctaggagtcgcaccaatcgaaaaggcggaagtgaaatacatgtacgaactcggtaaaccgcttgtcaagcctgagctgctgcagtccctacccacacaaatgtacaagttccatcagttgtacatggagatgagcgccaccggtagagagatgatcggagcgaggattagggacacggacttcttgcaaggagatgacattctctggatcaatttcaggggaatctacgaactataccagctggacgccctcgacatctctattatgagttgctggattttgtaagtatatcgttcagttagatttcttactatacgtctcctttaattaattaggtccttgtatataagtagaccatagaaaataatatactcccttttatcgttgtaaaatggagattcaaagggcccgacggcggagggttttcgatactggattcatcgaccctcggaaagtaaacgtcgcaatgctcgaccaatatccacaagaaacagaggacaatctcgtccatctcctgaaggcgcagcattacaagacgttcatactgttgccatacaacacagagttagtttaattttactgtcttcctacataccaaatttcattcccgtacgaacttgctaagtgtttcatatgtaatgcatcccacgcacattgcagattccactgggtgcttttactcatcgacctggaggcctgcaccgtcaacgtatatgactcaatggataaaaaagagtctacgtttgacaaggttttcgaacttatagacaggtaccgtcataagttcctttgttaattaagaaaatcttgttatgttaattgctactacgaatcatagctttaaactccatgtagggcttggtatcggttccgtcatttggtccgcggcaaatggagagaaagacttaggcggaagttcaaatttcctgtgagtacacatgctctacatttatatttctccgattcaaatacatacaagtgtatattaattagatctctcgttgtttgtcatttatttgtagtgcgcaaagcaaaagcagggaactaatttgtgcggctattacgtgtgcgagtattgccactgccttgcagaccaaatcatcaccacaagagagctcgatgtacgtacaaataaatttaaaatttcattacgtagcgatttcttgtttaattactaatcaatttcatacattcatatagtttattcgcatgagggataacctgaccacacacaaggaatttatcgcggcggttcaagaacaactcatgggattcatcaacgaagaaatccttgatcccaagggtgaattctactacgacggaaacacaattcaccggtccttagcttctgagctagcagcgagtactactacgtcgaaatcgtagctagctaggacatataatggattgtaattaatacatgactacatatgtttctatatgcatgtgtacacattttctataatgtaaatatattttgttcatatatatatctatatacatatgcatttgcataacatatatatgtataaatacatatatatatgtatgcatatatatgtattgaaacatatatatgcatatatatgtattgaaacatatgtatgcatatatatatgcatatatatattttttgcagcaacaggggcatgcaaaaaaaaaaaggtcagctctatctttagtcccggttggtaacaccaaccgggactaaagatggctcagccggccacgtggtgttaccaaccgggactaaagatcgatctttactcccggttatttcacccgggactaaagatagcgatctttagtcccggattggtactcccggtttggaaaccgggactaaaggggggttacgaaccgggactacaaagggtttctccaccagtgtttataggaatgaagtatatgaaaaacaaaggaaattttcatctactcaaatcacttgaagaaattcttatggattaacttgtgcatgtatttttattcctttatttttcttattcaaacaggttgatcttttttatgtttctatggattgaaattcctcccaatcgaacaagcccgaaatggatatcccaacccttaatcatcatactgatcgatctgatgcatgctcagaagttaagggtctcatcgattatcgaaaaacttattataagccgtaatgacttattagtgatcgaataataatttatgtaaaatttttatatatgtgttcctagcaagtaacgttaaaagctcatgtaaaaagaaactacgttaaaaatatcttaaaatcaactttagaattaaaattaagttttaaaattcaaatttcagctttagctttggctttttaggtaaccgatgagactctaaataccacacaagtatttatgtactctctctgtcttataaaatacaatatatatagtaggatgaatatccagatttacagtattaggatctattatgtcattggctatgatttatcatatttcgtattagatttgttttttataagatgaagaaaatatgttgctagcttgtcaaatactgcagcaggagcaccaaaacatatccggttccacacgtttgacctgccgggttattaaggcatgcatcgaagcgagtgcactagttagcgtgagcatccctctgcccagcaatcacagatccctatatttaagatttaaccgaatattaccactactagaagtacttgttttgaaaagctactacagtaaaaataatagtgagaatttgacatcatctataataataaatctgaataatctcatttctagtttcattatgttcgattatgttaaatcaccacgtagcttgtttgttttttatcagatgaagaaagtaactcagagtagcagtaatcatgcatggaacttttcgttccgtttcacgatcgccagtactcgaccaacacaggtattatataggtgcttgaatcttttgtagataaagattaaatgttttacacaaaaggaggtggtgataacgtgtaattaattaagttttaattattacaaacttgaaaaatagattaatatgatattttagagcaactttcatatagaaaattttggcacgaaacgtactgtttaaccgtttgaaaaacgtgtcacaattatccgaaattttattcaactctagttggataaaggagcgcagatgttacgtgtatgggtcggaagaaaacgatcgggaaatgatataatttctacataatactctccgtctatcgggaataattttacatatttattaatttaattatttagtggtgactttaatatgatgttgataaaaattagaaaaaatataagatttatatttggctagaattttgcgaaaatgattctcactaattaatatcgatcggtcgagaatttttgctaccattttcatccatgttactggctgtcccaatgcagggtagagccagaagtttttgaaaccctaggatcaaccaatataatttattacatctttaattattttcataattttcttaattaatttataagggattaaggagatatgcctagggctcaaatcctaattaatagccttaggctgcccttgtctcaatgtattatacatatttaatactctattatcaactatcaagcaaaaaagtatcggtcagaccgacggcaaccaggcggtcagaccgacaggacaacttcggttagaccgcgatccgtcgaattagagggaaacttttattttcgctaaaaattttcggtttttgggtataccaaccattcactcctctctggttggcttagttattgtgattcgatcctacaagaacctcaaatcttctcatgcactagccatggcttttttttcaacaaaataaacatcttgtgcacaatggcaaattgcatgtactccctccgtttcaggttataagacgttttaactttagttaaagtcaaactattttaagtttgactaattttgtagaaaaaagtagtaatatttttaacccaagactaatatattataaaattttattcaattatagatgtaatgaaactatgcttgtgttgtaaatattactacttttttatatagagttagtcaaacttagagtagtttgactttaattaaagtcaaaatgtcttataacctgaaatggagggagtatatatgatcgctacgtataaacaagcaacacgtaatctattgaatcttgaaattaatgtaggtctatttcaatcaacctttttttttcatgaatataggttatttagaacgtacagtcacattttatttcctttcttgtttgttatagccaagtaaattaaacaatatccaacataaaaatgactaccctttccaatacagaatataataaaaagaaacaaaagtcactgagctctttttttaattgttgcgcacatgtttaaaatgaagttatatatatatatatatatatatatatatatatatatatatatatatatatatatatatatatatatatatgaaggagtatatgtatacaaatatatatacttaataattacagaaaaataattttgagctgcttggaaagcatttttgcggttgtgcggctcatgactcatgagcggcggtccaaaaccgaaagccaagcttgcataacgaaagttatcgaagtctttttcaattaactctaaaaactaagttgcttcgaccactgacaaataagtgacattttagatacatgtagttaacatgtttaaactttgactacttatattataatatgagagactttgtccatatatacaactatatatgcatgagtgaaatcttatattttaggatagatacagtaatagaccttcgaataatttcaactcaacttctaaaattaatatggttatactcatatttgtttcaaaaaaagtacttgaaactaaaaaaattataattcttagatatgtttactggttttgtattagtaattaacaaccaaacaaggtgtgagcagtaattcataatgaattatccagcagcagtagtagtgtatataaataaaatagcataaatccctggaagtcaggtcccggccgggatagaagccgcagctagctgctgatgagcgcgcggcgcgcgcacgtgcacccgcgcaggccacctcccggactttgaggcctcctgccgcttcctcccatcgccatccaccgcgacaaatcgatctctctctctctcccgatcgacgtaatgtaatattcctacaaattaattcctcttcctcatatttgtctgaggaaattaatcttcctaccaattaattccttcttcctactaccttcgtcagaacaaaattaatctagtatggaatgtgatatttctaatacaacgattttagacaaacacatatgttcaaacttataatagtaggaaataccacattccatattagattaacttatttcgggacggaagaagtatttcttctatttttttaataaaaggaaaattagtcttccataaattaattaattccttcaacgtaccgcgtacacatcccgtgtaatgtccactgcacgtacacgctcaatacccatcttttccggtggccggccggccggccgcgggcgacggcggcggcggcggcatatgatcaatcgttatcgatgtcgaccaacggcgccggccgccgactgcatgccagcttgggaccagcgggccggccggtatggagcgacggtgtggcacgtcggcgccggcgatcgaagacatgtcgccgcacagccggagcacggccggaaaatacatagctggctacatgtgtatagagctagtggcatgcagcagaatatatacgtgagtttactcaatgaaccagactgatgatcatgcgtgcaagttggagagactaattggagatggtgccgagatcgacaagtattttacgtagagttaatttttcgcatttctacggagggagagagatcagtaacttagggtgtctagttcacgttaaaattgaaagtttggttgaaattgaaacgatgtagtgaaaaagttagaattttgtatgggtagaaaagttttgatgtgatagaaaagttgcaagtttaaagaaaaagtttggaagtaaactcggccttaattatattattgcgatcgatcgacttggtaactaatgcataagtcaacggctagcttaactcacaagcaagcttacgattcaatgctagctcgatcatccaaaagtgatagctgatcgatcgaacccatatgtttttaatttttttctgtaccgattgaaaatatacgtccaaatctaatttgattaaagttcattcaaacttttcaatctaatcaggaaattctattctaaacacagtcgaatagaaattttaggatgatttttattgattgttgaatgaatttacctagagttttcgttatttgttatctaataaaccatactaatattagcctcactacggtgctctctactagtagaaaacaatataaaccattgatcatttgatcgaagagtttaaatctatttatactaccatctagttagcggtagtagagacatggagggatattattgtaaaaaaaaaggtgtggggagatataattgtcatttagcagtgactaaacttttttttttcctttttttggctttttcgatgaaatacgagtgatgctagcgcaatggatgatatatcgatttagctaggaaaaaacataaatgacaaagtaattcttaatcattgtattagtaaattactaatttacccctaataatacgtactagtgatataatactataaatagagagcaccggagtataatatatagtactcctatgctaccccaactactggtatagtacgtacaatttataaatcaacaatcaattaagatcattttattctactatactagctactccatccgtctcaaatataagtattttagctataaatgctagacaactatgtgtctagattcataaataaaagttgttatattttgggacggaggtagtagtagttaggctaccataaaagctcttccaaagataaacttatagccaaaatatatagggaaagagtaccaagggtggtctctatgggtattatagctagtagaagtgacttcaacattcttactatatgtaaataaaaaagaaattctattaccaataattgagatgaaagtataattagatatgatccattagattagaaaagataaatggtatagatttatttctactaccactagagatcattgtaaaacacctcatatgagaaaatagttaatatctggcaacacaaaccaattaagcagtacacacttagttagaaaccgaatatgatgtgtggcatttgttggaattaagctagcttaatggctaggttaattttgaggtatcttcaaccaactcacgagggttcaaatgctaaatttttttccatgcattttgatgcctatgacaatattcaggcatgtgtagagaatcgatgtgtatgagtgtgtgtagtagctataatacggtgcatttatttacatatttatatgtatccaattgtacttaaaaaatcgatgtggcatttatcattcaacggatgacaaattaaaatgggtttttaattgtcacatgaccccccatttaattcacaagaagtcaaatatcaggtttgaatataatttcagatcgtatcacacgcgcgctaaccgcaatgtttgaaccatcacaagatctctacttgggataagtaaattattatgagtgataaccaatgcaaaagttgaatcctcacttgaaacaataacaaattactagtagcctttaggaatagataatgaacaacatgtagggaatagaagagagaatagaaatggaatatggaataatggaatgcagggcttaattccctgactcccacaaggctggtcaaaggatgatctaaagttgttttagtttatttatgaactatatataaaactttacacatgcatgcgcatggaccatcatatcatatagaacctaacgtcttctcctttcaaggaataaatccaaacctatttggctagctctctgtcagttgtcacgcacaataaaacaaattaagcttcaagaaaatatatactacattgcacgtagcaattaatgatctctagagagggcatatatgcaaaaaaagatcatcactatttgcagatggagacatgtcattgctccttatgaggccatttttgtggccggtgcgtcccctggtccaaagacaacgctcctcctttcctttagtccttccaaaaccggccatgaccaatgcaaacacactgtcactgactgaccatgcacaaatcaaatcattattcacaacagctaatctccatcactctccctacatgccatagtactactttatataaccccatgtcatgtcctttgggtgagcatctcaaatcagatcatctcaagttcccaaaccctagctatctctgctggtctcccccaagctctcctttatataacacaaactacatcatctcctttctcttgtgtgcaacatcacaaacacaacctttcactcccatcttggctttctttcctgtctctagcttagctacctgttgcttccaagctgagaaaaaccaagcaaaagaagctgtttgtgtgcctttccaaggtatagatttgcatgcatatacactttatcctgtccagttagaaacttatataaggacttgtaagtttctttactgaattaaggttaagtaaacttgctaaatgcatgagttttctgatgcattgtgaatttgtgggtatttctcagagtgaaaaaaaaaatgcatcctaatggcgcgccgctggccgtgccaccgggtttccggttccatccgacggacgaggaattgctctactactacctgaggaagaaggttgcttatgaggccatagatctcgacgtcatcagggagattgacctcaa

SEQ ID NO: 29914 - DNA, 751 bp, Oryza sativa
ggtgctaccaaccgggactaaagtcccacccctatatatatgtcttcttcctcctccagctgcccgagcaagcttcaaaatttcttcaaaaaagaggggaggtcatgccaaagtttctattgaatttattttggtgattacatacaaatcggaggtgcctaaaaggtttgcaacttcatcctccaatgttttttttttgtcatactacatttgcacctatgttttgcacactttttttgtctccaaaatttagttgtaagttgatgagagagaaaatgtgtgtggggaagaaagaatatatagaaatttagttcatttgctaaacaaggttttataaaatagttgagaaggaaaactctagtgaaagttaatattaaataatagaaaacaaactaaaataaaaattaaaagaagtaaaacacattaaaattagtttaaaactttacaaatagtttttaagaattatttggtgtaatattttatgatttttgtatgaataaagatatcttataattattgtatgactgtcattattgtaagaataattatttgtgtgcggtttttttgactcatgtagatggatcggcaatggatgtacgctgaccggcggtccaaagagtttattgacggcgtgcactattttttgagagtggccgaagctaacaggcaaaggggttttatttgttgtccatgcaataagtgtaagaatcagaaggagtattctgcatacaggactattcatttccacttg

SEQ ID NO: 29915 - DNA, 23753 bp, Oryza sativa
ttgttgacatgaatgtgaggctttgcactcgtgtggttgtggatggagacaaacgggattgagggaacaagagcaactaaccaataagctcggataccatattagactagagatatggtgcacactgatgcatagtatttgatgaaaatagtttgtggaatgtatcagcccaggctatcaaccggcctaccagctctgagagtttgatgaacacataaaaaaatgaagaaatatagggaagtgctttgagcatatatttttaccattgtaacatacccaccaaaaattttatgggctcacgatgccataaaaaaaaccttgtaatatcttaaattctgaaaagaaaactatttaagtaaaaggttctaagtgtctagaagtgaaataaaagaatttcatgacatcacactaagtgatggatgatgagtcaaatcatggaaaggtctctatccaccaaaaaataaatgtttacccccagcactgcatagtaatttagaagagaaaaataagcaaattaacaaaagcagcaaaacaaaggggctacccaagacagaaaacttccacaagagacaggaggctctcaacagcaagacttcaggaagacaataaatggttaaatgatgtatcagcctttgtacattcgaccagtcactgccttcagtggtgtcattgaggacatgacagcaataacagacgaaaataagggtgatgataagggacaagcagtagcagaggtggctcaaaaaatggcagaccaccaccactgaattaaaatgagcaccccagaaactacgatggggcagggtaaggtgaatgggatgaatgcttggtcacaggtagtgctggcccatctaatcccagcacaagaacgatcatgggccctctatgcagttaaggtcagtttttctgattcccccttgcaaaactgacagtcagacagcctgtggtcactagcgatattaatttttagaagtctttgacataaaaatgatatcactctataagttgatatgaataacatatgagctttcatgaacccccccatatcttgtattaatacaacaaaacaatcaaatgagttgataggtaaaatgtaactgagaattagtaaccttaccacaaaatgtaactgaagttgttaccatcatgtcagtataaggtagcttgaccttgacttgaagggtgatatcggacaagagtatcattatatctccttgcatcttaaattttgcccagagaaacttctcgactgcaaggttacgatatcaataagaacaagtagttaatgttgtaaggttcaaccctttcattgtatataaaagtattaaaccactttaagagtagctatcacataagggacatactcatatatccaagtattttgtaggcatgtgtccacctcataaggcagctccatgttcacaactatttcaacttaaaaacgaatgcaaattttaattttgtgcattatatttgactatgtactgtggttggcgtatcttataatcactctgttcacatgtgtacatcagcgcaatcaaacttcactcaagatttaattgtgaagattccattaaatgactatacagaaatcggaggtctgttatgtattggagagcatgcactgtcatgcatttaacaattatacaaaacaacaaaaaaagttataccataaaaagttaaatgaatggaactttttaacaaatgtcatgttctgcatgtatctaattggatgcatgctcaaaaaggaacacagtttcattgaagccataactgatggaaacaattaaaaaaaggataaagacaattttgtatcattactgagtttatggaacataagacagaaatgtcaacaggaagagaccaaacacaacatccggttccatagtgtagtggttagcactccagactttgaatctggcaacctgggttcaaatcccggtggaaccttcttttttttttttggtattcccatactactcaaatgggatagtcaattacttgcaggaccaatatatgaaacatgagttgtttttattaatagaatagtttagtcatgagagtgcataaataacaaatgcactgttttgaattaaacgtgcatgtttctagtatatgtgcatggctagttgatctctgcaataaataattgtttgcttgcaatacatgcatattagcataaagtcgagaaaatagcatttacagatcatggtaaatagggtatagcctcatgaataacagcaacaaagaatactgacacctggcattcccacaaataggttaactatttctagagagcctcagcttattttattttggtaactcgtaggagttgtccctagaacattatagtatagggtgtaaccataatgtgactacattccagtcaaacttgatgtgtgactccattcagatactaattcattcatttgtcttcatgattttttttcttactgcttagaaataagagtgatcttaaaaatcattacacactacagtgcctttcagcttcaaaagggcagaacccaaatagacttatgcatagagctcagcagcatggtcaatcctaaactggaaatatcacgtctatgccaagccaaagaagtcagcaaaactaacttcatgttatgtttcataccaggagaaaaccataacctaggtcagttcgttcgctttacttcctgatttcggaaattcattgtaagactatcacacaggatccacaaaacaagaaaaattaaccattacaagaatacatgagcatatgagaaaaagagaataaatgcaaccaaatgactgccgcgtgcctgtgtcatgtaagttaatcctttcatcaagagagaataaaacaaccgttgcaaggacctactagtaatttatcgcttcacacttcaataaaataaatatatttggcagtatgcagaattaatttatttaatcacctctattgacttgaaaagtaaaatctgcggtgctaaagagtaaacagaaagcagcaggatgtccaaaaatacacacgtcatcgattatcacaacactagaaacaagatcccgcccgagaatgcaagagtccccatacgctctaggcacgcataagagggatacggatacctccctcagcgaggagcggagcggcgacagagatctctacacacctggatgcgcctcgatcagaagccctaacaggtggacgtgccggaggcatggggaggctgctgcggcgccaattgtggccacggccatgggtgagagaaggagaggagagggtttagggcttggatgcggcggcgatggcgagacggagaagtggggaattctcgacgagacgaggaggggaagagatgagatcggacagggtaaatgggcttcatgggccgcctgagtaagtaagtagttgggccgtcgagctctctctctgctcggcgcgtcggcatcggttcgtcggcaaatggcggcgccagcctacgtgtcctctcgccggcgaatcccacatcctcgctgaccaacgtgtcatcccctcgtgcacacgtgtcaaacccgaaccgcttaagctccaatattttaagcctcccgccgcaacgctgtcccgatcatgtacagcgacccgatcactctctcactgtctcgttcacgtagctcacctgctcgacacaatggcgtcgcagcagcagcagaagcagccgaggaaggcgaagcagaaggaaggggaagggcactcggcggaggaggcggcggggctggaggagatcggcaggtatcgcgcccaggcgcagcagaactcgatggacgccatccgcgacgccgaggagcggtacgccaaggctaaccgggagcacggcggcgcgacgcgggcgcccggcgccaccgtggtgtcgtgcgtggagcgcaagaaggagcagccgccgccgccgccgcagcacgggaagaagcacgaggcggcggaggagggacacggaggcggcaaggcggagaccggcggccaggagggggtgaccgccaagaaccgcggcgaggggcggcagcagcatggcgagccggacgccgccggcgctgctgcccgggagaagagtgctggcgccacgcacggcgccaagcaggccggctcgaccgcggccacgcgcgccgcggactacgccgcggccaagggcaccgaggccaaagacgccggcgcgcacgccgcgcaggccgcgacggagaaggcgaaggtggccgcggggacggccaccgactacgccagacaggccgccgcgaaggcgaaggatgtcacgctcagcaccggcgggacggcggcggagaagaccaaggacgtcgcgctgagcaccggcgggacggccagcgagtacgcgaagcaggcggcggtgaaggggaaggacgtcacgctcagcgccggcgagacggcggcggagcacgccaaggcggccgcggagaaggccagggacgccgcggtggccgccggcaggacgacggccgagtacacccagcaggcggccgtgaaggccaaggacgtgacgctctccaccggcgcgacggtggcgcagaaggccaaggaggtgaccgccgacaccgcgcacaaggtggcggagtacgcgcgggagaaggcggagcaagggaaggaggccgcggcccgcgccgccgacggcgcggaggagccgagctccgggacggcggacaaggccggcgacatggccggacaaaccaaagacacgacgagcgacacaacgggaggcatggcgcacaaggccggtgccatggcggcgcagaccaaggacacagtgaaggacgcagccgcagccatggcgcagaagacgagcgacacgatcgctcaggcagggcacggagcaggtgaagcaaagaaccgagcggcagagtccggcaagaactcatcggcgaccaccaccatcggcagcggcggcggcggcgacggcgacgacacgacggtggtgggcgacgtgctggaggcggtgggcgcgacggtgtacgggatagcgaagcacacgaaggggatcgtcgccggcgaggaggagctcgtccccgtcaccaaggaagaagacaagggcaagctcgagtgagcgagcgagcttgcttcactgtagtggcaagctccccgactgtgtcacgtactgcgtactttagttgattaggagtttaagtatatagtgtttgcgaataatgtttcctgtatttagtgttaatcacggatccacggctgtgtatatatatgttacaatccgcagatgtgtgaaataaacttgataattagtctatcagtctgattggttacatattactcatccaatgaacacgcccccgcgtcgtctcccgtgggcgactcgggcgtcgaaacctagccgccgccgccgcccctctccaccctcctctctgcctcgccgccgcctgagcaagtggccggcaaagccggcggctcgcgaggacggcggcggcggggctcgcggcggcggccacccccggttccggcgcgggcggacctaaaggtggagctggccggatcagcgtcggcgtcgagttgggcgcatgggagaaggtggaggcagggaaggacgaagccggcgacctctctttggcgggcactcggggaggggagcgccaatgacggggcggcggtggccgccagatccgggctgctccggccggatctggcggggtggcggcggggagagcggggagggcggggagggcggcagcaacagtggcggggagggcgacggcaaaggcaggcgcgtgcgcgccggccgatggtgcttgcaggcgtcgatcgatggtgcttgcaggcggcggggatggcgttggcagagggcgcgaaggcggctgcggtggtccctacgcggcgacggagcggtgctcagcggcgacggcggcggtctccctcagatctgcgcctcttggccggatttggagggtggccggcggtggtagtcggcgacggcggttgacttgcgacggctggtaacagcagttggcaacggcagcgacggtggtggtcgcggcagttggcggcgacggtgtcggctaacgacgccgatggaggacttggcggcgacgtggcggacggtgacagcgaagcggccgctggcagtggcggctgttcgcggaggcggtggctggcgttggtggcagcggcgacagcggctgacttgcggcggctgtgactgtggaggcgctggcgatgtcggcggatgtgggtcgctggtggcagcaagtggaggtgcgcggtgaggatagcgacggcgaggtggctaggcgttcaacaacagcggctgtggtggtggtggccgtgatcgcggtcaccggaggcatggcggcctcagacagccgagggagtgggagacggctacatttggtcggcgcggcatcgtctggtggagggtcggagaccggcttggcgcagagaggcgtagccgatggcggcggaggccggctcggcgcgagaggcgcgggcggcggagatggaggccggcttggcgcaagaggcgcggccgatggagggaggccggattggcgcgagagacgcgtccggtggaggaggccggcttggcgcgagaggcgcggccggcggtggaggaggcgacctaggtgtgaggaggagctgccggtgggtgtggcgcgatcttcggcgctcgaaggctagccggcgggggacaccggtgcaggggtcccacaggtcggtagagcttgtgtggtggtggggcatcggtgcggcagtcgtggatttgcaggatctcgtctgggtccctttgttggtctagtggcggtcggtcacgcttagcggcggccggtccggtcctagccttctcctgggcttgtgtgttggcgacgtcggtgtgggtggtggtttatttttcctttttcctggttacgaccctccagattgtaatcttgtaatttttttctactctatcaatagaacttcgcaccgtctcgtgcgagtcgttaaaaaaaaatgatggtactgggaacagatcacaggttgcaacgacaaatttatcttatacatagcaaaataatcccaagagattgacatgtgcgcatagtaaagatgatgtcgttttaaacaaccataatttggatggatgtacattcataaccaagtggcagtggcagtggcagaatttgttggtaggaatacctgaagaagagattagtttcccgtttttttgacaaattgacccttttcaaaaacttaattcgaaactaaccactgccaaaaacttcaaccaaaactaggccgtcggctcagcgccaagcgcattggcgctgaggttggccgtgtcagcgccaacgggactggcgctgacattgtgccaccgtggcggccgggccgatcccctagctgacgtggcagctacctcagcgccaaccgcttcggcgctgaggtgcccaacctcagcgccaagtaagttggcgctgaccttggctacttagagcccggccgaggccgccccagccagttcttcctccgttttttccccagccgcccgcctagggttcggtcgccaccgcgttctcctcgcccaatctcccccaaaaacctctctaatcgaaggtgatttgtgcggcattgagtttgggatcggaagagaaggtaaacccctctataaaccctaagttccccaaagttttattggatattttgcattgttttggttgtagacgtggtttgataatagttggctaaggatggattattagatggataatatgggtggggatgaagtgtggaggtggcatatctttatccatttggttgttattgatacatttgacaaaatatatttgggatggatgtttggtgatgcactagggtttgatgggagatggatgtgtggtgatggcctaggatgtgggatggatttgtggtgattgagagggtttgaaaggggttgatgtgtagtgaagggtaggtaatttgtaggagtagagttttttttatcaataatgtgtagtatttgagtaatgtacttatttattggaaaaattagacatgttgttagcttttgaagtattggtattgcaatggtaattacatattattttcaagtaattaatgtttatgcatgggttaaaaattgtagatggatagattggtccggcttcattatggtggttgtgtggtagatgaaagtacacatggaagccaatttgagggaatgacagttagacaattagtgttttttgcgaagcctacctttgaggagttaatgtctcgcatcaagcatgaattggattggaatgatgagtcggttggtgtgcaagggagatacgatgtgggcggcggtgtcatgtcacataaatttatgttagacttgaatggagagatcgaatggcaaacatatatagatatagtattggggtcacatttcaaatctcttgaggtgtttgcatggaagaaagatggtaggatagggaagaaagaacttatagaccttaatgaaagtcaactcatagaatcacccattagctgtcacgaactgtcggagaggtgtagtaggaaggaagaattgattgaggaaaacgtggaggggggcgagggagtaaatgatatggcggatgtggaggtcagggaagagaatgacccggtaagggaggaagtacatgcagaggagaatgtgccgttaagggaagaagtacatgcagaggacaatgtgccgttaagggaggaagttaatgtggaggagaatgtgccggtaagagaggaaggagatgttgaggatggtcgggaggtaggagatgatgtggagttgcctgaggaagaagcgaatgctaagaatgtaagtatgggcctaagggagttggctaggctgaaattctatacccgagaggagtgtgaggaggctatgatacgcagtggattgaacccaggctggttggagtatgatacagaggatgaattggatgagtccgcttccgactccgatgatgatcgtagcacacaggtgggattggatgacattcattgctaagttcatattgttgcttcaatgtttactttctgttgtccctcctttccgttctcattgtgattgttccatttaatattttttcaattactaatgattccattttcatttgcaggatggagcactttccggggttggaggatttctacgaggagaagcaccgggccccacagattgccagcggagaggttagcatcaacaatattccatttttttatgatcgaatttattttttcttctttgattttagtttgtacagatagatcatccatcatagagataactcaaatcaaagttcaggagcctcaaagcagagcatgtaaacacacagatcttcttttcagttttcttgctcaatcccaaaattaaagttcctagttgcatgatgtattttccacaacccttgtatatgatatattgtcgctaactttatgttattatgtttgtctattgatgcagcgcttgaagacccttcgagtcagaggtcacacggcgcacatactgttcgacgaccggtacgtcccgtacctacggcgggcgcagctcttggcgttcgtgaccatggcgcagcgaccggtgcctctgtacaacgccgctgctctgacggccctagtggaccggtggcgtccagagacacacaccttccacctaccgtgcggggagctgacggtcactctggaggacgtcgccatgatcctgggtcttcctatccggggtcaggcggtcacaggtgacacagcgtcagggaattactaacgagtcttcgtattcatttgttaatttttttgcaattactaatgattccatttaatttccggttacaggtgacacagcgtcggggaactggagggagagggtcgaggagtaccttggtctggagcctccagtggcacctgatggtcagaggcagacgaagacatcaggggttcctttgagttggttgcgagccaacttcggtcagtgtcccgctgaggcagacgaggctacagtacagcgatactgcagggcgtacgtgctgtacatcttcggcagtattctgttccctgactctggtggagacatggcttcttggatgtggctgctgttgcttgcggactgggacgaggcgggtaccttcagctgggggtcggctgccctagcctggttgtaccggcaactctgtgatgcttgccgaaggcaaggcggggacgcgaacctagcaggctgtgtttggttgctacaggtaagttcacgcatgttatgtttcataacatttcaatttcttgctaacatgttggaagctaacgtatgtgacgcaggtttggatgtggatgaggcttccagttggtcggcccatgtggaggacccatcaggcttggccacaccaggatgcagaccgacgtcccactgtagctcacctgtgggaatcggtcccatctccagtagtaggccgcaggaatttggcgtactaccactacacaaacgagatggactacctacagccagaacatgtaagctattcggggttctatcacacatgaagatggtttcttactatatagtactaaatgtgcttcaatgtgttttatttttgttgctgcaggtggtgtggatgccatatcaggcacaggaagtgctcaagctagaactgaatcccatgtgccatatagaggatgcgttgaagaccctacggtgcccactgatctgcttctatgcagtggagttccagatgtgccaccgcgtgatgcggcaattcgggaggcttcaaacaatcccgcaccgtttctccacgagtatcgacctacacaagttagtaatttcacttaacaatttattttgcttgcccaatcagtcacttcaacatttactacatatttgagttggacattttgcatacgtgcagggtggaccgtcggaagaacaagaaggtgactgattgggcttactaccatcaggatcatatcacgcaatgggagaagttcgaggagaatggagtaccagaccagggtcagcacaacgggacggagttcgacttgtacttggcgtggctccacaggacctaccgtcttgtcctacgtccggcttggacactagccgacatagcggatgaccccgaggatgttgaggagcagaacaagtacgatactcgtacccgtctaggtaccacggtcgagacgggacctgttcgcgacagagtggttagtttctagcattaatgttgtatattatttcatttcaatgccatatatgttgtgacttacttcatttcaatcctacaggctcgagagctcttgcggaccgtcaacgacgcgggagtggcgctaggcacggctcctggctctgaaggagagggcggcaccctccgcaacgccctacaggtaatcgttggaaagagatgaaactacggtgttttcttccaaaagcgataacttaacatggattattttttatgcagagactacggcagcgatgtcggaagttggcagcaaggctcggctgcaggtcgactgatgtggtcgaacatgctcatgcccaccaagagggggatgaagaaggggaggtgggtgacgaggagggcgagcaagacaaagaggcggaggaaggagatgaggaggaagaaggggatgaggacagagaagaggaggcggatgagctcggtccctcgcagctagaggacgcaccagagtcgtcacagccggatatctcgcagcccggcccgtctcgaccacgacgccggcgggctccttcgcaggactggaggtacacccccgacgtgcctcgtcctcgcactagaggtaggaggaggtgagtgcatggttcaatggatggatggatagatggatggacttgatgcatggttcgatggatgtatggactggatgtatggactcgactggatgtatagacgaggatcgatgggatgtttttatttcttatatatatggacttcatatatggatgtattgatggattctatggatgtatggaatgatgttgggattgatggatggatgtatgttttgtatggttctctggatatattgctgcctgtaaatttctgtgatttgatgtttgcctgtgttgtgtgcaaagttttactaaagtttagcagggctgggacgtcagcgccatgctaaatggcgctgacatgtccaaactcaacgccagtgcagaggtcccagcccagccatccagaaggcttgctgggctgggccacggccgaaacggccaagtccaacctcagcgccaggtgggctggcgctgagtgtcgcacggtcagcgccattatggctggcgctgaggtccaagcccgcaagccatccagaagccttgcttgtctgggccttgggggttgcggccaagtcccacctcagcgccagtccggttggcgctgaggtagctgccacgtcagctggggatcggcccggccgccacggtggcacaatgtcagcgccagtcccgttggcgctgacacggccaacgtcagcgccaatgtgtttggcgctgaggcgacggcctatttttggatgaagtttttggcaggggttagtttcgaaataagttttccaaaagggtcaatttgtcaaaaaacctgctagttatgtggaaattcagttccaggtattgcatacatttttgttaatcgattggtgctaatgaactgccgtgtcctaattcctaaaagcctaaaattaatatatgatggaaattcagttccagatgatgcatacatttgttaatcaattgaagctaatcaactgctgtgtgacgagattacttgtgaggatatgaacatgcatgaggggatagatggcagatcgcatatgcatggcaaaaacatgcatatgattgttcatctgtatccacccatggggacttaactagattggaaggtaattaaccctgtcacatgaactactttgaatccttctttgaattgaaattcaggaaactattaccccttcgcaggtacgtatatagagctgatgctgatgctgcaacagctaattatactccgtttgttaatgaccgcgatccatacctgaatctgaatttctgtggaatttgcaggattcaaaatgtctttttatatatataaaaaaaaggactatgtttccgaatgctcagacattatcttctgcaacttagctattcattattcatgcagcgatcatgttgtgcaacgtagttacatgtggtgctcgtattttgggagtttgcgaccaatgtatatgcaatcaagttaattatagtttctgtagcactgcaattatcatttgttttgcgcgcgcatgtgaaatttgggcgaaaatggatccttgttttggggagaacattttggatcctcatttctcatctagctgtataaaatggattcgatattgcagctagcttgcaagccataatctgtctcatgtgtatatatgctcccaataccagaactggattgagtcatatctaactgattagatcgatagattgttacatacgtatgtcaaaaaaaaactcatgatcaataagcagagatgattaagtaggtagaagaacaaggagactgacttacatggatcatccgacgatgattaattttaattccatcctcttccaaatctcctcttggaggttcgattgagttggaattggagttcttctgtgcgcgactgaagttatctgcctctttatacaacgtaacacaacagtctcaccacccttcaaaaccaagagctttaactgtagagtaaatttcagtttgggctaggtattttgaccatgtttacaacctggactagggataagttgatgttttcacttaacaccatatatgttggcaagctttttcactttggaccggagtgaagggtttgaactgccactgtggctctgtccatggcatgccatcactactagaaaactgatctttactcggtcgtcccaaaactgatctttagtcccggtttaaaaccccacatccattctacgttaccaacccctgtcggtcccttgtcagaggggcggggatctttagtcccggttggtgtcacaaaccgggactaaagatcaccactactaaaatctcctagatctttactcccggtattactaaccgagattaaaatcacgtgtagtatataatccctattccctatcctctcaccaacaaccggcctcaatctcctcaacaaccggcctctcctcagatccatctccctctcttcttcctcctcccatccctaccctctcctccccctcctcccttcgcatccgatgcccagcaatgaccgcctcctccccctcctcccttccggtgcccagcggggccgcacccggtagggccgcaagcagcaggcgctgggcacgggccgagtagcgagcggcggcaggcggcgctaccggcatccattattttttctctttttttttacaatttgtgattcactgagattttacaatttgtgattcactgagatgtataattttgtgatttgttgtatggatctgagatgtataatatgtgatgtatttggtttgtgtataatttttttaagatttgtgatgtatttgatttgtgtgtacaagtaacttaagatttgtgatgtgaatgttttgggatgttgggtttgatttggaatatgcatcccacttgatttgggagaaaatacagggattaaactctggctaaaaaaaaacaatgaaaaaaaaagaaaaggagacctaatgggactgccgctaccctctcttaggtatctttagtcccggttatttcaatcgggactaaatatggacatctttagttccgcattgctagtctcggttggaaaaccgggactaaagtagtcccggattgctagtcccggttgaaaaaccgggattaaaaagattggaatcgggactaaagaggggttaccaaccgagagtataaatggtttctccacccgtgcatgcaagcagcaggtggtggactccacgtcttcacctccgttctgcattgccatcttcgatcttccttgggatcgatctagtaaatcgacagctctaattaattaaaaagtttatagtaagaataatgtcaagcaactctgtggtcaacatcagtcaccagcgcggcggtacaggtcatcgaaaccctcatcagcttcatctggcagtttgactttgtcagtttcatcaatggagaacatctcgcatgatgctaggattgaaaagaggagggagtcacgggtactttattttatggtttcttagggagattgttaattttgggttaagcttgattgattttgtgcaaaattagctattgctccgttgcgattgctgcgttagttataggtataagtgaagtaatttatgcgcatttggagaagcaacatagcagtctaaaccattgacccggtgcaaaatgcaaaagcttgcaaatatatatggtgttaaatgaaaacatagttctatccctagtccatgttgcaagtatggtcaaaatacatgccccaaagtgaaatttactcttaactgtatagtactaataagagaaatcagatcctatggtttcctagtttttgaattttaagttaaatgttatgagttttatcatagtaagatggatttatttctcacaaacccccctccccttaaaaaaggtaaatttcacttaattaattctagatattgtggtctaagttgaataaaatcatagcaattttagcacgtgacacttaacctcgtgtattatggttgtaaaattttacaaaatcatactattgttcattttggcattgatccaccatacttttaagttctacgatcacatcttaaatttatgaattttttttatccataatataaatgttacatgcacatatgtaaaacttttcaaagagtttatataggggtatataaaattggttaacagtacctggggttatgtaccatgtgctaaaatggagaaataaatcttaagggttttatgaaattttatgcaacttggatcataatatgtaaggttttatgaaatttactaaaaaaaatctgccagtatgctgttgcatttttacttttaaatgtgtgagttggcttgaaaatgtttacatgagttttttttggcacaattattccaataatatcatattcttcaattgccatgacccatgagtacaatagaaagcacaagtgaggaccagtagggcagtaggacaatatactgtactagtacatgtagtataacaattgcgttcttttggacagatcgtaagtaactagtgcactagtacgaccatgtgcgattctgaaacacgagatgtgaacttgtgaagtaactcttctggaatctgaagtttgtcctttgtctctcgtttgtcctaatgctcaatgtttaaacgaatcttttttcccttaagaagtactaatgcaatctggaattttcttcagttaacttggatgtacttgcttcagtaatcactcctactagtaccaaaggaaatttctttgcttttcgatatcttttgatatctccattgacagctcatacttcaaaacttatagggatacactgacaacaaaaaggagaaaacaaaccagggttcgtcagttcgtgggctgctaaaaataagtgcgaatcacatggcaagcaacgtacaacgcaataataaaaatagattcttcagatcagttcattagtttcaactcccacctgcatgcactgttctgaattctgcatccatcactgccaattgtatattcaggattcttctcccgttacctcgccatgttcagttcaattagcactagtaaccctcaccttctgctaattgtttgcagctaaaatgcaccaaaaataaactttcaggcagagctcattttctgtacaagaacgcagcaacatgttcagacaaaagctgctgctaagaacagggcagatttgaaccagggaaaccggagatactcaaaaagacaatttgtatcatatttccggaggcaatttacacaatcatgtgtctgttacattttcatagttatgtcgcctgacaaataaacaaaatcaagcttttgacagccctattccacctttgtacctgactgcaatgaatgtaatagaatgaaaatatacatgtatgcaaccttggaaccatatggaagaactactttccctgctccatttcagtgcactatcgtgatacacctctacaattacaacggaagaagtgactttctcatgaagattggaagatcggttggtcagcgaaaggaccatatacccaacctctggcaatgtgaccgtaagccgcctctgtcaggtgaatgccatcccagctccaatgggttgatggatcatcacacgcggttgcaccagcctcaccacatttggctgtgacattgaagttgtaagcggccttcgcaacggacccaggagccccgcagcatgccctaggtagctgcttgtaaaatcctgaattgaaaaggcaagaacgttagatgttttcaatttttaatcaacaataatgcatctgaatcctttttcttcaccagttgagacagaaacagtctctattagcagaattaaatgggccaaagatgtgtttgttgctaccacacacaatgaaagagaaatgctagcggatgtgatctagagatgacaaggccattgaaccgtgatgcccaacttggccattaaactatgcagaagatttcataactctacctgctgatgctccctctaattaaaaagcactaactacaaagcataaaaaaggtcattgccagcaaggtaagcaagcattagataacagaagtggatcaccaaaaaggatggctcagctaacagagcaattcctacatgtctgtactccccgcaacaaggacatgttgaaatttgtgatacacacgatggttggaaaaaggtaaaaaggttaggtagggaaaacgtgccaatgtgtcattttatttatttgtggtgttttcaagccactgctattcgaattaaactcacgaggataatatacacccactcgaacccatgtgcgaggttttaaaagaatcggtggcaaaatatgtatggagacaatcaaaatgtggcagttttgaaactgaactagatcatatcaaacaagagcagagctgccacaaccataattttaaagtaggtgacagtatggctaaggttcaaagcttttttacatggttgcctggagaaacaagttgggcagcctgtgtatgtagcttgtataacaatcagaccatcagacaatcctaattgttagccccacattacctatcatgggtggaatctcattatagttcaggatggccccctctctcaagaagacaattaacaacaggacaaggtttgaacaaagagtggtagagtactaatagaactgatagccatactactttacagactagtgtaaaagattctaatgaagatgggattagtaactttgcttccaatttactctgaacatagatggagctactctaattggtttcaaatcacaaattgtgatccatcattactgtaatttgaaatattgcagtgtgctactagagagataaggcacctctacccagatctgaactatctaaaaataatatattgtgtctttcaagggtgacaggaggaaaagttgactctaggtatcagttgacttgatctgttcaagtaaattagagcagcaagagctaaaaaacagttattttgctagaaaagccaatttagtaccgatgtgaaataaaggataagaacgaactgatgcttcctgagctagctaactatcaaagagctcaagaacttaccaaacttctcgggctgaagcatgaactggataacaggcgtgtagtaatcgccatatatgatcctcacattggggtgcttgggccggagcttctcaagcatgcgcttgagatgtgcattgtgcacccatgagaatgtgttgtaccgacggacgcagccgctctgggggccatacccatcggccggctcatcgagcatgttcaagtagacagggaagcatccagtgggcatcacaccgggtacaatcagctcccttgcgccctcagcaatcaattgctgcaccaaacacgaacagttgtataattgaaatcacattctccacatgaccactaacaaataggcgacacaacgaagctattgaatttctacctcgatgccatcggagatagcctggatgacatccggcatgaacttgtaggcctcctcaaggcccttccccgcaaacagcggcgcattgtagtcgttgccaccaaactcgccgacgacgaagagcgaattcgcatagaattcatcgcattccactgcaaaaacatcaaaacaatcagatacaattccccaatccagttctctctggagataaaaacaaaaacaaatccccaaattcagtgaggcgaggtagctacaaggtaaggtggggatttgggcatatgcaatttatgattatacccttggtggagttgcagaagaagggcttgagatcgcggaaccactggatttgggtgaggagggcgccggagttccagacgacggcgccgagccccttggcctcgaagtagggggtgtcgagcgcggtggcgccggtgatggcgaagttggcgccgtgagcgaagctggagttcttgagcttggacggcggcagcagcggcaggccgaactcgtcggctgcgatccaaaccaaaaaaccaaaccatcagcaacacaaagcaggcagacatcgaaatccaatctagcggagaaaccaaggggcgcaccgaggtggtcgacgacgaggcggccgtcggagcagcggccggtggggtggccggggaaggtctggccgtaggggagctgggcggtagcgaggcggaagtcgacgccgttggcgaggaggttgccggcgtcggccagcgagtccccgaagttgaacagcgccctgtacttccccttcgccttcccgttcaccttcccctccgccgccccagcaagaatcgccgccaccgcaagaaccaccgccacgaccaaaatcccccgaactgcccccatcgccgcccgccctatccctcctccgttcttgggtcaaacccaccaccacaagaagagggaagaagaagaagaagaggaagagagaggggtagcggctaggtaggtgtccggggtgggggtgagggggttcttcttgtagctaggagcacgaggagagagagagagagagattgggatgggttggtggtggtggcgtggcgcacggcggcttagctctctctctctctcgctctcgggtcgcgtggcgttttcttctcgcgagctagctgccgcggctgcgcggtggcggatggcgattagtttactctcgggctctctcgcggcttggggagtaattgcgatttgggattgggagggggaggagtggggaagaagaggggaggaggcgaagagaggaggaaggtgagaaggaaggaaggaagctgggggcaggctgtccggtgtggaggaggtgggggattcgacggcacgtatgtgtgagaaatggaggaaaaagtgggctacacggttggactttgggggcgtatttcgggcagggtttgttggactcgagctagatgaagagagcgtgtttggagtcaaagtttttggtctgggtaatttggcagtgttagatcaaattggggagtggagagtgtgtgactaatggtgggtctagttcacactaaaattagaagtttggctgaaattagaacgatgtgacggaaaagctttatgtgtataggaaagttttcatgtgatggaaaagttagaagtttaaataataattttggaactaaactcggcctgtatatgaggttggaagctctggattgggtgaactcatgttttcgtatttctacttttattatagaaacacagtataaacgtatgcgcttataacacgtgcacattcaccactataaacatacacacgtacatcatatccttatgattatctccgaaatattggaccggcatatttttttttctagtatattatttatgtcatacattttcgatcttaaaagtttaaataatactggccgattgtcctaattcactggcataagagatgaaaatattacatcattgtataaaatggtatggtggtatattgtaacgagtttcatctaggctcgaaagaattcctatatccgacattataaataggtagaataatcaaataagtgtgaccgcatttttcttgccaaaatgcagtgggggcatgcttgtgtccaaattgataggagttaatttataatcatcgtgttatttgtaagttgttagaagttcgttctgagaaacttggttttatccagctagagtattataagttgcaagcacttgttctggtttttaatcagagtaatacctctggctttaactcaattgagtaataatcggttggtccacactaaaaatttccaacagcaattgcacctaatgagatctatcataatgcacctctttagctaacgaagtataaattgacagcaaaaccatggtagtgacaacttttagcatcgcaaatccgcacgcaaaaaacttcagtgcataccaacagaacaacttttgacaccagttctgcccaaaatggcacgtgttgccgaatatgttcatccaagcaggaaatttaatagacaaagtcatggttgggttgcattcgatttggccgtcattttcccttaatcactgcgcagattgctcctcatcattttacagttttttttcccttcaatacttcttttttcttaccgttgtgtatcaatacttaagtacggtagtttgatcggtttagtgataagattgtatctagaatgcgggggatttctcatgaaataattcaattcagtatggatcaataaaatatatcccatttgctccaaagaaaacctaaaatgcgttgtcattgtgcatagcaatttaacaatgtgtcactgtcataaactgttagagcttagaacatactccaggtagatggatgatgaacacaagactacataagcaaaggtcgtatggtggtcaatttaaatgcgatacaacaccaactgaaaaagaaacgattgtgctgtgttaccaaccagtgaaccaaaatttcttttcttaaaaggaagaaaaggattggctggcagattaaaaccacatcagataggtcaaaatgatgcaaatctggttggtatgaaatttttagataaatgatactaatatactactttcttatccaccacggtgccataacatgggctccctgaatcacccacattagaagaagaaattaaactaatcctcccaagtttcctcctaatatcttcttgttgattttgttgatggcccttgtggttcggtgagaagtcagaagacagcaccaaaccttccagagcaaagttggtctaaccataaaaaaattgcgtaagggggtggtttcctctctaaacattgttgtcaagtagttgcaaaatacacctccagttttttctaatggtactggcatgtgcagctttttcacaagaaggaaaccactccaaaacctaacctgatagctgtggtgtgaccaaatgattgaggcatgaaacagatggattaatttatacattgaaaggggtggaacaaacgtggcaaataatgagatacatcgactgtagcaacagtagtgcatgcaccttttttttttaaaaaaaacaattattgtgcaaatacttcatgacaaaatgtaaaatacggaatcaaggtttttaaattctacctagagtgattagccataaaacgaattgcacttaaatcttcacgttcgcagggattacagacttgcaacgattagtgatgactgatggcttatatatgaataaatatatggtatgaactcatccttacgaccttaacaaccgctaccaccaccaccagaaatgggacataatttttgacatggatcatatgttaaaaaaaattattatgttgctttcacatggaacatatgatatgcctgcccataacctggttaagcttgctctaacatttgtattcaacatcaccttacagtccgtgagactgacaaaacggtggttctttaattattattatttttccacaggcataatccaacgcatctgacgttctagcatctcagaaagttggttggctcgtatctggcaacctgctcggctatcatttgtgcaaaggaaggcgacacttgggtggaccaaactgagcattggactacaaccattcgttttctcttttcttttaagagtacacgacgtttattcatacatgaatcagccacattcccacggaaaatgaagaaaatctgtcttcgaacaggcccaaacaaacagataacaatcaacatcccatctagttgtgcggatctataatgctgctgctttactactatcaagttagactggcactttagtcctactacaaagtacaaagagaacaagaaaccaaccaccagatgttcagttcatctcgtagtgaagaaaaagaaaatattaagcagcttccttcaagcttccaaccaaaacgaatgcccaacttaaatggatagagtccaagggtacagacaacgaacaaaacaaactatcataagcaaatggggcaaccccaccggaaaggttgcaaaaactagtgcacaaaacgatctgacaatacagtacgatcagtttcggaataagcattcatcacaaaggacatggactggatcacaggcaacacaagacaaacaccaaagcaacgtttatcaacagacttcatttgggtacattttacaacaccgtcaacaggccacattt

SEQ ID NO: 29916 - DNA, 13206 bp, Oryza sativa
cctcagaatctcataatacaaccatatgagagcaaaggataattgttcctactggtcacctcgctgctgaccagtgcatgctaaatggagggtcaagttccgtacagaccatatcataagccgcagaaaacaatatggaagaacctacaccagtagtctccgcatctccacaaccagaagataactctggattccagccgggatcaaccttatcagtcagaccaattggttgtaacaacagaaaggccaaaagttgtatctcataaattctagaatggttaaaacagtaattttagctccattgtgaaacttacctacacttccaagatgaaatcatctcgccattgtatttttaataaaaaaaaaagggcgggggggggggggggggggttgaatagaatagagtaaatgaggtaagcttatcatgtactggcatatttaaacagattttcagtaggaactaacattatccattcagtacgtcaactaagcgaaaatatagctcattaaatcacctgtaatatactctttgtgtttcatggtagaactagccactagtagttaacaagttggaattgatcaaaagaaaatacaagtctcaaggaaagagtcgtctataagagattaggatctatcaagctcatgcacagatgcactcagttttcctaatgtgtacttcaacatctcagtctccctctatttcatctaggagtaactgtctaccttattcagattcatcatttcaaaacatttctctattcaccaattcgtagttacttctgtccatcctaagttcatttctttggcattgtgcaataccaaaacaaaactttgatcactcttttttatcataatatcagaagaattacaacagtaattcatgatggaagtattttacaacgatgagcctagctgtgtcattttgatcatgtgggaaatatgtaatcttaagcgttcgtctgtgataaaagggggaaaatttaatctatactacagattttattggcaccaaataataccacaagattctttcacctttcaaaaataccaggaatttgacagagaaccaatttagtaagcagacaaaattacccttgcatctcacatcctttccctctcttcaacaatatggggcctccaccatatcatccgtgtctctgctccgtccgccatggcatcacgtccgggcaggagaccaccaccagtccagtatgcgtggaggggcatttctgttttgctgctgcggcgttgcgcccgggcaggaccccctgggtcggccatgtggaggcacttttttcctccaccactggtgtttgtgctgccgttttctaatccaccgttgtggcctcgctgcaaagcacaatagccgtggaggggtcttctttgctctgtcgtggcggggtcgcttcgagagcaacagccgccgtggtatccgagcggcctggaggccatgatgagacacccgccaactcgaactgcttcatcagttcacatgcctgagcaaggttctggatgatgagctccactagctggtaccaaatacaacttctgtatcatgctgctgctgcggccacgatggagattggagaactcccaatctagttcacacttcatagggtagctcagtaatcttctcaaacactggtaacggggacaaattagtttgtccaagattgggtaacatccattgaaatctgtatcatttttggaagagacattgctgcaatgtggtattgagtggaggtgcaagaatcttgtggtattatttggtgctggtgaaatctttgtggtatagatgaaattttcccaagaagaaaaaagaaactaattaacctcaagtagactgtcacagcatattttttggaccaggaaaactataccagagtagcagaggctaatgatcaatcacacatgtaactgagaaaagagaaaaatatgctgtagaaatattcaaggaaactgctgaaaacactagaataaattcaaaaaaatacagtcattgcaactgctaagatcagtaatagcatatgattgaagaggcattatcttcgagtactacaccagttggtactttgctagctaggtggtttatgcataataataaatacaaaaaaaaacagaaatataaaatgtcatagccacaaggttgtacaaataaaggtgtgtttgaaatttgaagtcatgttcaggtatttttactccctgcactcacgaatatttgcaatggagtagcagatagttaccaagaaaaaccagtttctatattaaaatattaatgtgaccgataaacccctgacaactagcccatggcccaatctagccacaaatgggtatagaggatttatttgatacggacaaaatagaagatgtgcaatggaaaatgtggggttaaggggattataaactagcatagctggagactgtccatcttcatcatgtccatcaccaatgctcatgcctacaaacgtttaaaagtaaaaaaaaagactcagattcatggagaaaacaattaaatattagggggcaactatgagaatgagatttagtttgaaaatgaaaaaagaacttagtttatttatttatctactatcccgtacagttggactcacaacttgcagcgcgacttttttgccaatgacataacgaactgttgtttcataaaaagaccaaaccaaggtgttattatggttttcagattattagcaagatcagtaaagataaaggtattcagtgaaatggcactatttaagcactaaaatgagccacttgagtacacatttgcatttcggttggcttgaacttgactttcatagagatcaaaataattaagttctatcagtaccaaaaagaaatgctgtactcatattttcaatctgtatatatacttcaactgctacagaaacaacaataacaaaaagaaaaacatcaaaatatattgaagagttcatcaagcagcaaaacaagagagtgatactaccctagtttacattgctactttagcaatcgaggatattcatgcatacatcgacaaaataattagaagtccaaattgctactctagtactcaaggatatgaaaggcaaacatcaaccaactatgaaatgtaaatcatgccattacctgcagtgtaaacacttgcaaatggataaatgaaaagggcagcacagtctttcaaaattctcttgaactccatagactcaagatggaccatgaagagaccattaattgtctttaggaaaatcacattatagtcctcagaaaaccccattacgattggggagcccttgcgctctgttggactcaaggatagaagctcgcccaattgaactgttttctccagcacccatccagactcagagacatcatcatcccaatcattcttcctcctccaaaattgtgagcccaaatccgacatgaagacgaagccgaggccaccatccgctgccggcacgacacaaaatcgtcggtatccatcactcacagccattggcacatcatcaatcacagctagcctctgctcgttcagatcgaactcgaggattccacccggaatccccgaaatcaaccagtagagggaatccccaatccgaacaccgggaacagccagggatatcctagtcaaattgtgtgggaggggtgttgcgatgagatccccccatttgccggtctccgacgagtagatgcaaccgatggcttcgtactgatggcgggtgcccaccagaacgatctggaatcggaatccgccgccgccgccgggaaggcgaaacaccgcgccgttccgcacctcggtctgtccctggtcgcactccggcgggaaggcaacgcggcgctggtcgccggagacggggtcccacacgaggaagcagccgcgcagccgcggcatcactgggttgacggcgaggacgaggccgtcgcggcagccgaggatcctgcagcggaagtcgtcgaaccgcagcgagaagcgcccgccggcgcccacggccgcggggacgcggtcggggggatccatggtggagacgaaggaggggctcacccggtggctgtggaagaagccgaggaggggcgcgccgcggcggtggtgggcgcggaagcggcggaggaaggcggggtcggcggtgacgaggcggcgccagcgcgcgcagacggcggcggcgcgcgggagggaggagggccgcggcgggaggcggagaagtatctcggcgaggaggtcgtcgtcttccagcggccgcgggtgcgggtgcgccatcaccgggtttcggttccccgcgcttctccgcttaggtgggaagtggagactggagaatgtaggcagactgtgagactgggactgtgttgtttaggcgagtttacttccaaacttttttttcaaactttcaacttttttatcacattaaaatttttctacacacaaatttttaacttttccgtcacatcgttccaatttcaaccaaattttcaattttagtggaactaaaaccaaatagatagaaaaaatttaggccaaaaacgtcacatcaaatatttatatatatatatatggggtattaaatgtgggaaaaaaaatcaattgcacagtttgcatgtaaatcgcgagacgaatcttttaagcctaattacgtcatgatttaacaatgtgatgctacagtaaacatttgctaatgatagattaattaggcttaataaattcgtctcgcagtttacatgcggaatttgtaatttgttttgttattagtctatatttaatactttaaatgtgtgtccgtatactccaaaaactttacactcaaataactaaacacacccttagatgaggaaaatgttgagatatttaactatttgccacttttagatgtggcaattaactatttgcctctgaacccatatgtcatagacacatatggatccacatttcattgagataggggtggcaaatagttaaataccaaatttaaaagtggcaaatagttaaatgccccggaaaatgttagctcgaggtcctcctcttttattttagtttttaaatcgtactttgaacaatattacgcaaatcccattaacttttaaaacatttgtaaatgaggtccatcgacggtattgtttacggttttagctgaggtggctcttttgactaggtcttcgtcccatatgacatttgcatgacgcttacgtggcaattcaattcgataaaaatcgtggagctcatgtgtcagtttaaccaaaaaaaataattaaaaaacatggggccttacgcgggacccacatgtcatctcattctcattttctcttccctttccttcctctcttatgttatcccttccccactcctctctctctctcacacactcctctcaggctggttaatctcagcgcaaagacagtttgtgctgagttcacggtttatttcttgttaaagtttcttttactgtatagtttcacaataagttttttgaaaaggaccatttaaaaaaaaacgggaggggggagagagtaggaacaggggacccgtgggctggtctgtcgggacaagttcgcggcccatgaaatgaaatccggccattaggcccatcccagtcatggtgccctgtcttgcatgccatttgttcgaccgatggaatccagtgtcgcacgctaaatacctcttctgctcttcatccatccgatcactctgaatccaagtgaatctccggattaggatcggccgcgagttattttgctctgtgaaagttgcttggctgcgtatagcactcctcattcatcaacatcgtggtgaagagaaacgaggggctcaaaaatcaaaggcaaattttactacagtacatcgtggctttgcagttttaactgcaggacaccaaagtgactttggggtgaagacactttcaaaagttggatatttgctggtggacactggacccactaaaataataatttttggtttaagaggagggagaaatcgtgtgaaatgtatgaaatgtccttgggcccacatgtcagatttccatctctcttctctctctatcccctccttccacactggcacacagccatgcgacgggcttcagggggcaggaggagggttgtgacgagggggacagcggcagccaacggcctaggccttgccgggccagatcggcgtcgccgccacggagcccgcatcttgccaagaccttaagagtggcatttaaatgtcgttcacgaaatcaacacgacatgttgtttcttgtttataggataaattatatgaatatagccacatccactatcagggccggccctggccctatggagccgaggcgaccgccgggggcccatgatggtggggtggggggcataatggtggggggcaacacctaatactagtagtctagtacctcatccgatgttgagatcaatgatttttattcagaattaaaggtgatgaaagtgagtttgccagattcttcgatttccctaagattttgaagtttgttatggatgcagatttctatccaaatgtttcagttgcctatcgaattctcttaactttacctatgatggtagcttcagctgaaataagtttatcaaaattgaagttgttgaaaaactatttgagatcaactgtcgcaaataaggttaaatggcttggctatgtgctcaatcgagaaggatatcttggacactattgatcttaataccgttctttatgattttgcatcaagaaatacccgaagaagtatcttttcataggaagcaatggatatgacggggttctattcttcattaagttaataaataattatattagttccaagttacaaatatattgttattttggtcgattttatttcttgataattaccaggaatgttaaatttaatatatagatgtatttgttttcattttgcaagtaaaattagcgtctatatatatcaataaattttatatatagcttggagggcccatcgcgatgagttcgcctagggccctcaaaatcataggaccggccctgtccactatagtccataatggaatatccatggcatgaagtaggaaaattaagaagtttgtaacctttatttagtactgatatcgaacagaatcaccaccaagtgtcatacttgtggtgttttattttactctacgccgatactagttctcaattacattactctgaggtctcgctttcggactcattcgataatcctgggtagtattgttgttgaaatctaggagtgaaggcaccgtgctcttctcccctgttgttcttgaggcttcgggcttgctcccttgagatgcgatacgcattagcgactacatcaactggcaaggcacggaatactgagtttttccctgcaaggtggctgacgaaggcgttagcgtttgtcttgattgcgatatattggcatccttcacgctctgctttcttcaagacagcataatgttgcggaatgatcaataattgtcctgggcgaaggacaccatcaaacacagtctttccaaagttactaacgacttgaactcgagatcgcccttgaatcatatagaccaaactatgagcattgacgttccagaacggcgagagaatagcattctgtagaaatcagtagagaataatgttatataagcaacaaatcaaagatcttccaaaaaaaatgaagagaacaaaacggtgctataataaatacctggtataggtttactctggtagcgctcatttggatgaggttaaggatggggaacttctgactattgacacttgttatccttccggcacgtgggttgtatgaatcagcacgactaggattttcaatgtttactctcaccttgatcgtgcaaaagttctcctccaatccgttccatcgagaagatgtttgctgtcgttcactgtattgaacttgttgatattgatcttgtgcttgtgcttgttcttgctgttgtgtcaaagtcggtttcaacaattgaaggccattcttcacatgtatgatctctcctctttgatcattttggctctgtagcctctttgctgctactgcgttgatgcctaaagcctcacttagcatctcaacaccaaatccgctgaatatgttttgcccagagtgttgctcaattgagctaccatatacttgttgttgttgagcccgattgttgttgccggctaataggaactcctgaaatttttatcaatgaaaaatttaatgttttacgctatgaattgcattgtaagaacatatgaaaaacatagaaaattacaactttgatggaaatatttgttcaaaaaattaccttttgcctaggttcaagctgattggcgttgttgtttacgtcataaacatatacggcaacaataggtgcatcaccatcattgtagaaccaatgtgcaacaccagctgggagtgcaacaatgtctccttgcctaaattgatgaatcttttggtgctcatctctaaacttttggctctgactttggccttgagatgaaaattgttggaattgttgctggtaagtcgcagggcaaccggggaaggttaaacccatagaacctctccctaaaaattataatgttcacataaggtacatacaacattaatttgaccatggagatcataactactagttgcatcgatagagttctcgattatatttattaggatacaaaccttggatgatgtagaccacgccaggaatatttgtgtatcgaggtaccaaaaggccttgaggctgaatgacacgtcggatcacaaaagtacccgtgcactggaataattcattcttctcatcgaagtactcagtcaccccagcttctgacctcactttccgaagtggttcaaatgcttgtagtctatcaaatctacactccctaaaacttccttgccgaggactatgccatgggtttgtgctgggattaaatagctgggccatagaaccatggcataatagaagaacacaaaagtatatagaaaaccgagagaaaacggaactcgccatagctatttgtacttgcttatggaaacttaagctaattgatgtgagttcaaagacagaccaagctagtttatatagcaataaaaaagcatcttgggatacatggtgatatagtttgttgcacgtacagacaatatatggcttgtagtgttaaaacagtacaaaaggaaaggcaactttgcaagattgaactatacatttcatgactcagccatgacaaacttctggtgcttttggagtaatacaaatggagtttgttaaagaaatgtctatccatactcttaatatgtatctttgccttgtcattatatttgtttttgcaccataaagctcttatgcttgagaagatgagtctaactttaagatgataataacttgtaagcatgttgtcatttttgcatggcaagctatatttgataatttaagtgttccttcaaaatagcaaatttgtaggtttgttgtcatttacttgatacactacaattgataagtaacttgtatttttaaatgacgtacttgtaactttgttgtcatgtaaaatatatcagacagtaaggcatattggtgtaagtaattttaccatgtcataagcctttttactgcttattgacccatataacttgcctatatatattatttaactatttgaaaaacacatattatgataattttacacatctgaccacggagagctgtgaggctacacgtgggcccgtgtcactcaaatccacccaggcgcacggatttgcttcccgtgcacctaggacggctccccgcgtgctcccgctctatgtgaatcgtgtttgcagacgagtggacccactcgggataccgcgcgggggaccgagtccactagccttgtgcactcgtcctaggccacatcctcgtccggtccactcggtcccccgttcgtcgtagctgctccgtcgtgtgttcgctcggctgtgcccacgcagcacgctgggccacacgccgccttcagcccaaaaaggcagaagccatcccctttttcctttttctttttccatttaattcaataatactttttttctttagacagagaatcaattaatcttagaaaatccatatctcttcaactgtctgttcgattgactctgttcaacttctaaaattcctcaaaaatcgagatctattcagtggcacacttagtactcactaatacgagcttttccttggtcgttttgttgagttatctcgttccacgtgtagcttcggagccagaagagtcctagtgcgcggaatacgaggaagaagctcaagatatcaagcaaggtaggtcacctttgattattttgagcccataatttgaaactaagtatttcatttctcaaaatgcacatctctaaattacacatgaaatgttggccgcagtttgcaatataaccaacaggccccacctacaattgctgcattaacctccttggtcgactacaatgctaggtctcagtattcgtgccctcaggtacggataccaatgaccctcctcaaaatttgaatgatcaactatgggtaaaacttgggtttacaaaatccctggaaaacccgacacacctgggtcggtgccttgaaaacaaatgagtttactaaactcgtatttcggtagaagtactggtggtatggttttctcgttcttgctcatatggaccgattcctttagaatttcatccaaccataacatgtgtgaccacatgggtgaattgtgacatgcctggctgagtaattagctaggtcaggcaaatcttgatgccaatggacaagtggatttgtcggggtggtgttggggaggaccccttggatttttcctggcacaacatggtttgggacctaacttgttgttggtctgtgggacccctccagttttcataaggtgtccttgtgtgggctttcgaaatgccttgtcgcgaaatcccttaagtcacaagacgtggctattttgcatgggctgggtaactcaggttagtggcgttgtgtaggtaaagtgtaccttctttgtagagattaacaaactgtttgaacagtcgtgctcacggtcatgggcggaagtgaggtgattccttagcatagttttggttgactactactttgtgaagttgttggtagcaagaatctgttttaaattgatatgtggctcttgggagcagccagactcggggagtcctcttatttgtttggcaaggagccacccatgcagatgcattaaatgaatacacttcactgctttggtcatgtgagatgcatcttctcacttgtgtagttgagaaccactcacttagtcgtttcaaaacctttatagaaaaaaaaaatctaaacatggaaataaccagcctttctctgaagcttgcattaaacacctaattcacatggtttgttgagtactagtatactcacccttgctctatataaatacaccccccaggcacaatttctcgatgaagaggagatggatccagctgatgagttcttccaggaacaagcaggcttcgagcggtattagggttttggcttagttccaaagtcatgcttgtggctttgtctagtctccgcttctgcctttttgtaatgcagttgtgaactcgggggttgttcgcagttccaacaatgattgtatccctactcataataacgaaacccatgtcgctgtgatattctatcttcctttgtactagctctatttcctgggactggtacatgctcacaagttaatatgaatctccttacattggttttcatttggagctagtttggggcgtgacacatggtatgctagaagaatatttctttggctaaaatttgcattcaccatacttgtgatatttttttaaaataagttcatcttagatggtcactgtaaatatataaatctagatggagacagttgcgaatatatgtgacatattttcggtgctatggaagatattttattagggaaagattataagtacataacttttcaaacaaaactcttgtgataaaagtgtgtgtggcacactatgaaccagcctagttttactgtaactaatttatactcccatcgttttttaatatacaatgtcattgacttttttacatacgtttgaccgttcgtcatcgaacataaaagatataagtccatgcttaaaaaaattaataaaaaagtcacaacaaaataaataacaattacataattttttaaataatattaattgtcaaacggatattaaaaagtcagcaatcttatatatattaaaaaaacgaatgtagtacttgtgttccttttgatcttaacggttggtttatgggataaatacatttattccattaggttcctacatatgtcccaaaggatatctaatcccttaattaactctgcctactggtggccttatggttccatgttgaatgccccgtgcaccaatgcccatgcctacgagcataaaacgttaaaaaaattaagattgaaatataaatcaaatatatattagaggcatccataagtatgaggaatttttatgtactaccccatctatgaattcagggacaactcagctttcagacaacattaggaatagataattaaacaaaaacatatctaccatcaaatgaaaagaacattcttcagcaaaatataaaatataatcaagtattttactattataatccaaataaattgattcaaaatagttttaaaaaaatcaataggcaagttatatagtcaataaactgtaagaaggcttatgacatggaaaaattacatacaccaatatgctttattgtccggtatattttacaagacaacaaagttataagtatgtcatttaaaaatacaagttacttatcaattgtcaagtaaatgaaaacaaacctacaaatttgttattttgaaggaacacctaaattatcaaatatagcttgccatgcaaaaatgacaacatgcttacaagttattatcatcttaaagttagactcatcttctcaagcataagagctttatggtgcaaaaataaatataatgacaaggcaaagatacatattaagagtatggatagacatttctttaacaaactccatttgtattacaccaaaagcaccagaagtttgtcatggctgagtcatgaaatgtatagttcaatcttgcaaagttgcctttccttttgtactgttttaacactacaagccatatattgtctgtacgtgcaacaaactatatcaccatgtatcccaagatgcttttttattgctatataaact

SEQ ID NO: 29917 - DNA, 662 bp, Oryza sativa
ttacttccagttttcttaaagtgaacttcaaaattttcatcaacaatttgtgaaactgaaagtaaattgtactttaagtcctcaaccaaagctacattcttcaattaaaatttttcatttacctatagcgagaacggtatttgtagcagcatcaccaaagataatcgattcagtcttagatgccttctttagggaggagaaccaatttttatcactggtcatgtgccgcgaacaaccggaatccatgatccacacgttctccttccttgccaccaaagcctacacacaagcagaagtcgaagcctcagtactggggttagatgataataaaaatttaggaatccagtactgagacacacgaccagaagatccaataggcatatatccatgtgcaaaatcaattttagaatttttagaaaaattcctccgacgccggtctgaccgaggtatagtggccggtctgaccggtggtcggtctgaccgaggcttcaccgtcggtctgaccggtggtcggtctgaccgaggctgttcagccggtctgacctgtcgcggtctgaccgcgggacccactacggtctgaccggtttcctcgagggaaaaccagatttttgccactttgattttgcaaaagcaatctctctctcctttttctgtttatgagc

SEQ ID NO: 29918 - DNA, 1464 bp, Oryza sativa
gttgttttaactttttagcagaaatcatgttaaacatcaaactagcatgaaaagcaatttgatatttttgcaacaactttttagttaaaaacaactcatccaaagtgcatgtgtgcaaagcaaaactacagcaagagaagatctatttttcaaatcatgtgcagcattaacatctctaatttttgaaatctcattcattaaaacctcacaattttcacaatcatcatcattaggaataagagattttaacctatcaatttcagatttaagagattcaatgataaattcctgttttctatacttcttctcacactttttattttttgcactcaaaatattaatagcttcctcaaaagcactcacctcattatcttcatactctatgtcagattcaccacgcgccatgaagcaaacatcggagacattcaccatctgcatcacttagtggctcgaagacggcgcaaacttgttgaaaagccttcctaagattctccatcttcccccttggtatgaaccctttgacttgttgttgttgggcttgttgttgttggtcttctcaccatctttgtcttctcttttgcctctcccaagcttaggacaatgcgaacgaagatgatcaattgaaccacattcaaatcctaaccctgcaggaactaatgggatgtcaaaagaaacgtcatctactgactcggctaacaaggagattcagccagagaagaccgtgccgcaggagtaccgcgacacacgattgctgccattcccttagcgtagtaggaaaccgtcagtggacgagtagttcgctcattttgttgaagtgatcgaaaagatccacatcaacgtgccgttgttggacgctatgcaagtgccaacatatgcccgttatctcaaggacatactcaacaacaagagaccgctcccaacaatggaggtggtcaagctggcggaacactacagcaacatcatactccacaagctcccggagaagaagaaagatccggggtgtcccacgatcacctgctcgatcggggcacaacaattcgaccagccttgtgcgaccttggagccagcgtcagcgtcatgcccaaagatgtctttgacaagctcaacttcatggtgttggcaccaacaccgatgcgcctccaactggctgattcgtctgtccgttacccggcagggatagcgaaggatgtgctagtcaaaatacgggatttcttcatcccagttgattttgtggtgttggacatggacacggggaaggagatgccgctcatcctggggcatccattccttagcaccgcaggagccaacattgatgtgagaacggggagtatccgtttccatatcaacgggaagtaggaaaagtttgagtttcaaccgaggacagaacaatgctccatgtccagaatcaggtacgggccgaacccgcaaaatattcaagtggtcgaagtggagccaccaaagacg

SEQ ID NO: 29919 - DNA, 2387 bp, Oryza sativa
gcatgaagttagagtggccggctcggaaaaaaccgtcttccgcactgaaatcaaagaaggtgtggagggaaaagccaaagacgcccgctccatcccctctagaagaaggctcctccagctgccgcgtccaggtgatcgcgggacattggggtgagcccattgtaaaagttctgcaggatcagccagtcgtccatcccataatgaggcaggcggccacgtactcctgcagtcgtacccatgtttacggaatggatcatcccttgtctgctggaaactggaaattcgtccacgaagggcattggttttgcccatcaggaagaacttcgagaggaatgtcgtagagtatttatcccaggtgttgatagcagcacgattggcatagaaccactgcttcactcacccgaggagggagaacggaaacagccgcagcctgacagcgttaggactgactccctttatgttgtacatactgcatatctccaggaattgctgcaaatgagcatgggcatcctcattagccttgccacagaacttcaagtcgaaatccacatctcctatgttgacttgcggcccgacgaccacattgtcagcagcgaactcgcgaagagtcttgttggccataatcttgaaggtcggtggcgctggtacggttggtttctctgtcggtagagttttctgctgagcaacgactcgcggcctaacgctccggaaaaaagcttctggattttctttgaagttttccggcaggttgaaaccagtcatgaactaccctgtttacacgacaaaaagtgaaaacaaccaaggttagcctgcaaatgaaaatgactatacagaggtaaatataaagtattagtttaagtaatctctattatgaatcttccccggcagcggcgcttgaaatgcttgttggtatttcttaacgacattactagaaatataattcgcagcaatggcgcagaaacacttctggtatagagttcatccgtaagcgcacggatataccattgtagcatttcacccgagagtattctaagggtatcgtatttattttatcccgtgggaagatcatgtagagagaactcaactaataatttatatattacttgtgataatgatattctaagcaggggtgataatccaagggtagagtgacacacaaacattagtactcatcctcataataaataatctaagctagatggaaagaaaagagaaagagaatctattcctatacttctaatatacatagtatatacatacattctagttaactgatatactagctaataccctctatccgatgccctcctggtacttcgagaatccacccctgactgccgagttccttacgacaacccgtcatgaccatccaaccggggctaaatacggaggaataccctccccaggaaattaacttaggattatatataggcgcggagttatacccgtattgagctatcaccatcagtggcccacctctcatccgcaatatataaccccaaataatgatatcccataatctagacaccacgtctaaactaccagatactactctaatatcatcgtcatgacatagagtaattgcataagcaaacactatacccgcaccagagcatcttccacataagctagcagtatattcagtataacatcaaacataatgtaaagtaggtactcgtatagtcggaaagtattccaataccataaatgtatatagaagagtattctaatgaaagtacaaagcttacaaaagaggaaaggaaagctactagagccatacccgaactctttcgaagacttccggactcctgattcctattctaattctattccaccagctagatactactaaactaaacttgagaggaatgagagagctcttgcttgagttgtgtgttgaagtgaagagagtgagctccttatatagaggtaggtatgacggttgtggaaggggaattgtccgtagtacactccaaccgtcataggggtgcaatcttggacgtacatgccaaaccctggcctcaatggtggagatgggggtttggcctaaccccctgggtcggccgaaccatgggctggcccaaaccagcccatctttggttggcgacttcctctattgcttcactttgtagacttgtgaattttagcccaattcatcgtgtcaattttgacttcttggcccattcatacataagtctatctctcgacatcgttcgattgatttatcgtctatgttgatgtaattctcctccactttattgtcattttctgcaaacggttagtagacctaataatagtggaatattattattctaacaaacaaatgcattgcaagcaccactactctcctctattttggtaatattgacggtcgaaactgattgata

SEQ ID NO: 29920 - DNA, 616 bp, Oryza sativa
atttctcactaaagtaagcaacatgctttttatcttgcattaaaacagctcctataccaattccattagcatcacattcaatttcaaaagttttagtgaaatcaggccaaaccaacaaaggagcttcagtcaaacatctttttaatttttggaaagcatccttttgtgattcaccccaatgaaactcaatacctttttttgtcaactcgttcaagggtgcagctatggtgctgaaatctttcacaaatcttctataaaaaccagcaagaccatgaaaagttctcacctgacttacattcacaggggttggccaatccttgattgcctccactttcgattcatcaacttcaactccctgtcctgaaatgacaaaaccaagaaagacaaccttctctgtacaaaatgtgcacttctcaatgtagcaaataattatcctttcttagcacatccaaaacttgttttatgtgactagcatgttcactcaaagacttggagtaaatcagaatatcatcaaagtaaaccacaacaaattttccaatgaatgttctcaaaacatggttcatcaatctcatggaagtacttggttcactagtcaaaccaaaaggcataactaacc

SEQ ID NO: 29921 - DNA, 593 bp, Oryza sativa
cacaatctcaatcttgtcgccttgccactgaatcaagcattgatgcatggttgaaggaatgcaacaattagcataaatccaatcccttccaagcaacaagctataagaacccttcgcatcgatgacagaatgttgtagggatagttttgttgctgactgttagctccacattcaaaactcctttctgatggatcgccgccaaagtctttaagcaccatgtttgtcttgatgagatcttcaacgtttctgcccaactttctgaatgtagcgtaaggcatcaagttcactgcagccccaccatcgaccatcatcttggacatcggcctcccattgacataaccatttatatacaatggcttaagatgccgattctctgtcccctctggcttctcaaaaaccgcctgctctggcaacaaaatcaatttagtcgattcttcttcaacctcatcgacatcggcttgcttgctcccaaactcggcaggcaacgtgaaaaccatgttgaccgaagcagttacaacactttttcctttagctaacctttttgcctcatcagctgtggattcatcggctacaggaacctgattcttaacacg

SEQ ID NO: 29922 - DNA, 1531 bp, Oryza sativa
tgccaagtcatcgtcactatggattttttgacgagggatacttcaactactttggatctgggaagtctaatctggccagagtatgcgccccgacaaggtcggaaccatcgtcatcaacaattcgatctcttgagatcgaccaagcctcaagataagcggcgtatcgaaagatgtcagaccgtatgatgtcgaacgagtacgcaacaaggtaattggtagattggttttttaaattaatctactaatttcgtaaatacatccggcatgtatctacaaaggtacgcaatattttatatgcaatttatcgtacctattcagatcatacaacattgtcagatctataatttattatgtttacctagagcatgttttttatacaatatctattgtgcgagtgcttccgatgttaggccaactacggtctaatgctggggactcgctctgttctcttctgtatgaatcatgcttgtctacgatatacataatgcctggtatttaatttgctcgttatatcctgataatactataagattcatgcagctttttgagtacatactcgatattatctgctatatatcttgtcttccagacgatatttttcaggaacaattgagcacgtgagtaggttgtggtcgagtacaccccattatcgagaacattctcgacaaatgcggagttgtcgcacccaacctaccaacgaagaccgacgacctatctcatagcgccaaccatggctgcgctattcgagaaaaggttgttaacggataaattctcgtgaacgttgtcagcttgatcacccgacatgattgcgagcggacatctggatatgctataagttgggtatgtgagtcatgctggccacatgagatgcagatgtaacaaaccaactttagcacccctataggtgattgagaggctcctactcctggttctcgaaccagtaggacgtagcgatctctcgcgccttaacttctgatggtcgaggtacgactacggcaatagcgtagcggtcctcgcaccacgacttcagatgacttcagatggttgaggaacagctacgactagtcttcgaccggcagcgtagcggtcctcataccacgactccaaatggtcgagagacacctactcactggttctcaaccagtcaatcgtagcgatctctcgtacatttacttctagtggtcgagttacgactactatctggtcctcgaccaccggtgtagcgattcgcccactacttccaccgggaatgctattaggcgagcgatcgccctcgctcgcccagggcgatcagttttgcgcacccccccttccctccctccacctctccaccttgtttccttttttggcaccgcattactttcctattttagtaaatttatacacctaaaagttacacatctaaaagttagagaccaaaaatttataagtcaaaagtttatatatccgattcaaatttgaatttgaattcaaatatttatatatatatatataggatttctatacatctaaaagttatacaccctaaaag

SEQ ID NO: 29923 - DNA, 2092 bp, Oryza sativa
ccttgtcggatcatgtagagacaaatgaccatgtaagacctggtcatgtaagagttctcgccgtgcgtattaaccaagccatgtaatcggaaattgagttttccaacttcacagcagggggctagggtatgtgctttttcaatcaacgcaagtcaagggtccaagagccttatcctcgagaacgattctccaacacaaggctgggggctagggagagtgtatgactcaacaaactgactgatcgaagtcggtaaaagagaagacgctcgtacataaaacattggtctgtaaatttaattcattttcagttttccatacatattataacatgtcaccctttgagcgttcgctcgggggctatttctatttaatattcttttctaagtattgatttcaggaaattctattggatattgtcgaaggctccatgtctctatggttctataccaagatcgactaaggcgagtacgacgaatgttgacaaggctcagtcgcagactctgcgccttctcgatcactcgagaacggttggtggatctcgacaaggaatacggaatgaagagatggtgtacccgccgagataaaatttcttgacttcaatccaaattctcaattacagcaagacgagagacttagttgtatgctctgtactttcttggttgacgtcggagattaactcagacaaaccctataggtgcctgcacgaggctgataagggaagtctaacgttatctctgaactcaccgagaacagtcacgtgagctcgataacagttattccaaggtctgcggattgagaatatgaactcgttcatttgcattgaagtcgggggctactgtcagggttatggataccacatacctaatagtagttggctaaatctcggcaggacccaccacataccatgtcttatacggaaacaaccttcggatataggaggagttccggataaggaaagacaactagagttctacatggaaacgacaaggactactcggattgtatccatattggttttcctagttctacttggacaaggggacacatatgagtataaatacaaggcccctaggaggagaggggacacggaacaatagatcaagacacaagatcaacatacaagccaacatacgccaagacaagacgccaccggatatcgacatcagagatatgcttggactgaccctatccagtacctacagaggacgactgtagggatctagcgctgtctttgatctcctcgggcacgggttcgaggaggaagactaccctgttgtcgactacgtgatgatacttactccgctatgtcaacaatagttagataggctaccctaaatattgtactggtgtgattatggtgaataagagcaacgaccggcttcggccaacaggagtacagttattacctgacaattcaggggcccgaacctgtataaaaatccttgtccccatctcttttactacaatctcgcatatatcctagtaccaacgatccccatactatgtaaataccggaatcgcgatatcaaacgtcgacaccatgtaattagcaaaacatgcaattttatttgtaaaaaattataaagtgggttcaatatgctcaaggggaatgtgtacttgctcgaatcttcaaacaatccttcgaacactcatcctcgcgaacgcgatcttccgaaacggtggattctagacgctggcacgcaaaacgaggaaaagctctaataaaaaccaaataagtagtatgtgaaagtaaacaatcatgcaaatctcaattttagatgaattttgcaagatgaatggcccaatttggagttcgtatgaattagttgagaattttagaagttttgagccatttaaatgaatttctagaattaaacttgattttttgtgctattattaattatttttcttaaaggaagtcaatggttattgcatcagcagtggggcgggtgtggaccgagtccaccaaaggtgggccccactcgtcagggtacaaggggcagcaggccaccgtggaccaagccacggcgtcgatcggacggtcgagggtggccggtcggtatatccagcgaggaaggcaaccgtgcaagca

SEQ ID NO: 29924 - DNA, 1153 bp, Oryza sativa
gctcggtacccgatggcatatgatggatggacatcgtgtgggagagatcttcgcaacgggcttcacgaggtgtgcgtgcaagtgccggtgttcgctaagggaattgtaaagttggagtagtatatggtgctacagtacacgaggtactgtagcgtgcaggtatgcatgcatgtacggtgctgtacgtgtatgtgtgatcgatacatgcatggtgaagcatgtatgtgtgcatgactggttggccgagcagcaggagagcggctcggtgggcttcggtggctgttggcgacatgccaagtcggcccaggagaaagcaagggccctgctggcagcgagtcggtgacggtcacacgtggatttctggtgcgaatccgttttggatttctggtgcggccggttgtttgctgcacgtttggaaattgtaaaacgtatggaaactgaaggatggagtcctattgtgtataggagttctacacctactttgagtaggagtttttgtggtataaatagagagggagcgtgaggcttcctgtatcgctttagagagcaatagagttgagttttggtttagggtttcgagtttagtcgaaatttttgtaagaagtgctgttgttgcactttataaacatagagagaagtaataaagtcgtcatccactttaagagttcttcgatttgtatttcaccgggtttcggcggtctaaccggtaactcaccagtggtcagaccggcggcattgcggcggtcagaccggcgggagcgaagcggtcagaccggcggcggcaacaggtgcggcaggcgacttcagcgatcagaccggagattcaaacaccggtcagaccggcggcatccactcggtcagaccggcagatcaatctcggtcagactgacttccgttgatttcgagggtaacttttatttccgttaaaatttttcggtttttgggtataccaaccattcacccccccctttggttggcttagttcttgtgattcgatcctacaacagcggatcacgagtggacttacctcccctcgtcgtgatcgccttaacattttcaatggaggagtcgggttgccccggaatcctcccagattcatttgcagggactaaagatgccaactgagctaactgggtttctatcatcttattaa

SEQ ID NO: 29925 - DNA, 1125 bp, Oryza sativa
actgagctactgggtttctatcatcttattaaagctcagttggttttgaaacgcggaagcaaagccatctagcttgacatttatgttttctaagaccttatcattggcagcaagctttttgcttagcgcatcagtggttttagcttgcgcaaaaacaagatacttcaaggagggctggttagagatgttggcagagggagcagcgaactcgcgaagagtcttgctgggcattgaattgaaggtcggtggcattggtacggctggtttatctgtcggtagagttttctgtggagcaatgactcgcggcctgacgctccggaagaaagcttctggattttctttgaagttttctggcaggttgaaaccagtcatgcactaccctgttttcacaataaaaagtgaaaacaaccaaagttagcctgcaaaggaaaatgattatacaaagataaatataaagtattagttcaaataatctctatcatgaatctttcccggcaacggcgccagaaatgcttgttggtatttcttaacgacattactagaaatgtaattcccagtaatagcgcagaaatgtatattatggttacagagttcatccgcaagcgcacggatataccatcgtactatttcacccgagagtattccaagggtatcgtatttattttatcccatgggcagatcacatagagagaagtcaactaataatttatatattacttgtgataatcatattctaagcaggggttatgataatctaagggtagagtgacacacaagcatttaactactcatcctcaaaataaataatctaagctaggtggaaagaaaagagaaaggaaatctattcctatacttctaatatacatagtatgcatatattctaattaactgatatactagctaataccctctataaacgatgccctcctggtacttcgagaagccactcctgactgtcgagttccttacgacagcccgtcatgaccatccaaccggggctaaatacggaggagtaccctccccaggaaattaacttaggattatatataggcgcggaggaatacccgtactgagctgtcaccatcagcggcccacctctcatccacaatatataaccccaaataa

SEQ ID NO: 29926 - DNA, 5961 bp, Oryza sativa
tgcttctcctttccttgggcggttgaaagatagaacagcaactagagcacaaatcacccaatctttattcaacttttattccagaagttttcaaatgattttgcaaaagaaagccaagttcctcatatgattaactcagtctctccaagtgtatcaatatgaattcctcaccatttttgcctttttgattcctactctaaggtttgatatgtggagctcggtagggatcaaacatggcatacttgcattcacatttattaccaaatcaaaaactcagactaaagaaaatgattaaacatactcaagatcaagatcgtgcaaagtgtgtgtgtgatataccctgtttccacaacaaaagtgaaaataaccaaggttagcctacaaagggcagtgattatacagtggtaaatataaagtattagttctagtaatctctattatgaatcttcctcggcaacggctccagaaatgcttgttggtatttcttaacgacattactagaaatataattcccagcaatggcgccagaaacactcatggtatattatggttacagagttcatccgcaagcacatggatataccattgtagcatttcacccgagagtattccaagggtatcatatttatttaatcccgtggaaagatcatggtagagagacctaactaataatttatatgttacttgtaataatcatagtctaagtaggggttaatataatccaagggtggagagacacacaagcagggagctactcattctcataaaatatctaagctaagtggaaagaaaagagaaagagaatctattcctatacttctagtatacatacatcctagttatccgatatactagctaataccctctatccgatgccctcctggtacttcgagaagccacccctgactgccgagttccttacgacaacccgtcatgaccatcaaccggggctaaatacggaggaataccctccccaggaaattaacttaggattatatataggcgcggagttatacccgtattgagctatcaccatcagtggcccacctctcatccgcaatatataaccccaaataatgatatcccgtaatctagacaccacgtctaaactaccagatactactctaatatcatcgtgatgacatagagtaattgcataagcaaacactatacccgcaccaaagcatctcccacataagctagcagtatattcagtataacatgaacataatgtaaagtaggtactcatatactcggaaagtattccaataccataaatgtatttagaagagtattctaataaaagtacaaagcttacaaaagaggaaaggaaagctactagagccatacccgaactcttccgaagacttccggactcctgattcctattctaattctattccaccagctagatactactaaactaaacttgagaggaatgagagagctctttattgaggtgtgtgagtgaagtgagaaggtgaagtccttttatagctgaactatgacggttgtgacggttggaatggtcggtaataccctccaaccgtcattggggcttcatctcaaccgtccagccaaaacctggatccaacgaaggcgagggaggttcggccgaaccaccaggttcagccgaaccttgggctggcccaatccagtccaatttcggctggcggcctcctctgctgcttcacttcgtagacttgtgaattttggcctgattcatcgtgtcaaatctgtgtgcttggcccattcatacacaagtctggttctcgacattgtccaattgatttatcgtctgagttgatgtcgattctccttcactttattgtcattctctacaaaaggttagtagacctaatactagtggaatattattattctaacatatttatgcatagcaagtatcactagttctctcctgttttagtaatattgacggtcgaaactgatcgataatgaccgtcacatgcagctacctctatctcaatgtcttcaacaaaaggtaaaacttgttatgatggcttgcgttctcgggattagtgcttccatctttatgatactctaatcttgtttatgtaattcgtcaagttatcatatatcttacataatctctagcaatatcgctatctaacccacaatcggctaacatctgttaatagagggcaaccgattaggttaaatatcgacgttggtttagattatataagatatctaccactctatgaaacttccagcggcttaattgtctagatatggtcttcttttcatacttaatgctgcatcagttgagtttgatctattaagtcgtgcttagaatatcaatctttagccctgccttctggttgccgattagggcagtatcggggtttcagccaatcttatctggtttaactatatttgctctatacgctccattgacaagttagatccgccctttatgtcaagatattattgcatttaagtatattacgcttctgtttagtatattctacttgttttaacatcttaacatagagttgtatcggagtactagccgatacatgctagatctatctgattggctatgctataaacatatatagtcctgttattaatatatatttcaacctaagtgattaatactgtctcggcatggcgaccgatctatcccaatcacttggtttaagtatatatcgatataagaactatatattgttgatatctatagccaatcgagtagatttagttctttattatctatttataaccgccgatcgatttacatatgatatcggctcaaaaataaatgatacgtcatcggcacctagccgatcggctatcatttataggtttaaccacggtttctttgtctctatttcttgttgattgcaggatcaaatcaactggcacgctaacacacccgaaggcgagctttggacctgcactggagttaagtagatctcccaggccttgtgtttcacgtcaacacgctcttggcacgcctggtgggaccaagaagaagttagcaagcaattcttcctcatggccgagaaaccaccgctgtcgccatcctcggctagtccaggcactgttaaggaaaagatccagaagttaggattgaccgacgtcaatgaaggaaacgtcgtgcccatcgatccagaaaaattcacacctgatcaaaagaaagattttgacgcgatgatgcagcaggcacgcaatcagttcttgaactcattcatgcagactcgcaagggaacacttgttcagaagtataaagtaaaggtagttgctgatgatcctgggaccagttcttctaaaggtgaagacgggaaacaagctccggatggctcggctcaaccgagtgacaaaggtgctacagatggttctctaggaagtcaaggtgacaattctcaaggagtccatggggttcaaggtgagggggtgcatggagttctaggtgatggtgctctggggttgcagggaggaaattttaatcaggatggcaatgcatcacaggagtttttcaataacttccaagatcgggttgactatgccgtgcacaatgctttgatcaatcaatctggggtgttagtcaatacattgtcaaatatgatgaagtcaatggtcgatggtacaatagctgaataccaagctgcaggcccagtttatttgcaaggaggagtatttccaaattaccgaccattgatcaccaatactcatccacctgttcaagcagctccttctattgcaccatcggctcagccgatggcaccagcatcagctcctgcacctaccgtaccaccttcggctccaggccaattgatcaatccccgactgctgataagagaatagccacaacacgctggatagaatgtggatcggctaacacaagaccaggttgcatcccatgtttttgcctcctcaaaacactgttgatccaacccagcagcagccgattcagcaaacaccaccaaggcagcaggttgtgcaacccatacagcaaacacccccaatccaacaagttgtgccaccagtgcagcaaacaccccgagctcaaagagttgtacaaccgattcagcaaatgccattaaggcaacaggttgtccagctgattcaacaacaaggttcaatgaatgcatcggctgggtttgcgacacctggtgggcggcctgtgcagcatgctacaaatcaggttgtcccagagcatttagtccatcatgtacaaccagatggcacggtgattccgcaagttattcctgaacatttggtgcgtaatattcagccggatcttcaaaattaccaggggggcaatttgaattatcaatatcagccaccgtcacctcatgttcaacaccagcaagcaggatcagctcagccccaatttgttcctcaatataaccaattcgagccgatgccacaacaacctcaagggacacctcaacagcggccatgggccgatttgattgcagatgtcataaaggagcagttcgggctcaggccgaaagatgctggaaatctatatcgacagccatatcctgaatggtttgagagagttcctttacctaaccggttcaaagttctagatttttcaaagttctcagggcaagatagtacatcaacttatgagcacagtagccgatttttagctcactgcggtgaagcatcggctgtggatgccttgagagttaggttattccggttgtctttagctgggtcagcctatacttggttttcttccttaccatatggatcaattaacagttgggctaatttaaaaaagcagtttcatagctgcttctatagtgggattcatgagatgaaattgtccgatctgacgtcgatcaagcaaaagcatgatgagccagtacatgagtatattcaaagattcagggagatgagaaataagtgttacagcttgagtttgactgatgcccagttagccgatttggcttttcagggtatgattgctccaattagggagaagttctcatctgaagattttgaaagcttgtcacaccttacaaagaaggtagctctgcatgaacaaaggtatgcagaggctaggaaaaattctaaaaaggttaatcatgtttgtccttatatatatggatcggatgatgagggtgatgattctgagatagatgcagtcgagtgggtaaggagtaagaaggttataccatgccaatgggtaaagagctcaggtaaagaggagaagtatgactttgatataaccaaggctgataaaatttttgacttgctactccgagagaagcatattcaacttcatgccagtcacacaattccatcggctgaagaattgggcaagaaaaggtattgcaaatggcataattctaggtctcatacgactaatgattgcaaggtcttcaggcagcagatccaagcggctattgaaggaggcaaaatcaagtttgacgattctaagaggccgatgaaggttgatggcaatccttttcctgttaatatggtgcatacagctgaccgaatagccgatgggagtcgtgcaaggggttttcaggtaaattcggctaatattatcagcaaatatcagaggaagtatgacaagcagcaggagaagcattatgaagaagatgatgatggttttgatcctcattggaatgaaggtatgaggctgccatctatcgaagactgtcctgggtgcagtgatattgctgagagttcaagccgatcatatagtaggggcaatcggctaaggcagacaagagttcctgttcatgaaagattgggtccagtgaatcaagacatagccaagaggacaatgaaatcaggaaaaatcagtggtgtccatctggtattttcacgaagaatcataagagaagggttcaaagattgaggaacagggagcacttttaggaggtcgaacaagaaattaaccattggctgaggaaaacaaagccgaggcaggagtggcgtgttaagaatcaggttcctgtagccgat

SEQ ID NO: 29927 - DNA, 3838 bp, Oryza sativa
ttatgctaatgtgcattccttcaccatgcatcaatgcttgattcagtgcaaggcgacaagattgagattgtgccagccgacaggtcagtcaatgttgccagtgctgaattagctctttgggagatggatgggcttgattgtttatttattttggaaaagtttgggatggagattttctaaaagtgtccgattctgatatacagccacttgaagatggagaacccgagctattattttgagggcgtcgtagagggttcagatgtctacaacaaggacacggtagatgatctcgatgacaaacaaggacagggtttttgtcggctgatgatttggaagaaattgatataggtccaggtgatcgaccaaggccgacatttattagtaagaatttatctgcagaatttagaaccaagttgatagagttgttgagagaattcagagattgcttcgcttgggagtattatgagatgcctggactcagccgatcgattgtagaacatcggctacctatcaaaccaggggttaggccacaccagcaacctccgagaagatgcaaagctaatatgcttaaacctgtcaaggctgaaattaaacgattatatgatgctggttttattcgtccttgccgatatgctgaatgggtttctagtatagttcctgttattaagaagaatggcaatgtcagggtgtgcattgatttccgagacctgaataaagctatcccgaaggatgaatacccaatgccagttgccgatcagctggttggtgctgcatcagggaaaaaaattttgagttttatggatggaaacgcaggatataatcaaatctttatggctaaagaagatatccataagacagcttttaggtgtcctggtgcaatcgacttgtttgaatgggttgtgatgactttcagcttgaagagtgctgagctacatatcaaagagccatgaattacatataccacgatctaatcggctggttggttgaggtttacattgatgatgtggttgttaagtctaaagaaatagatgaccacatagccgatttgaggaaggttttcgagagaaccagaaaatatggcctgaagatgattccgacaaaatgtgcttttggtgtgtcggctggccagtttttgggatttcttgttcatgcgaggggggttgaggtgactcaaaggagtgttaatgcaatcaagaaaattcagcctccggagaacaagacagaattataggagatgattggaaaggtaaattttgttagaaggtttatttctaatctgtctggaaggttagagccttttacaccattgttgagattaaaagccgatcagcaatttacttggggggcagagcaacagaaggctttggataatattaaggaatatcttagctctcctcctgttttgattcctccatagaaagggataccttttagattgtatctatcgaccggtgagaagttgatcggctcagttttgattcaggagttggatggaaaagaacgagttgtattttatcttagtcgtcggctcttggatgctgaaactagatattcccctgtggagaagttatgcttgtgtctatatttttcgtgtataaggttgaggcattatctactatccaacgagtgtactgtcatatgcaaggccgatgttgtcaaatacatgttatcggctccaattttgaaaggaaaggttggaaagtggatattctctttaactgagtttgatcttcggtatgagtcgccgaaggcgattaagggacaagttatagccgattttattgtggaacatcgtgatgattaaatcggctcgattgaaattgtgccatggactttattctttgatggatcggcgggtactcatggttatggtatcggcctagttataatttcccctaggggggcatgttttgagtttgcttatactattaaaccttatgcgactaataatcaggctgagtatgaggcagtgctcaaagggttgcaactactcaaggaagttgaagccgatgcttttgaaatcatgggggattctttgctggtaataagtcaattggcaggagaatatgaatgcaagaatgatacgttaatggtttataatgagaaataccaagaattgatgaaggagtttggctggttactttgaaacatgtatctcgagaataaaatattgaagctaatgatttggcccagggagcattggggtataagccgatgatcaaagatgttaaggttgaaattgcagctatgacagccgatgattgggaggtatgatgtgcaccagtatttacagaatccatctcaatcggcttctaggaaattgagatataaggcattgaagtacactttattggatgatgagctttactatcagacgattgatggggtgttgcttaagtgtttgagtcccgatcaggctaaagttgcaatcggtgaagttcatgagggaatttgtggtactcataaatcggctcataagatgaagtggttacttcggcgtgcagggtatttttggccgacaatgttggaaaattgtttcagatattacaaagggtgttaggattgtcagaagtttggagcaattcagcgagcaccagcattggctatgaatcctatcattaagtcatggccatttagaggttggggaattgatatgattggtatgataaatccaccatcgagtaaaggacataagtttatattagtggcgactgattatttcaccaagtgggtagaggcgattcctttgaagaaggttgattctggggatgcaatttaatttgttcaagagcatataatctaccggtttggtattcctcaaactattacaaccgatcaaggcttaattttcgtgtccgatgagtttgttcagtttgccgatagcatgggtatcaaattgttgaattcttcaccatattatgcacaagctaatgggcaggccgaggcatctaacaagagcttgatcaaattcattaagcggaagatttctgattatcctaggcaatggcatactcggttggccgaagcattgtggtcgtattggatggcatgtcatggatcaattcaagtccctccctataagcttgtttatggacatgaggctgttttgccgtgggaggttagaatcggctctagaagaacggaattacaaaatgatttaacagccgatgagtattacaaccttatggccgatgagagggaggatctggttcagtcacgattgcgagcccttgcaaaatttatcaaggataaggagcgtgttgctcggcattacaataagaaagtggtacccaaagatttttcggagggggaacttgtttggaagttgattctgccgattggaactcgggatagcaaattcggcaaatggtcgccgaattgggaagaaccgtttcaaatttataaggttgtgtctaaaggagcttacatgttgcaaggactcgatggagaagtttctggcagagcattaaatggcaaatatttgaagaaatattacccaagtgtttgggttaatgcaagatcggctgatgttgccgatacatgataagccgatgtattttcatcgtcttgagatggccgatattgttatatcgctcttagtcgttttttccaattgtaatcggttgtggtttgccgatatataacagccgatattgttatatcgcccttagttgtttttctaattttatcaatgctgttgacattataaaattaggggggcacatatgtacaaaaatgaaagtgaaaatttttttagcaaaatcagaagttatgttaatcggcacagaggattgttaaaacaacagagtattaaggtatcttagccgattacaaaaaa

SEQ ID NO: 29928 - DNA, 15556 bp, Oryza sativa
ttgcattcctgaagttgtgccaggagctcaatcttgcgagcctcgagccaatcaatgttggatttgatcggactctccgaaagctgatcaagtttggatttctcctcatgcacaagctgacgattggcttggattgtggcctcaatatccttgcgctctcgacattcggctagtcttaatttggacttttctagcttgaattgatgttgctcaagatagaccactggagtaaggatattggctagctcatctgggattagagcttggatctcatgtagccgagtcctaattggcccacagtttaccaccaaattatctaatgatgacgcttccagccgatgagagatatcttcaagtgttttcttcacatcatcgggtaagggagctaaagctttgcttgaagtatcttcttctgcctcatcaagataatctctgatgtcaaaggagaaaagatcggctaaaacctgcagcaacaatttcggaaagagtaagagctgggtaaaatatagccgatctaattattgagacaaaggaaaacttactgggatagcagaagaagctggttgttcttcctcctcgatgtgatgactccccacggccgatggagtctggtcacttgacgattgctgtacaggaggagaaggaggaggaggaagctgtaggatagataagtgttatatagagtcggttgagattgattaagtaaaagaattaaagatatcttactggtggagccgacttgacaattgtcgctgctggttttttcttcacagcagttttcttcttctgcaaccacaaagtccatgagtaattaactaaagagggaggtaacttcagaagaagtcaaagagagatacttactcttctgaaatgaacgggggcaggagttggaggcgtttgcttgggtgaagccgatggtgttctttctgtgtcactcatttcagctacaatctggtcaatatcttcaccaatttcctcttcatccagagcttgttcaatagatggatccaaggcaggcagatcatcggtcggcttagttttcttgaatttggcctttttctttggagctaaggccaaggtactcacggccgatgatctggttttccttttcttgcctgcatcggctggttccctggttaggccgtgaaggagagttgaagtcttgggggcatggtagccgataacggggggagatagtccacctccattcggaattagtcctggagaatattcaatgttcctgccactgttactttggtgtggcggggaagagtcgattgtctgcagaacaagaacaagagattagtcaagtaataaatcggctaacaattattcaagctaacaatggtgaggtttacctaaggtatgacatcagggaatagatctgtcatatacatcgaagccgattgatgaaacaagtgcagcttccattcaccccaccatctgtcgaaatttttgcttctaaaccctgccaactcaatattatcaatgctgcccagagagggtcctggtaggttaagtagccgatccatcattagagtggatgcgatttctcctcagcactgaatcttgtcgacaaagaataagccgattgggagttgtcctaatccaagttgtctagccgagctcattgggtgataaaactcataggaaacttggatatttcttccttgatgaatgccgacaggaaggatgcatgggctgattgcggctgtaagaacttccctggatttttgatacttttcatgattgatatcttcaaatctaaagactgatggaagttcaagatctgctgagtcttcataaggaaaccaaactcgggcatctttcttaaagccttcatagaagccgcagaaccaatccttgagtagctcggccgatagctttgctctagcatcggttggtgtggacgcatattccccatatgatgtgcatctacgatgagtgcgttcttctccatcatctcctgcaatcggctctggcaatgggaactcagcatctgtcacagatggccgattgacgactttcatgaccattaggttcaaccaggtttgcagcagccaccattgtccacctgcaccaactactgagccaacggctatcttggccgatgcattgttcaatgtttcgtataagtagccgaggagaatcttgcctaagggaaattctttctttgattctaaggcttcggctacaaattgccagttggttgtaggaccacaactggatccacaaaagagaaatttttcgagccacattagcaagaaggctacatgctctcgaggagtaacagatccttggcccatatatgccgccacatagccagaccagccacctatgcttttggttctgaagtcaaactgatttttgctgttcatgctcatgggattagccgatgaggttacatctaaaccggtgatcatggtaatgtcaatcaaagttgtggtcatcggcccttggttgaacaagaaggcgttaatggtgttggactaaaaataagaggcggctgccattaagggctcgtcgttagctgagttggctatggttaggtcaagtgcttggccgattccaatctcatcccagtgtactttcttactagctgatacgcgctggtaccatgtaacccaagttttctcaggggtggttttctcaagagatggccaagacttgaaagtgtttttctagtggctcaggttagggttggctagcctcaaggggatcctattggtttcaccgatgataaaatcagtggggtcaagattgccgattggacccagaaaatagtgattttcatgcgacaggcttggaatcgcaactaggttggaaaggtgctgcaaatccaaagcaaccgagaagaagagagcaatatgagacgagaaaaatcgatttgctgttgagaaaggggatctagccgatggggacttacctcggcatactcagctgatggcgcagcagatgggctggcagaggatgacatcgctgtgggcggagatctcgccggagatgaagtcgcctggaaatcgctttgtgcgtcggagggatcgccggagagagagaaggcagagtttcgcttaagcggtgaaaacaggagtaacggtgtgagatttctcaggggcaacggttagtatttaaagcgcttgaataacggtcggaaaacggtaaagtgcgaaacttgctcggagtcgatgttaagcaaatccgaaacattaccaaatattccggacttggggggcatgtgttaacgaccaaatttgctaatatcagcatcgaaaaagaggattagatcgaagtggagtcgaaggtggagatcgattcgagaacagagaaagaatcggctggagtccagatcagctacgattaggatcggcaggatccgagtcagattgggttaagtgatacagccgattccgacaatatgacttgtatgcgatatcggttttgagttgacgtacttcatgatgattgccatagatggatagagtcctggggaggcaattgtatctattaattaggataatttatgtaaattccttagggataaatataggcaaaagtctgccgtagagacttatggtatcttagagcttgtttgagataatagtcgtgtccggtatggacatatcttgtaattcttgggtataaataaaccccgagccctatgtaatttttaaacacacacgttcaatacaatttcggcgcatcgccacccttttgcttttgttttatttcgacgagttcttgcttttgggttgagctgcatcggtttcgatcttcaacaaaaggtaaaacttgttatgatggcttgtgttctcgggattagtgcttccatctttatgatactctaatcttgtttatgtaattcgtcgagttatcatatatcttacataatctctagcaatatcgctatctaacccacaattggctaacatctgttaatagagagcagccgattaggttaaatatcgatgttggtttagattatataagatatctaccactctatgaaacttccagcggcttgattgtctagatattgttcttcttttcatacttaatgctgcatcagttgagttcgatctattaagtcgtgcttagaatatcaatctctagcctgccttctggttgccgattagggcagtatcggggtttcagccgatcttatctggtttaactatatttgctctatatgctccattgacatgttagatcttccctttatgtcaagatattattgcatttaagtatattaagcttctgtttggtatattctgcttgttttaacatcttaacatagagttgaatcggagtactagccgatacatgctagatctatctgatcggctatgctataaacatatatagtcttgttattaatatatatttcaacataagtgattaatactgtctcggcacctagccgatcggctatcatttataggtttaaccacggtttctttgtctctatttcttgttgattgcaggatcaaatcaactggcacgctaacacacccgaaggcgagctttggacctgcactggagttaagcagatctcctaggcctcgtgtttcacgtcaacagttacccggcggggataacggaggatgtgccagtcaagatacgggatttcttcatcccggttgatttcgtggtgctggacatggacacggggaaggagacgccgctcatcctgggctgtccgttccttagcaccgcaggggccaacattgacatgggaacgcagagtatccgtttccatatcaacgggaaggaggaaaagtttgagattcaaccgaggacggaacaatgctccatgctcagaatcaagtacgggccaaacccgcagaacattcaagtggtcgaagtggagccacccaagacggatagcctggtaaggttcatgcagaacttcctagagaaggaaacaacaatgcccaggaacccctattggaggaagtcggtaaaatcacatataccgcactgaggtaacgaaacatcactgtgccacgaccgcactgaccgttggattccaacggccgaaagtggggccggttgggcccactaggggttcgaccgaacaccctggttcggccgaaccggctaggcaacagtcggctgcctcattttttgaggcaacggctagtgggccccataggtcagttttgaccgttgtgggtgcactacttaagccaaccggctagtgggccccatttcaacacattttcattccccctccaaagtttgctctcaagttcattcaagcttttatagttttcctcaaattcaaatctttagtttcatacatacaagttgctttggtgaaactaaccggcgggtgatactcttgtcatttctaacccccgccgagttagcctgttcttgctccattgtgcagtatgaggaggcgactgtctcgtctgttcaaagggtcaggctctcaatcaagtcgtcatgacaagtctagtactcgttcatcagctgatgtctcaatggaagacgccgacgctccgcgacaactcctgagtgacgctgacctcgaccttgtcagtgatcgggagagacaagcctactacatgctgagcgaccgggagtatgctcacacgcgagtatactcaccggagttgctgaaaaagataggtatgcatgttgaatttcgttctatttggaaagatgttggttggcagagatttgctatggtagatgagcccggttcttgcttgcttactttgcaatttctgtgcactttgaaataaatagaagatggtatttcttttcgctttttccataaggagttcacactcacatggaaaggcttgagtacacttcttggttttcacgattcctggaaaatcgatctccagaaaggaatttctgggttcgagaaaaataggttttgggaagatatttctggtgctccaatttgtaagaaacctacaacgaatgatatccataatcctacacttcggctcatgcacaaatggattgctatgtctttgttccctagaagtgatctgtgacccattagggggatgaattaattatcatgtttgccatggttagaaagataaaaatttctccagtgaagtgtatgataaggcaatggttagaaagtataaagttctctgctcctgttgagtgcacttctctgattactcggatagcaaaagggctaggggtcgttagcgaccaaattgctcttatctcagccgctcgtccgcgtattgatgaggcctatctagtgcaagggcatattttgaaacatggagcagatggatctttgatatactttttccccggttgtacaaatgaaatcccgttgccaaatgcggggtatcatttgtacaactgccatgaactaaccattcccctgcagaccaaagaagaatctcatgcaggtggaacatacagggagacgcgcaacatgacaaggaacgaacaagcaagttcatcatcctcaacacccgtgcagatgtatgaggcaggttggacaccaactggggatgctccaggatggacccaagctccacgccatagcatcggagtctcaacctgggcaggcgccagtgaggaccggtggcatgcgcctcatgacatccactggggggacaaccaaccctcaaagtgaatggcgctcaagttcctcacgttgggacttgggtgaaattactaggagaatggacacccttgatgtgcagacgggggagatccagtacgacctcgcggaacacatagcccaaacgcaagaatggcagcaatctgctgatgctcagttcaccaacatcaacaacatgacgcagcaacagcatgatgaccttcaggcgtactttcgctttcaggggttcaatccttaccaaggaccctgagcgaaagcgaagcttgaggggagacctcgctctccccactgaggtaacttgtatcacattgcatatttcccttcccaattgcataattgctttccaattgcatcgtataaaccttgaaaaacaacataaaaaattgtaaaatagaaaataccaaaaagataggataggtttgagtcatgctaggtaagataagctagttctctttgttgaaatgatgaatagttgctctgttttatatctctgatatatgggttcttggtaaatgctctctcaaagattgaatataagtagccaacaattatccgggaacctgaggtaaatgagctgcacttgctaatctaagtctaagttgttgcgagatttgacatagtaaaaatgagtagctatgatcctgatactaatttgacttgaattccggatgttttgttttgcaaaatgataaattgaaagttcctcatttgatataaattcctaccagagccaaaaatgtgttatcatgataaaccatatacattttggttacttgctattccattgaactttgtcaaactcttgtgacttgtgtagatacttctcacgctctatgatcaagatcatacacccacatatatgcacatgctaaactcctacactgggagctaaggaatattccattccattttcatattaccaccaaaataaattctccatgctttgaagtgctttcttctcctaaaaagataattcgttttgaaaaaaaaggagaggagggaaaggcaaagttatgaaaataataataataataataaagttatgctccatcaagcatgagcatgatgttgtagccatggcctctcccaataaaagaaggatttttgggataagagagtaaagcacaaaggagaagcatttttcttttatttgtcctcatacaccgtttccaccatatatcacacacattttgcacgatcttgatcgtgagtatgtttagttatctgctttagtctaagtttttgacttagtaataaatctgaatgcaagtatgccatgtttgatccctaccgaggctccacatataaaccttagagtaggaataaaaaaggcatcattgggtgaggaattcaaattgatacacttagagagactgagtgaatcaattgaggaacttggttttcttttccaaaatcgtttgaaaacttccggattaagagttgaataaagatcgggtgattggtgctctagttgttgttcagtctttcaaccgcccaaggcagggagaagcagtgtctcgtgggaatcaggggtaagggtaagccaccgtgccaaagattatttaatctgagagagagtacatatacctttcacctgtatctttgaggtatgcagcatagtagcaactcctgatcaacaaccaagtcattgtttcctttcgtccttcactcaggacgagcaaaggttcaagtttggggggttttgttgacggtcgttatcgatcagtttcgaccgtcaatattactaaaacaggagagaactagtgatgcttgcaatgcataaatatattagaataataatattccactagtattaggtctactaaccttttatagagaatgacaataaagtgaaggagaatcgacctcaactcagacgataaatcaatcggacaatgttgagaaccagaattttgtatgaatgggccaagaacgcagacttgacacgatgaatcaggccaaaattcacaagtctacgaagtgaagcagcagaggaggccaccagccaaaatgtgggctggttgggccagccccaagttcggccgaacctccctcgcctccgttggatccaggttttgcctggacagtggagatgaagccccaatgacagttggagggtattaccgaccattccaaccatcacaaccgttatagttcagctataaaaggacttcaccttctcacttcactcacacacctcaagcaagagctctctcattcctctcaagtttagtttagtagtatctagctggtggaataaaattagaataggaatcaggagtctggaagtcttcggaagagttcgggtatggctctagcagctttcctttcctcttttgtaagctttgtacttttattagaatactcttctatatacatttatggtattgggatactttccgagtatatgagtatcaactttacattatgttcttattatattgaatatactgctagcttatcagggagatgctttggtgcgggtatagtgtttgcttatgcaattactctatgtcatgacgatgatattagagtagtatctggtagtttagacgtggtgtctatattacgggatatcattatttgatgttatatattgcggatgaaaggtgggccgctgattgtgacagctcagcacgggtattccttcgcgcctatatataatcctaagttaatttcctagggagggtattcctccgtatttagccccggttggatggtcatgacgggttgtcgtaaggaactcggcagtcaggggtggcttctcgaagtaccaggagggcatcggatagagggtattagctagtatatcagttaactagaatgtatttatactatgtatattagaagtataggaatagatttcctttctctttactttccacctagtttagattatttattatgaggatgggtagttgaatgcttgtgtgtcactctacccttggattatcttaatccctacttagaatatgattatcgcaagtaatatataaattattagttgagttctctgtacatgatcttcccacgggataaaataaatacgatacccttggaatactctcgggtaaaatgctacaatggtatatccgtgcgcttacggatgaactctgtaaccataatataccagaagtatttctgcgcctttgctgaaattatatttctagtaatgtcattaagaaatacaacaagcatttttggcgccattgccggggattatatttctagtaatgtcgttaagaaataacaacaattaggccccattttataggcaagagagagagccgaccacgagattgagtggaaacggtgccggagatggtggtgtcagcggcatcaatggcggcttttgaacaagatccaaatcctggcgattggaggcaccattcaagccttgttcggttaatgcccatgagggaggaattggagaggatttattccccacctattgtggtgtggaattattccccctcaatcccctccaaaccgaacaaggcctcaccggggaaattagggggatttaaagagaaatcaatgggtattaaaacccccaattaatttggatttaaccggcttgaatggagcgaatttgagggagagataggctagggtttatgggagagagaggaggccggcgggaggaagaagacgaccggctgcctagcggcttgggctgggcgaggcaggggtggcccagggcagggcaaggagaggcccgagagagaaggaagagaaggaggggacttcggctgcgggccgagggagaggagagcgactttgggccaggggagataatttttagtttttctttttaatgaactcttataattgttttgtttcttaataaatattttcggtgctctgaaaattggaataaaaattgagggctccatttagaccaaggaaaatttaagaaaaatactccgggccacaatcgaatttatcttgtacgcatgatgaatttatcaggccatgacaaccgacaaccgatgactattctaagcctaactccactactacaagagagaatacaatatgaaatgagagaattgctccttgaagttagtgttaaaactgaagaaggaaatctccttttataactctcaagggcggttgagtatgacggttatggaggttggtgcacccctaactatcattaagagtggttgtggagttgacacgtggaggatggggccgaggggtgccacccttggttcagccaggcaaaccgcctttccccaccgcctttggtcaggggatgataggtgggtcccttggtcggtgcacactctaagtcagtttagtatgatttgtgggcccataaatccgtgtgttcgcatgtgattcatcagaggtgtgtttctttgcggctcatttctcctttactttaatgtataattcctgcatccatagtatttctccaatacaagtgaaactacattatttataaatgatatgcgtgtaagaaatgttagttttctcattatttattatggtagttgatggttgaaattggtacttaacgatcgacaccatggggatagcttgtttgggatgctgacatggtgtggccatcacggatgtcgatgaaacagcgactgcgacgggttgaggaggtgggcaacggttctaatggcaccaacgagtcttgccaatgctcgcgcgaatgctatggatagttgaaagggttgtcgcgttgtgttcgtatggtcgttacaactgcgacggcaagagctcgatttcgatgaaatccgctagaaccaaggtgccatatatggccttgcaagattggggagcttcctagcggtaaggtaacatgattgcccgcttgtgctagaggggatgctatcctactatgtaacgccccgattttcgtttgggataaaaatcattaaataatgcattttctagaaattaaaaaaaagttaaagcaaattaataaagtgaaataatgggagaattaaaatttttcccttaaaagtcatggccgagaatattttgtaatattctttgtgccctaaaatactctccggatttttccgtgaattttcggagctcaagaaataatttaaatagcacaaagttcattaactcaatttaaataaaaagaaaaatgattaaaattccctctccttccttccttgggccatttttggcccaatcccgcccctcctcctcctcccgcagcccgttgggcttccctccacctcctcctcccgcagcccgctcgctcccctctccctccaaagttcacctaaccccctcatccctctccctctcacgccgacaagtgggaccgtcggacccacttgtcaggtcctcctcctacctccggctccccaattccaaccgtcatgccgccattgccgcctcacgcgccgccgattccgcgccaccccgccaccccccttcttgcccaagtggtggaaccgacccccaccacctcctccacctcttccccctctcttcccaaaaatacggcgccggtttgccccgccacgcgcccacgatgccgccccactccgacggccgttgccggccgattccaccctccacagccacgatctcgccactccaagcccatataaacactccccgcagcctcctctctcgtttcccgagctccccgcgcgttctcccgctcaccccacgccgagcccgtgcgtcaccgctttccggcgagctccggccgtcgctcctcgccgccctagccgccgccgcactgcgccgccaccaccatcggcatcgccgtgctgtgccgcaccccggcccctattccttttcccctctccacctcagaaacactgccgcaccgcgcgcccgagctccaccgcccgccggcgtcgtccagccgcgcgccgccgccgctatagtcgtcgccgcgctgcgccgccgccaccactagctccaccgccccttgccgcacatcggccgccactacacttccccaaatcgccaccgaaatcgcctttccaccaccacacccgagctgcctcctgccgcttgccgcggcgctcgaagccgcgtccggccgcgccgacaccccctccgtattcgcagtgtcgagctgtacgtcggccacccctccctcttcgcgagtcaccatcggaactccgtcccctctgctcgaggtgagcatccgtcgccccctctcatctccggccggcaactcacttcaccgtgagccacctctgtaacaactgaaaatttaattagtagtttaacgtgtcatatgttatgtttcggataaaattataggaatttcaaaaactttcttagaaaaaaaattcttcagatgattcttatgtttaaaatggctagaaatttaaaccttttgctagacttttgtttgggatgatgtcaatctttagctaccattatagggaaagcattttttttccagaaaacaaaataaccatataaccttggtggcgaaatctaagttgctgggttaaggaagaatcatccaatttttcaaatagtgctttgacgctaataaaatttaccaacacaactaaagacctactcaccaatatttttccttgcacgaatggaacgagaatataagagactaagccaactcaataccagataattcacgaagatccacctttctttttctcccttttagcttttaagccaagttgaaacctctttgtatttaactataatgaatgaccaatcggtaattttgtaactcatatttcgcttatttgataatctacccgatcacgcatagcttttggctagtagattaagtaactagtgattgtatgcttgtgtacctggttgtagtgtagtccaatttattggcttaaatgattttctttgtttggctaattggtaaatgttaaatgaatatagatactctgtaacaaatctaagcaacataaaattccatgaaggtcctcatgtcaattagacaacctaagatgaccactgtaaaggtttcatcattttatcaccctttttactacctcagatatatcagtcaagtatagtcacagtgattaattagaaacctaatcaggaaaatgaagcaactcctaaatgtgcttaaaaattgatcagaaggatataggttttataatttattcaaatactagattatttatcatgagttaatataatttttctagaatttttacacttagttttgacctcattgaaattcaatttagttctcagcataccccatttcacctttttgccagaattaaaatatttcgaatttttgagtgaaactttgaaaaatggaaactaggtaactcaagctatacacacaccagatcacccatttttggaattcttgtagctaggtcaaactagttaaccaggagagaaaattcctgaaaattcactaatttcattgtgtacctatgtttctagccttgatttatctgtcctatgggcccagttcgacttggccccacatgtcactgacctaggcccgctccatatctcctagaccacctcttgggcgtgcaaccccacctcaggaacttaagacagcaaaaaaaaccctccatcttcctcctccctttctattgccagccactttacgttcttccttaggctgagctccctccccactttctcccccaaattcttcttcaatcatccaaaaccaaaccctgcatgtcacacctttggatccctggggctctaggttttccatccatccaaatatcttgcacatgcatggccatttgagagagatcgggaaggaggaacagcaaggagctgcaggctgcgaggttgcagcagctggatgacacgtttcttttctgtgttggtaagttctttccacatccatggctccctacttgagttcctataatgccgacaatcccttctttcttcccctccctattggtcaccgattcaaatcttgagagcaaagagcagctacaattcatatttctccactccggcaacaataacccatgttcctttgagttcctctgttttggtgagttctcatgtctctacctcctgtagatttatgttcttagctttaggatcaagtactcacggtgcttttgtcctgcaagtagcgtaaggtgagttttgtattattcttccttgtactacttgatcgtgctctttctatattgatagtttgatacccttctccggtaaacccgtgtaccaggcactgcaacctcaccaaatgtaggatataaatgagctcacacctatccttcggcagccatcagtggatcatggtgatttgcattagtgattcgagtcgttgttgagtttgtcgcccctaagaaaattagggccagcctgctgcacctcgtcctttggtgagatttttcagcaccttggcaatttgttttctctcacacaaaaggacctcacaaagattgctttgccactgaactccaccaatagctagtagttgcaaaattctagaaacactgttcttggtgctttaggtagattgttaattagcaagaagcatggggatattcagaggaggatggaactaaagtcacttggtaatatctgagaaagagataactggagttacaatgtaattacactaaattcaagtgctaataattactgaactaaatcaattatccccccacatagcttatgcacctatatcatttctttcaattgtaagctatgaaatcaaatttctgctaaggggcagccagtagcagttccacttgtcacattaagtcaacgcgcatagttacttcattccaagtctaaattgggtgattcaaattgtattagaaccagtgaatttggctccttggtgtgatataaattttattcacgtaaggctgctaaaaatctcagtatatggttgggtctgtttgttctattttcaaaagttgccattttagtgtatatggctggttagttgtgtatctcctaagctagagcagcaaatgtagtttttatgtcaacttgtacgctgcc

SEQ ID NO: 29929 - DNA, 7178 bp, Oryza sativa
tccagtggaccggcggtggacctccctgtggtcccggtccacggtggaccgatcaccttgacccgctgacgtgtggggctcgcttgacggcgccggcctctttgatgacgtcaacgcttaatcttttcctttgataaaataattaataattccacaataaatcattaataattgtataaatccatctaattcatccaaacttcaaattgggccattcaacttgcaaagttcatcaaaaattgagctctacatgtttgtttactcttcatgtactatttacttggtgtttattagagtttttcctcattttgagtgccaacgtgtagaatccattgtttcgggagttcgcggtcacaaggatcagtgttcggaagactcttttgaagaagtaaggcaagtcacacattccccttgagcattttgagcctaatttaaaaatgttttaccgtttgcaaataaagatgcatgttttgctaattacatgggaatagggtttacctatctgctcgtttgtgccatgtctacttgatatatgtcctttgtcaaccctgggtaataatttgactacctcatgttacttatgtgacctagctagaactatatgcttagccatgcttgattaccactagcccagttgatgggataattgcagtattagacctattagtatcttgacgagctgcgtgctcgagacatccggccatgtttcgttggtcgtaattatccaactaaaatgtgactgaatggtgggctgtgggtgcatggttttgctagtcgcgcccatggcaattaaggaccggttcgcgggatgcactagaagacatacagcgcttgccacaagctagaatgggtaattgcctgacttgaagtatagctttcctcaggctgacgcatccaggcaagggtaagcgtgatggagttcggatgggccctgtgacggcctatgcggctttctgattcgcttaggcacgagagaggactgcccgctgcctgttgaagagtgggggtgaaacctgaggtatggtgtgcttggttagagggggttatatgaaaggtcttgtcacaatcactcgacatggtaacgtgtcaggcctggcgcggtgacatgccgatggattgtgtcctgtgggtacagttgtgcacctctggctagagtaaaactattcgaatagtcgtgcccgcggttatgggcgatcaaccaaaatcaccgtgattagtctcgcccttaataaattgactcaatgcattggttagttcaggtgggatggttgggcctgttcaacgtgtagcgttgatcagtggagatttaatgttaccttaattactcaattgttttactattttgctcaataaaatgctttacgaccgcctttatgcaaatagcctcaagccattcttgaatccccttgcacatctgcatcattggtgtgccttactgagtacggtggttgtactcagccttgctattgttcccccttttcagaagtgtagtacttctgagctgaagacgaagttagaggaccaaggctcagaccccagttgagttttgcctatggagtggagatgaagccccgctaggattgcctttttccgctgctgctgctttcgtttcggtgtgaggactaagtacctcttctataagtattttacgctttatttacatttggaactgtttattacttgtcgttttgtgtaccctggatgattcctagacagggatttaatacacaaaatagtctggaaatttgggctaaatttctggacgtgacatactactacataaatgaatttttggatgagaccctctttaggttgcaaacgtaattttaactagccgcatctgcaaaaatcgtcctccattttcgcatacgactccttaaggggaccacacacaaaaatcgatgttcacagacgagcctcttaaggctccgcacgtaaaaataagcatattttttgcaggcggacctcttaaggggctgcaaacaaaaatatattttcgtaggcagacctcttgatgctccgcctaaactttgagttaactcctcattccctcttaatatttcaaagtttttcatccttatccactcatatttctctcaccttctctctctcacctcctgatgtgccctaacccccatcacatgatgatgagcacatcccagctacacttgacataaacaaggatgatggtttacgtcataagtcacatgaggaaaatgaaaatgacgtaaattatgttgatggattacgtctcaacaagaacgatcaagcatatcatggtccaattacgcgcagccgtgctaggaaaatacaacaagaggtgaactcactctttgctcaacttaatccaaattttatactacataaatgctctacatttgtattgctcaagtttacgcccgaggacatcatcactacggcaagaaggatgggttacgttgaggacgataagggttacgtcgaggaggaaccagcccatgccaaaccagtagctgtctacgctaacaagaagatggtttacgctgcaaaaggatcaacttccaaggcttgtgcgacccaaccagtcaactttctccatgcttaatatatatggttggaaagataatcaagtctagtttcacctccaacaaacggctcgtcatttcgacttcccactaaggagttatggacaaatcattgaagactgctcagaagccaaacagacgcgcgagtcttctcgggaattcacttattatgacctttgacctagcctatgtccagtaaactcccaagacttttcattctcatctaggagggttgttcctagtataaatatcccctatgttttatcatttagaagacttttggacagtgaaaatatgaacaccttttgttcagctgtgtgctaataaattcagagagagatctctacccctttgctcttgtgatttccttgtgagattacagaaacagcgttcgacgccccccaattggtgctcctggtcccttcgaggtttttccttgattgatttaaggttgtattggttggtaaacttagagtgtggttgggcgaaccctcgattcagactgccgtaatagagacggtggttggcttcgagtacgatcgtcaggttgcactgttatcttggctgcttgcagctagttatcttagtctctttgatgctagttattggttcttgatcctacgccgtaaagatcgggacatcagccctaccggggtcacatcatctgatatcagagttttcgttgtcaaaatatcctatctttctttgtgcgtgagttggtgtttctattcctgtggggacccaaaataggacttcctgtgtataagtgctagtctaggatcaagctagcacacacagaaacaaagataatatcacaaccaacatcacaaaggaaacctaatatttaatattaataatgactgtgataagccttatggctaaagtttacatttattctgccacgaagggcctaaggaaaatattaaagtaccagcggaaatatgataaatgcgtagtagctccattcaacttgccacaggcagtcaactgggactcacgacctattcctcgtcttcagcagcaaactcctcaggaaacagcgggaacctttcttctggaattgggggaattggaaggtgagtacatggaatactcagcaagcacacagaaatatgcatatgcaaagatgacaacaaaggcaatggctattttgcataacacagcaatttgcagttataaacaatttataaacaggtttaaaacaatagttataaataacgggtattaccaactatccatccacacaggattcgtccacacaggaccacatagctatattcattaacctgcacacagttcattcccagttttcacaaactacccctcatgagatatcaccgagcatgtccatgaccgcggacgcggctattcgaatagattaattaacactctgcagaggttgtacagcttgacccacaagatacatcgtccttttaacggccatgcgcaagtgtcacacttcaggttgtgtgcggccaaggagtctgtaacaaggctttttagaaactccgtcccaacactgccttcccccatgagacacctttccctcacatagacaagaaagtccccatggcgaacctaaactcctatcatctagctacctgggccaacagtgccaagactcagaatcctactgggccaggttcttcccatgagaacatgtggttgcacgttaggctcagatccatgacttatgaagtgaagtccttaattgaccaaggcaacttgccaaactacaatagcacacagctcaacagtaggctcacacagagaccatacccagcaacgatcacacagatacattaccacctaaccaggttcacactgaaccacccatcaccccggtcaaaaatgttttatccgcccgttgttttacacgttgcaacacatgctaccgaaaagatagcacacagccacacagttcatataaaagtgattataagtatatgattaatcaaaattatattttgcttgtaaaacaaccttgagcgggctaagcataactactctaccatgagttgagcccaatgttcaactcacaaatactagggagacaagatatcatgggcaatcaataattatcaaaggtaggataataataacaattaggtcacgctacccatcgatagtttataaacaaaacaatgcatgtattcaaaacaaaacatttcacaaataggttcaatatgttcaaagagtgcacttgccttgatcccaatactgtccttgcacagcgtcttctgaagcaaactgctcttccgctccaacgtctacacgattgcaaacgaaaaacaaataaacacaaagaaaaactaactaaataacatcatatgaaataaccaattaaaccaagaggttgagctcgattttagaagaatttaggaagaagaatgggtcgaatcggagttcaaacggaaaagttatagcctccggaagtttgaattcagggaaaatccgaggataaaagaaaagggaatattccgagaatattctctggatttttaatttcagaaattgaattaattttggataggaaaatatatgtgggcccactatcagtggcatagagtgtatgggtgaacttggtgtatgtgaactcgatgacgtggaacgacacgtggcgacataaggcgatgaggtggcactgacatggatggatctagggctgaggtggcataggttagggattatgtagatccaacggttgggatttgatctagggatttggacggctgtgattatttggagtttttggatggcaagtcccacacgtcagtgtcacagggaagaggacaagcagcagctgctccaccacaggcctgggcgtgcccggccatggcggcatggcgactccggcacagcgacgtcggcggcgttctccagcgacggcgcgcagctgcagcgacgagcagctacgtcggcaagagaaggcggaggcgaatccggtggcgcagcaccgagctccgggacgacgtggagatgacccatcaatgacgagcggcggttgccggagtggaggaagagagaggaaaacggcgcggaaggaaaagaggctcggcctcagggctttaccagcggctgcggtatggtaggaagatggtgacgacgacagcgcggctcccggcggcggcacggagcaacggcggcggcggctgctcacggtggagatggcggcggctttgaaaaaggggggaaaaggggcggtggccgacggtatttatagaggaaggagtaactagggttagggcgcacggcgcaagctttggaaaggcggcagctccgaatttggcggcgcggcttgcgggatttggtggcgcggccggcgcgggctcggtcggcggcggcttgggccggcgacacagagaggaggagaaggccgggccggggcggcacgtgggcttggggcttggcttccccaggcctgcagctcaagaaggagagagagagctggaggtagaagaaggtgggggaaaaagaaaaaaagaaagaagaataagggctaaactgcaaaagggtagaatagagaaaaagagaggaaggaaaaagggaaaaagacagggacttctctagaaaattccaaatataaagtatttggaatttttgggaaggatttagatttgaaaaggaatattggatttggatggaatttgaattagggattgagcttcacttccgaaatacaaattaaatccaactaactgcaattaagaatcacaaagcgaacaacgtaattaactaattaatcattttaaaaccttttgatttaacgaaattttcattaagctattttagacgaataaaccaaatgtgaattttcacaaataggcgagaagaacagaaagcgaaaaatcaggacgtgacaattccaaaccttttggatcagcactaggcattgaacttctagtttgaattgttacttatctttacaacaactagatttcagattgcttagtgtaggtttaccccaccaagctccacaaagaaaccatcgtttacgtcatcttggtcttttgttcgcttaaccatcacacttttttccaccacacatatacttctgtaacttgcaaggaatacataagagcttcggttggtaagagaaggtgaggttgtgacagtttccacatattttacaattccacatatattttgttttgccacttgtgttctaaccatgcaagaagatgtctgaaattaatccggaggattgtgttaccatggctcaatttaatgagttgaggcgtaacatggaggcaagacaagatcgaatggcacaagatgttcaaaatattttgggtcattttgaaaatattaatccttttggtggagatgcaagtgtgcacagtggagaagatgaagaggatgataatgatgatttgccctatcgttttggtcgcataccacggcggagaaataatgatgaagagaggcttggtaagctgaaattcaccattccaaagtttgatggtggatctgatctagaggcttatcttatgtgggagttgagggttgataaaatatttcacatccataattattccgaagagaagaaattggcatggcttcacttgagtttgaggattatgctctaatttggtgggagcaattgatgaatga

SEQ ID NO: 29930 - DNA, 1666 bp, Oryza sativa
aggattatgctctaatttggtgggagcaattgatgaatgaatgagaagagaatggccaagatgaaatgaaggctgcaatgagagcaagatttattctgaggcattactgacgtgatctttttgatagattgcagaatttgaagcaagcaagttggtatgatgaggaatattataaggagatggagaatgccatgatccgagctaatatttttgaagatgaagagcaatccattgcaaggttcatgtcagggttacaccgggatattcagcgaattgtggaatttcagtcatatcgtaatcttgtccagtgtgtgtatcaagctagcaaagctgagcattagttgcagcaagatgccaaggcaagaaagtcgagttcattcagttccgggttaccccaattggtaacaagtttacgccaagagccaatgtgaattgaggtaccaccataaactcgagtggtggtttacgctctaatgtttctagtttttctaatggcaaagaggctgtcatttctagtgtgaagagtaaaccaacggtctcatctactacctcaattggctctacttctaggagtcgagatatccaatgcttcaagtgtggaggccgtgggcatgttgttagagaatgtccaaacaatcgtgccattattgtgattgaacatggagagtttgattcagctagtgaggtgtaagaagatgttcttgatgatggaaatgaagatgttgttggaaaaaaggatactcaatgtgagtttgaataaggtgctgcacttgttgtgactcaagttctgagtgtacaacttaaggatgctgaaaatggacaaagaaacaatctttttcagacccgagctaaagtgggaggaaaggtgtgcaaggtcatcgttgatggaggtagctgccataatcttgcaagtaaggatatgtgtgacaagcttggtctgaagttgttgcgacacccacatccatatcatgtccaatggctaaatgatagtggagatatcaagattgggcatcgggtgaaagtttcttttaagattggtgaatatgaagatgaggttttgtgtgatgttgtgcctatgacagtgtgtcacttgctgctgggaaggccatggcaatttgatcgatcatcacggcattgtggtcgaacaaatcaattctctatcaagtggaaaggaaggaattttgtgcttaagcccatgacacctcaacaaatcatggctgagcatatgcaaaagagttctgaagttaggatagaaagtgagaaagaaagagagcaaaataaatttagtgacatccacaaatcggtgagcaagagccacaagccaaatatgagtgataaaaagaaaagagagggtgagaactttgtgatgttagccaccaaatcagaaatgagagatgtgagaaataatctggctcaagtactcattgtacttgtgtacaaggaagtaatgatttcagctaatgacttaacatctcttcctaatgttgtttctaatcttttgcaggagtatgaagatgtttttccaatggaaacacctgctggacttcctccattgcgtggcatagaacatcaaattgatctcattcctggggctgcactacccaaccgagcaccataccgcaccaacccacaagaaacaaacgaaatacaaaggcaagtacaagag

SEQ ID NO: 29931 - DNA, 2116 bp, Oryza sativa
caaatgggtagaatttattaaacatttccctatgttgttaagtataagaaaggtaaggaaaatgttgttgccgatgctttgtattgaaagaatgttttgttgaatcaacttgaggtaagtgtgttgggacttgagagtataaaagaattgtacaaagatgatcttgaattttcataaccatatgcaaagtgtcaccatggaaaaggttgagaaaaatatcatgtgcatgatggtttcttgtttcgagctaacaaattatgtgttccaaattgctctattagactcttattgttgcaggaagcacatgcctgtggattaatgggtcatttaggatataaaaagatatacgagctgctgagcgatcatttttattggtcaaggattagaagacatgttgagagatttgcgcagcgttgcaccacgtgccataaagctaagtcaaaactgaaccctcatggtttatatactccattgcctactcctagtgttccatgggaagacatagcatggattttgttttgggtttacctaggactaagagggggagggattcaatttttgttgtggtcgatagattctcaaaaatggcacattttataccctgtcatataagcgatgatgcttcccatgtagctgatttgtttttcagggaaattgtgaggctgcatggagtaccaaagaccattgtgtccgatcgtgatgtgaagttcatcagctatttttggaagacattatgggcaaaacttggaaccaagttgttgttttctacaacttgtcatcctcaaacagatggtcaaactgaagttgtgaaccgtacactatcaacgttgctgcgtatgatgatcaagaaaaatttaaaagagtgggaggattgcttgccacttgtggagtttgcatacaacagggcagtacattctaccactaacatgtgtccttttgaaattgtttatgggttcaaacctactgcaccaatcgatttgttacctcttccattgtaggaaagaactaacatggatgcttcgaagcgtgctgcatatgtgaagaagattcatgaaaagaccaaggaagaaattgaaaagaaggcgcgcagtaatactgcaaaggtgaacaagcatagaaagaaagtggtctacgaaacaggagatcttgtttgggttcatctacgtaaggaacgatttccataaagacacaaatcaaaattgatgcctcgaggagatggacccttcaaagtgttagccaaaattaatgacaatgcatacaaaatcgaccttccgggtgaatatggcgtaagtgcttcattcaatgttgtgatcttacccattttatggttttgatgaaacagagttcaggacgacttcttttcaagagggggaggatgatgtgccccaacccctgtcacatgatgatgagcacatcccagctacacctgacgtaaacaagggtgatgtaaacaatggtgatggttcacatcataagtcacatgaggaaaatgaagatgacgtaaatcatgttgatggattatgtctcaacaagaacgatcaagcatatcatggtccaattacgcgcagccgtgctaggaaaatacaacaagaggtgaactcgctctttgctcaacttaatccaaatttttgtgagaattttatactacctaaatgctctacatttttattgctcaggtttacacccgaggagatcatcactacaccaagaaggatgggttacattgaggatgataagggttacgttgaggacgataaaggtacgacgaggaagaaccagcccatcccaaaccagtagctgtctacgccaacaagaagatggtttactctgcaaaagactcaacttccaaggcttgtgtgacccaaccagtcaactttctccatgcttaatatatatggttggaaagataatcaggtctagtttcacctccaacaaacggctcgtcatttcgacttcccactaaggagttatggacaaatcattgaagactgctcagaagccaaacagacgcgcgagtcttctcgggaattcacttattatgacctttgaactagcctatgtccagtaaactcccaagacttttcattctcatctaggagggttgttcctagtataa

SEQ ID NO: 29932 - DNA, 2984 bp, Oryza sativa
ttgtgccatcatgttcctggtggatgtcggttcgggttgtggtcctcgcttgccccggcgttggccttgcagaccgaggttgcgcttagcagggcagctacgacgagcatgtcggcacggtggtggtgggcaagctgaggtgggagattgcgtgggaagtatggatgtgttcgacgcggtgggtgaggaggaaaggcaaggcgacgacgcggccatcacctttataggaggcttcggcgcgcggtcaaagcatgtagcggggctggcgatgtagttgttggccgtcacagcgtcatcctcgttcctcaaggtttcgccggtgaggtatgggacacacatcggttgggcggactaagaacgcacggagtggtgcacggtgagcttgcatggcggtggctccctagctagggttagagctcagcacaacaattattgacggcaatgggcatggttgttagggcgtatttcgttggagatctcatcaacagaaggagtagcattagtcccggcgacttaccggtggtggtggtcaactttcgtcggggcgtacgggaacgagacgaggggaggatcagctcagctcggcggctcgactagccagaaaatgccacaattgggcaactaagctggtccggcctagctcggctaggcgagaaggagactgaaaggaagagaaaagggttgagggattggatttagaattataagggagttcaggaagatcagttgggaggtttgggtctcggtaggctaggctagacccaccagggagcaagaatagacttttgctgttaatttcataaaatagttccttcatgattttgttttacataaaggttttgaaaataatattatttgactttcaatgataagcgtgggcagaaagagaaaaattcggaaagaaccagcgtgatgcaagttttcgcaaaaaacgttaaagccatgatttttattttctgaattttatttatgaaaatttcatggtgtaacaggtggcgagggaattgggagagcgagtgtgcctggacagggtagtttctcaagagttcctcgacatgataagtagtttgcttcgggttagattcaaatcaacctgataagtagtgtgctatgatgagtttctcaagaattgttgggtacacttcactatacgtacatacgtacttaaagtatgatttatcttttatatttgcactaatttttcaaataagacaactagtcaaacattgtatgtagtgaccactaatttggaacggaggtagtacaaaatattctacttcaaattcgatagattttcacaaaagtcttcttgtgagaagatgtacgagtgattgatagacaggatgtacctgttgctaattgacggaatcctccctaacatcggagacccagctcaggcatggtggagtgtcaaagcatccggccgacttgttccacgcttcaattccatccatccccacgagctgtctacattccgatccccatcccgggtctccatcccaaccaatccatcatcgaaaataataaaatcaaacacagagatagagagagagaagataaaaattacgaacacgtatgtccctactgtccaagatggaattaggtgggcaatcctaattattgtgcacttgatccagacaagtcaaacgaaggtgggagggaggaagcagcttcgccgtgccgaactacttcgtacgtactattactagtatttccaatcaacgccacgctgtccccaacgaacgaaacgaaatatacaactagtttccaaggagagcaatcatcgcctacatgttacactcggctcgtcatgtgcggatttaagccttagaacaaaaacttgtatatgttaggtgctagctggtgatcgcagctggttggtacctctgggctaagcttctctcaggagtccttgcgtgatgtcgtcgacggcgtacacgcggccgtccaagccaccagggccggccggagagcggaggcctccgcggctagccaaggagcttggcaggatcgagcccaagaagctcgggattgggctggtcgccggctgctgcctcgctctcctcacctacatctcctttgcccgccttttcgccatctactcgccggtcttcggtgcgccacttaattatttcttgttctcttcgtgtgaaactctctttttttttcatacttactgctacaaatttttcgaaattcttgttagagagcacgtccttggtgatgaagaacgcaccacctgcgtcgactcagcagaaccctgtgctggctcaacaacagagcaaagaagaggacgagaaagatgttggtgaagatgagacggaccggaaagtgccaagctttgcggagacgacagaaaagaatgaagaggaggaaacagtaacgaaaccatgtgaggcttccttttttttatcgctgtttagcacctcgagtggaaaagaaaattgaacacagaacagttttaatactgacagcatctatctttcagaatccgatccccgcataaaaaagcgtagctctaattcggaattcggttctctcgtcttgtaatttcgttcatgtaggagtttcatccatagtagtactaattaagatgctttgtctgtgattccgacagccggggacgaagctgaggccacaatctcctgcgatgagaacggcgttgatgagggcttcccatatgcgcggccaccggtctgcgagctcaccggcgatatccggatcagcccaaaggagaaaaccatgttcttcgtaaatccgtccagcgccggcgcgttcgacggcaacggggagaagaagatccgaccgtacgctcgcaaggacgacttccttctcccgggcgtcgtggaggtcatcatcaagtcggtctcgtcgccggccatcgtgccggcctgcacgcggacccacaacgtcccggcggtggtcttcttcgtggccggatacaccgacaacttctttcacgacaacacggacgtgatgatccc

SEQ ID NO: 29933 - DNA, 2568 bp, Oryza sativa
ggcaagatggactggatggccacaaacttctacgggcagccggcgcgcgacatgcggctccggtacgtcgagtattacgtctcggaggaggagacgacgctcaaggacaagtacccaagggaccactacgtgttcaaggaccccatggccatccacgcgcagggctggccggcgctcgccgagatcgtcatgaagcaggacgtcacggtgaatgtgacaagattcaagccgttcctgctcaaggcgctcgacgaattgcaggaataggaggagcgccgtttgattggttttgtgtgggcgtggctcgtccataagtgggatgtaggatgttttgattttatatttatattgtaatattgagttaatcaatgtaatttatttcgttggagattcatggtgtttgtcattcagaaaaatatgatttcttctttttggttgttgaatgtaaaagaaagaaagaaagaaagaaggaaaagcaatgtataaatttcagcattataaaaaaatatatatatacttcagcccaatttatgttcacacgactattataaataacgggcttaagtagtgttcttctttttggacacaaatgtttctagctatacataacggaggtcatgggatccccgtccctgaattggactgaatcgagatgttaacagtttcttactactacatctattctagaacgtagcaacctaaaaccgattttgatacatcataataccatatgtcaaattcaattataggttgctatacttaggagcagagggaggacaattgtcacacccggagattctgcttttccgtagtttctaattcaccaataaatcgtctacagaaattactttagttaactagaagaaaacccaaattaacaatgtatttaataatcgaaaatatcagggagaattttcttcgaattctctttttgctctaaaatcattacaaggacttaaccgaaatattcagagcatcggagttaatgatgttataaattgtcaatatttgaattaataatattttttctctcccgcctttcgtcgagggtcgtgccctattcactcccctcttcttctgcggtttcgttttgcatgatgagccaggtccgattttgttcgcggattccgtttctgttcttttcctaaaatggcaccgcatttcttttccaatttaggaaagttttttttttgacgtgaaacatgtaacatcctgatctttcgtttcttttaaaaacctattttaaatacaaaactattttcaaaatttggttcttatttgaatattagtgtttgtgccattaaagatctcaaatctctccttccaagtccacaaataaactcccagaataccaaactccacattcccttttacagtccatttacaatctttgaatccaattccaaattcctgattcaaattccaattcaaatcaactttgaaactcctaggaaaaataccaaaacttcctatccttttgggccatcaatcctctctttccctctcttcccttccttgggccagcccccacctccctctctcggccggcccatttcctccccctcagcccacaaccagcctggcacatctccctcttcttcctccctacccagcagccatcctcacgcgcacgccacgtgctcgacgaaatgccgagccggacgagcgacgcgtcgagcagcctcgcaccctccgcacagggccatgcaccgcccgagtcattccacacagtgccgcatcacgttgtgctgcgccgcgccgcaacgaggtttggatgagctcccttccttgccctagaagcccctccacagtggccaacgatgtcgacacccggccccatgtcgacgccgtctgcaacgccgctgctccccatccaccatatcgcctcctcgagctcgagcccagctgcagcaagtccacgccgcccgcgtgagtcgtgttcacgccgccgcgccgccactgtcgccgtcctgtgccgatgttgacatccgcctcgccaacactgctacacccagtgcaaaacctcgcattctcgccctccacctcccgtagtcgtgagtccacacattcggtgtgcgctgcgtgcacgccgcccacgccctccgcgtcgccactatgccaccacagtgccgccatatccattccttgctacttccttctcttcgaagccactgcaacaaaattgtcacttcctgttaaattcatcccgaaataaaaatcattctctaaaaaaaataatagaattaattaaaattcgaaaagaaattagcaaaccttaaaatgcgtacaagaaaatttcgaatgtggtccggaggatttttgttaaattctccttggtctaaaaggagccctcaaaatttacttgaattttcagaacgccggaaataattattaagcaacaacaacaattaagaaagtttatgaaaaagaaaactaaaaataatcctccttttcttttgggccaagtctagcccaaagttcccctcctccccctcggcctgcggccgaagtctctcttccgtccctctctttttcctttcccatctctctctcgggccgcccctccct

SEQ ID NO: 29934 - DNA, 738 bp, Oryza sativa
  unsure (1)..(738): unsure at all n locations
caatcgcccggaacggccgcgccatccccggccaccttccatggcaccggccgtgtttcccgtcgccgttccgccctctcctatgcccggctccctcccctcacctataaaatggaatcccctccttgtgttctctcgtttttgcctcttctcgagtcttataaaggtccctagccacctcaccgccgtcctcctctctctcccgtgccgccggccacctctaaccgcctctccctcttcgcccgtgcgccgaccggccgtcctgtcgccatcttcggccacgcagctgcctcctcttccccggtgtgtcctccgttttgcacggagaccaccggagacacattcctgccagcgtccagtggcgttgccaccattgcaccatctccanccgcccctgtcgtcgcgccagatcgccagccgacgtctccatcaccttccctggtactgcggcatcgacctccaccccggcctgccctcggtttcgtccgaagaccgccgccgcgcgccggcctcctcttcctcctcgttggcatccagtacctctcctccgggcggctactgttcctcaccggtgagtcagccgacgtcgccgtctcctcctccggcatcgcagcggcaaggtagtcctcgacctcacctcccctccatccgaaccccgccggtcttcgtcgtcgtcctctcgtcgttcccggttgcgctcgtcgtcggccctcccttcgtcaagccatgctcgttcgc

SEQ ID NO: 29935 - DNA, 9914 bp, Oryza sativa
tcactaacaaccgtcaacaaaaccccccaagcttgaacctttgctcgtcccgagtgaaggacaaggaaataaaaacttggttgttgatcaggagttgctaacatgatgtatatctcaaaggtataggtgcaaggtatatgtactctctcttagattaaataatctttcgcacgatggcttacccttacccctgattctcacgagacactgcttctccttgccttggacggttgaaagacagaacaacaattagtgtaccaatcacccaatctttattcaacttttattacggaagttttcaaatgatttttgcaaaagaaaaccaagttcctcatatgattcactcagtctctctctaagtgtatcaatatgaattcctcaccatttttgcctttttgattcctactctaaggtttgatatgtggagctggtagggatcaaacatggatacttgcattcacatttattactaagtcaaaaactcagactaaagtagataactaaacacactcaaaatcaagatcgtgcaaagtgtgtgtgatatatggtggaaatggcatatgaagataaataaagaaaatgcttctcctttgtgcagtttcttctctcaaaaatccttcttttattgattaggagagggcatggctatatatatatatatttttcaatatcatgctcatgcttgatagagcataactttatattattattattattattttttcataaccatgcctttccctccctttttttttctttttctctctttttttcaaaaggactttccttttaggagaagaaagcacataaaagcatggagaatttattttggtggtaatatggaaatggaatgaaatagaatattgctagctccaagtgcaggagtttagcatgtgcataattgtgggtgtatggtcttgatcacagagcatgaaaagtatctacacaagtcacaagagtttgacaaagttcaatggaatgacaactaaccaaaatgtatatggttcagacatgatggcacatttttggctctggtagaaatttatatcaaatgaggaactttcaaatttatcattttgtaaaacaaaacatccggaattcaagtcaaactaggattaggatcatagcaactcttatttactatctcataccttgcaacaacttagactcagatcagcaagtgcagctcacttacctcaggttcccagataattgttagctacttatttatttaacctttgagagagtacttacctatggacccatatataagagatataaaacagagcaactatttaccatttcaacaaatagaactagtttgtcttacctagcatgactcaaacctatcctatctttttggtattttctattttgcaaattttttatgttgttttcaggtttataagatgcaattgaaaagcaaatatgcaattggaaagggaaatatgcaatgcgatacaagttacctcagtgatatctccccccaagcttggctttcgctcagggtacttgctaaggagtgaacccctggaagcggaagtacgcttgaaggtcatcatgctgttgctgcatcatgttattgaagttggcgaattgagcatcagcattctgttgccattcttgcatctgggctatgtgttccgtgaggttgtactggatctcttctgtctgcatatcaagggtatccattctccaagtgatttcaccaaattcccaatgagaggaacttgagcgccatccacttggagatggaggcacaccacttgatctgggccgttggttatccccccattgtatgtcatgaggcgcatgccactggtcctcactagcacttgcccagcttgagactccgatgctatggcgtggagcttgggtccatccgggtgcattcccagtttgctcccaacctgcctcatacatctgcacgggtgttgaggatgataaacattctcgttcattccttgccatgttgcgcgtttccctatatgctccacctgcacgagattcttctatggtctgcaggggaatggttagttcatggcagttgtacaaatgataccccgcgttaggcaacgggatctcatttgtacaaccggggaaaaagtatatcaaacattcatctactccatgttttagaatgtgcccttgcactagataattctcatcagtacagggacgagtagatgagatgaaagcaatctggtcactaacgacgcctagacgcctagcccttttgctatctgagtaatcagagaagtgcactcaacaggagcagaaaatcttatattctctaaccattgtcttagcatacatttcacaggagaaactttgatctttctaaccatggcaaacatgataatcaattcatccccctaatgggtctaagatcacctctaggaaacaaagtcatagcaatccacttgtgcatgagcctaagtgtgggattatggatgtcattcgttctaggtttcttgcaaattggagcaccagaaatatcttcctaaaacctatttttctcgaacctagaaattcctttctgaagatcgattttacaggaatcgtgaaaaccaagaagtgtacttaatcctttccatgtaagtgtgtactctttatgcaaaaagcgaaaggaaattccatcttctatttctttcaaaatgcatagaaattgcaaagtaagcagacgagaaccaggctcatctaccgcagcaaatctctgtcaactaacagctttccaaatagtacgaaaatcaacatccatacctatcttttcaagcatccccggagagtattctcgtgtgtgagcatactcctggtcactcagcatgtagtaggcttgtctttccgatcatcgacaaggttgatgtcggcgtcgttcaggaaacgtcacggagcttcggcatcctccatcgagacattagctgatgaacgagcgctagactcgtcatgatgacttgacgaagagccggaccccttgaacaaacgagacagtcgcctcctcattctgcacaatggagcaagaacggactaactcggcgggggttagagtaacaagagtaattgcataagcaagcattatacccgcaccaaagcatttctcaaataagctagtagtataattagtataacatgaacataatgtaaagtaggcattcgtatactcgggaagtatttcaataccataaatgtataaagaagagtattctaaataaagtacaaagcttacaaaggagaagagaagagctactagagccatacccgaactcttccgaaggcttccggactcccgatttctactctattcctattccactaacttgagagaatatgagagagctcttgcttgaggtgtgtgagtgagtgagaaggtgaggggtttatatagcctcccaatgatggttgtgacggttggaatggtcggaaataccctccaaccttcattgggagctaatccacaccgtccagccgcaatcctgcatcaaacgatgccaggggggtttggccgaaccccctggttcggccgaaccaggggccggcccaacctggcccaaattcggcaggtggcctcctccgttgttcttcttcgtagacttgtgaattttggcccaattcatcgtgtcaattctgagttcttgacccattcgtacataagtctggttcttgacatcgtccgattgatttatcgtctgagttgatgtcgattctcctccacttttatggttattctctgcaaaaggttagtgaaacaaatactagtggaatagtattattctaacatatatatgcattgcaagcctaactagttctcctctattttggtaatattgacggtcgaaactgatcgctaacgaccgtcaacacagacgcagaatagaaaatgactaggagcatgcatctataactcatagaacaattagaaagccaagtgaaactcacctcattgcaacttataaaaactctgagatattgcattatcttaaatagtaatatatagatatgtcttccaaaatccaaataatgttattgcgtgtaaaaacaatataagttattagttaatacaagccaataaaaatattactgaaagtaatatatatagataaggaataaggtttagaacatacatggcatcctgtgtatccttttcatgacgttttttcatcttatgaaaacgattgacaattacatcattagtgattgtgcccaacatatccttctctacaaagcaaatgaggatatggctcagaaacttgtcacccatcttgttgtgcaaagcaaactctttagtgccttgttgtgaaaactattacggtcaccaacatgagtcaccaatctctttgtcttgttccaagaatagaaaccttctatgacaaatgcatcatacccatagtgattatcttttatgctgtccctaaacaaatagcaacataaacagtaggctttgtcatctttttcactatactctagccaattagacggattgaactgcctcttcttattcccaatcaacctatacagatattgaaaatcatcatgtggctgatatggtccccaaactaaatactttctccttatatcttcatgttgattgggataataatctgccatctcttccttttactaggatcccaaggaagcttgtccaaatcaattggttgaggcactgcaaaattttctctcggtattggtctagatgcatttgcactagaacttcctctagtggtgttcatagttgatggatttctaataaaaaacttgtccattatctttcctataaaatcatgagaaggttgattagatagagcacatgaggagggagacctagggctagggatccatccactataactattcacagggaagaggagtacttaccagggagggaggcagagaggacagcgagcagagcaccgctcaggtgctgacgatgaagagcgatcgaggaaggaaggaagtagcgatggcggtgaagatgaaccaatgcgggggaagcgcgatgaatgggcgaagaagaggagcggatgttcgacgtcccctcgactcacgcatgcgcgatggaaggaacgaaaactagggggagtggggttcttttttccaaatggactggggcccagaggtcatactactatgaatatacctaggagcataaattttgacatgggtccagggcccccatcgtgtgtacattaaatccacccctgcacgtattcaccggcagcatcattccaaccaattggaggtggcttaaacaaccatttgatggccttatgccagtcagaaataacacacataaacttcccatatcctattactccttccgtagccatctcataaaccagccccaatttgtactatcctccttctccacaattgcaaatgcaagaggtatcagctgattattagcaacataaccacaagcaattaacaatctggcctttgtacctccctgataaaaagcatgcatcaacacttattactggatgcaagtagggaatggcttcaatgcatggtccaaatacccaagccacactttgaaatgatcgccgcccttcctgattcatgggctttgacaaaagaacatattttgtacctgcatttttagcattaatagcatctagaaaatggattctctcttccacgccataatttattataagatattttgagcccataagaaccttcctaactaccgaaaagttgtgctattgctttctctcttccacgccataatttattataagatggcttcgcatttctatatctttgttggactagtgatctcgcgttttttctactcaattccaggtcatcctttaatgcatcacatatcacattagcaatcatagaagatgataactgagcatgatcaaatctatcagccggtgctcgacaggtgtgagcatagggacatttccttatcatccaacctgaacctatttttgttggaattgcatagagtctccacatgtagctattatcagtgcattcagctactagtttagactgactacttgtgctatacttgatttctgaatttttacatatatgaaactcgcctatagcaatttgtaggcgctcttttgaatcaaaagtctttccttgtgctagtgggttagaaaattgattcttacgtccaaagaaactctcgtctgctgttgtcttccacaacacagatatatcactaaatgctttataggattttgtccagatgcacgcataaaaggaaatgcattgacagaatgaacaactcgtggttctgggggactcatcatctgaactattatcaagggcagcatcaaaatcatgctcgttgtcatcatccagtccaaatttgtcctcaccaagatctgtctcctcacctgcatatgtgtcttctgcagcattgtcatcatctatagttggttgtgtttcgcaatccacattatcctggttgacaggtggagacaactgaactgttgttgaatgtataccatgtgctaaagtgggtacaacctttgcttgtgaatgaactctacctggctccaaagaaacacctaaaccatcccttccgagtgcctagttgatgcaaccaaggttgtactattaacctgacttgatcttgcttccgtagaggtgcatttgacataaagctcaacaacctgcccacatttcttctcaaatatcatcttccatcccctatcttcataaataggaatcaattgaaaatattgtggtccaggatttccgatatcaaatcgagattggatactcattggacaattatcctcagtgtacccaagggcttgaaaaatttcttttttgacttcctcaaaggttttaacctcaactgctggaaaagttatttttggaggaatattatattccgcacccttagctccatgttgtattttcccatcaacatacactagaacaataatcattttttctccgccaactctacaaaacaaaccaaataagttagcaaaacaagttatataaatattagttagataataatctacagatatatccattcatgtttaaaaaatgttgttttgcttagtaaaaatgtcaatgaacagctcataagttaagaatatgcagtaccgatccaactacaataacaaatgaataaattatgtctaattaagaaagtaaatgggctatctacaataaagcaaacatgtcaatatataaagtatgtatgaacagctaatcaatgataattatataaacgtatgcatgggcacctgctgttagtgatatgccctagaggcaatcatagagatgattgtatcatatactatgtttacatatttatccgacattgttccttgaaatagataactccttattggttaatgaatatgtgattctttcatgagactctttatgttgtttgttactatttctaaaggatccctgatcaaatatcatatgtggaacaaatatgtttatatgatcagcacatgtattaattgatgatcatgtctcatggatcatggtatagagataccaaattaataatatggacatatgttggtgaacatgttgttggatagacctaacatgagacactgcaagagccatatgtgttgtgtcatcagtgatctcatttagtgttggtgttgaatccttacatctaagattatcatggttctcaacatatgtagtagcttacttagtaactgctaaacgctactccgtaaatgggtagctataaaagtagttttcgggtatgctatgaaacatgtagtgggatatgaataatcaagatgggattttctcctcccatggagagatatctctgggccccttgatgttgcagattatggaagtgcatggccgtgccaaaggtgattgaggagtcaatcacaagttatataatctatcaacaggttcgagtgaatgattgagctattagaggatggcacatatctagccttgagcttaatcgatatcgtgaggcaaaggggttcatacaagtatacactagaggttcagccgatatgatctttatgtatgtccggtgggtcaatacattctgctaggggccgcttgtgacacgtggaccgaaaaggagttttcgggttacagccgagtatatatgaacctacagggtcgcacgcttaatgggccggaataaggggattggatagagatccaatatgagcttaattccgatagggatccgaataggagtcctacgagccttggaggcccgagtgatggatcctatatattcgtgagaggtgtgaccggcggaggcatcgcatcacgtgagaaaccctagccgtcacttccctccccgagcaaaaccctagccgcgcgcgggtgctagcacatctgcgcgtggcgttccgtccctgtacgtgtggataccggtagaggcgccgctggtttgcggtgctgatcggcgtgggagtacggcgaggagaacgcacgaggaggagaaggtcgagccggtgcaatcgactacttcctctacatcgatgcgcgctacttcgcgagagttcctttgacttctcagcgtcttcttccgctgcacagcgcgtcgagtggtaacgatctatgatctaatacttgcatggttccttgtttacgcgatagaaaattttgacttatgctatcgtagtctacacgtatcccaacacctgcatgttgcctcacagcggaaaatgcatgctgatcaatagacgtatgcatgtgtgatggaacttgcagagccgctgttgcctcacacggtgagcagccaacggacgcagcgccaaggacaccttggctggattggtggcactgactgatggtgaaatcgaaggcgctggtgtcgacagcgggagtgacgacgtacggagatcacagctaacacatacgacgatgtgccagcgaacggcgagcggcgaaccctaaacctctaggtcgatcgatttttttcacgttgtgccatcgacgcaataggttttcctttctataattctcgttttgttatgcatttctggtctggctgcaccaacaagctggtgtacgctgtttccagtagcatcgacatctggccgctgtttgaatgcgcgtccaggtctggacgctgttagaaacaccgtccatcctgttttgataaatcctccaaaaaaatactaataatttaattttaaaaatattaattattattaattaagccatctgatagccttgatacttttatctttaggaaaagttcacgttttgttttactagaaaatatatccgtacgttgcaatggataaaaatgttttttcagtggtacaaccgctattagagactaagcgatgaatggaaacattaggatcaatattcattataattgaaaaagttaatgaaaattgttccttcgttttgggcctaaaacctattattttcttccttttcagtaccaacccagtccgctacctccctctgctcgatctgcctttcttcaatctagcccacaagtggagctatgatgacggttgttatagaccaatttcgactgtcaatataactaaaataaaggagagctagctatccttacaatgcatatttattttagaataatctacttccacttgtacttggattttatttgagtgcaggaattgagcaaataaaataaagagaaaatgaaaaaacctcactcctaagcaagcttattgataagatgggcccacatgtcaggtataaccgtcccagaaattgtcataactgtcacaaccatcatagggatccacctgatagtgacccaggagaatttggaggcctgctgggccggcccaggggttcggccgaatgctggcaacgtcggttcaggctagccttacacgtggacgtccaggattgcttgctgaaggcggttgcggggcatttccgacatttcgcatgctcaaccatcaaaactgccgtataaaaggagaagcttattcact

SEQ ID NO: 29936 - DNA, 1309 bp, Oryza sativa
atgcaagggggtacaaggagtaataatatagggttgagttttgaagcaaacaagcattcgaaacaattttagttgatcaaagccactttataactccaaccttaagtctaatcatgattattaatcaagcccatgaacccacacgaacatgccttaacccaaggactacgatgagttagaccaaactggcagccttgttgcgggaccccagctcatcccaagccaacctaggctaaccattctaggttttagttgattaaccaaattttaagagggaaaccactaacttgggtacattgtaggcttgcacataaccgagggcacggctattcgaatagattatactctaattagagttgtaaaactttacccaacaagacgcaatcttgacatcatgtcaaccatgaatcgtcgtacctttaaggttcgcgaaaaggccaagattgtgacatagttcttcacctatcctggccttgaacaaaagtaccgacccaactcctgcctatggctgggataggtaggttatgattgagccccaggacatcagaacatccttcgggagggaccacccggatgtccgtccagtgccatgacatctcgattatcgaagcacccgcccgataaccttcatttgtcttagagatatcctttacccgacttcatccatatctatcagtgtcctttcgttcatgactagactgagctacaaagtaagccttacccattagacatgtgaaagtacgacagtgctttgcaacagaggcctaaagaccggtccttatgatggccgaggatcgaccatcaaaaccctgcaccccgagcccagcttgaaaccattttggagattttgaataagggaaggggtgtttgtccaattccaacatgagctaacaattccataatgtctaggtgatagaatatacttcccaaagtctaagattataaagccagcaaaagttgtctagttaaccagcgaagcatctagctaaattcatactagtggagccatagatagagtatacattagttggggttttattttcctatggtgcgcaaggtgataataacaatagcaatggtaagactataacaaagattaataggaaaagctaagtaaaacaatgataacgcgggaatttaaataaagcggtaatacagtaattttaaataaattaatttcaaaatcatgggattcaatatgctcaagaatgatgtgacttgctttgctccgatagaacagtcttctgaaccttcggcgacgaacacgaaccatgctttgggaacgtttggaacgacaggagctacttga

SEQ ID NO: 29937 - DNA, 6307 bp, Oryza sativa
  unsure (1)..(6307): unsure at all n locations
tctaaaagaacatgaactagggaggttgtcaaaatatattatgagcagaaagcaaaattgaaaatatttctcaaacataattgccaaagagttagcctcacaactgattgctggacatcacagcagcaagaaagttacatgattgtcacagcccatttcattgataatgattggaacttacataagaagataattgccgttttcaaggtcaaaagtcataagggggaagaaattgggaaacacttgcaaaaggtgttgttggattgggagttagacaaagtaatgacagtcactgttgacaatgctagtgcaaatgatgttgctgttagttatttgagaaaacaaatgaacaatttgaatactagcattgcacaaggaaagtacctacacatgagatgtgctgcacatattgtgaatttgattgtttctgatggtttgaaagtggtggacatttctatcaagcgtgttcgtgctgctgttaaattcataaaaaatggtacggcaaggttggtgaaattcaaggagtgcagaattggagaaggtggacagcaaggctttcttgaaccttgatgtgtgcactacgtggaactccacatatgatatgttgaaagctgcctgcacatatgagaaggtttttataaggtatgcagaagaagatttggccttccaaatagaattgcttggtgacaaaggtcccggcgttcctggtgagggtgattggaggctgcaaggaagacggctgactttctaggccattttgctgatataactctccatgtttcagcatcactaaacgcgactgctcacaactttttccacgagattgcagatatcaatattttcttgcttgggcgaaagaaaagagatcgagcgtaaggaatacataaggtagtcatggttatattcgagctagttgtgtactcaatgtcaatgcaattataaatttaaattaaattacagggccctgcaatgttatgttgttcgagtcaatgaaaagtgcatatataagggacagtcatctacaaatggatcagcactgaagagtgcaacggattaaacaatccatgcaatttactctcataatgagcttatctaatgtatacatatccattcattaaagctattcacatgggatgactataaaacatctctctcacctgctttcttctcgattggtttatttccttctaatggagcaaagttacatctctttcacctcctttcttctcgatggtttgtttccttctaatggagcaaagtttctgtttgctataagaagcacttgagctatcaattcgccgttattctgcacatgtgaaaaacacatttgttgagtcatcacataaattcaggcagcaaacaagagtcattctgacctgacatatgcagactgacacatacaagagataacaatttataattgttgccatgtttatctttacgatctgaatatgaaataatagaagattcagatgcattccttttttgaattttcagaaagtttaaaagaataactctgttcttttttttgaataaactgcaagtttgtttgataagtttccttgctatatacaaataatctccaatatgagatctttcatgatatccaaacctaaacaattaaaaatcagcagcctctcaattagctcctagaaaccacagtccagaatagtacactgaaacaacatggaaaacgttgctctgtttttcctaaagtaattatttagtaaaagcttgtactgcttcttctttaaacagtccacaataattggattgtcacatgctacagctaacaaattcaggggagaagcttcgcgacagtccctgaaagagaattttatggcagaaaaggaaaaagaaaatcataatttaccctgaaagcaaatgcagaaaagttattcttttaacaagcctgcttttcggcagttagtcagttactggccaggttttagttggtggaagtgcacataaagcttccaaatgcatacataggaggtgtattaatcaatgaccaactactatagctacagcctaatatatcccagaaagaacacaccaatcagccaatctcatttcaaaatgactgtaagaattcaagcatgaagataaatgccggcagtgatatgatataaaagtctttccccttcaatttgactacacagcaaatctatttcatcagaaattagaaagaaaacccattagatttaactgagaacaagtactatgccacaaatatgcggcggtgtgggagtggacgaccggcgaaggtcaatggcgaagaaccggatctgacagcaatgtggtgactggcggtggcggtgaatcgtgtacggctgatggagggaagctagtcggcaacacgagtattggaaaaagggatgagcggaacgaacatattcgagaatcaacctcgaggtcgacgatcggcgggcggcaatgggcgatcggcgggcggcgtggtcgtggtcgacggggatcgaccggccaggcagcgatggcgcggccgcggaagacggcagcgactcgtggcagtgtcgaatcgggctatgcagcgcgaccgtgagggcggcgaggcgacagtgatctagcgagagatggaacgcgatgcgaggggacgtgttgcgggcttgcggccttgcgggggatttggcggagattgcgtcattggaggggatggggaggaaatcgcggcaatactggcggcacggatgcggagtgggagagaggaaggtgtgggacaggcggatctgggagggaggagaggatgactttagatcgttggatgtgtgatatgatgaatgatgaatgagtaaaactatttgttgaactataaggtagactacggagagggctctgggtccacatgtcattgggttagtgttttagtctctcatctgagcacttgggtttctagaaattatgcataggttctgaacatatttttccatgagtgatacttctacagtttggaccctatgtttcttgctatttatgtgccaccgtccttcttcttcctccagaactaacgatagacagggagagggatggcagttcgtgatggttgcggccatggcgctacagagggcggcgtctctattaggagtaaggagatggtctagggactacttcaaagcttaccctgtggtgtggagattatgggtaccccatacctacacggcatggttatccgactggttataggggataacttatatctatggaatatgtaacagatcatgacttgagtattacgtttccctttatattatggaatggcctaaagtcctggtttgataagattgtaaagtagatttaggaaaccaataccgtattggttaaggtttctatcttgtaatcatgccccccctcctatataagatgggcaggaggccctctagggggcatatgagcacatatgatcgttagatctatactacacccggcggattcaaatccccaaagaggagtagggtattaactctcattaagagggtctgaacctgtctaaatccttgtctccgcatccattcacttttaggtctcgtgcgctacccccttttattattgccgaattcatgtttcgacatgtggctagttggggatgaggcgacgtggagaggtccggcgatgaggctctcgatctggcagtgagcggcgtcgacgacagcagtgctcgggtggatttttcctgcaactgattgagggtgtcgtcttagggaggtcctgggagtgtgatggcacgagggactgagctttagctcaccgaggcagcggatcgatggtgagggcggcggcagcgttgttctagccgacgcgaaggacgtcggagaggcgtcgttgcccctgcggcgttttgtctgaggacaagggtaaaatgggtttagtgagggatgctaagaaagatgacatgaacggtttctcgtgaggctcaccagagggaaatcaatggccacatgggctttccggcactgacatgggcgctcgcgttccagccatcccaagggacttacttccctgggtttgcttggaacgtgaataggcgagctaggagagagtgttggagtaaggggaggcttcaaggtggactttggacgcggtgctcgtgagctcggtctatggccttgtctctggctctccgttctcgagcagcgcggcgatggaacaggacagctgggtgtgtctggagctttgcttcctatccagaaagagtaatggaggaggagatttggttggggcgcggagatttggccggaacaacttcgtctactctcaatggagccgtaatcatgtgacgattggggagaatggcgcgaggtggacgatgggtatggagacacggtgtctaggcccacctgcagcaacttactacaacaaatctgggctactatgacgattacctgatgacagaacacatatctgtcataaacagaggctgtttatgacgactgttcacaggatgacaactgtttatgaccaaaccatgtatctgtcataatcagcgtcacagtatactctgcatgggctctatgacgatagcacgatgacaatagtggatcgtcataaaatatagaactattatatttttagaaacaaacaaaatattgttatactacattgctaccagaccacaaattgtttgtcctaggtggactcttcttgtctacagcaattctagtctcttattttaggatttaggattgaagtcatctctactctcattttatgaatgaaaaaaaaatcaaaattatggcgtttcattttatgattgattgaaaaaacttaaacaacagactaaaatggctataaattggtctaaataattctttgaaatttttcatgaattttcggagtacaataactaattttaataccacaaagttcatttaacttattaaaataaatagaaaacaaattaaaattcctctctatgtctttgggccttttttggcccaagtatttactctctccctccctcagcccgcagcctccctctcccttctcctcccttttcgggccgccggcccagcccttttcctcctcctttaccgacaagtctattttacctccctcctctcaattcaaataacttttcgcgtagtaaatgatttcaaatgaaaaacttgtcaacaacaaagttgtataacttatcaatatctacaacttttgttttggtcatttttctatataactttttttcaataatttgaattcgaattccaaattatgacaacttcaaatactattttcaaatagtaaataatttcaaatgaaaaagtcattaacaacaaagttgtataagtattaaatatctataacttttactttttcattttgctatgtgactttgtttcaataatttgaatttgaatttcaaattataacaacttcaaacaacgttttcaaatactgaatgatttcaactgaaaaagtcatcaacaacaaaattgtataactcatcaatatctataacttttattttggtcatttttttatccaacaaagtgatagtaacattgttcacagaaattagatatctctcttacagtttataaaaccatataagagatatgtaaattttatgaacaatgttactatcactttgtcggatgaagaaatgaccaaaataaaagttatatatattgatgagttatacaactttgttgttgatgactttttcagttgaagtcgttcaataataaaaagttctatttgaagttatcaaactttgaatttcaaatttcaaaatgtacaaataaagtcagatggagaaatgaccaaaataaaaaaaattgcatctcaatgatctgtacaactttggttttggtgacttttccattcgaaatcatttattaaccccaatttttgttcgaagttgtcaaattttgaaaattcaaaattcgaattgttcaaatgaacttatttgtaaaagggaccaatacaacagttgtagatctcgatgagttctacaatttttctgtttatgacttttgcatttgaaacataaaaatcaactaaaatcaaatttaaagttctcataagtttaaggtgaaatgtccattttgtccatgaaatttcgtaactaccctcacaccagggacagtttggtaattcgcataggattgcttcttatccatatactctgttctcaaaaccctagccaaactccatccatccactcacccgccgctaccatctactcactctcctcctccatccactgcgccgcctgcatctccgcccccagccacctnttcgcccttccccggctcactcccccacccagggaaggacagtggcgcgcggatcc

SEQ ID NO: 29938 - DNA, 2468 bp, Oryza sativa
taattcgcataggattgcttcttatccatatactctgttctcaaaaccctagccaaactccatccatccactcacccgccgctaccatctactcactctcctcctccatccactgcgccgcctgctctccgcccccagccacctcttcgcccttccccgcctcactcccccacccagggaaggacagtggcgcgcggatccgccgcctcccctcctcgggagcgacggcggcgcatgaatccagcggcctccgtcctcgggagcggcctggcgtgagcgggagcgccggcagcacgcggatccgcccgcctccgccctccggagcagcggcggagggcttaggaaggcgggagcgagcggctacggtggcggcggctgcggcaacgatggcgatggtggctgcaacaatgacgacgacggcgacagctgcgacggtagctgcgacgacgacgagcgtcggcgcctcggcacaggagctgtacgccgtcacggcggccagcgagtcggcgactaggagcactggaccagcaatggttgcgccggaatgccaaccaaaggtccagctccaagcgtcgttcactcatctgtctatgtgcacggctgacggctggtatattcagtgagtatttctaggatctctctctggtttggtttttctcttagcagagagtgagattaattaaaaagttgaaacctagaatgagtaaactcagttcagttcaaggcatatttttgtgatttgtatgcagagaattgagatcctgtgtctttacttcctgggtcaattagcaatgagtaaaaatgaagcgctgcaattaggaatgattaattatattattgtgaacaagttttttatttgactcaactatactatgacatgtgggcacacccatgacaaaaatctgacccttgttttctgctaaattcaaatgcgctgttaagtttaagtacactgggtttgtttgcttagcttgttcttctgatcgtatagtcactagaacaggtgctttactggtacaggtggacctaattacttttatcataattcatgagtgaattggaggcattgcacaactcaaattgacttgaggatcataactcaaattgacttgaggttcatagcttggacaagtgagcaatccatccaaggaaattaactaactgaaccaaagggtggaatttgatggcaccgcttcttttgggctttctgttttgcaatgggcttcctgataagttctttcaagaaaaatgcatggttaactaattatagttatgaagatgtttgtgcctgcccaaccgatcagagctgttgtttactcctttgatctctactatgtaccaaacttacctcatgcattcttcttgaaaaacaaacaccttttttttgttaatgttaggtgtggtagcattaatctgagctcagtttaatccaagtatatagatcatgatatctccaaggaagaaattttttctagaagaagtaggaagggaagctactgctgcatctccacctcagtctgtcgttcataaagtataaaatgtcactggtaaaagggaagcatcacctcctgagaagaaaggccatggctagcatctctctgactccttttgtaatccaatataatgtctgtcacagaaatatccctttaagaatgtaaataagatgtgagatttttactaaattggctataaacttgctcaaagagtacatgttctttaaaatcatgttccttagaaccctactcaactgacagatttgcctagcaaaaccggttactagtcagaagcttctgtaactctaatgcaatgttgtgatcctttcttctgatcctttcttcatctgtgttgcagaatgtgactacaggaatgagggcctcgggactgcaagatcaggtggcgctggtgagcatcggcgggtggacccctaaccagggcgtgctgcagccggccatcatcgtcaacccttccttctcgcgccacagacggggcctttgccctgggcggccatattgggcggcgtcaatgcaattgagcaaccgcactttaagtacagaactgaagccaatggaattgagcactactgaacaaggcaagtaacttggattcttgttcttttgtccttatatgtgctatgcttcattcatatcaagtgaaggatctttttattgacacatgtaaatgttttatgttaggcaccctcactggcagtagacaagtgcagctaagggggaagagcatgggcactgcaattgacagtgagcccactgcaattgatctctttaaggagttgcattgcagcaaaactaaaggttttagtgaacctgtgaagaaagctatagtaagtattaaactattacttcttctttccttcttttattaagtaccttatgcaatgaacctttatttatataataatgcaaaactgaaaccttgctttgattgctaggaggatatgcatgcacaggaaa

SEQ ID NO: 29939 - DNA, 1946 bp, Oryza sativa
aaaaaatatttgggccattgtaattgaaaataaaaaaagcccatgctatatgggccgaatgtgaattgccacgtcatttgccacatcacccgccttgtcatctgcaacatcacatgtcatcgtacacgtggcgttattcggttcaatttgttatgacgaatttgtctcgtcattcatcaatgacaggagaactatcgtcactgtatcaatgacgatgtcctttggcggcacagaagctggttagcgactcaccttctgtgatgacaaccattttgtcactgcgggtagtcagtgacaggaaacaggctgttatcttcataatgtaatcgtcacagaagcccagaattcctgtagtgttaattctaatggctaggcttcgtggagaaggcttggcgtggtggaaagctgagtggtattgttttcttctccaaaagaagacgcatgccacatgttcgacgaaatgcctacaaggacagggagagaggaagggaaggtgggaaggctgggtggtgaccagggctttcctactggctggataccggggccaaggaaggctggacccagtggaagtgaaatagggtagggtgagagaaggtcaagttgaattttctcaaatttaaatcacatgctcacattatctctttgaccagccatttcaagtgggttactccaaggcgaaatttttggcaaaaatattgtgagtagaggaggtcatgatgaactacatgaaggagaagcaaaggcagaggagttatggttttactgtggtagattttgaaagaggactaagtgatatgctttaattccagtttttgactggtttgactaaataatttgaggtgccaaatgagctgataaaataatgccaatttaattgagggtatagcataatgtatagtaattttgtgaattttttcaggatttttgcacacacatattaattattaaaattattccaagctagtttccatgcatatgaatgaaatgacggatgcatgaaaaatccaaaaacgagcaaaataatctcaaaagacagaggggaccccatttcactgattataatatgtattcaaggttttacaatttttgggtcaattacaacctaccccccttaaaatgaatctcgtccccgagattcgctaggcctaggaaaagaaacttaggaactcggttctaggacggtcctctcgctcccatgttgcttcgtcagcggtatgattgctccactgcaccttgaccatcttgattgtacggttgctcaagaatgcgaatcgggtattcccgataagaaagacagctgagagacatggaagacattgtgcacatctgagagttgtgatggtagctccaattgatatgctacttcgcccgtcgagcaagtatactgtatggatcgatgtaacggggagccaacttgccgtgcacttggaagcagcaagtgccccgcagcggcgagaccttgagatagacaaagtcacccacctcaaagctcagttcatggcggcgacgatcagcatagctcttttgacgcgattacgcttctttgagccgtttgcgaatcaattcaacatgttcttccgcttctttaataaggaatggtccaaagaattgcctttcacctacttcagaccagtacaaaggtgttctacaccttctcccataaagagcttcaaaaggagacatttggaggcttgcttgatagctattgttataggaaaactcggcaaatgccaagcatttctcccaattggtgtttaggacaacacacaagctccaagcatatcctccaaaatttgatttgtacgttcagtttggtctccaatttgagggtgaaaagctgtgctaagaaatagctcagttccaagtagctcatgcaaacttgatggcattatcggccttgatttccccagtaggcgtcgcttcaattcacttgatgaatttgtcga

SEQ ID NO: 29940 - DNA, 3843 bp, Oryza sativa
cctagaagttcaaagtgtatttaatggaatttgattcgggaatttggaattggattcaaagattgtaatggactataaaagggactgtagactttggtattctgggagttatttgtggacttggaatgagagatttgagatctttaatggcacatacactaatattcaaataagaaccaaattttgaaaatagttttgtatgtaaaataggtttttaaaagaaacggaaaatcaggatgttacaaacataccccccttaaaagaatctcgtcccgagattccgctgctaggagaacagctctaggtgctcagctcaaagacgatcttcgcgttcccatgtggcttcatcttctgagtgattactccattgcaccttataaaactttatggtcttccttcttgtacaatggtcctttccttcgagaatccgaatcggttgttccttgtaagtcagatcgtcttgtacgctgattgcctctaagggaacttgctcttctgggatgcggagacatttcttcagttgagacacgtggaacacgttgtggacatctgtcagtcctacgggtagatccaattggaaggcaacttctccacgtctggcgatgatgtgatatggaccaatgaaacgtggtgccaatttccctgccataccgaatcttttcgttccacgtagggtgatacccgaaggtacacgtggtctccttcttgaaactcaagatcccttttgcgattatccgcatagtcttctggctggactgggccactttcaaacgttctcgaataatcttaatttgttcttcggcttccttcagaatatctggtccgaatatcttcttctcatccacatctgtccaacagagcggggtgcgacacttgcgtccatacagggcttcattggaggccatttgtatactggcctgataactgttgttgtaggagaactctccatacggtaaacagaggtcccaagtacctgcgaaatccaatgcacaggctctcaacatatcttccaatacttgattcactctttcagtctgtccatctgtctgaggatgataagctgtgctgaaattaagattggtgcccattgcttcatgtaacttcttccagaagtgggaggtgaactgagtaccacgatcagatacaatcttcttcggggcaccatgccaacaaactacgttggtcatatacaactcagctagcttcttacctgaattggttgtcttgcagggataaagtgggcaactttggttagtcgatccactattacccacatggagtcataacctgcaggtgttctaggcaatccggttatgaaatccattcctatttcttcccacttccattctgggattttcaagggttggagcaatccagctggcttctggtgctctaccttaaccctttgacatatatcacataaggcaacatactcaacaatatcccgcttcattccagaccaccaataatatggcttgatatctaggtacatctttgtacttccggggtggatggaatatgcggattcatgggcttctctgagtatcaggtcttttaattccttcttgttgggtacgcaaatgcgtttaccgaacaaaacaactcctttttcatcaatggaaaagcttatggctttatctttcttcatattttccttgatagtattgatttcttcatcactttcttgagcttctctaatttgatcttctagggttggctgaaccacttaggtcgctagggttcccggcttgaccaggtttattcccatcttttccaattgttgacggtcgttatcgatcagtttcgaccgtcaatactaccaaaataaaggagaactagtgatgcttgcaatgcataaatttgttagaacaataatattccactagtattaggtctactaaccttttgcagagaatgacaataaagtgaaggagaaatgctacagtggtatgttcgtgcgcttgcggatgaaatctgtaaccataatataccagaagtatttctgcgccattactgggaattatatttctagtaatgtcgttaagaaataccaacaaccacacaaacatgatacaaaagacacatctttattatatcgataatatttacattattacaaattcacttcaggcctgacaatcaaaaataaacagcagcggactagcgggcctacggctccatcttcaaaggcgctcaactagggtataagccaggactccacctaggacttcttctcaaagcttctcttactgaacggggggaaagatagagcaagaatgaatacaaccacagtacttagcaagtcacaccgggagatgcatgattaatgcaagggggtacaaggggtaataataggggttaggttttgcagtaaacaacatttgaaagacacttagttgcccaaagctattttgtaaaaacgatcctagagctacacaatattattaatcaaggccgtgaacccacatgaacctgcctaacccaaggcttacgatgattcaaaccgaactggcaatccgacctgggtcctagctcgtcccaagccaacccaggccaaccattccacattttagttgttaagcaagttttaagagttaaaccactaacttgggtacattgctaggcttgcccataaccgagagcgcggttattcgaatagattatactctgattagaggtgtacatctttacccacaaaacacatctttactctgcattccaaggccttggaacgcgtcgtaaacatgtcacataacccttcacccatgctagccgtgaacaaaagtaccgacccaaccttgcctacggccggtatcccgggacaggcaggccaggattgagcccctagcaacaggacctagaccgggtgcaccacacacataggggtgagaccacctgcgtactagtctagtgccacgacatctcgactaacggacaccggcccgtgtagccttcatttgcctagacatctcgattaccgagccgtaactcgcgtagccttcatttgccttagagatatccatcgttgcaacgacttcatccatctctatccgtgtccttttgttcaggactagactgagcaccgagttaagccttacccattagacatgtggttagtacggtagtgctttgcaaccgtactttgtagcagaggcccgaagaccggtccttatggtagccgaggtgcttctagcaaaaccatgcacctcgagcccagcctaaaaccattttgggagttttgaatagagggggaaggtgtgtgttcaattccatcacaagccaaccattccataatgtccaaatgatatgagaactcccaaagtctaaagttataaaaccatctagtgttgcctaattaatcagcgaagcatctacctaaattcatactagtggaaccattaatagagtacccactagttggggttttgttttcctagggtaagcaaggtgataataaacaatagcaatgatacggctataacaaggattgatagatattgctaaataaaaccatgataacgcgggaatttaaataaagcggtaatgcaataatttaaatcaaaatagttttataaactaggattcaatatgctcaagggtgatgcgacttgccttgctcagagagaacagccttccgaaccttcggcaacgaccacgaactgcgctttgagaaccttcaaaacgatagaagctacgcgaagcaccaagcaaagctacaagcctaaaaagaagcaataccaatacataaaaagaaagcacaaggttctttaggttataacaaacattaagagacttgaacgggtcgattcagagttcgtatgaccaagatatgatcatccaaag

SEQ ID NO: 29941 - DNA, 6835 bp, Oryza sativa
tatttaagaagctcactctcttcatttcaatacacacctcaagcaagagctctctcattcctctcaagtttagtttagtagtatctagctggtgaatagaattagaataggaatcaggagtccgaagccttcggaagagttcgggtatggctctagtagctttcctttcctcttttgtaagctttgtacttttattagaatactcttctaaatacatttatggtactgggatacttcccaagtatatgagtacctactttacattatgttcatgttatactgagtatactgctagcttatctgggagatgctttggtgcggttatagtgtttgctgatgcaattactctatgtcatgacgatgatattagagtagtatctggtagtttagacgtggtgtctagattacgggatatcattatttggggttatatattgcggatgagaggtgggccactgatggtgacagctcagtacgggtattcctccgcgcctatatataatcctaagttattttcctggggagggtattccttcgtatttagcctcggttggatggttatgacgggctgtcgtaaggaactcggtagtcagggatggcttctcgaagtaccaggagggtatcggatagagggtattagctagtaaaccagttaactagaatgtatgtatactatgtatattagaagtataggaatagattctctttctcttttctttccacctagcttagattaattattatgaggatgagtagtaatgcttgtgtgtcactctacccttggattatcttaacccctgcttagaataagattatcacaagtaatatataagttaatagttgagttctctctatatgatcttcccacgggataaaataaatacgatacctttggaatactctcgggtgaaatgctacaatggtatatctgtgcgcttgcggatgaactctgtaaccataatataccagaagtatttctgcgccattgctgggaattatatttctagtaatgtcgttaagaaataccaacaaagctatgggtagttggagggtaaatggctggtttggagtttggatagcaggctggctggctagggtttcatttgattaagccgatatcgaggtaggacgaatattggctggacaaaatatagattttgaatttagatgaatttaggtccaacattcactggaatcggatttacggtttaggagatatgggctcctaaagaataggatttgaattaaatctagaaaatacggaaaggtactttttatgggcccacctgtcagtctttttcccttttctttttctttctcttcttcttcctcccgtctcttccttcttcttctcttccagcacaggcaaacagggaggatggggaggaggggcgccggtggtagagcggctaggaggtggcgactctggaggccagtggtgttcccgagcatcgcgcatcctgggagggtggtggccggcagagggagagaagggtatgtccggaacgggctaggggaaaagcttatctccggcggcaaggagaggtggtggtggtggcttatttcgaagggggaaaggaaggggaagtggggaaatgggtttgcctcgtcgaggcgaagctagtggcgcgagggttgtgccaatggggcaccggtgagggagatcgaccggtggcggcaatggccggatatggagaggagagagaaggagctcggagaactcgatggtgtggagggaaaagaggcgacctcgccagtatttataggcgtcggaggtcggttcttcaagcggttcgcagaggagaaagatgaggaggatacggcgccggtggagtggagaagaaggagacggcgccggctgtggcctgtgattggtcggcgacggtggcggcactactttgcggcgacggcaaggcagcggcttggcgtgggcggcaagttgacggtagcgacggcatgggaaagaggacgacggcgccggcttttgctttcttagcggcgacggaagggagttggcggcggcgtgcgcgtgtgcaacacgtgcaccagcaagaggaggaagggcggctcggctggaggctgggccgtcctaggccgaagaaggagatgggccaaaaggaacaatgagaggagtttcggcccaattacaaaaaggaagaagtctaatttgaataattgatttggattgctaggttttgcaaagaatttgaattcggagagaattcacaaaagagatatcttaatttatttgagtgcaatatttggaggtggagtttgagggaatttatttggaagcactcaaataggaagagaaactaataatattcctcaaaatatttttggtaatatacaagggaattaattgaggggaatagataggatttgaattctaaaattggtattatgtatatttgtggttaaaaggggaagttgagtgaagagtataaattggaattttcttagcacaagagcaattactcacaatatttgcaataatactattcttgtgtcgaagaggaaatcaagccacaaagattaaattggtggctagatccaaaggaggaatttggatatttggattgggaatcaaaggatgggtttaagatcaaaggatgggctaacaattaattccaataaaattggaattgctttggtttaggttttagcacaatataggaaggtttcttggaccaaattcataacagtaaaaagggtttttcaaactaaatttaaataaaggatgttttaggcgaaagaaggttttagattaaaaccaaatcaaggaatatttcaagataaaattttaaatgaaaatcacaaaggcttttgaatatcaaagagggattttatgtaggttagctttaggaggtctcgctaattataatgtcctaggtttaaagtggttattaaaaacataagacccgacatgatgcaagattagaaaatagtaaattttcagaatgttacattcagctacattttgtgagcaaagtcgatgcacgtattcaggggcggactgttggtattttttaatgatgttactagaaatataattcccagcaatggtgccaaaaatactcatggtatattatggttacagaattcatccgtaagcgcatggatataccattgtggcattttacctgagagtattcaagggtatcgtatttatttaatcccgtgggaagatcatggtagagagaacctgactaataatttatatattactcgtaataatcatagtctaagcaggggttaatataatccaagggtagagtgacacacaagtagggagctactcattctcataaaatatctaagctaagtggaaagaaaagaaaaagagaatctattcctatacttctagtatacatacatcctagttatccgatatactagctaataccctctatccgatgccctcttggtacttcgagaagccacccctgactgccgagttccttaggacaacacttcatgaccatacaaccaaggctaaataaggaggaataccctccccaggaaattaacttaggactatatatacgcacggaggaatacccgtactgagctgtcaccatcagcggcccacctctcatccgcagcatataaccccaaataatgatatcccgtagtctagacaccatgcctaaactaccagatactactctaatatcagcgtcatgacatagagtaattgcataagcaaacactatacacgtaccaaagtatctcccagataagctagcagtataattagcataagatgaacatattgtaaagttggcattcatatagtcgggaagtattccaataccataaatgtataaagaagaatattctaaataaagtacaaagcttacaaaagaggaaaggaaagctcctagagccatacccgaactcttccaaaggcttccagactgcgatttctactctattcctattccactagcttaagactactaaactaacttgagaaaatatgagagagttcttgcttgagatgcgtgagtgaagtgtggatgagagctccttttatagcctcccaatgacggttgtggcagttggaaaggtcggtaatacccaccaaccgtcattggggagccatcttagccgtccaagagaaacctggatcgaacggcgctgcgggggttcggccgaaccatgtgtcgggccggcctggcccaaaatcggcaggtggcctcctccgttgctctcctatgcagacttgtgaactttggcccaattggtcatgtgaattctgagttctttgcccattcatacataagtctgattctcgacatcgtccaattgatttattgtctgatttgatgtcgattctccttcactttatggttattctctacaaaaggttagtgaaccaaatactagtggaattttattattctaacatggatatgcattgcaagcatgactagttctcctctattttggtaatattgacgggcaaaactgatcgctaatgaccgtcgacaaaacccaccaagcttgaacctttgctcgtcccgagtaaaggatgaatggaacaaagacttggttgctgattaaggagtttctactatggtgtatatctcaaaggtacaagtgcaaggtatatatactctgtctctgattaaataatctttggcacggtggcttacccttacccctgattcccacgagacactgcttctcctttacttgggcggtggaaagatagaacagcaactagagcacaaatcacccaatctttattcaacttttattccagaagttttcaaatgattttgcaaaagaaagccaagttcctcatatgattaactcagtctctccaagtgtatcaatatgaattcctcaccatttttgcctttttgattcctactctaaggtttgatatgtggagctcggtagggatcaaacatggcatacttgcattcacatttattaccaaatcaaaaactcagactaaagaaaatgattaaacatactcaagatcaagatcgtgcaagtgtgtgtgtgatataccctgtttccacaacaaaagtgaaaataaccaaggttagcctacaaagggcagtgattatacagtggtaaatataaagtattagttctagtaatctctattatgaatcttcctcggcaacggctccagaaatgcttgttggtatttcttaacgacattactagaaatataattcccagcaatggcgccagaaacactcatggtatattatggttacagagttcatccgcaagcacatggatataccattgtagcatttcacccgagagtattccaagggtatcatatttatttaatcccgtggaaagatcatggtagagagaacctaactaataatttatatgttacttgtaataatcatagtctaagtaggggttaatataatccaagggtggagagacacacaagcagggagctactcattctcataaaatatctaagctaagtggaaagaaaagagaaagagaatctattcctatacttctagtatacatacatcctagttatccgatgtactagctaataccctctatccgatgccctcctggtatttcgagaagccacccctgactgccgagttccttacgacagcccgtcatgaccatacaaccggggctaaatacggaggagtaccctccctaggaaattaacttaggactatatacacgcgcggaataatacccatactgagctgtcaccatcagcggcccacctctcatccgcagcatataaccccaaataatggtatccgtagtctagacaccacgcctaaactaccagaaactactctaatatcatcgtcatgacatagagtaattgcataagcaaacactatacccgtaccaaagcatctcctacataagctagcagtataattagtataacatgaacataatgtaaagttagcattcatatactcgggaagtattccaatccccataaatgtataaagaagagtattctaaataaagtgcaaagctttcaaaaaaggaaaggaaagctactagagccatacccaaactcttccgaaggcttccggactgtgatttctcctctattcctgttccactcctttaagactactaacctaacttgagagaatatgagagagttcttgctgagtgaagtgaggttgagagctccttttatatcctcccaattgttggtatttcttagcaacactactggaaatataattcccaacaatggcactggaaataatcctggtatattatgattacagatatgatccgcaagcgcatggatataccattgtagcatttcatctgggagtattcgaagttatcgtatttattttatcccaagagaagatatgataagagagaactatactaacaattcatatattacttatatatgtcaaagtctatgcaggggtcagttcaaagggtagggtgacacacagaagaaagaactaagaaccactctcactaaaatatagtctaagaaaagtatcattcatgtacttctagtatacacacatctttagtctatacttgctagtatacagtcatgcaaccaatacctcgtacccagtgtcctcctggtgtttcgagaagccacccctgactgccgagttctttacaatagaccgtcataaccaaaaaaccgaggctaaatacggaggagtaccctccccaagaaattaacttaggactatatacacgcgcggaggaatacccgtactgagttgtcaccattagcggcccacctctcatccgtagcttataaccccaattaatggtatctaataatcgaagcaccacgcttacattactaaatactactcta

SEQ ID NO: 29942 - DNA, 828 bp, Oryza sativa
tgtagattttgatgagactatccgcagggaatttagatgaacatgatgggtgagttatcgtactttttgggattgcaaattaagcaaacacctcaaggtacttttgtgcatcaaacgaagtatacgaaggatcttttgagacggttcaagatggagaattgcaagccaatttcaacaccaattggttctacagctgtgttggatcctgatgaagatggtgaagctgttgatcaaaaggagtatagaagtatgattggatctttgttgtatctaactgcttctaggccagacatacaatttgctgtgtgtttgtgtgcgcgctttcaagcttctcctcgtgcttcacatcgttaagcggtcaagcgaataataaggtatttgaatcatacacttgagtttggaattttgtattctacttcatcttctatatgcttaagtggatattccgatgctgattttggaggttgtagaattgataggaaaagtactagtggaacatgtcattttcttggtacatcattgattgcatggtcttctaggaaacaatctagtgttgctcaatcaactgctgaatcttaatatgttgctgctgctagttgttgttcacagattctttggcttttatctactttgaaagattatggtcttacttttgagaaagtacctctcttttgtgataatactagtgctatcaatattgctaagaatcctgttcaacactcacgcacaaagcacattgatattcgttttcactttttgagggatcatgttgagaaggaagatgttgaattgcagtttttggacacaaaagtgcaaattactgatatt

SEQ ID NO: 29943 - DNA, 1743 bp, Oryza sativa
gcgccaccgcttgccgctgctgccgttgcttgccgccaggccgctccgccaagtacatcctccagctcgagcacgactacccctgggacgacgaccccaagtccatcagccgcctcatcttccagcagatgatcctcttcacggccgccatggaattcgaggaattcaggggagacgtggacttctgagggaggtttcgtggggtttttaggccagtgagggaccggctggcggcgagaggagtgcaggtctgttgggttgccgtcggcggctgcggcgagggggttcggaggccggccgctcgcttcgccactgctgccgccgccgccgcctcctgctgccgccgccgccgccgcccaccgctcgctgctgctactgcagctcgccgcccgccgcttgccgccgggccactccaccgctgccatcgaacaggaagaagaatggagaagaaggggaggaaggaagaagaagggcaattttgtccaatcttttttgtaaatgcatccaaatggtaaatagtggcatgtatcaaatatgtgtaaaattataatggcatggttccaaatacttgaatactagtggtatattttaaaaccagcatatttttaatggcatggatctaattaatcctatattaaaagagagagagagtatgatctattatacgagaaaagataagggatctagatcatactctcttggtcagcaagatccatcatttgtgcgtcactatgaaaaattgaccgattggttcaatagcaaagggaaaatgtcaacaatgataagaggagccagagaccatccttaatttcctggtccgtcgaccacatatctatcacatctaccctttataacttgaatgatattttagacatttcttaaaaagtatctacttcaatagcatattgtataaaaagaaaaagttaatagcatattatagagggagataaagtagatggcaaattgttaaactagagtaaactcagtggtatataatagattctcatagtaccagctgaaagtacagtgaggtttgccaagaggcccttagaagatggccaaattacacttggagcatataaaatgcaaaggactctaaaagaaagagaagtacaagtccttgactttgcagtcttcgcaatggtggcagccagattgacgagggtgacgacaacaggatcgtagaaaccgtggtgaactccagaaagtaaagcccagacacgaacccaaatagggcctctcaaaagtggaggtcgaggcaaccttgacaagcagtgaataatatcaattgtaactaaaagtgttgtcattggaaaccccccccccctccctcagtacaccaatgaggagccccggaagtaaaggagggtgacgggccggagagaagggtttttttttccaacttgctaggagctagttcgtgagatcttccggtagtaattttttttatagttcttaatttacaccattgagattgccagtcgagttgagttcactgataatgtggcctaataggtgagttcgaaaaccaaaatgatcaagaggcaaactttatggtagattccgaaaaaaatagaaagccagtagtggtcaattaaccctcgagctaatttggtcccatttcctatgagcatatctataatctatactactttaaaagccagtagtgatggtggcattgagactatctccaccacttccatctaacatgtgggacccaatagtagtggcaagaggagatgt

SEQ ID NO: 29944 - DNA, 664 bp, Oryza sativa
tgtccgatacaggaatgtcacgccgctttcaaactagagtctacaggaatacacgatcgaaaattcagataacaaacctgatatatattatacataataatgagatgggagctacaagaatcatctgcgctaatgtttcaccaacgctagagctaaagaatatgtttcgaataaacagaataaactcataagttaaacttctgaacaactgcctccatccacgcacggacagccaactaggcgtctaggccaaatcaacatgagatgaacttgcatggtcagaattgcctgcttccaccttagaaaccgcaagaatcaatcactgtcgtgctcagcatctgcagaagcatatggattttattgagaaaaagagatatggaatcgcttggaatgcgaaataacactgaacatgctgtaaatgccactggatattcccctggatgcaataactaatgagattataaatgactagctggtgacagtgaaattgaaataccatgtattattgaatcttaccatcagcagatccatcgccagcttttccaacatcattgtcaccttcatctccaccctccacattcacctcctcatcattgtcatcttctgcgtcttcttcgtcatcttcatcactatcagctactattttaaggcgtgggcaggggta

SEQ ID NO: 29945 - DNA, 1175 bp, Oryza sativa
cgagctctcttagagtttttgcttgtcttctggccagaatccttatgagattcagttttactagttttctttgtcccatttgcaggttcttgaagaatctgtcacacagaaaattaatgaaacacaatgagttcgacttcttagtccaatcatcaacatgcatctgaactaatacatgtgtgcaccgctgcaccctcaatccaaactttaaacttacattgtctaattccgtcgaaataaaagacttgtaagcatccaaagctttcttctgaagcttgagatcttcttctaaagtccggcgaactccttgtaaagtaatagttctgcattgctttcatattgtgaatacatgctgaagctgactagccaaatgcaatatgagcaggtaaagtggacatcgaacatgcttttggtggcagcaagcatccgtatggcgcagaatccaaaatttaaaccagaataaagtaaaatgctgaagtaacatgattggacatacttaggaagtaaccacatccttagggggaaaatacgatggtacgatttaagtattcttacaaaatttcttgccaaatgtccaaataataaagctagaaactcagatattctagaatagactctttaatatgtgtcgtttataagtcattagcacctaagaattcatctcaagacgaacacatacaatataagcaaattcctatatttccgtttatcgccaattggttcataactctaaagaactgcatcacatatgatcatgtcctatataatattggccgcacaccactcttaacaacaagaatgatatgttttaagaacatataggcaattttctttgtaaaactcaacagtttcaatcattatgttccaaatgtatattcagatcagtgcacacaactgggctcctgttcatttttagacggtctacattaagaatgactcaatggccttttcttttaccagctaagacccatatcccccccccccctccctcggcatggccccccacaaatttgtcactcagaattgtataagtgaactagcacgcaacgaaatctccctgctcaccgcttgcatcacacaatgggagcaattatctctactttcgtcccttattcatatgtttcaccgcaagatgtggaacaactaaatggtttctctattattactcaatcagg

SEQ ID NO: 29946 - DNA, 553 bp, Oryza sativa
tgcacattactatttggttactataccttataggcaaaagctaaggagaccccaacgatgaagaggaagaaggggaagacaaagtccgctagcgtcacgccatcccatggagagtggctgatcgccgggacaatgccaccaacatcatccacgaggatcataagctgcaatattgtaggtgttttttagcatgatctacagacgatatatatagtaataactttaatcaataagttttatttagggcccttggaatgtaccgataggtaccaaaaaaatatcacaattttgtttgtcatttggggagttcaaaaagtagcaagaattatgggagtacagtaccagatagcacatcacttagtatctccaagaccgtaaaatgtataaattaactatatgtcaactaggggaaaaagctagtgtttcaaaagaaatatcttctactccaggtaattaactaaggtgttcatgcatggaaggaagtggactggttgaagatatactgtgcaagtactatatatgattctttttttctcagatcaaaagggcaaag

SEQ ID NO: 29947 - DNA, 1682 bp, Oryza sativa
cagaaagagtcttgatgtaattcggaggagataatttattcatttggtaggaattactagctaaaataaaatatatgccacatgtcctttttcttccatttatccatggggtagaatttttagattccagttttgtgtcattgtagattgatttttatgtatcaatctaccaaagtatttcaaaattctttagacctgttgaggaaagcacagataagagaagcactgtaggagcctctgaatatttggatggcaatcgatacaaataagacgtgccagcaagttcagtagtcaatttataatccagagaacagcaaagcaatgtaacattagatggtttgtgtgaaccaaattgtacacaaattcttcttgagcgagtcagtctcaagttacactagtcaagtagtcagcatcacctgaaaaaccgaaggctctacgggttcatttgttcagcaattcctgaaggagtggtacatgaagtggggaaacgaaaaggatgtaaccacagataggtacatatttccttctaacagcaggatctatgaaggttaggaaaacatatgcccacaggcatttccaaacacacaaccttaatgctgaaccatggggatgaatcttgtacaacttgattactcttgagctgttgcttgttcagaagattggtcaatatgctgcgaccgcacagatgttggtaatgatgtcacaaactctgctatcagctccgagagttcatcatacgcatcctcctggaattccaaagtaatgagaataatattatcaccatactctcattacctcaatttgcaacttagctacacaagaacttcatatacaccaatgcatgaacataaatggagacttaaaatagcagtaatgatgacttcctgtatagaagtacctaaaaaactggctttagttaaataaggatcccttatagcagggaatcaacacatgatatgagaataatatgggcagccaaataagtgagaaggtgaattattcagttagctggtcttgatgtttgcaatgagacgatgggtgttgagtactgctccgttctagagattatttgcatccttagccaatggacacctgatgcttgtgctactaattcttaacaaaacatgatggatcatggtgagctgtatcagaccagcgacattggtatgatgcatagtaaatcactagttaacttaaagtagagcttgaaggccaacctgcccaagcaatcttgcatgactgtctgtagtttgaacctttacatcagctaagctatacattcagcacaaagctaaacactctttacattttgaattgattatgaaaaagggaaccatcacactgacctgaggccattggccacccggaatggtaaaagaatttggcatccggcaaagccgcggccaccttttttcccttattggatcacctaacaggtcaaggaaccggccacaggcccattaatggccaatttcttcctggcttcaaaaaggcccttcaatcctttaggataaaggttttaattagagcctttcaatgattcaaccatggaatcctttttcccttcaattggaatcgccgcacgggggggcctaggcgcaacttcggggccaatttccgggggaagaacagcggaagaagtcccttgaacaatgcgggcaccggcaccaccatgctcccca

SEQ ID NO: 29948 - DNA, 3563 bp, Oryza sativa
ttcgctatttcacttgcataattttattttgtgtgtttttggatttttcgtccatacgttcttacatcaagattcgtgttcttgtacatttaacttaggttcttacatcaatttctacacttaggctgtgttcgggagtgagggtttcccgacacgcaaaacgaagccacgtttaacgtgcgattaattaagttttagctaattttttttcaaaaaaatagatcaatatgatttttttaaataactttcatgtagaaactttttgtaaaaaatgcaccgtttaacagtttgaaagacgtgcgcgtgaaaaataagagggaggggttgagaacccctgcaaatgcagccttttgtagagcactcatgttcgttgagaccgagaggtccagtgtacgagtttcggtaaactctacgtcatccaaaatataccaactgcatcgattgcagcttaccagttaaagctaaaatttaaaatttaaaacttaatttaataaattaacttgaggcaaagagaaaaagtttcatgctacaatctagctaggagtataataatctagcataataatctacttgtttgtttcagcttacttctaataatccagattataataatcctaagctgaatcaaacaggttctaagttaagttcagcctaggtttgaaaacgagaattgaatgtaacgaaatcatgacacaacatataattagcgaaaaatgtgtttcattttcgatataagtgtgttcaaaatgagagtttaaagtaacgagacgagatcgcaagtggatctagtgggtggtgcatgaaaaaaaatcctaacctaatgcatatatactcgtttttaatatagtatgatgtatatttgatccgtttatacttttaactttgttatattctttagggtattttaaaacaattatataagttgaatcatcaatataaaaattctagatatgtcactagatgagatgactaataactggcgaaattgtgtgctaatttagtgtagagcacactgtacatgaattgcattaggcagcttgtcacgttatctaggtacgttcacctcatgagagatttgctttctcattgcaccgtgatgcaaagcaaaaggctaattaagttgcatataaagtagtatatctgaaaattctttccttgttgacatcacatcacaactatcaaagggcactctttatctttagtgcaacattgtttgactaaagcataattaactactcgatgtggtagataattaaaactaaaccatatataaatatcagcagacacaacatcagaactaatcatgaccatgtcagggtttactatttcactatgcacaaatccgcaggggatcggaaatttcaaaatatttttgtcaaaatagaatttgaataaatcttgaacaaatttaaatagttttcgctaaattcaaaaaaaattcgggcggaatagtttcaaaattcccagaattttaaaaattttcgtactgaaattgcaaaccatggcgatgggattggaccgatatttccgaaattcctgaaaatacggaaatttcattacagaagtatcaaaccattgtgtaggtggaccgttttcccgaaattgcaggtttaccggttgctctgacaattgcagtttgatgttcaaagcttaccattcgaaatttccaaattttgtttcggtctccctggatacattccgaaatattgaatcctgatgaatgatgatgcatgcatacgcaacatttcggagtgtacctaccagttgctctgaccatttcgcttgtttagtctagcaaaaacttatcaaatttaaagaaatttgtttgaagtccaaaattgaccgttcaaaatttccaaatattatttcgaaatctttttgattgatccttgcacatggccagaacgaggaccacatcaaccggatggtgctgcgcttcctgtcgccgtcggcgcggacgccggcgctggggacgccgctgggtcaccacccgctggacgcgctccggcggagcatgctgcacggcgagtaccagtcgccgcgctgggggcacggcgcgggcgcccgcgcccaccaccgcgacatcatccgccccgccgcctacgccgacgacggcggcggcgacatcatccgctccgccgtggagctctacgaggccgggatccgcttccggcgcgcccgcaccgacagcctccacgacgtgcggttccgccacggcgtgctcgcgatgccgcccgtcgccgtcgacgactccaccgagtacatgctcctcaacatgatggcgttcgagcgcctccacccgggcgccggcaacgacgtcaccgcctacgtcttcttcatggacagcatcatcgactcggccaaggacgtcgcgctgctgtcgtccaaggggatcatccagaacgccgtgggcagcgacaaggcggtggcgaagctgttcaacagcatatccaaggacgtggtgctggagccggagagcgcgctcgacggcgtgcagcggcaggtgaacgcctactgccggcagccgtggaacatgtggagggcgaacctgatccacacgtacttcaggagcccctgggcgttcatgtcgctcgccgccgccatgttcctcctcgtcatgaccatcatgcagacggtctacaccgtgatgtcgttctaccagcaggcggaagggggcggcggcggcggatcggcggcgccgtctccgatgtgaatggatttgtttgtaattggaatggtttttggagtttttggagttggggttttcgatctctcgttgtttgatttgggagtgagggggttggcttatttgtgttgtgttgtgggtgcctcttctaattccactgatgattatttggtttatattttacatgtttttcatgcatggcttgatttgattaagagcatgttaattttgtcaggtttgaataagtaccaattccacttgtcactaacatgtactacatgctttatgcttataggacatgctagggataaaggctgccttcttttcagctatttgagcttagctactcctcgatttccgttacaacgcttttcaaacgattaaaccgtagtatatttcacgtgaaaattttttatatataagttgttttaaaaaatctaataaatttacccatcaaatatttatatattaatacttaattaatcatatactaatcatgttctcgttttacgtgcaactaattagctgtttctaacgcagccaaaaagtcacaaatagagagcactgaggagtggaacatactcagttaattttgttttataatggaaataatctacatctacagcttctgccataaatctgttcagccaatctattatattattaaaagaatagaaaaaggagtctccacgttcactctcatagcctagaaattctcatattaatcggagaaaaagaaaaaatagagtccatatagaaatacaaattagaaatagatgaaattcgaaattaaaaaataataaatattagaagaggagactagagtccatatagaaatacaattaggaaataccgaaataactgaaattcggaatta

SEQ ID NO: 29949 - DNA, 4342 bp, Oryza sativa
ttacaaataactaaaattcgaaattaagaaaacatgggaagaagagtttaaagtcaatatagcaatacaatttagaagtaactaaaatttcaaattaaaaattaaagaatattgaaagatgtgtttagagtccacatagaaatacaattaaaaataataaaaattcagaaataaaataaataatattggaagaagagtatagagtctatataaaaatacaatttacagaaaattcgaaattaaaaaaagaaatattaaaagacgagtctagagtccatataggaatatatatgtaatttacaaataactaaaatttgatattaaaaataataaataactaacacgtatataaaatacaatatgaatattacacatcagtagttttgtaaagttattgcaaaatttaaaattatgttgtcattttaatatatttgaataatataatgagaaaacatatatgctattatatgagagaaaatataattatgctagccgtgcaatctgcgcgtgccaccatgctagtttaattaaagacaaaatatgtgccttaatcttcttctctgactggagagtacacttctgatgcaaatgtatcatgggttgccaaatcaagaaaggtaagtagcaccataatttttctagttggcatgccacacttccctccccttcctcgtctcgccaccgccggagcgcgtcgccggaaaccgcgcggcctaccaggatggcggcggcgagtctcctatccctggtagcgcggctgtctctacgcgaaggggcagcgcggaccgtcgggaaggccgcacggcgacgaggcgttgtggcggcagatccagcaccgccaccgctggatctggcacccccgcggcgcagcgccggcgtcgaggcgcgggaggctgcgtgcaggcgcggcgtcgtagcgaaggcgcggacgacggcgacagcggtggaggcgcaacaggcactacggcggcggaggcacggcggcaggcgcgacagcggcggaggtgcgggtggccgtgctagccgtggaggcgtgggtgaccctcgcagttgcggaggcacggctattgttgctgggggcgaacggttgtggctgcctggcccgcggctgtgcctggccagcgagtggctgaccggcccggtggctggtcagcggggccggtggccggccggcgcggtggctagtcagcgaggccggtggccggcacggcgaaggagacgcggcttgcggccgggcggcgcaaagagtgctgccggaggccgtgtagtacaaggaggagcattgcaagctggcacggcgtgagaaggcgtggccggaggccgcgatgcaaggagacacggccgaggccagcgtggcggtgttggccggagcggtgaccgcgcagcgggaggtgaggccagtggaggtagagcccggtgaggcctcgatgagtcggcagcacgcggagactggccggcgcggggcgcatgtacagtggtgcccacgtgtcggcggaggttcagatggcggtggagcaatggtgcacagttgtagatcggcaggtggtggacggcgggtgaaaacctagggcaacgataatgttcgagcgtcgttcccctcctgagggcgttgtcgtgccgtcacaaccctcaagtgtggctgtcgggcgaaagcccagtctcggttctctttgggaccttgacggacggcggcagcggtgtttcgtcgcttctctccttggagacgtcgtctaggcatccccttgccaaatccccccaagcaattggtgcaagctctctctagattcatatcctcttgtgtcggcgtcctagcttctgcaagttgaccacgtcagagggcctagggaagaggagaagttccattcttctctctgaccctccctccctaaatcccaaatacttggatagagtggggttttgtgttggctgtaagggtaaggttttaggcgatctcggctgtgttctattgttggcttagcggcggtcggttacgcttagcggcggccagtccggtgctagccttctcctggatccgtgtttggcgctgtcggtgtatgggtggtgatatattttttttcgtttttctagttacgaccttttagggttgtaatattgtaatattttcctactctatcgatagaacttcgtcgttcaaagaaaattctttcctccaattaatctgaagggattggatcagatcgatcgacccctcgttcataatcacttcaatctagtatctgcagctggttgactttattgattttttggccttgctccatttctatgccattccgtagaccattttttttaaaaaaaaactaaatcaacagtagactacctaacactgcaaatgatgatgttgtgcttgcagcttaattatcccctctcatgaacttccggaagatatatattcatcgatcagcctcctattccaatgagtttcagctgttcaaagattaacagaaatatatgttatgatgcagtccaagtatctgaaattaaattcccaaaaataaggaaaacattaagaacaaagcaactgattagtactagtggtaattaaagaggagttttgtgatcacttacaaggttgttgctgggctctttccagtagaatccctgaaccagtactgggataacgttgcatgctacgagaacaaagatcatcagagcatgcttgcccatccactccatgggaagaactggcctcttgtaccctttcacatccacctaacaaaacgatttcatgttaattattaatcgtcaaaacagctgtcatgcttaattaccaaagggcacaataaattaaatcagggattctgggtgtccaatatagtagtaatttctgtatcaacatgcattgagttagtctctttttccagtcaggaactgaaagcaggtagccacacctatctattcaagagtacttcagttctaattaatacatcctctggttttaatgttcaacgctgccgacttttggatataagtttgacaattcattttattaaaaaatttatataactattatttattttatcattaagtcctttctttgacagaatatataattttctgctacggagcccgtaaagtatcacttatattttttatactcgtataaaatttttgaatgaagtgaatgaccaaacgtatatttaaaagtcaatgtcagttaagagagagagagagaggagtaattgttactaaccagcaggtagatagccacgaagaataaaccagcagtgccagtggtgacacaggtgtagctcaggctgtacagtgatttgttcatgtgcagacctgcacacatatatgagtgttaatagttcattagtacaaatactttgccttaattaatcacatatctggccttgattaagaattattaattaccgaagagatgaagagagaagccaagagtgagcaagcacaatgatagaatcgaccatcgcttaatcctctcattgtgcttctgcatgcatatcgaagttgattatatcatgattaagtccataattaattatcatgttactgaaaaacgcagtacaagtttccccgacggctcaaaggaggaaatgccgtcaggaaaatgattagttaccttgaaatggacaattacatggccaatctggagaccgattaagcatgtcacaatcgccatcaacgagctgcacattttgtatgtgtccatttatatataaacaggccagcatacaacatttaggatgcatttatgctgtactttttatgatttaaaattcaattagagaactatataaaaaaaatctgttttgttcacctaagaagcccttcaggatcaaatggagcttcacaccatgatggggcattaggtggaagagggccgttgcgtggagaggccatgctgcattgctgcaattgtcaaaaaaaaagaaagagaactcgaaattactcccaatatcttagagggattggaatcttctcacataaagacgtgatcgctgatatgtaggccccaccacccttaaacccacatgtcagggatcacgtactcacattaggtgggaagttatgtgagatgaaccctctccatcttagagacacaaaaaaaagaggaagggaggtgcctttgcgttcataaaaatttatggttatttgctttttagtctccattacttagtttcattcatcatattctttgtacaacatttgtccaatctctaatagactatgtgcatagacgaaaatgatacacaataaaaaaacaatgtaaaaatgatcagtgctgcataagaaaggtacaacaagtccaaatatcgtgataatcgcaaccttagtttcctccatgaaaaatattgtt

SEQ ID NO: 29950 - DNA, 3759 bp, Oryza sativa
caccaaaaccaaacccacaaacctttgcaaagtaaggaaaaggacaacatgtgatgtaatgcatgagaaatttcttaagtttaagatcagttaacaatagctgataaattagcaagttgtgtaaagtgtgctcacatctgatgatggtatcttgttattaacatagagccagagccaatgttaccgccactactaaccctccttagccagatttcgcaaagcgccaccactaagtaggctattgcaatcctctgcgtcaagtgtgtaaaatatcatgtgtaaaaagctcttatatattgctcacagtagggactgtttggaactttgtgtttgtacctgtagtacacccattaaccgaattttgcgaatatcgacaccataggtaagttcatggatgccatggaagaagccacctaacatgatcattccagtgggaattcaatagttattgtgctttatgctatatatgtggatgatatatgcttcgtacacctagatggttagatcccatatctatggctttatttcattcaattcctagattgatcccaaccctataagaatttaccttgcaatataaggcccacaatgaagagttttacagccctaagcatggcctttttggttgctaacattttgtctggcactttctgcacaaatcatgaattaaccagagttaggcggtttccgatttaatttgaatgatatgcacattactatttggttactataccttataggcaaaagctaaggagaccccaacgatgaagaggaagaaggggaagacaaagtccgctagcgtcacgccatcccatggagagtggctgatcgccgggacaatgccaccaacatcatccacgaggatcataagctgcaatattgtaggtgttttttagcatgatctacagacgatatatatagtaataactttaatcaataagttttatttagggcccttggaatgtaccgataggtaccaaaaaaatatcacaattttgtttgtcatttggggagttcaaaaagtagcaagaattatgggagtacagtaccagatagcacatcacttagtatctccaagaccgtaaaatgtataaattaactatatgtcaactaggggaaaaagctagtgtttcaaaagaaatatcttctactccaggtaattaactaaggtgttcatgcatggaaggaagtggactggttgaagatatactgtgcaagtactatatatgattctttttttctcagatcaaaagggcaaagccctattccatttcttaatttatggaaacaaaacaaatgttgagagcatatatatatttagaggtacctgtctatctttagttaaaataacgtaagatatcataataaaggtttgacaaacttcaccaagttgggaaagttcagctttatggcttacatatacttggttctttaacccaagagaaatcaatagaatatatacacatgtacatatgcatgttaatctattaggtgtaggtacacaaaagtatttaggtttatatttatgtacataatggattaatatattgatatccaccggttgccaaaaaaactcttattagttctttgggtggttcaaaaaatacgatggggctccacttgcaccgttttttctcaaaaaaaaaatttgatgtgggaattttaagtagatttttagtcagtttctgacctagcatggcaacaagaatgggtaatgaaaatggtgaacgccccccccccccccaaaaaaaaaagaaaaaaatcaattaaaaaataaaataagctatactgcagattttcagaaaaaaaaaaagctatacgagacaggccaaagattttattccctatggcaagggtcacggattgaaggtggaagctagtcctacaagtatgtcgaatattagctagtagctaattggtttattataggtcattttctatttagcttatcagccgaagcgaacatttaaatattaaagcttaattttagagttaattttaatattttttcaccaggagcttttaagtcacaaataacaaatatataaaatatttatgcatcaaattatttttttaagttgctaataagtattacgacttataatcaatggtagacgaaacgatgtgactattagttttttttaaaaaactctcttcccattaaagaaactatgtcaagcctccttttggaattaatggaggattttatagagatttttgtgggaattgaactacttatgtgaaagtcatacaaaactaataaattccaaaggagtcctaagtcatttgttattgtagtccatacctaatacatcatattttgagtaaaacataatataattcaaaaaatatcgaccgaagaaatggaaaatacaaattgcttacgatacaaattggatccaacgcgaggcgacctcgaatggccgcctgggtttgtcaggcaaacacacaatggattttgaatgtttttgttaattagaagcaaaatttagcaaaaacttttctctatgtgccaccgctagttataccttttttttaacatgtgggtgaattgccatgcacgtatatattcatttaggattaatcgtgtccaagtatggttgacaaacagtctaacacaacggctatatatatataaatattgttaccctctctctcctaaaatatatgacacaattgatttttcacataacatttgaccattggtcgtcttattaaaaatttagtataaatatgtaaaagtataagttaatattataattttattttatgataaaacaaatcactgcaaaataaatgatatttatataatttttaataagataaatgattaaatattatgtgaaaaatcaatggctttatatattttaagacggaaagagtattaggaattcaccgacgaccgcgacgcggctaagaaaaaaaaaaagaggcacccaactttctgcatggcgcgaatccggccgtccatttcggctggagctcgcgcgcgaagccacagccgttagttaattaagctggtagtgataccgagcatatatatcttctgttttatcctcttcgtgcccctattcgatcctcctgtgatggagaagcaacgacgacacccctcgtggatgataatagatagacagatatattatgccctcttcctctatcacaattctatagcattattctcctccacttatatctgatatgatatgatatgatatgatgtgataagcgctgtgcttaatcatgtcaacatgtcactggcttattaattactatattagtattactttctttagacgtgtacctttacttaattatacttaatttggcgcagtttaatttagctttgcgtggaatataataaacgtgattaatggtgatcgatgctagaagataaatggaattaatgattagagaatatgttcactggagatggaaatatcatgggaattaattaagctcaccgcgacggtgattcccctgaagacgtcgagcgacacgaggcgctgccgcgtcgtcgtcgccgcagcctcgccgtcacggccgaggacgcctgcctcgacgtcgtcgtcggctcccttcttggggtattcttctcgaccattgttgccgccatgacccctgctgctgctgctgatgcacttctccgtcgtggtcgtaattttcattgatgaattcacaagctagctagctatagctatacttgatggccaacaatccttagttgttgccgcgatttggcgatgagccgcagctgcatat

SEQ ID NO: 29951 - DNA, 1316 bp, Oryza sativa
tattttttatttttcaaggtctgacttttaatcctctgtaattaaaccccaatgatgtaatttaaatccccttaatcaaactaggtcctggcggtattgttttatgttctcgctcagttgttctgatatagaaaccaagttttttataaccattttgcatctgaaccaagagtctgagataaaatgtgtgatgagtataaaaaatggcaacttggaacacatagttgatgagcagataattcttacatatagtacctccttattctgcattgcttgtctgcatggaatatggactaacaagtattccttcggtaaaaagcatggaacctacaaagatttttactctatgctgtgtacatgtggaatgctccaaaggttattctaacaatgtttgaggtaactgctttcgctcactgtttagggcttctgtaactgacagtgatccccttttagttactatgcacctattttgtcctcacatcaacaatctttgtattgtagaaggaagagcccttcaccttccccaagacggcgcattagtcgttctccatctcccaggcgacataaaagtcggtctccatcgcaaagacactacagaagaaagagaagtcggagtgtcactagctctccgattaccaaatctcaaagtcctcctgttgcgcgtgggccagcagagaataagaatattgttgataagcaaggctagaagaagaaaagaaaaggtggggagtatctactttgctatgcggagtctgcataccatctacaaaccaaactgtttactatttattcgcttccctattcctcatttatgttgacagcatgctattcattaatcaacatttttaacatcctgttaaaattatattcatctaactgttgtttttaccagaatatatcttgaggtcagctctattggcaatctgtgctctaaatacattatttaagttcttttatgaagaataatgttttttttaaatgaccttcttgattatttaatctgcaaaacttttctttaatgaaacgactgcacgtcttgcttccaaattgttatggtctcttgttatccttgcatataattgttggcttaagatgttgaactctagctctgaagaagtcatctatgatgagcaaagccatcgcactagatgatttttctgtgtaaattctgtgtagtatgcatttaatgtctcctctttcccaccaaggcagttttccccatttgttatctattatgaaattgtattacattttgctgctactttgattgtttgttaagggttgccatgcaacatatagattaatgagttgagtcc

SEQ ID NO: 29952 - DNA, 962 bp, Oryza sativa
agctcgaatttgggtaaatgctttcgagcttttttttatgtcgtgttttcgaggtaaggcaaaaccttgttcgaaaaccgccgtcccccttacgtttcaaaggagtgacgaggtcgaacgtgtttccctcgtcgcaattactttttagttttcgagctcgaatttgggtaaatgctttcgagcttctttttatgtcatgttttcgagctaaagcaaaaccttgttcgaaaaccgccgtcccccttacgtttcaaaggagtgacgaggtcgaacgtgtttccctcgtcgcaattactttttagttttcgagctcaaatttgggtaaatgctttcgagcattttttatgtcgtgttttcgagctatggcaaaaccttgttcggaaaccgccgtcccccttacgtttcaaaggagtgacgaggtcgaacgtgtttccctcgtcgcaattactttttagttttcgagctcgaatttgggtaaatgctttcaagcttttttttatgtcgtgttttcgagctaaggcaaaaccttgttcgaaaaccgccgtcccccttacgtttcaaaggagtgacgaggtcgaacgtgtttccctcgtcgcaattactttttagttttcgagctcaaatttgggtaaatgctttcgagctttttttatgtcgtgttttcgagctaaggcaaaaaattgctcgaaaaccaccgtcccccttacttttcaaaggagtgacgaggtcgaacgtgtttccctcgttgcaattactttttagttttcgagctcgaatttgggtaaatgctttcgagcttttttttatgtcatgttttcgagctaaggcaaaaccttgttcgaaaaccgccgtcccccatatgtttcaaaggagtgacgaggtcgaacgtgtttccctcgtcgcaattactttttagttttcgagctcgaatttgggtatatgctttcgagcttctttttatg

SEQ ID NO: 29953 - DNA, 2179 bp, Oryza sativa
catggatggtaatgcaggatataatcaaatttttatggctgaagaagacatccattagactgcttttcaggtgtcctggtgccatcggcctgtatgagtgggttgttgttgatggctattaaataccaaattcacacagtcaatacctgcataaatctgaaagtataaaacatccaacatagtggtagggtttatttctaacaataaattctcaaccatcaaagttgagaagaaatatacataaaggagaggaagaattacattcatatccaagcctatggagtcttgggcccataagtccaacgaaatacatgtgggcccaatcactatgccactagattaagggccttcctgccatgatcctggagaaaattcagggccaaatggcccagcaagggttcagccgaacccaaaactggcctgttcggccccaaatttcatcggcagttactaccgacgtcccaatgacgattgtcacagttttcggtgctccaaccatcattacgaggacggattgcaagaggggagtgaagatgtcgtcaggattccatggaggatctccatactcccaaggcacctacacctataaatacccctcacctccttcattccaacacacaccaagtatgaactgaattataagatgcactattgtatcttttatgtacattagaataaggagagagtaagtgagaaagagttggagaaatttcggagttgtccgtaatttcctcttacttttgtaccttgtcaattactctgctttaattgataatatctttattgagtaattgagattcactttgtgaggattatctcttagttcctattagcgtactggaatattgttcactagaaatagtgtttactttaatgtttgatcggcattagagtagtattaaatagtgtagacgtggtgtatatgctattgagtacctgtatttgctgcttattccacagttcggtatagaggtgggtatagaggtggtgataaccctcaagattaatagggagggacttgtatagatacatgacatgctatctaataggaccacaaagactcagctaatgcaatatgccacgttttaggttgttcaataatcttccttttcaccaacttgatcaaactcttgttacatgcctctgtctgtccaatagcttgtgtataatcaggagaagaattcaacaactttatgcccatgctctcagcaaattgaacaatttcattgacacaaacatagatccttgatatgtggtgattgtttgtggtatcccaaatctatatataatatgttccttgacaaactcaatagcatcttgtaacaccctggaaattcgaccgacaaaaatctaaactctaaaaatatgggccttcaaaaactttttaaaataaattgcatcatgccgattttattcgcctatttcattggattttgaattcggagtttgttgatcgcgaataaagaataattaattaggaataaaacctaaaattaaatgagcaaaataaataactgaaatataatttaaaataaaggttgaggtagggatagaaacgaataaaatattatcgcgatcatatttgtattaattaaatctaaatacgacggaatgagaattaactctaattaaaatcaagtaaattatataaaaataaaatatgggtacaattaatctagagtggatccattggttgggataatacacgtattgagcaaacttcatttatgcaagatttagaaattatagaatcaaatttatataggaaataaactaaaattgggataaataggaaaatacattgttcattatggcgtaggtgttcgatgcggtccctagccttccccctcctctcccacctctgcgccctagccggtcttgagctccgcgtcgccgccgcccgtcgcgtcgccgccctgcgtcgttgccgtctgccgccgcgcgccgacgccatcgccgctgtcgccgtcgccgtcgtgtcgccgcgcctcgcgccccgagccgccgtcgccatccatcaccgtcgacgtcccatcgccgcgcgcccgtcgccgtcacgcctcgcgccgcgcgcccgccgcctcgcgccccacgcgccgcgcgccgtctcttcgccgctgccgcgccgcgccgccatcccgtcgccgcgcgcgtgtcgccatcgccgcctgccgcgccg

SEQ ID NO: 29954 - DNA, 13958 bp, Oryza sativa
aatggaatacccagccgatgcgcagtccgtatttagtaagattcaatctccttcaattccgcgtctatatctaactccaaattcgagtctatcttaccaaatttcctgttaacagattcataacttgaaaaacgtaagtataattctagagtactattttttcctccaatcacgcatcatttaaatttcaccgtgatctacccaaccacagtccaactcccaagcgcgctcgttaaatttcatgcaacagactgatagagacaagtcatgtaacaatcttcgttgtgcgggctttattttttttttgaatcgattgtgcgggctttattcagcttagcactataatagtttcaggagcagtactcaagccagtttccatgatcgatggaaaacaatacataatgatggtttcaatctgtaatgtaaatcactgactctaccaatatcattgctccttgttgcataactcactacaaagattcctatataaagaaactgtttaattgtaacagtaaattataatccttgttgcgagtattccttggcaattatgccaactgattttgcgatccaacgcacatcttttcttagatggttattcatcttctgattttaatcgatgaaatatcatttttcttttaagcatttcggtgtacatctaatttgttcacactgcaatgggacaatcattaatctcattatttgggcactgtaccataactctttttaagtagttgtttggagagctaagaaaatacacaagcaacaacatcactattgcgtactatgcttgcacctaacaaccacatggaatgattgaaccaggtaaacacgctttggcagtggaacatccacaccatgctttgctgggggcttaaaacatgctcatcagtgaggacctacagtgaagatttttttaaaaaaatatggtacaaacatatttcatctaacaattatttactccctcgctcctataataataaattaactgtaattccatatgattaaaaacaagtaaaaagtaagtccaattctagagtactattttttcctccaatcactcatcatttaaatttctccctcatctctccaaccactgtccaactcccaaggacactaattaaataagggatatatatctaggttatgtttcttccaggatattttttattttcaatcatacaatcacattaatattagaacagatatctataatgcacttcttagtcgctgccagttgtcttagttgctttggatctattgaccgtgtttttcttctacataggactagtgtctcaattggagactgcagagggcatttagttttctgcatagatatataatacaataactgccgagttgccactgtgaaccaaaagtcctatgatcactcttggatctcagtgagttgttcccactcgagggtttatactgtgatccaaaagtgccaaggtactaagctatatgaaagtattcatagtgggaacaaccctcctagcagaaactcgcgttcacattaaataacttcaaaaaatttgactaaaatttagagggatgatttattatatggaaaacaaatttatacaaattttggtcgatttctatatgtggacccacatatttctatgtggcaggcctaattccaacccccaattattttctgaatgattatacttacataaaaatgggcagaactagtcatcaataaaaataaataaccggtagcctaactcactcaaatccccaataaatattctacgagcaagtacaccaaccgttatagaacagtgatgcagccacaattattcagctcttgccgatagattcatcaatcagctggtcgcttataacatatcgtgaagccttatagattgcatgcttaaccagcagccacgactcttaagcatgtgtagatggatggtacatgtcctttaacctatccggccatacgatgcacctgcgtatggtactgtcacgtttgtgccatgtcattgaagtcgatatgtgctattgattacttgtttctcttttttaatctcgattacttaatcagctcatcggttgcctcaatcatggaacagtggccttatataatgtgtgtttaatcacagccacgtctgtagaacatgagtaggtggcagttacatatcctaataacctatccagccacaagatacaactgtgtatggtactgtcacagatgtgccttgtcattgaagacgatatgtcctattgattgattgtttctctttttttttatctcaattacttaatcagctcgccggtaggctccatcatggaacagtggtgtgacctcaatcatggaatagtggtgtgaccttaatcagctcttgtcggtacgcctatcaaccggtcgttaataacttatcatggcccaatacatgtccatattttaatattgtcctatcagcgctatatatttcatgtactgcaacttgcatcatcatgttccaaatcttttaagatgtctttagttttcccagttacatccacgcctacttaatgtgaaatgtttagatcagatccatttgatatctaccatatgatatcttgtatatgtatgcaacaaaactaaaaacatgcgtgtgatatgtctggtattaattccctcagccagctaaaagcattagattaagggacaagttgttggaacttgttggtatgagtattctattaatcctattaagccctaggccaggatgtcacaccccaacacccccattcatatacacaaccatcaatatatttaacacaaccatattcacataacattcattttgatcacatatttcatatccattcacatatttcacacggccttaatgggagcagctcgatgctctgacagcgaaatgaattgacatatatatttgagacagaagccaatccaatctatttctaagattgaagatatcctcaccaggtaaagatcagaactgaaatacaaattagaaaacataattgggtgaacatacccatccaatttgaaagtgttactcaacttgcaaacttggtgagttatattcttcttagatctgaatatgtagatgacaaatcaaccaattgatctacgtgatattgttggccgtatccttcaactggaataatgaaaattgatctgcagttcaggacaaataaaaaaaagaattgactcagtatcaagtatctggatcctgggacaggaaacggaaggaattgaaatgcatgggaaaactgtttgataacaaaaatgggaaaataatgctaatatgtattgggccatgcttgcataaacactgaacacatacaggttcaaattagaatgctggtcctattttggggaaacaaattagatgaatcaaccaaaggcaaagaggaagttggtaacctgtgctagatcgttggagaaaattgaagaggatggtgcagtgatgcatatttttccagcgagcaagctccagcaacttgagcgaaacaccatcggcctgatagattaactatcccgcttgataatgattatgattttatgaatttataagtaaatggaaagaggggataagaagagaacaaaaggcattagagccattaagaatgaccatctgtctgcctatcatggtggcatcggttttcagaagtaattgttcttgccgccgtcgatggttactcgtggtgatcggagttcacatcgaccactcgcatgccgcaagaggagaaggaagtgaggagactggatgggctggatcaatcgcttaagctgggttgggcctcagctgctgcaaccgagctatgtaacggagagctgagggagtttgcaaacgttgagatcaaatctaacggttctggaatttgtggtgacgtggcttcatgtgagggctgctttataggtgttaatgatcttagtaggtaccaactatatagagttgggagttttgagagacgatgctatttggttgggagatattggagttgtggtgggatagggatgggaatttataaaggaactctctcctttctaatatctggatagtggtggtaattgagaggaaatttctcctatactttatctaaaaaaaaatctcaaccacctgttttttttctaacttctaatcttcaactaaactaccaatcatctatcaattcccaccacctctaccaaacaaaagattgggactaaaaatcaaatttccatgttaatctcaccatcaatttactcgttgaaactaccaatcatcttccctcgagttttcaaacaagtcgtaatcattttattccccattccaccactacactgagttgcttcatacactgaattttttaatacatttaggtcattgtaagtttcgctatgtgagtaacggttttgataagaaactttcatatgcaaatgttatcaggatttaggaataattcctatttctagcgtcttcaatgtaagaaagattgtaaatgttattaaatttcatgcaccaaatagttcaacctaaaagattataaactgatgagaaaacacgtgatgcggatatcactccttcggatacacacaacaatcctccaccggtcattcaaggaccgataacaagcgctcgcgcgcgacaattgaatttagaggtgagctcgttcctatgtgctttttttgtacgaatttgagaatagattgctacctaatgattatattgtgattaggaacaatagaaggggaaaggagacacttgggaaaggacttagagtcatggaggatcatcgaggacatccaagtcaaggtggaggcccaaaccaagtcggcttcgagtgcaattcagagtctaggatcagtctgcactaaaatgggcacgcaggtcgcatacgtgaccagattggggcgttctctatatggatggaaagctaagaagatatcctttccaatggttttggacacacgtccaaattctttccgagtcaacgggaatcgactgaataagttgacatccaaaatatatcccggtgctgcatcatcctatttgggctttcgggccgtgtatcgtgttggaacctattagggttgcgttaagggttggttgcatgaccctaaactcttgatatcagtacctgtcgtcatctttagggtttgggttttgcttagattattctgtcgagaacagtttcaccgctagatcggtttgtaagacccaacttgtgagcttattcattcatctgcatttttggttgcgtccttctttgttcctgtgtgtgttcttcgattcgcaaatagggattagccttctcggcgaggtcatccgcgtttcgacatgggtgataaccagaggagacgtggtgctgcgattgcggggctcaatagtgtgttcgttcaagaagccggatcgatttgtgtcgcgactccgcccaaatcgttgattatcagaacctttcgaaagatcgggaaacctagtcaacatcaagtggtattagagctctaggttcaccgtcaggttcgctcggattctttatcctagtttagtttttgttttcgcatttatcctagagtctaaagaaaagccaaaaaaaaaagttgtagtcgttagtgtccttaacccaaaccgtgtttggcctttgcacaatccttttcagagtttgtagtgttgagtttgagtcctagcttaagttcttgttgatggtctagtgcatgttttagtctagtcgtgtgttttcctttgtaaccatagccgccacctttcatccgtgtgttagggttcatcttttgagatccgtttctgccatcataaacacctatccagatcaccacacctcactagaacatcctacatactccgttgccaccatatcccataccaccgctaaacagactagtttatataccctctggaaaacctacacggaagccccaacttcaaacagccataacttttgcatacggactcagactcagaaaaaaattggcttgcaaaattgtctgttcgagctcacaagtttctgcacattctttatagtggcttcagaaaattccataggccacatatcaactctgcttgagctgtaacttcgtggtgtgcttatcagccttgcggttttgctgtttttgctgagactcgctgaagcttgcctgccagtccttcatttgcgccatcattgttaccactactgtctaggacacgagtagaccagcaactagtggcaagtgacttgggatttttatttagcattactatctgtcattggattgtgtaccactcacatatatttagccttcctagctccacatattacttctggacagcacatgttcttgatccctacaatcgctgactacgccttccaggtatccattgcttggtaagggcttggtaaggttcttcatattgctgagagtagttgagaggcaccactgcacctgcctggtagattattatggataaccttcacatttgttgttgttttggtgtttcaatggcaggtgacgatgatgagaggactgcccaggactttgctgactgtgtcagtgttgacggtcgttatcgatcaattttgaccgtcaatattaccaaaatagaggtgaactagtgatgattgtaatgcatatacatgttagagtaataatattccactagtacttggttcactaaccttttgcagagaataaccataaagtggaggagaatcgacattgagtcaaacgataaatcattcggataatatcgagaatcagacttatgcatgaatgggccaagaactcagaattgacacgatgaattgggccaaaattcacaagtctgcataaaggagcaatagaggaggccgccagccgaagatgggctggggatggccttgcccatggttcggccgaacccatcctggtgtcgttggatgcaggtttcggcatggacgtccaggattgcatcccaatgacggttggagggcacttcggacaattccccttccaaaaccgtcataactacctctatataaggacttcaccttctcccttcactcacatacctcacgcaaagctctctcatattctcttaagtttagtttagtagtatcaagctggtggaataggaatagagtagaaaatcaggagtctggaagcgttcggaacagttcaggtatggctctagtagctttcctttcctcttttataagctttgtactattattagaatactcttctttatacatttacggtattgaaatactttccgagtatatgaatgccaactttacattatgttcatgttatactgaatatgctgctagcttatctgggagatgctttggtgcgggtataatgtttgcttatgccattactctatgtcatgacgatgatattagagtattatctggtagtttagacgtagtgtctagattacgggatatcattatttggggttatatgctgcggatgagaggtgggccgctaatggtgacagcttagtacgggtatacctccgcgcgtttatattgtcctaagttaattccctagggagggtactcctccatttttagcccaggttatatggtcatgacgggctgtcgtaagaaactcggtagtcaggggtggcttctcgaagtaccagaagggcatcggatagagggtattagctagtatatcagttaactagaatgtatgtatactatgtatactagaagtataggaatagatgatctcttttttctttccacttagcttagataatatattatgagaatgagtagctgatgcttgtgtgtcactctacccttggattatcttaacccctgcttagaacatgattattacaagtaatatataaattattagtcaagttctctctacatgatcttcccacgggataaaataaatatgatacccttggaatactctcgggtgatatgctacaattgtatatccgtgcgcttgcggataaactttttaaccataatataccaggagtatttctgcgccaatgctgggaattatatttctagtaatgtcgttaagaaatatcgacagtctgtcaagagcaactacgaactagtgtagaaaattgctcaaaatgacatgacggaggccgttacaaaggctgtccaagatgccatcaataaaagtggcttcttaaaccacatggagaggctggacaagcggatatccacgctagctaatcgggttgctgcgttggagacacaagaaccttccagtgaggaagtgagtggcagcaacgctggtggccatcctgaggacacgatgtatgatttagtggcaatattgatgcagaagctacaaggcaagcacgactacgacgtcgtctatgcacataccgcacaggtatgggtggcacttcaaatgaccaccaccaacaaggtaataataatcgtgtgcccgatgacccttatgctaaggttaagtttaaaataccatctttttcgggttattatgatgctgagaaataccatgattgggagatgacagtggagcaaaaatttagtgcccatcttgtgcctgagtagcatagagttcgacaagactgatgaaggagtcttggtatttcttaacgacattactagaaatataatctccagcaatggcgcagaaatactcttggtatattatggttacagagttcatccgcaagcgcacggatataccattgtagcatttcacccgagagtattccaagggtatcgtatttatttaatcccgtgggaagatgatagtagagagaaatgtactaataatttatatgttacttgtaataatcatagtctaaggagggattaggataaatcaatgggtagagtgacacacatgcatggagctactcattctcgtactaaattacctaagctaagtggaaagaaaatagaaaagaatctattcctatacttctagtatacatagtgtatatacattctagttatacgattaactagctaataccctctttccgatgcactcgtggtacttcgagaagccacccctgactgctgagttccttacgacagcccgttatgaccatacaaccggggttaaatatggagcagtaccctccctaggaaattaacttaggattatatacatgcgcggaggaatacccgtactgagctatcaccttcagcggcccacctctcatccgcagcatctaaccccaaataatgatatcccgtaatctagacaccacgcctaaactaccagatactactctaatatcatcatcatgacatagagtaattgcataagcaaacattatacctgtacctatgcatctcccagataaactaggagtataatcagcataacatgaacataaagtaaagttggcattcatatactcggaaagcatttcaataccataaatgtataaagaagagtattctaaataaagtacaaagcttacaaaagagtgaagcagagctactagagccataaccgaactcttccgaaggcttccggactctgatttctattctattcctactccactagcttaagaacactaaactaaacttgagagaatatgggagagctttgcttgaggtgtgtgagtgaagtgaggatgagagctccttttataacctcctaatgacggttgtgacggttggaatggtcggaaataccctccaaccgccattgggggctgatctacaccatctagaaaagacctggatcaaacggtgctgaggagggttcggctgaacctggggccggcccaaccagcccagattacggctggtggcatcctctcgtgctcttctccgtagacttgtgaattttggccccattcgtcgtgtcatttccgagttcttggcccattcatgcataagtctgattctcgacatcgtccgattgatttatcgtttgatttgatgtcgattctcctccactttatgattattctctgcaaaagtttagtgaaccaaatactagtggaatattattattctaacatgaatatgcattgcaagcataactagttctcctctatttagtaaatattgacgttcgaaactgattgctaacgaccatcaacaaaacaccccaagattgaacctttgctcgtcccaagtaaaggacgaaaggaaacaaagacttggttgttaatcaggagttgctactatgctgaatatctcaaaggtatatgtaatctctcttaaattaaataatctttggcacggtggcttaccctaacccctgattcccaccagacactgcttctccttgccttgggcggttgaaagacagaacaacaattaaagcagtaatcacccaatctttgttcaacttttattccggaagttttcaaatgattttgcaaaagaaagccgagttcctcaaatgattcactcagtctctctaagtgtatcaataagaattcctcaccattttgccattttgattcttactctaaggtttgatatgtggtgcttggtagggatcaaacatggcatatttgcattcacatttattactaagtcaaaaactcagactaaaatagatgactaaacatacttaggatcatgcaaagtgtgtgtgtgtgtgatatatggtggaaatggaatatgaagaaaaataaagaaaatgcttcttctttgtgcttacgtcctcccaaaaatcacactacaagagggttgagctatcgccaccaatttattacaacgaaaaataattcatggcaatatattatactatcacaatgatattttttctatggcaaataactatattttgttgcaacgatttacaatcgttgttttattcagtatttttgttgcaataggaaatgagctatcgccaaaaaaaacattactattgcaaaaaaacatgttctatcgccacacatttagttcgttgcaataaaaaatttatcatctcataatttgacttattcttttcatatggacacggattaggataaattttatatgaaatttatagctctcgatgagatctacaacttaaattttttatttgaaatcttttaaatactcaaattcatgattcaaatctaagttaggcagtctcaaatggaattgtatgcatttttaaacaaaactgatgcgtaggtgagttggtcatggagagcgcgcgtaagggagagatcttgggttcgaatcctgaacatgacaagatatcaaaagaagatagttaggatgataaattaatattgagacatttaatttggtacgtataactaatgccacacatagagtggtggcaatagttatttattacaaccatgtgaagtgttgcaatatatattttttgccacatctattttatggcaatatcaaattttattacaactaaataaaaatcgttgcaataacctgttaccacgctatttattaccacggctaacaacgattttaagattgtggcaacatgtatctattgccacaattttagcattgatgctacgatttttttcatggcaataaattatttttctagtagtgtcattcttttattaataaggagagggcatggccattttattcctttttttatataatatcatgctcatgcttgaaagagcataactttattattttttctttttttctcataaccatgcctttccctccttcttctttttttttccagaaagaattttctttttaggagaagaaagcacacaaaagcatgaagaatttatttagtggtagaatggaaatggaatggataattgctagctcagtgtaggagtttagcatgtgcatatatgtgggtatatgatcttgatcatagagcatgaaaagtatctacacaagtcacaagaatttgacaaagttcaattgaatggcaagtaaccaaaatttatatggttttaatcataatggcacatttttggctctcgtaagaatttatatcaaatgagaaactttcaaatttatcattttgaaaaacaaacatccggaatttaagtcaaacttggactaggatcatagcaacccttatttactatctcttatgttgcaacaacttagacttagattagcaaatgcagctcatttacctcaggttctcaaataattgtgggctacttacatttaatttgtgagagagcacttacctatgaatccatacataagagatataaaacagagcaactattcatcatttcaacaaagagaactagtttgtcttacctagcatgataaaacctaacctatctttttggtatattctattttgcaaattattatgttgttttcaggtgtatagaatgcaattggaaagggaaatacgcaatatgatacaagttacctcagtgaggggagagatgtccccccctcccaagcttggctttcgctctggttccttgataaagattgaacccctgaaagcggaagtacgcttgagggtcctcatgttgttgctgcatcaggttgttgatgttgatgaactgagcatcagtagtctgatgctattcttgcgtttgtgctatgtgttcctcgaggttgtattggatctctcccatctaaatatcaagggtatccattctcctggtcatttcaccccagtcccaacgagatggaggcataccacttggtacgggggactgatggctctagcctccccactgtatgtcatgaggcacccgccaccggtcctcactaccgcttgcgcagcttgagactccgatgctgtggcgtggagcttgggtccatccaggtgcatccccagttggctcccaacttgcctcatacatttgcacgggtgttgaggatgatgaaccttctcgttcattacttgccatgttgcgtgtctccctgtatgttccacctgcacgagattcttctatggtatgcaagggaatggttagttcatggtagttgttcaaataatatcccgcattaggcaacaagatttcatatgtacaaccggggaagaagtaaatcaaagatccatctactccatgtttaagaatgttcccttgcactagataattctcatctatacagggacaagcggctaagacataagcaatctaatcattgttaataacccctagtccctttgttatccgagtaatcaaggaagtgcactccacaggagtagaaaatcttatactttctagcctttgccttatcatacatttcacagcagcaactttgatcttcctaaccatgacaaacatgacaattaattcatcccctctaatgggtcgtagatcacctctaggaaacaaagttatagcaatccatttatgcataagcctaagtgtaggattatggttatcattcgtcctagttttcttgcaaattggagcattagaaatgtcttcccaaaacctatttttctcgaacctagaaattcctttctggagatcgattttacaggaatcgtgaaaaccaagaagtgtacataatccttcccatgaaagtgtatatttcttatggaaaaagcgaaaagaaatcccatcttgtatttctttcaaagtgcacagaaattgcaaagcaagtgttgtcgaattgataactgtgtcacgtcgaaggacctagttcttttaacagtggttggaagtaaagacaattgtattgcttagtaaaaattttttcagatccccctgttacatggccctagactctccattagggtttaggctctacagaggaatttacgtggttgcccttatgatagggacatctttatgggcatacaatgtcttttgctcgtatgggctcctaatgggccaagtgactcggcccagtccatggtgaagcctctggaaggcgtgttggcctgctgggccttctcctggcaaggttcgatacttggcgaaacacatgccctccggcatggtccatctttggcgaagcttgtcaacttgatgctacggcttttgctgtttggctttcacctatgttgtcccttcgaccttcgccacttgcctccagcctacgcctttgcctatgtccttggtttcggtaagcccggccaaaggtccttgtggtatacctccaacaagcccctcaagggcaag

SEQ ID NO: 29955 - DNA, 1680 bp, Oryza sativa
tatatatatatatatatatatatatatatatatatatatatatatatatatatatatatatatatatatatatatatatatatatatatatatatatatagcccggagtttgattcagttatttaattgcaaatatcagttttgcaattatggtcttgtggatccatgacttccttttcttttccaaaataaccatataattcctgttgtaaccaaaactcgtgaaaccaacagaataataccaaaatcatcaacgtaataatgagtaatacatacgtagatgaaataactaggcaattatgtaggcaaatagccaatcaagcgtctttgtttgcttgcgacaaaaaaatccctccgttccatataagttgttttgagtttgtcccaagtcaaagtttttaagtttgaccaagtttacagaaaatatttagcaacattttcaacaaaaaaaatattcgatgatggagttaatgaaactaattttgtattgcaggtgtaggtttttttttttacaaacttggtcaaaattaaaagaagtttgacttcaagacaacccaaaacttcttataatatgaaatggaagaaatacatacgatagttacagtatagtggtatacaaacatgccactcaattagggtttcatcaggtattgtcggtgcctctcaaaagttctattgagcgttcttggcatctcttcaatatcattgtgtcatatgaatatttcaccatgcatgtctctcatgcatgtttcaactacttccatgttagtcttgttcaaatttcagcaaccaaatgaacaaaagttaaagcaagccgccctatgacaagtcgatttcccatgagttatatattgagtccacctcaacacttggcagaaaacatatacaattcatccgcaaaaaaaaaatctataaactggttgacaagtacacttgatctctcaaatgaacctactccaaccccacaccacctgcgcctgcagcctgctactctactagtacttatcgatgcatggtatatctggttctatcatcctatagagagagatcacattgccattgcctttcttgctttgtgcagtgcctgctttgtctcttgtcaattgtatcatatccatccgttatgcgttttactctacttcatatccctgaaaaagtgtatcggtgtatgtaaaattatgaagtcgttctagtttgttcataaaaatgttatggtacctactgaatttctgtaagtaataaacattataggtattgggatgtcttacatggtatatgggtgtttctcattttctttctcctgacgcttcccatccttacgcttctatagatctctgagaaatggacaactcatgagacaaaagatggactctacagtgctagaattactctagcatatatatacattacccgaatgaaaaaattattttcatgaaaccacaaatgtacactcccttccactatttgccttttatctcttgttcattcttgaccttttccgtttcattcgtatgtctatgtatcaaagatggacacagtgatgaaataataggttggcgtggcattgatccccttaattatttgggaaagtcattttaccctttaaaggggatgccccttttttttgcatgtcactttaatcatgaaaaattcttgaaaatttgacaaggggtgcaggaa

SEQ ID NO: 29956 - DNA, 2376 bp, Oryza sativa
tgtttggatccttgagggctaattcagagctaaaaggtgggggctaataattagctcatggaaccaaacaggaccctagaatgaacatggcgagaatgaagtgtagattccttgaatgcagaagaatacaaattacagcaatggagaataataaactggtaaaaggcaaatgatgggagcgggagcatttgtgaattgggaaagccatccaaaataacatactatatgctagcattggagagtccatcttgtgtctcacgcgatctccatttcttagatccttgaagagtgtgaggataggaagcatcaggaaaaagaaatctccattgctattgcttggtgggtgtagcagcaacaagcctacattgggcagtaaccatggttctagaaattaattgatcatttccattttccaccatggttctttagtcagcttgctgtgcatctacattgggcagtaaccatttacattagcaagcaattacagcgcctacttctactctgctactataatcctgagtaagacaacataattgtctaggactgacatcgataatggcctcttcattgttctcacgttatcactactagtatgaaaaaaaaggagctagcatgaagaaaatcgctattgcacatctgtgaggatctttataacaccgacctttcactactcatcttcctaacattagtgtatgaaaattggcgtaaaccgttgagactagccactagcgtctgtcacttccgttcttcctctttagtccaaatgggaataggaggtatcaggataagcgtagccaaaccgttcttccaataaagtaagcagtgcttatgatattagtccttatctctgaaaatcttgtgtttcttgctgtaacaaataactaaggctgaactttagcaagctggttcaataccctctttcatagagttacattacttatatataatgtcttttcaggtgtgcgagataaactagaagaacaaacatggggagaatggagtgttgcggctcttctacctatgaggattgaagttatgtgactcctcgcatcttgaagaagaacggcacggatacacttccctgcagctaaagatcattttccgcttacataggtttgcaaggtccttcagccctacgtaggttttgtgtgtcagatgatcaatgacagattgacacacaccaacctgatcttcattgctgcatcgatcttcaaatattcggtgcataattatctagatgtatagaatagatgaagaaccagcaaaagatagaaagacaaaagatgaaaggaaataaaatgtttttgcttctgtgaaagccatccgattaatatatacgctagcattggagagcccatcttgtttggtcatgagatgtccatttctcagctatctcttagagcgcgaggatgttaagcatcaggagaaagagattgagagatcgaaatgataagtaagagaaataccgtgttttttttactctcagaaatccattatatctgaaaacaaacttttttatgaacaaagtagagaccaacttcagaattgtacatccttagaataagttatctctgtgcatccacattttcagggatatgaaagaaacagagtaaaacgtacccacgaagtgagattgaagtaatgctctgtaggacagagatggttaatgttacccattctctccattttttttcccatcaacgaatgcttattatgagaataagcatgtaactggactgccaatggacttccgctggatgtagcaaggctgtgattctgtttagacttagttcttatcccctaatacaatgacgatatattgttctttctcaatttgctgtgcaagtgtgcatgcagggttttcaatttcgatttgtcgaaaatttcggtaagaccaaaatttatgaaatttcgtgattttcggtactttttggactgatttttttttgaaattctaacaaatttttactggagttgaataaactttgaccaaattcaacaaaaaattgataaaatacgaaaatttcagttaatatattgattaccaaaatttcagaaattttgaactaaaattgcaattccctgtgtgcgtgtagattcgatatttacatcaacaaaaatcatagcacctacttctaccctgctcctactatcatcctgagtaatataacctagtactacttgtctatgagactgacatctataagggcctcctcttggagtaatgcaaatgaaaaaaaatggagcaatcatgaggaaagtaactggatgacatctatcagggtttatttttatagcacctaccacttgtaactactccatcttcctacgcatgtttgtcacataaacctccaaatgcataatgcagggaatggt

SEQ ID NO: 29957 - DNA, 2759 bp, Oryza sativa
gccttttcacaagggcgcgactaatgggaaataagtgaaaaagctacaaaatggtagaattgatccatgtgaatatttctcaacttttagcatctggtggcaacaccatttgcccaattttggtaactttgtcgaatgtttcagagactggatcctttataaatgctcttgcccaatgtcttcaaatcctgttggtgaagcacaaaaatatacatgcaattgtgtagctaactctgaatatgcaatctcctcaagttttttcaggaactgtcttgtccagggatcaaatatactttctgctcctgatcaagctctgaacaatgttggcattttggcaacatggacaatgttcatcagacaatgtctgttggagaacacctatgctaacacctaggcatgcactaattttccttgcatttgatttccaccttgcagctggttagctcatgcacatctattttggcacacttcaactctgctgaaaaaaaaagctgcacggtcaaccagctagacacgatcattgtctgatgaatgatattagaatttgattgcgttgtaaattactataacttacgtgtgcttatgccatttaaactccatctggtgagcctggtctctcaagaaacatgagcatgggtagcatccgtagtttttagtgtattttaagagatctggtcaaaacctacaacagtaaggcaaaattaaaataaaatattttgtttgcatcaacgatatactcctaaaggcaagattttccaattgtgatgaaagccggaaacctagcgaggtaggtgaagaaagacaagggatgtgtgaaacatgatatctttcatcttgtctttctttttggccattttaaaaatgattttaactctaatttatatttgggagcatgattggattacacgttgcactgacaagtgccgctctacatttggatgcttccattgactgaaaagattacaatagcatatcatttcatttttcttaaaagaaattaatagataaagacacagctgatgataaaaggcaagaaaagattgtgtcaacttcactttagtggccgaagagtgagttgccttctgcagcaattcagcaaagtgcagcttggaagcgtctggcgtattatgccaagtatttggacagcaggaatttgtcgcgatgggtctttgacaggcattaccataccaatagttgagagcttgaggctcaatctgaatatgtttccgcctttattcttagtaacgtaatttcaattatatatggataaatattattatccgtaaaaatttattctctagtaactatattcacaagaaaacaatgtaaaataaaattagaaaaagtaaatcaaacatcaaatcctgttcctgtttggcagcctgtaactaaggtagagtttagttccaaacttttttttcaaacttcccaactttttcatcacatcgaaactttcctacacacacaaacttctaatttttcaatcacatcgttccaatttcaaccaaacttccaattttaacgcgaactaaacacaccctaagttgtaacgtggctgctagactcccaagacaacggctggctgcaattccatagtgtttactaggtgaaaccctgcatactcctgtgagagtttaatacgataataataagtaaaattaatgtataagatggcttaaacaatatgagcttacataaacataagttgatgtgatttaaatttaattactatatagaatgatgattcaaatgtaaaagtaagatgatgtggcttatgagaaaacaaaagaaggaagataatttagatcatacatctaacggctaaaaaaattgagattatatggcttaatgagagaagaaaagaagaggtataatttgaaccaaagattaataatcatataaggattaaaaattaaaaacaattgatgagatatgacttaatgagagaaaaatataagtaacatgaactaagtggggatgaacttgataggtataggagataatatagaaaaaacgatgaagagatatattaaaatattatatgaattatgtggaatgatttgacatgcttacattttaagtctctaaaatttaataaattattaaattataaatattacagcaatacatgtacgatacttaaatgtaatagtaattgttagtggatgataatatggtacctttgcatataagagaggattatcttggttagaatttgtacataataaaaaatggctgtacataccatccaacggtgcgtacaaccttcgttctatataactattttgggataaaggtgcaattcaagtatataacagtactagttcagtttttaaatatgcgatgatttttgacacgatgttttaatattcatcatgttcaacaatttaatgtaatattaaaaactataattcatacttaaaatatatttaatggtaataagatcataactgaatggatgatatttatataaaaaattaatagtaaaacgaatgattgaatatcatgtataacagttgacaatattgccatatactgtatttaaaaactggaggtggtggcacaagatttatactactccagtattagtacggtaatgaagggcactttaatgatagggtcagcatagcagttgataccaattaagatatcaatcacacgtactcctaagtaaagagagtttatcacgcttaatagatcaaaacaaacgtgccagatgtgaaaacagcaaacgatgtgatgaatctgaacaccaataa

SEQ ID NO: 29958 - DNA, 915 bp, Oryza sativa
gtggggagggaggcgtcgtggctatgccgacaatggcaagacaaggtggaacaggagaaaaacgaggaagggaaaggaagagggaaggaggagggaagaaaagggtgggagttgccatcgctagcggcggcgacgctagtgggacgtggccggcaaacctcctctcggggctggtcggctcccgtgtctatttaggagaacggcacgtgagtccttttttctctgcgtgtatagacaataaattgcttctttttaggcccttctatcatgcaactagtgcttccaaacaaatccctataacaccttgtaagccatagagacaagcattgttcatgtcgttctgtaggatcatcccaattccgtccgtgcaatcgtgtggtctgattgagtcaacaacattttgtttggtggaagaaaactgatggatcacctattcatttatagggataaattgagcagatacctattcatttatagaacaagtggttagtaaaaaatggtttttttaaaagaaatgtacttttagaaaagtgggggcaaatagtaaatgacaataattcaatggataatctgaaaaagaacagggccttaatttcatctaactgtgcagtggacatgtccccttctacttcaataggttctcctgttgaaaattaatgagtaaaatgcaccagcggtccttaaacttgtcaggaggtttcacttaggtccacgaacttgcaaagagcacatcgaggtccctaaacttggtttattgtatcatcccagtccaaagccgcgtttgactgtggtcttgcctacgtggcacgccacgtggacgatgacatggaatttttttatttttttctcttcttccttcttttttctctttcttccttgtctaaaagatgaaaatgcctcgtacacatcatcgtc

SEQ ID NO: 29959 - DNA, 7621 bp, Oryza sativa
accatggcctatacataatttttattaagatctctagtaaattattaaggagcgtgttgtgtatgcatggcactatggcccaaatataataaatcgtgaagacatgaattaattgaggggatatatataagcttcttttgtatatacggacgttctaatatattgacgtgcaatcctttggcgcgttcgaaaaaaagtatatacatatgtttcttcacttatccaatagtggcattctcctcgttttctatatgctctctcatgaaattcattgcctgctgacacatgcattcgtagtttcctactccctctggtatcaaatatatggatgtttgagggttgtgctctttggatgcaaattattgacgttttggtatttgattgccactttggactgctatacctttgcatgcatgtaatgcttgtcttcagtagctcatcaactgtagcaggctcccaacttcccaagcaacgacgcattaactccagctttgaaactaaaggccatagccacacaggtcgcatgggagtttttgataaaagagctacactaaagtttttaataggggtaaaacaggaaataggcaacctaattaatcacttcttggtaagtgagatcctgtccaaaacgtcaattaatatagaaccggatgagtactaattactccctccattccataatataaggcacaaccactttttttagatgttccataatataaggcatacatgcatgcctacaattaactactgacatcttctccattaaattattaacttttttaaatccttcactctcacatcctctaattctattggatacatgcattgtatttattaggatgatccaaactacaagatgataataattatttcttgatatttgggttaagagtggttgtgccttatattttggaatggagggagtagtaaactccactgctgctagctaccccctccgtcccaaaaaaaaaacccaaacctagctaggaacctacgtatatacatgtctagattcgtagttagggtttatcttcttttttttttggaacagactagtagttaataggattactgtaacaaaactatattggtgtatatctcaatagtgcttctataaggtcagagacagaccaacctggtatgaaacagattaatggctgtgttcgtgtatagaggttaggaacacatgccctgcacacggaaaacaaaacagtctattagcgtgtgattaattaagtattagctatttttttaaaaaaatggatcaatatgattttttaagcaactttcgtatagaaattttttgcaaaaaacacattgtttagcagtttgaaaagcgtgcatgcggaatacgagagacaggggttgggaacccatgattccaaacacaccctaaaagtactcaacctcagtagatcttggatcagatttatactcatattactccctcaatcccgtaatataaggcgcccacgcatttcaagattcctatcttcaaaatattttgaccaatatttatgacaatatgaattgaattttacttgctaaaagttatattattggattgacatttgaatttactttcatatgattacaattttgttactacacagattagttataatatatgagaaattataagacaaaaattagttttggaggccgtgtcaagtttgatcctgccttatattatgggatagagggagtattgctcaaagagtaagactcatatgtggttttgctatgtctaaatattgttgaagtagctgattgatttttcactgcggcgtctgaaagttccctcggtttattctaggttcctttacctgaaaaaggtgagatgtcaacaaaagaagccattgaacatagaattcagcttgttaagaacaaacacagttttttttcaaagaaaggaactaatatcataaacattaatttatttactgatccagctgcgaaatgtggaattctagaagaaaaagatactaaatagatgatcccttacatatgtgattggtccctctggatttcttgttctcgatgcctccgattctcattgacacataagttgacatagcaaaactgaaggataagtagactccattctcctgtgcttcttggtagctactcctacatgccatctgtgctctgttttaaaaacaactggtttggcctttcttctattttcccctcggctcgttttgatacctcatataaccttgagtagctgcaaggcgagatgcagaactggctacggagaggggggagggatggtggatagagtgattacagcaggtacaatagatcgtttttgttggctacactgcatccatgctggagaaattgacgagctggagtaggaatgaatggaaagagagtgaaagcgagcgactaaataagcatcgattgctcacccgctcttattggatctctgcagtagttctattctcacagagagaatgattgaacagggatcaaaaggatatggacatgcgtgaaaagcttagattaaaaaattaagaatagatgcatagtgtttgtaccataaattggcttataattagtgcatttactcaggctaaattatgtaaaatagttggtgtgattgtttagtggtttaattataagagtagcgcaatttatatgtgtgcaggattatttggtgcactggaaggttaaatctggtgctagcttgttgctcgatggtctgcatgacggtgattaaacagaagcagatggatggatggatgtggtcatctgattttatggatgcattaggctggctgctggtgctggcgtggcgtgttagagctgatgaagccggttagcgcgtgttgcggcaagatagatagaaacggattagccggttagtttgtttcctttccgattaaacttttccatatttttgtgggatcaattaggattgttaaagattgattagagtgaccagtatatatactggtgacgacagattagaggaaaccccgaacaaaattatcaatctactattttcctgttatttactttcctgttattttctattttgttttcatggctgagttttgacaaccctagaatttagttaatctttgccgttttgcgctgaaaaacggtcgtgcttctccaaaaaacgagaagattatcctttgctagttgctcggaaactagtcgttcatcgtcacgtaagtacgatatttatcctctttgctaatttgcttgtaaattagtcgtgtgattccgcgaaagtgaattaatctcgaaatcggtttcactagccgattttgatctatcgattttggcgactctattgtttacaccgcaaatcattaggtgatattgtgttggccacaaaaaaacgtcaacacatagcaaattgggtgtagataattttacatctacttattgtacacatactacttttattcactatttctattactgatgtggagatttttggagccagcgatcggctatactattaaacttgctcttattgaaacagatagtttggaggtggtggggatgctaacacagattggagtaaaccgttctatctatgggacaatgatccaagacctcaagaacatgttaaagacgtacttcctgggaaatgaaggtccaatgggtgcagcgatcggcgaataaaagctgctcatttggtagtcatggatgcgtgacgggcgaaacatcgaattggttgtcgattccaccagtctttattgaccatattttaaaggaagaatgtaattttgatagctatatttggtagttcattttgtgaggtcttaccctaaaataaatttttccggaagcaaatacatgacaaaaggtctctgtcttagtgtattactccctacgtatttcatattataagccgtttgattttttttcctagtcaaactttgttaagtttgaccaagtttataaaaaattctagcaacatttaaattattaaattagtttcattaaattaaaaatttgatgtattttgataatatatttgttttgtgttcaaaatactactctatttttctataaacttagtcaaactaagagaagtttgattagaaaaaaagttaaacaacttatgatttttattttgtttttccatggtgcttcccatcctcacacttcggcagatctctgaggaacgggtgtcacatgagatctgtaaccagatggactctacaatgctagtgcataattatcagtcatcactttgtgaatagtcaccactgactcttgatcaactttgcactgcccgctgctctgtttcatatcactgaaaaagtaggtcaatcagaaaaaaacatgttacaagatcagatatacataactggagaatagttctccagtttgtttcatcaaaaaaaaaaaaggtgcaccacaaactgaattttcttaccatcactcctagtgtcggtgagtttcttttacctaatgcttcccatccccatgcacatatacttccagaaaacgaacaatgacgctgctgggacagtagacagagtctacaatgctaccaatgttcagatcgattccccttcgtcattgccttctgtcctcagttctttctcctgtttcattttggaagttatattaaggaagatagggatcagacactgcaagggaaatgtggtaggtgttccattgatgttggtgtttgttagtagccgctgccattgcatatgccattttgcctaagatgaaaccaggaaagcaaagattttgtaaattagcgtaagaattcagatgtcccctccttctaagtgcactggtggagctcggaggcaaaccggataagattttactccctccgtcccagaatataagaacctagtataggatgggacgcatcgtagtactacgaatctggactaacccagtccagattcgtagtaataggatgtgtcccatccggtattagattcttatattctgggacggaggtagtaatttattgccaccgatcacggcgattttatcttcttttcttgttagggaagaaaaccaatggaatttaatctcatcccttaatttgtataggtagttcaatgatatgatcatcccctaaaatgtcatttcatagttttatagaacagatgtaaagcagattcagcctgtgctagttcactcccaaactgcagttcactagaatatgtccatatgcttctttatttaggttatactccaaagtgattttgaattttgaagtttgatttttaaagaatagttttaggtaaaattcgtacttcttagggatcatgaaaagagaataggctaacgaaaatgatagagaaatccctaaaattaaccttacaaatcaaattctagccatcaaaatcagatttggattagctcagccaagcagttacacgttcgctcattaggggcctgttcaaattgtagccaaaataaaccttatcaaattttggtattgccaaaattttagtaagaaggtaatattgctaaaattttggcaggatttcttatgtatttatcaaattcagcaacaaattgaacgtaaacattttttttggcaactttataaaaaaatggtatggttaaaaatggcatcaaggtgaacagttcctaggtcttcgtgtagtgattactaggattaaagtttgattcaccgagttggatcttacctattaattgtatgatatattaggattagggaggcctgttgtgtatgccccagatataatatagatcatgaactaattaagtgatatcagcttctgttctacatatcattcggatgtttttgcagtttctactatatatttgagaatatcaaaatttttactcaaaacaacgaaactccgataggagatacatacatctacagtagtttttatgctttctcatgcatgccaaccctgccattttctgatacacaattgttcggcttgttctactccatgtattagtaaaaccaaacaatcagattagctcctctgaaacggagagaaccaccctggtctgcaataaactcaactgttccagaccttgggccatgtctggactcgggtccatctacggtttcgttgtcagagtacggttgaaggctttgaagcaaagaagcagtaggaggcttatggaatgttgtgctgcgaagtgctgtatgagttcattctaatatggttctcatacctgaaaaattagacgagtaaaatcaacaaaagagggcactgaacatactaaaattcagcgttttgaaggaaaacacagcaaaagtgttttaaagaaaagagttatttctatcataaacatttgttcgctgatctatctgaccagtgaaattctagaagaaaaaagatttggttacttacaatttaggctacatgatttggatttcttgttcttgatgcctccaattctcatggacacgtacaggagttgaggcagcaaaaccgaaggaaaagtgcagtctattttccagtgctacttgctatctagctacttctagagtgtgtttagttcacgctaaaattaaaagtttagttaaaattggaacgatgtgatagaaaaattggaagtttgtgtgtgtaggaaagttttaatgtgatggaaaagttgaaagtttaaagaaaaaatttggaactaaacttggccctagtcatttgtgctatgctataaacctagacccaaaccaaattggtttggtctgtcttttttttttcttttcctcggctagttatgatgccctaggctacatatatatactcattctgttatttaatcacaattagtccaaatagaaatacggtatcatgacttttccccttcaaaaccaccatattactcctctagtttaggcgccagaactcatgaaggaataatgccaaaatcaccaatttaatggaatcgtatcctctgtcattctaattggaatggtagagaactacagtggtccatgccataagctatttatagccgttagatcaaatttggatggacaatattaattgctacagtacattccattgtttctacggtgatttaactgtttgtgaaccccaatttaatacacaagtagtacacagatagatgcaataaataggtaatcaatcatgtatgcaaatccaaccaatcaagcatttttgaaaaaaaaatgatatattacagtttactaatacgccatcagtaaaatgatgttttcacgtaaccatttttttgtattagttaaaaacgtgctccgttttactcttttccaactcaatttagacgaggagaggaacagggagaaaataaaaatgtcacgggatttcctcgataaaccaccatgttcagtgacatgccttagcctcagtttgcgaataatcatcactgtctccaaaccagtgctggctcctccatattatatccctgaaaaaaaaaagatacattggagagaacatgttacaagatcagatgtacacaactggagagtagtttcctagtgtgtttcataacaaaatcatgccatgtgcaccaaatttctcaccatcactcttggcttctctggccttgtttatgctgatgcttcccatccccatgcacattagcacatatactttcagaacccaacactttgtgggaaactagatatactctaaaatatgctaccaat

SEQ ID NO: 29960 - DNA, 1299 bp, Oryza sativa
ttttgttttcgttgtttaccatttccatatggcttggtcagtagaaataaaaaacgagcgtccgttggttgaaaatttctgtgaccattttcaaccctggttggcattggtgggtggccataggcggcagagcagaaatgttggaaccttgtcataagctcatatttggggctatttagaactcatgatattctttttccgcgagattaattttcaccctgtttagttcaattcatgtagaacttctttgaaatcctaccatttcaaactagggctttgaatattgcaataatcgacgtatgcttcatgcggggaacaagctaggggtcccgagatcgagagtaccccgcagctgtgcctatcaattgcgttgtttggatcctagctacagatcgaaaacatgtaccccactaagaaatgttcgtgtctacatacgacgaggagctcccatttcaaacacttcactggctcactgccgcattatattggtatactccctccgtactaaaaaaggaagtcgttttggacagtgatacgatttccaaaacacaactttaacttttttctataaaaatatttattgaaaattgatatatgtatacttttatgaaagtatttttcaagataaatctattcttataatttttacatttttaaacccaacaacttaaagagttattcatgatttatatttttaagatttgacttaaatattattctaaacgattttctttatgagtacggaggcagtacgcagctaggccagctgggaatacaaaacatttatgcatctgtcctgtcacagcgtttagcatctattgtgactgggtcctaacccctaattcctaaactcatctattgtcgacgggaaaagcaaaacgtggcgtgcatgtccggcagagcatatacatcggtatgtcttgaagaaccgtcggaatgctatgctaatgtgcgtgcccatcgtacgggatgtttgatgtctccgacattacatttcaggggtgcgtagagaacacgcgtccgtacgtggtggcgtaaatgtgatacatcttggtgttgtgtgctactgcctaatactagtaaagctagattgatgccaaaatataccatgtactccctttataaaaaaatataaccgacgataataaaaatttgaaatcacatattttatgaatctggacaacctcatatcatatccaaatttattgttctagatgttgtcaaatggttgtcttttttttacagagagagtattagtttaaaaaggtaaatggaatgattttggtttgaagtcaaatc

SEQ ID NO: 29961 - DNA, 1116 bp, Oryza sativa
tgtcagcggcaaccctcactacactgcagaatcctctcgtgatcagaggttgaagacgatgaatagtgaaatcgccaagtgttcgacacgggttttttggtgctgcgcaacaacttacagcgttttctgtttacttcatatataaagaagattacatgctaactgaaaaacgagaagaaaaaggaagtgctgaagtggcctccgctatgtgcgccagtactccctaatgacgtgcgccatcccccacgtcgaagcactagcgtggtatacacgctaaagacgcgttccagaccatcgtggccaagaactcacacacgacgctcacgccgcgaacaagccggcgcgctcatgcaacaaaccaaaaacaatgacaagatatgcaacagtgccatgcatgattaaaatgacaagctacgctacagtgccacgtatgattttttgacaggcgcaggattattccacctaacacacatcgttgttggaggcacgtcatcgccgccacccacgtacgtacgtcgccgcctccaccagcactaccacccagcaacatcgaggagccaccgtgcgacgacgccgccactgcagccacccacatgatcagcaacggcgaggaactccaccgtgcaccgccaccgcctcaccgtcgcgattcgcgcgtacgtgtacgtgcaacctagctccgcccaaaaaatgttatgggacgtgtgcgcgcgacacggctggcgcgcgcggccacagttgtgatcggtgatcggtctcaggaacgcagcaaaacgtacgtactgttcaccgcccgcgcccccgcgcggttgcgctcgcgcatgcatgcacagatcaggcgcgcgcggcgtgacatgccagtttttttttccttttttttcattctgtgccaatgtagcagcagctagcttagctttaggtagacgcacatgcgcgctccagagcgagcagcaggtgcgcgcgccgtgcgcggccggcgagctagcgagcaaaatattctctcgcgtttgtccggccggctataagcttgccgtggcgaggcacagattctcagtgaagctgtgctgcgccatagcttagctagctatagctcgccctgctgcgtttttggtcctt

SEQ ID NO: 29962 - DNA, 1729 bp, Oryza sativa
ttgattgtgaatgtgctgcagatatttaggtccattctttttttagtggatttatgttggttctaaagatacgctgaacctccctcttaacctggacctagtcctaagagcaaagttaatagtatagccaactactagctacaattcatctataactaatctaatagttaattcatacaatagttgcttactatactattagtatatagtcccactgtcatatacacattatgtcttggagtccgtgctgcagcgggctacagaagctgttcttctctctcatcttttatcttattaaaatatgtttgtagctggctaatagtatgctattgtacctgctctaagagcacccgcaatggtaaagtaaggtgctctctataaaacatgtatatctcagtaatagattagattaatagtaaaccacctcaatagtatttctacatgggtatctatagctctctcatccattgtcttgtttttctctatagactctccaggttagtagatagctttactctctctctccatttaatctcttacaagtaggaaaatacgattatcttttatagagagcatatagataaccattgcgggtgctctaataacactagctaagcgcaaactccgagttatccatttcgcagcatttaccttgacggagtggacctgaaacgctaaacgcatgagcaaacgtgtacggaactcctttggtcaatcgttggattatccatctgaaactccttttgttttcgccgggatacccgtatgaaactcctgcatccgtcgccttcattcgcaccggtgataccgtactcatttggccggcagaccaaacatagtggattagtggacacttatgtgttgagaataccgtgccggtcctttgcgaaagcacatgtaacgcctaggaaagcaaggagcagaagcaatctgcttgtcttgtgtgcgacaacgaggccagtgcgttgtcctcgcaccaagcgaccgcctcgccgccgattgttccgtgcgacgccacaccgaaaccgaaccgggacaacctatttaatctttcaacaaatttaaaccttcaaatcttgaaaagttttcaaccaatggatgcaattcattttaaataaaataattaaaaagcatatcaaaaataataaatctagatataaaaagagttgtataatctaattccactatacttacgtagataaaacactgttttacgtaaaacgatatggcattaatgtataattaatagagttttaattatcataaccttaaaaatttatttatagcaactttcatataaaaagttttttaatgaaatataccgtttagcagtttgaaaaacacgtgattatctaaatttttatccaatttttattacataaaaaagacctaaatttacaagaatattctctctctccgtcccataatataagttattttggagagatatttattttggagagatatgacacaatctaatactaccaatctagagtaccagattattatgatacattcctttaaaattaattatattttgatataaaatcctacgaacgaaaaatacaaagacagaaaaaacgaaccgaataaacccaagcaaagcaagcggaaatccccgcgtcgcgttaaccttctcgcccgcggtttcttcccttcctcgcggaagaagcccaccgttccttccgccacgcttcaagcaaccgctcacctcccctcccctcccctc

SEQ ID NO: 29963 - DNA, 865 bp, Oryza sativa
gtttgttatggtcaacatctatgagcccatacattcccacaggaggtaaaccgttcgagctctgccattacagccacccaacagaagcagaaaccctagtaatggccaatgaggcagcgtacacagaggggtggttggcttggctgcatatacatatcctgatcgatcgaaaagcccaaatttgcagtcttttcagcatgggatgcaccgcagaaacaagggatgcattcaatcttccatgctgctctgttcattgtgtttgggagatttggagcaacacatgcatgtacaagggatgtgatcagagagcagttagttggcagtgtgatatatgtgtatatttatgcactggctgcattgtaattgatgagcttgatgtacacatgtaactacatgtgtgtgtctatatatatatatatatatatatatatatatatatatatatcgtgtatatataccctttctcgtggtttcataaaatctctctataatttttttaaaaaataagtatataataacatatgtactgcacaaaagatataccatttaatttcatttttatgagcttaatatagggtcattttgaggttatttaattgcttgagcatgccctctttgtataatttgcatttaatttgtctgcagctgttctcaacattgtcatccaaggtggtaactgattgatctatatcatgggattccatacttgattcccaaacagatgtcctcataataattcttgtcactttgtttagttttagagaggcatgcacatgtttatatgcaaccaaaaacaggaagctgtttaggctaagtaatgagccacaaccaaaagtctgttccaaaaggacaagtagggcccagg

SEQ ID NO: 29964 - DNA, 1081 bp, Oryza sativa
gtgcatgcacagaaaagtggaatcttttattaggcaacctgatctgacctgacctgctgcttgtactcctatttggacacatgaaaaatgaaaatggtaggagaagcaagggccatatctgggcttgtagccagtgaacattggacttggaaagattcatcaaaaaaaaattttgctttcccaaagctgctgctgacccagcacctttcagaattctcagatcggatgcttgtcttttgagttttgagccttgaccaggttaactacatactcctatgcaacttcctttctgcaagctatgttatgtacagtacatctgtacatgtatgacggccgctgtagataggactacagtgctatgttgccatgcatgctctgctgcaccttttgggctgagaattcaatgttgtttaatccttttctgctagggttggtactatagtagggatagcattcacaatgagttcatcagctggagccaatattcagctcaaattaaggcaaagcatttgcaagttaatccggtcgccagtaatgcatacacctttcatcctataaaaaaacacttgtataatatatatatgaatttagatatattcaaattcatgtttaaaagtgaacttattttgagacaaatggtgtagacactcgacgcattaataacaatgcactcagtcacactaatcaagcttttacttttcttgccacaatcttcagtatacatcagcccaacaacactccatagatcgcttatacatatatgctcaaattctggagcagtgcagactagtatcaaatctctctagtctactggacttccttgagaaaagtaactactccctctgtgaactccgtttcacaatgtaaatcattctagcatttaccacattcatattgatgttaatgaatctagacatatatctatatatctgtctagattcattaacatcaatatgaatgtgagaaatgctaaaatgacttacattataaaacggagggagtagtagtaataatacacaagatataggaatcaggtaaagcaaccaaactgagcaggatatcaccaatcctccatgaactg

SEQ ID NO: 29965 - DNA, 797 bp, Oryza sativa
attaaagtataattattttcttcaaacatatagcataaggccgggaggcgattaattgttgttactccatgagcgagcatccatgccagctcaatccaagacaagagttcgtttactcggttacgtttcagctttattagcctagttgccgcagtataggatccatcgatataattcctgacttcactggaaaactacggcggctggcctgctactctaattaactatatgtataaagttagtggaatttatttaattaattactctacgcatcgatcacaaaataatatgctacccaatccgttgcatgtagctagttcgccttccctctaatctaatctaagtatatatacatatttgtattcgggaaactaatgagattaaactggtcccttgcgtgcgtggacggacacgcaatggagaaagaaattctaattaaattaaaggccgatggagagcttatttctttcttcatttaggctgtgttcggatatgggaagtaattaaattaaaggccgatggagagcttatttctttcttcatttaggctgtgttcggatataggaagttgggaactaaactccccgcacggaaaacggagtgatccattagcacgtgattaattaagtatttgctattcgcttaaaaaaaatggatcaatatgattcttcttaaataactcttgtatacaaatcttttataaaacattcactgtttactagttagaaaagcgtgcgagcggataaatgagggagagggatcgggaaaatgggattgcaatcacagccttataagat

SEQ ID NO: 29966 - DNA, 1512 bp, Oryza sativa
  unsure (1)..(1512): unsure at all n locations
ccactaataaagtaggagttatataccatgaagataagtgtataacgccaacttagagagcgtttgaaaagagaggaaatgagaaaatcgataagatacactaaacaaggtgataaattagcgtgttaaatattaattattttgaaattgaaaatagattaatatgattttttaaaataactttttatagatttttaaagagtattttcaaatttatattaatatcactattaggcaggacacgggaggtgatgacaaccgtctcgcgtgaacgggagaggttacgcctcctgcattgcactttgctctcccaattccttattcaattccctccgccctaaaataaatttatctttaccttattttatttatttaataagttcacttttaatcatcactacatcaaaatgtgtgtaaaggtaaggaataattgtcttagagcaagttttatagtagatgtgactaccacctctaatcttaaccatgtcatctacttaataattaagaggcaacatgtataatacattacctctaatacacaaccctaataattattttgttggttcactatgacatatctcactatctctttatacatctcatcttctcaaccaatcataatactccccatttaattccattaactttctttcaatcttaaaactcctgacattttgagacgaccacgtagagctagccgggtgcattcgtcactacacttttctaatttctactcctcatttttcacgctaacgttttccaaacaactaataatgggntttcttaatatatatatatatatatatatatatatatatatatatatatatatatatatatatatatatatatatatatatatttgtagtagatattcacatgggaggtggattttcatttcgaggggatatcttctcgttttatgcataccacctataaaatcatcaaaaaatttggaaaaaaaatcaacaacatagatcaatatgtgatttatcactctacatacatgcaaattcaacttgtataagtataaaaaaaattaactctgaagtgtatactattcgtactgaaatttgttgttttttcctatttgtgtaggttgaatttgaatttgcatgtggttatgaaataacgacatatctcatattgatctatcatgttagttttttcaaaaaaaaattataattatctgaatggcatataaaaataagggatatatcttgttaagaaagaaaagagtttcacatttctaaattactacttccatgcatatatgtataacgttggctagtataaatttgaagtagccaatgtcatataaaaaaactggagggattattttttttataatgaatttttattatatatatagagtcaagctagtaaattaattaggtgtacgtacgtcgtagtatgtgctggtgctttcttttttttgaacggaagtgctggtgctttcaggcacatgaaactaattgttcacaacaatagtgcaccacatataccaaattg

SEQ ID NO: 29967 - DNA, 948 bp, Oryza sativa
  unsure (1)..(948): unsure at all n locations
agggaagagtagtatcaactctggtgatctcggtaaaaattagtatcaatccaaatgactgactagttatactatatatattaaacccaatatatatacacacgtgacctttctaaaaaattctgatttttttatcatgactcactagcgcaactatttctgaatcttcttgaatcatgtttcggtacatagagcacatcgtcatattacggacaattttattcttgcacatacttagatggccaatattgaatatacccatgctttttcaggcatttggctttatccctactttttttgaaacgaatcaaccgtttgcctctgttccgttaattctggctaacggtgttaaatgtgggggtaaaaagataggtatactcttagatattttctcgcacttttgacataatcaaaatacaaatatctcaatgccattctatagcacgaatttaatttgtaaatttttgtgaaagtttaccaaaatttggatcaaatttgaaacataggaagaatcaatttacaacatgttcaaagttcgtgtcaaaatggcttatctcaaaatagggcaaatgtgcaagtggtgtacaaaagtacggggaaatatctaaggctatgcttgtcatttttaccctcatttaacaccgttagcaagaattaacggaacaggggcaaacgactgactcgtttcgaaaaattagaggcaaaaacgaaaaaaaaactgaggcaaaatcaatagtgtacattgaagcaggagcaagaacgaaantgccccttcatataaagtataattattntctttcaacatatagcataaggccgggaggcgattaaatggtggtactccatgagcgagcatncatgccagctcaatccaagacagaagttgtttactccggtaccgtttcactgtattagcctagttgccgcatataggatccatcgatataa

SEQ ID NO: 29968 - DNA, 664 bp, Oryza sativa
aaataaaagcaactttcaaattattattattgttcacaagagaatccattaactatgcctaaatggggtatttgtttccaaagctctgagtgaattcattataaatgaagccaaaggacctatttggcatgaaaaggttttcatattatccttttatgtgccccccatcaccgtcacgttgtgaatatctggtctataaagggcaggtcgaccaactgtagaatataatctatacccctacagacttcggttacacggtgtactatcctatcagctactccctccgtttcacaatgtaagactttctaacattgcctacattcatatagatgctaatgaatctaaacattattatatatatagattcatgctgcatctatatgaatgtggataatgctagaaagtcttacattatgaaacggatgaagtaccaaattctgcagtgagtaaatgaattcaaatctaataaatacaagtacaaagatcttcaaatctgcatcctatcaaatagttcacatcaagataaagaaaattatttagagtgaacttctaagcagtcttattgaaagtaaacattgtcacagtccatgtacctgctgccggtttggtggggcgggtgtgtgacccgttggtgcagcaggcaagttaagctcagaatctagat

SEQ ID NO: 29969 - DNA, 1159 bp, Oryza sativa
tgtccatgaagcttgcctcccttagccctttgatgtatgagtttggaccgggcattgatatgcacccagatgttcttcgacaggtaaagtaaaatagggaacaatgacagcatcaatccaaacgcaagcaagcatctctgaagaatctgtgattcagttttcttctgccatgcatgcgatcatatctctgactctcttagtacttagtataccttctttgtttgattaagcttgcaaagatgccacatgagatggtgcagtgcatgggccaaatggggagtacaggcatttcactccaaggactaggaggaggacccacaggctttgctcaggtcaagatgataaccatagtctctctgaatctgaactcaatctgcatgactgcatcagatgtgatgtcgcttctcctgtgttgaacacaaattattccaccaagcactcatcaagagtagtaggagtagcagataaggaaggcaatgtgacactgatcatgcatgcgctgtctgtgcttcacctttgcattgcaggatggcagcagccacattaacatggtggtgatgcaagttggagagcaaggccagcagcagggctctcttcaccaggtcgagatgagcagccactgcttctttcattagtagtagaacccatgcatattctggtaattgagatacaagcatgattgattagcaagaagcaaagcttatgttctttgcaaatggtgactgatgatgtgttaactgttgcatttaccagactaatgcagctatctagtaacatttgtacaaactaggaatggccacgaagcagcatcacatagaggaggagatgccgaatcaacaagtgaagtgaagtgagcaagctgaagaagaagagtggggcaagccgacagagttgaacctcctgaagatctcgcaaggatcctttggttgctggctcagctgtaccatctcctcctgggctccaaaatccacactatcgatatctctgccttcaccgtcaccaagactgcatgcagacagtaccaagacgaggacatgtactgttgctcctcctgcgtttcgcttcattcattcatctgctgctgtgctgttcctccccctcttctgtgtgttgcatctgtagatactctactcccttttcatgtgtttaatactccaga

SEQ ID NO: 29970 - DNA, 906 bp, Oryza sativa
tcctttggttgctggctcagctgtaccatctcctcctgggctccaaaatccacactatcgatatctctgccttcaccgtcaccaagactgcatgcagacagtaccaagacgaggacatgtactgttgctcctcctgcgtttcgcttcattcattcatctgctgctgtgctgttcctccccctcttctgtgtgttgcatctgtagatactctactcccttttcatgtgtttaatactccagaaatgtgcatgtgtgtgtgtgcaatatgcatgccttgcaaatgtgtacttgatgctgccagcctgatcgatatgacttggcctcctgcctccagtcctctcttgtacactgtaccatctctctttatctctgctctgggatccattcaaagcttgcaaatgcaaaagcaaatgtgtgtgtgcatgcacagaaaagtggaatcttttattaggcaacctgatctgacctgacctgctgcttgtactcctatttggacacatgaaaaatgaaaatggtaggagaagcaagggccatatctgggcttgtagccagtgaacattggacttggaaagattcatcaaaaaaaaattttgctttcccatagctgctgctgacccagcacctttcagaattctcagatcggatgcttgtcttttgagttttgagccttgaccaggttaactacatactcctatgcaacttcctttctgcaagctatgttatgtacagtacatctgtacatgtatgacggccgctgtagataggactacagtgctatgttgccatgcatgctctgctgcaccttttgggctgagaattcaatgttgtttaatccttttctgctagggttggtactatagtagggatagcattcacaatgattcatcagctggagccaatattcag

SEQ ID NO: 29971 - DNA, 3121 bp, Oryza sativa
gttctatttgctttcttttttttttactattttcacctggttttggtgataaccattgtcagatggttcaattggaaaaaaaaaaggtactcctaaatgaaatcataacggtacgtagccggttggtccggaattaccaacaccaatttcaccattaataaaagccatgtcttattgttattattgctttagtcccgtgtcaaggtttataagtcatagtaaataaaaaaatcccagccgaatatattcaaattaacaacgtggagaggatgcttaatggaaaatagataaaataaaataattagtaataacggtaggagtactaatctatgtactttgtggctttcctaggtagtccggtgtcgtcttaggacaaatctatgtgtgacctacattttatggcctttcacagtggaccacgcggggcgagttgcttcatgcctccaccccacttgcgtgatgccgtggaggagggagggtgtgggccctattacctttgcataggctctcgtccctcaggtaagacgcgagttccttgcctcgaaaaaactagaaaagcagcatagcatccaaagcatcgatcctggaaagctcaccccacccccgccatgcctggtccctcacgtaccacacgcagtcgctgttgtcgaggacaccgcatcagcacatccgctaccaatgccaccgaatctgcagaggaggtgaggaggagatcgggaatggagccgccagacccgagcgatggaggaggcctccttgacctctttttttctctcttttactgtctcgtcaacaaaccgtgtgaaaggagaaagaagactgcatgtgtcatgaggtggtgtggctctaacatagtgagccgaagccacttctacgccgttaagccgtcacatgtatgtatgtatgtattgttacgtgccatacgcagatcatgttgtgttgtatgtattatggttgctgcttctaccatactatcccctccatctcaatatgtagcaatctagcatgggattagatctatttctcattctagattgatacatattggaacggatgggagtactacctaggagaaagaaaaaacaacaaagcttctgttggaagactgtagtacgaacaaacatgcacgcgtcgcgtcgcaggatgttactagttagctacagcagcaattactatcttacattttcggatttttcctttaatgatagaatttggatccaaaatctcaagatactactggtctctctctctatatatatatccatatacacgctcaagacagtagacaaaatccatagcatctagtacgtgccaaccatgaatcaatcagtaagtacatgacatcaacattactctatcatgcaagtcagctatagctagctcgagaacacagagagaaagatactgtatcgtatcaatcatcataagaagttttgattttggtcaaacttaaactactttaaatttaactaagtttatgtataaatatagtaatatttataataccaaattaattttattaaatcaacaatcgaacatattttcataataaatttgtgttgagttgaaaatattattattatgttctataaatttaatcaaatttgaagtagtctgattttaccaaagtcaaaacatcttacaaactgaaacggaaggagtagtagttattattattattattattattattattattattattattattattattataaggtaatagtagtggtttagttgtttgcggaagcataagatacacgtgatgtggacacgtgattttcgaagagattatttcttttggagtaatcaatggccaatatccacatgtttaagataaagatatgttcgccatcaatatgctgctgctgcctcctatactcctccatctaaccttcaatggatgtgacacggccgttgcaccatctcaaaatataacaaaatttaactttcgatgtggatattaaagagttaaatataacaaaattttactttcgacgcggatataaaagaggggatcatatattttatgcacaaaaacctcccgtacacacttcatacacactaactagcaaatatcacgaaaaattctataaaaaaggcatttactactaatagtattacacatatatgcaaagtctcatattcaaattcattatattttagccgtaacaaaaaaagtgaaaaatctaacagttttacaggtaaaaatctgtcaggattttgtcttttttattacggctaaaatataatgaatttaaagataagatttcacatgtaagtgtaatactattggaagtatgtgtccaattttttgtagaattttctgtgacaattgctagttggtgtacatgggaggctagtatacataggatatgtttttttaaaaaaaaacaatgtgagtaggatatgtttccataaagagagggttaaataaaattatcttctcaggatggattatatatagacctaaatagttagggtttaaataataccaaaagtactataggtagtttagggttaaatgtcacttcatacaaatattaagttgttatattttgaacaaaattaaaaatgcagaagttgtattttgggatcgaggaaataccatattatatcacctaccactaataaagtagaggttatataccatgaagataagtgtataacgccaacttaagagcgtttgaaagagaggaaatgagaaaatcgataagatacactaaacaaggtgataaattagcgtgttaaatattaattattttgaaattgaaaatagattaatatgattttttaaaataacttttctatagatttttaaagagtattttcaaatttatattaatatcactattaggcaggacacgggaggtgatgacaaccgtctcgcgtgaacgggagaggttacgcctcctgcattgcactttgctctcccaattccttattcaattccctccgccctaaaataaatttatctttaccttattttatttatttaataagttcacttttaatcatcactacatcaaaatgtgtgtaaaggtaaggaataattgtcttagagcaagttttatagtagatgtgactaccacctctaatcttaaccatgtcatctact

SEQ ID NO: 29972 - DNA, 963 bp, Oryza sativa
cccccccccccccgaatttttttatttttcttttatttttttgatattttttgcacgcttagggacacataagaaccaaccatagaaaaaatgaactcaaatggacgtaatatgtaacatgtagaatttttcctctcctctcatatctctccgaactaatgcagaggagagagatgtgcaacttttttacttttattttatttttttgatatttttttcatacttaggaacttacaagaaccaaccatataaaaaataaactcaaacggatgaaatatgtggcctgtggaatttccaaagctctaccgaaaaacttctctcctcgaaaacacaatcttgcaagcagaattcggaggttttaatatcgccgaacccggcgaagcgggggaggatcggatgtaacattttctgtaaatgtccgtggatatattatttgcctgattccgagtccgtatgagaaagttacgtctattttaataaatgacatattttgtccgtttcggtagagttttggaaaattttacaagtctgtttgagtttattttttatatggttggtttctatgttctcctaagtgtgaaaaaaatattaaaaaatgaaataaaaataaaaaaattgcatctctctgtactgtttaacttatggctatcatttcatgtggttatattttaaattagattaagtaattttatatagtgatagagtgcattatgtgtaacatgatgatcaaagggttttactaaaggagttatggtctaattttagtgaaggtgcaaagtagactaagtgatatgctagctattttcagacttagctaagtggtagttcgagtttaattttttttttgtggttagttgtatcgtgatcctaagtgtgaaaaaacattcgaaaaaataaaataaaaatgacaccattgcaactccatacagagaaacaggaatggaggcgaggggtggggggcgg

SEQ ID NO: 29973 - DNA, 5559 bp, Oryza sativa
acgtgttggaattaatgaatgggccttagcccactcgaagattaattctttggaaaatcacaaaagcccacctcatgggatggcatgcatgtggagtttagtaccaccttgcttattctaggagagggggacctccttaaaagggatgatgccctcctagtcgcttgaagcatgtgtggtggagagaagaggggaaacacacgcgtgcgctcgctcgcctcgcctggcagggcaggcggcgcgcgtgcacgacgtacgcgtcgaatggtccgaaaaattggctcctcacccttgcgcagatgtgttccgaaaaatctggtgcgtgcaaacggcgtggagtccggataagttatgcgcgacttatccggttcggttacgcgcagtagagatcgtgcgagcgccctgatcaagcgacccttctctatataaaccgacccgccgtcttcacgcagtatatacgcaaaatcaatctagggtttgcctcctactctgtactgcgctgtcgctcgtagactactccatcccgctcgccggcgtgcaccagcgatcgggagagcaggtctccggaacctctgcctttgacgtcctgcaccgggagaaggcggcaataaggtttttgggaagcgcttcgcgcgactgctccctgttcgttcgcgacggctcaccttcctcttcgctcgcgtgtttcgtgccttcgtagacacctgcgaaaagtttcgaccaagcagccggtcttttcgtcacctcggtacgtgttcaatatgttgcgcatatttgatctgttcatgttattctgcgtagtttacatgtgtagatctaatgatgcgttcatgctagttttcatctgtaatgtcatgatttatttatggaataaattaaatcattatatgcccataatctcaacaatacgtgtaccgctcctagccatacccgggacggcagctgcccccgcgccgacgccgtccgcgacctgtcacccaagcgcgcctccggtggtaggcagtacccgcgctggctgtgctggtacgaggggccccgccgtaccagcacggcagtcgatcgccgaagtcggagaagtgtactccagctgctgcctgctgcgccgaaatgtcaaaccggagtcgagcagagctgaggagagagagagagagagaggcagggcgactcttgcgttcgggaagaggcactctgccacgctgcttcaccttcgcgatcccatggctgatcagcaagagaagggtgcaaaatgtctgatccgtttagagcggactgaaagcagcacaccagtacgtggcgctgcaagcgtggatcgtcttcatgtcatatactcatatcctgatatccgtggtggatgtgattggtcaggaggaaaacgacgcatgcacagcttgatactgatacagtactgctagtatgaaatagcatcgtatcggagtaagatactatgagattttattttttaaaaaagtttaattaagatttgtattaattacaaatagccattcaataaaaaatacatagtaataatatatatcatgcaaatagagactttatcaagagaaatcacattagttttgatatatttaactgatttttatataaacttaagcatatatatttacgttatttttcaaaccatcttattttaaataatattttgtagaatcgtaagaatcgtagaatcaggatactatctataatttcgtaatatcgtgtcgtaataaatgaaaattaggatactatattgtttcgacttggtaattacgatacggatcgggatactaacaaccttggatatagtagtgaatatgtcgccatcacccctttcacttacgtgtgggcccacaatgctggcagtgttagtgtttcatcccgaagcaacataaatgtgtacctttagctcagcctaactcagtaagcatccaaaaattgatggaaaaaatggcttataggtggacatttttaggctttaaaatgaatcaaaatatattttttaatattccatggcaacacacgggcaaatcatctagttattctaaagttattactaccatattgtatctgaaaagcactctccttccaatcttaaatattattgcgacataattctcactgtctaaagggagggccgaatttattccctttatttaaaagatcacagttcactcacttaacacgttaatttacatgtctatagataattttcttttaaaaaaagataagtacaaatgcatgtgctcacatacacatgtacacgttgtgcacatcctatatctccgagagactggaccgatatatattgagattgacaaagttataataagtgtcttgctgttgacggggacatcatctatcaaaaaaatataattactcagaaaaatgatcacccatattaaatctggaatttaaattggaatagatataagaaatctaactagttgagttatatttgctggtatttatgaatcttgtttcaagtgaacaaggccacttgagacattgtttttaatttgtttaagtcaaatatcagttctaacaacttaggcagaacaaaaatctcaaatatatgagcaattttgaagcttctctgcagttatagcctggtttaattcctaactttttctttaaactttcaacttttctatcacattaaaactaattttctacacacacaaacttccaacttttctgtcacatcgtttaaatttcaatcaaacttttaattttcgtgtgaactaaacacacactatatatgtgaaactaagacgccgtacgtttggtctaatccatgaaggaaaggagaacgtggttttgagctttcatatgccaaatttgtcactatcgactcacggttggtgtttgaatgtttgttaggccacagcaacagaaaagggccggcaacttgttcgtaccactctagcctagtactccaacaatcttactccatctattctaaaatataagtatttttagatcatggcacggtcttcgagatgctatattgaccaacaatatttataaaagtaagatattttaaataaaaatagttgtatattatgatagtttgtttattgataaatctagtaacatcaattttatatgattgatgttctttactctttttttttttgctattaatagtcaaacttaaaaatgtttgacttatcactgtgctaaaaatgcttatattttaggacagaggaaatactattgagttactactggtattcctagtatttggtaggctagtattcataatttcctccgttttagaatatagcaatttaaaatcagatgagacttattctaatcatataaatttagagggagtatatccagattcatgctattaggatacgttctattcgatattgctatatcgtggaactgcggaagcacatggcaattgccaacagcccaaaccgcgggacacgcaagtagtacgtgcttgactacccgttttttttatgtgcatgcatgtgctgttgtgataaaagcaacgggtgcagatactagaagatatctgcctgtaccattcgatatcttggagaagtgccgtttatatatactccaggcagcatcacgaggtgcttttgtttcttcttcagacgtgcaggcgcaaatgggtgagatattctcgacgcattcattgagccgcctccttccggtgagtgggatatttctgatttctcgtcatgttttgatcactgcgtattcggcatgactgcctaggcacgtcttgcttttcagagcgatgcaaactcgcagatggaagatacacgggtgacgggttacggcccatgtttgatgggaggtcaccatttcgtagctttcccttgtgcgttgctcttcggctgtcacctgtcatgcacctgcatcccggatgtgttcttttccactgaaaacggaagataataggaatacgcgctctagctataatttaatgctgcgaaagttaaaaaaaaacgttctgcatatgaatctttaaggtgctattttaattctattttgttcgtttacttcctctatcccaaaaatcttgatgtttttagattcctcagcaaaattatcttcatgccaaaatgattaaattgctcccgtcaattcgattcagttgccattttatcaagtctacacgcactcatcaggttatacagaatcattgcatgcaattaattaataaattctttctaaaacacattgccaaataacttgacggaatagactagataaggggcaattgcaaatttaccactactttgaatcgttattgcaaaactgccactagaaaattgcaaaaatgccactagaactgtcattcgagtggtatccttgcaatattcaaaaaaccggtggcaaatttgcaaatgccccaatagataaatggtctcacttctccgatcaaatttactactccagcgactttttttattggtagaacggctcgtttgtagggtggatgaaaagaatcatcggttggccatattttctaataagttaaaacaactttattaagaaataaaaattaatttattggtaaaaaattgtatatttgctctgcgacttaaaagccaacataaaaaaatacattaaaaatatcttaaaatcaacttaaattttagcttttgctttagcttattaaaccaattgatagggcttgaaatatacttttaatcatttgaccatttagccatacaatgtttccttccattttattctgtccaaaataagcttaaagtactactatcttcgttctactatcttcgttctaaaatatagtttatttttaacacagtacattattccaaaataaagttatctgtttaatacctatctcctcccttctactattcacaactattttccttcactactccctccgtcctaaaatataagtatttttagttatgaatctggacaactgtgtatccacatttatagccaaaagttgttatattttaggacggaggtagtattttctattctcaaccaattacaaccatcctctaattcaaactatattgtccagattaatagccaaaagttgttacattttaggacggagtgagtaacatttttaatgcctatgtcaacaaaaaaaatgcttacattttgagatagttgtagtcctatgatactagagagtactttctctgttttagaataagttaatctagtactaactccgtcccaaaataattacagccgtggatattcgtgtccaacgttttaccgtccatcttatttgataaatttatgatttttttaaaaaaaagtcagacataaagtactattcatgttttatcatctaataataataatactaatcataaaaaaatcaaataaggcgaacggttaaacgttgaacatgaactatgcaaaactacactattttggaaggaataagttcacttcatgaccctcaaaagtgacccgaatctaatccatgaccctaaaccgcaaaaccggatatcttcacccccaaattattgaaaccggtgcaatttgactcccttggtggttttggagggcggtttcgctgacgtggcgctgacgtgg

SEQ ID NO: 29974 - DNA, 771 bp, Oryza sativa
gtacccatgaattcagaaccccagagtccgcacatcctcaaatacaaagcacttccctagttagatgtaggttagacttcccgttcgagaaactctaccttctacctgccctcaatttatgcacgattaatgaatgccacctgggtggaagcgagaggtggaaatggaaggtcttagttcggaggtgggatctctacctgatagttgcattgccattcatgatgatcccctggcattcgtccattcagccattcaccattcacccattcaactggaattttggttgaatgccggaattgtgtccacaaattgtggatggatagttggttggctggctggatggctggctggatggctggctggatggatggtgaatggctggcggcggttcggttgctttgaagcatttgttgctatctaaattccatttaaggtcgtaccttatcgcccagcatcatcttattctctatttgtattccctccatctttcagatacggatgtagccttggatgtgcccgtgcccaatgaagaggaagagcgcaacatgaaacgtaagtacaaaagtaccggacacccacccagatcccaatagaatccgccaaatcctgcgggaaattgtaatcccattcaccagctcctacatttaattaacaagagaactattgtatttatctaacacctggattatctccacctttcatttgatccctatttatagattacgctgcgttgctaacgggccgcacctcctatttcctcaagggtgagga

SEQ ID NO: 29975 - DNA, 753 bp, Oryza sativa
cagaaaaggcggcatgacgaagttaactgacagatctgcatgagagaaaattcatgattaaacggttaagatagtttaaggccataagggcattgctcataggatggtaatttcatcaacaataaacacgtgtatagcagaggaaatgatgacacataactcattgcaatcctgcaaatacagaaaaaaaaagtgagaaaaacttaaggcaaccccttcaaaatctatcaaatttatatgcttaatgcaaacagaaatctagcttatcaaaggggggaatcacgaatgcttaccagaatagccttttgataaaattacacagaatgcattccatgaagaactatagtgaacttgtagatttagaacataaaagttatttgcaataatttgcataacagtagtcctccaaaaccattatgcttcagacgttaatatatatatatatatatatatcagcatttgaaaagattaaatgaaatatgaaaagaaccttgcctgaccatacagaattgaatatataaaacaaacagaagaaaatgttcctgaagcatttgacatggacactcaaccattccttgagctttgacaaataatatttaacatcttaacgctcaatgaatattgtagatagtagaatttataacatgaaaaaagggacttggcaaaagaagataaaaacactaagatctatttaatgtctgaataataaataattatgtatttcatgtggcatcacagtgaacgatttatact

SEQ ID NO: 29976 - DNA, 2576 bp, Oryza sativa
atttttaagatgattttaatggtggtggtaacgaatatgtcacccccctactatcattctatttttttcatattaccctttcaatttcttagtattacataacaactagtaaatttaaatggatagtcacatataaaataaattaaggttagtcttccctatagaaaaatgtagacaacaaatttcatggaaactatgcttttatttattttagaaaaatgttatgacattttttcttttatccatagccaagtacgtgtatttacgtagttatgaagaaaagaaaggcatgcaaccagtgtttacaaaaccaacaaaaatcagtcggttttcatgaaaataagacttctcgggcttgttcgagaacacaaactgcccagtttcctggtcaaactattttttacaaattttgactggatttttaacggtagtcaatactccaacccggcatgcaacttcccacttgcacctgtaggaactagctaggaagtcaacctgcttgtgcaatgtgcatatagcgtgtcccctatagtgcaggaagtgccgtgttatttgggtgtaaaaggttgagtagtctgacttcaagcagcactcatctcatgctaaaatgagctgtggcccagaaacatgatctcctctattaaaggatgcatgatataactaaattaacatgtaactttaagcccccatttggagctgagtttttttttacagaattatacatagagaaatctcaccaacttttttttttgttaaagctcatgcagttagttagaagttattaaattattctaaaattcacgttttatcaacaagatgactgtattttaagagtatgtaactgaagggcacacgatgttgtaagtaaggtagtgtgcgcgcacaatttttatagatacatgcgttgtcagttaactcgagcaaaattcagtttatttagttgaattcgagtgaaccaaaacctactcataattaaggacgtgattgtacagctagtgataactggtttgtctcacttcatctatgagagaccctatcctatagagctaaatcgagagcacttttgaaatagattttctgcacaattaagtcggcacttcatctatgtgtatagagttctactctttaatagcaacaactaggaaacgctcactgatttatgattgtgcaagcattgatggtatcgatcttagacgattatgcgaccccctctcttctccctatcattcgcccttttctctcatatattctccagctgctagcccatacatgataagccccccggcaacagaaaagatgcatgaactggtcacacacacacgccacccccacatgatgagaattgtattctctgttcataaggacggcaacgggccggattaaagctggcaacattcagcttagctagctcatcatcttatcatcagccacgtcgaaaatttaaatttaagtaaatttcacttcgggccaccttttgttaccgatgtttcactttgaactaccctttaagcaatattttcattttggactgggtaaacctgcttttgtttcactttggaccacccgactctcttctcaagcatatgaacgatctcgattacatcgtctcctactcgtcaatgaactgccacagctatatgtaagattatttcttcgacatattacaagttgtatgtagatggataaatgagtaagagtggtccaaagtgaaataaaggtaaaaatacccggtccaaagtgaaaacattagtcctaaggtggttcaaagcgaaacattggtaataaaaggtggcccaaagtaaaattaactctttaaattttaaatctcaattttaaaattgattttgatatcatattttttatattagcttttaaatcgataataacagatatataacagtcttatccataaattatctgtcactaataaacattatgattataatcagctatagacgaaattaataatgatgcaactgatcaatggcatcacatatgcatccacacaacaaaaatatctgcagttttagctgataaaaacacgcaacaaacaatatatatggcagtcgttggccatttagagatagggcctggtagtagatctagctggagatatatacatgcctgtgaaatgtcgcagccatgcaacagtaggtacgtggacagtgcaccagcaaccagtgtgtaatatgcattagcaacagtctttgcctccaaaaaacgacctgcattacgtgctaagtgtatgtctctagaaagcaatattgtgatgggctgtgcaagtgcatgctttacacatgcttagctagatggcaagttatctatctttataattgttcaaagaaagaataaaagggcccactacaatttactctgagagtatataaattcttgtgttaattttggggaaaaagagaaaaaaaagggcccatttgaattaacatggtgggtctggattttagcaaaatatatcgattgatacaattaaatataaaatccaactatatttacaaatagaaaattacatactatctctctatttaaataaatgatattgttgactttattcggttttg

SEQ ID NO: 29977 - DNA, 2006 bp, Oryza sativa
gatactatgaacctgctcttattggttaaggcattggataggcgggcaccacatcataggccacgggacaaactggtagaggcacggttgcgcgcccacaggcctgtacatggagcggtgtttgcacatacaaattggcattgatggctggcgtagttattggtgcagcgaatgcgatgagcgtcgaacatcaagcaatgtagacgaataattgaggcgaagaggcgcctagtcaccaaattagaagataaaattatgattgatcgcttcatgtctgatttgaactaatctagtgatttgatgggttgattgtaggctaatggggttgtctagtactacctccgtcctaaaataagtgcagccatgaaaatccacatctgatctttgaccgttcatcttatttaaaaatttatgaaaaaaattaaaaaaatgtcacacataaagtactttttttttagaattacacaatactacgtagacactcacaacgcacgccactcacccctatgaacacacgcacataaagtactattgatgttttatcatctaataacaataaaaatattaatcataaaaaaatttcaaataagatgaacggtcaaacgttaaatatgaacagtgcaaaattgcacgtattttgggatggatggagtataggaggagggcgtgagcaatgtgggccatagccggcccggttaacccaccacgcccaatgggcaagtcatatttgatgcgatagactttaaacatagtttgatcattcaccatattcaaaaggcaaaaaagctagtattcaaaaggcaaaaaagctagtatgtaatttattttgttgtgatttgttttattcgtaagtgtactttaagcatgacttgcactttaaaatatttacactaactttaaaataagatgaatgatcgaacatcatatctaaactctaaagttaattgtgttaaatatttatgatgagagagcaatctgaaatgctatgtgggcatagcataatatgaagtattgtgtatataacataattatgaaatgtgtgggtataacataattgtgaaatgtgtggttataacataatttcagaatttccgctgtcaaaaaatatttgtgtaacattttctgctcagctgaggctgctgtgtgaatgtgtacagaatcagcgatgctgatttactacatctctacaccagagctaattgaaaacgacatcgagccaataacatcaacatttaacagagcgacatatatctccaatgaaaaatgtgtctttatttaaaagggagcagttactgcctcattacatcactcttttaaatagatacaaagacacatatttactcccacataaagggatgaaaatccctaaaaagaagagaatttgagcaggaagctccagaataaataaaaaatatcaatgagaagattgcatcttggagaccaggaaaaatgaagattcctcttgtcccaacagctgagaagattgctctcactcctaatatcaccagcacctacatttttgtcattcagggctgcttctgaaaattggttttaacttttcatttgtaccaaagatatatgttataaattattggattttggtggcaatgctgaaaatgttgccattaagccctacacttgcccagggtccttaatgctgggcaggtaacaaaactagactaagttagacaaaatgatgagttgggtactcatgctcatatccattgtaatcataatatagcttctcaccacaagctatatcacggcaggcaaccaacaagacatggctctcaccatctatgtcataccggacacatttaatattcttcttctttttgccatccctgcaaagatttaacattttcaaatttaggaacgatagcagtctttccaacatcaagcatagagtcagtcttcctatatttgagaacagagtattttattgaaggaatgcagaaataaagatggtttgacatgtcagacagacgcctaattatgtacttatg

SEQ ID NO: 29978 - DNA, 1244 bp, Oryza sativa
gtcaagtgccaagttctgccaaatgataagtaaaaacttggcaaagagggtggcgatgcgccgagagtagttgtattgatcgttgagatagtttacaataaccccgtgtgtacatatttatacccatgggtagatacgagtacttcttggacaagaaagaaacttttctaaagataaaaggaaaatataaagtccttatcagacactaaacacacttttctaaagataaaaggaaactactaaatcatgcctaattaatagatagaattacgccgccatgtcgcatcctccttgaactcggtcacttttggataagcttcctttattcagataatttccttaatcaaatctagtaagaatccgactattggtgacttgacaattcccatcggccaattccaggactctgaagccgatcctgactctaggccgatgatgacttcgaggcttaccaaatttcaaatttcactgttaacaactatacaacctaaaatgattatcttcttgggagatgatcgtcttgggacagcgagagtaggattcaacaccaagtttctccttggttttccaactggtttttgagtaatgggggagtgaagcttcatagtaaacccatcatcctgtcgtgtgtagaagcccttttcaaggaggatctaaaaaccggattcttggtgtccaaacttaggctgagttcgttggttaagttttcaacacatatctcgtttttcgcgctcacgtttcccaaattactaaatggtgcgttttttataaattatatacaaaagttgttttaaaaaacatattaattcatttgcaaaaaactaatacttaaataatcatgcgcgcgctaatgagttgctttgttttgcgtgcttagaggattagttcccaacacacaatacccaacacagccttagagcctgtttaggggagcttctagcagaaacagcttctcacaaaatctccacctccccaaacagattgtcactctgattctaagcttctcacaaaatctccaccacccccaaacagtctagattgtcactctgattctgataaaatgtagttctagaaaataaactagaacccagaagctggaaaacccagctttcatattctaagaagctggctactaacgaacatattcttaaaatcttaagctccccaaacatggatttattggatccaggaaaataaaaaaaatcccacgctagccttacctagaaaagaatttttatttttta

SEQ ID NO: 29979 - DNA, 1039 bp, Oryza sativa
tccccctcccccaccacccatcgcctccattcctatttctctatattgcaacctttttatttttgttttattttttttggatgttttttcgcacttaggatacgatacaaccagctaaaaaaaattaatcttgaacggaatataccacttagctagatatccgaaaatagcataccacttagcctattttgcaccttcatcagaattagaccataacttctttagtaaatacctttgatcagcatgttaaatataatgcactctaccactatatgaaattacttaatctctaattcaaaatataaccacatgaaatgatagccataagttaaatagtacaaagagatgcagttttttttatttttattttatttttttgatatttttttcacacttaggagaatacaagaaccaaccatagaaaaaataaactcaaaacggacaaaatatgtgacttatagaattttccaaatctctaccgaaacggacaaaatatgttatttattaaaataggcgtaactttctcatacggactcggaattaggcaaataatatatccacggatatctacagaaaaagttatatccgattcttcccgctctggcgggttcggcgatattagaacctccaaattccgcttgcaagattgtgttttcgaggagatgtttttcggtagagctttggaaaatttcacaggccacatatttcgtccgtttgagtttattttttatatggttagttcttgtgagttcctaagtgtgaaaaaaatatcaaaaaaaaaaaaaaagttgcacatttctctcctctgcactagttcggagagagaggagaggagaggaaaaattctacaggtcacatattacgtccatttgagttcattttttctatggttggttcttgtgtgtctctaagcgtgaaaaaaatatcaaacaaataaaaaaaaataaaaaatttccggggggaagggcgccagccactctggcgcgctccccctagccacctcagcatcgccccgccacgtcggcagggggacggcgcc

SEQ ID NO: 29980 - DNA, 3897 bp, Oryza sativa
  unsure (1)..(3897): unsure at all n locations
actcatagactatcatttttgccaagtttcgtgcaatttgcatatgtggttctaatcaagagatagaatctgccatttctttgcttgtttgttgatatacctcttgtgtgtaacttgatgttgtagctaattgatggttgatgttgatgataccaagtgtgtaacttgatgttgtagctgctgttgtgatgtacctctacatgttctagagaagactccatttgtacccattgttgattattgtggaagcttggagtggaccgttggttccatggttttttactcctcacaccgaggaggttttttcacgtaaatcaccgtgtcttgtgtgcatgtgtttattgttgtttcgctgctgatttgctagttaaaactatcctcaaagttcatggaaagatgaggggttgattgtgtgaaatacgtttgtcggtttgcgaattgtagtttgcagattgaaagtgtattggttcagcccgaacaattattatactcattatttggaattttcattagttttgtcaaatattttaaattaggatatatgcagccttttgaaattaggaacttagcctatcaaatagggaacttagcctttaaataacccaaaaattcgctcctatgaagatttgacattaggacattcagtgctactcagattactgcaaccactaggctatataccctttcataatttcatcaaacataaagctttctattttgtgctatacttgagttgattaatgaattgccatccaaaacacagcttgcattgaccttgttaatttgctgcaaagtgtttttcttccaaatatccttgtcgatggtaggattcatgacgaaacaaatgagaaaggtgcatccagtgacaataattacagatgaagaattggttctttgaatagtggtcagcattctcccgtctgtctactgcatcttcaatccaagattacaaatttttatcatatctaacgttcacgtgttggtgttcagtaaggttagacatcacaacatcacaatgtgtgtgttctctgtaccttttcataaaatagagacagagaatgttattgttactcattgtactaactgtttatatttatgttgttcaatatacgagattgttaattccaaatgggcacatcgcaattatttccatggaggtgatttctattgtgaatcaataatggcacaaccaatatatactggatgttgcttccctaacagtggcaaacaaaccagacaatatggttggtgtttgacaattaatgatgacacatgctgcaccatgctgaactgatccagaagtgttaatggttataacaagaggattagataattttgaggcattagagaatgcattgagggatcttctatataacaaatcacatagatgtgacaatgctttaaatcctaactttttgccagcctaaccgaatctaccacgggctaagctacccgagtcaatcttgtccaagtgcttgtattagatttttttttcatcatgtttcattgaacttcttttgtggatatagccatactcagtgcgatgacatttaagctctcatcaatatttctgtttgtcgaatctccaaaaacgtgtcaagactatactatataaatatttaattctggtaaagattgcattgacatctcataatttatgaaaacatcttgatgtggttaagcatatgcgtacgggatggttcaacaaaactaagtgtgtgggtaagcatttgcatcaaaatgacttatagagtggaatatcaaacttcaagtgccgtatgggatgttttttgcaaattcccctagtttttaacaaaagcttttaggggtgggcctggctgtcattctctctcttctctctttctccttttcttctcttctcccgtctgcgcgcgcgcgtgcgcgcgcactctagtgtgtcggtggtcctgttctaatttgggccaggcaattgttcctagagtgggtgagaaaggtgccggagtggtggcttgccatggaatggtcggattgtgatgattgggcggtcgcgatcattatcactgtagggcatagcagcctgtccactagtgagcatgcatgcagtgctgcggtgttggccaagagcacagtggcggcgtcactgtaccatggcggctgcggcatcaatgaaaggtgtcaatgagggggacagagtggaaggcaatgagtgctcaccgggcagcagcccgctagcgcatgtgagggcggcgagcagcaaaactatggtcattgacgtatgggtcgggaaagtgttaactcactggttatccatgcgctcttgccgtggtgcgataacaaagcacgcatgggtcatcctcattcacgacgaccccctcgctccaagcgtagtgttgttggattttattacataatggtgctcggttttattacgaccatagaataatctgcaagtatacagataccattatagtctttacctaagagtattctagggtatcgtatccacagagaacatgtgtgtataatttaagaacaggattcttccaaggacaacaactaaattgtatagcatatcaataatgatgtatatagaagaacattaacacaagagcattatattagcctataaaacataatttatattttctttaaaagttaacacatgcaaaataaaaatcttgaaatataaacatacttctatattatgtaaggaggctacgtaaaataatttaatttttttcgtaactttaattgtaacctcttgtaagtcttgaatggcattttgggtattttttttaaagtatcttggcccccncccaaaacttttaaagggcccccccaattaaaatttttttggggggcagaaaaaatagataaacgcaattgtgttaagggcaaatccttgaactacagtaaactccggtgggcatagaaccaattctctcagtagtttaatgaagtggttgtcgcaaggaaccgcctacactaataactgtttagtgcaagctattctctatgagaacaatatacccaaatctttttgtcacattcattgataatacattaatactaaactttaaaatttaaaaaattgctctatgaccgattgaagcgaacaatctaaaggtttgatcaatgtttaatatggttagatcaatatttccctatataaatattttttttctaatgtttcttcgccaatatcaagttgcgacagaaggagagaccaaaagatttcaaaactgatattagttggcaaacatatcacaaatgtacctcaacatctagctagacaaagaacaaagcattgatgtgtccatttgcataaaccccggctgaacacaaaactaacacggtgtacaatcacctccttctccatgggtttcaactaaagagagcaagtggcatgttattgttgagaaaatatcatgaaattaaattgacaaaaatgagagaaagaaagggttcaaaccaatatttcgaatgaagtatatttaagaaagaatgccatggaactaagcgatttagcatcaaatgtttcgaaaatccatgtttggaagtgcgatgaaattgacatcataatagatgttgggataatacacttgctattcttagctgtgcattgaaagtacaatttaagtagcataggacacttaaaatatttagctgtgctatagaaagtatattttaattaggaaaatctgccacatccgaagtggctttaataacacatcacctaaggataagatatacgtgcatgctctgacgtgcaattaaactatatctcagcataatcttccagattctgttagagtaaaatcctcaagatatgaaagtaaataattattaaattctttcatatataacatcttctatgttctatgtatatatatgtgaaccgcagctcctgaagtg

SEQ ID NO: 29981 - DNA, 1987 bp, Oryza sativa
tgaactcctcccaccggaacgtctcgccgccgaacaccaccaccggctcctcctcccctctcggccgctccgtcctctgctttatccacttgccgccgccgccgccggtgacggtgcggctcacctgctgctgccgccggccaccatggccgtcacctgcgggcaccggcccgatgaagtaggcctcgtcctcgccgccccggccgtggcggtggagcagcgcccacggcggcgcgctcgccgggtcgtcgaggaagacgacgccgtcgacgaggaggcgtcggtgctgcaagtagggcaggaggaagaagcagagaagctgctcgacggacggattgaacttgaaccccggggagagcccctgcgactccgccgccgtcgccattgacgcagttacaaatcgctcccgcctagctagctaggtttgttttttttttctttttctttagaaaaaaaatcatggagaagaaataaccgttatatcgggagaggttggacttttcatcccgattcgggctcgacccctcgtcgttccgactccgaaaccgtccatggcccgtacttttacatctcggtcgtctctcatctcgtcgcccagtgagagcagcccacgccacgataggtgtggatagcttttttcgtaatcctattttagccttatattgcgttcttattttttaatatacgatgccgttgattttttatatatctttggttatttatcttatttaaaaaattatgtgattattatttattttactgtgatttgatttatcatcgaaagttctttaagcacgatttaaatattttttatttgtacaaatatttttaaaaaggatgaatgggcaaacatttataaaaatacaacggcgtcatatatttaaaccggaggtaatataagtttaggttaaaatgaataaaaaaaaagcccactttatttttgaaataactcaattttgtagcctaaaaatttaggctctttaccacccctagcacacgatcaactgaatatgcacacgtgcgtgtagcctcgcgtgggttgagcataaaaccacaatatattatttggttgctcgtattcacatagttggactcatcttacttacttacatgtacacttcgccatgttcactaaaagattattgttttagctaatcaaagatatattaatcaagggattaaaagataaaaacattattaatcaagagattaaaagattgctatgctttcattaatatgcagagaaaataagttcagggagaaaacgaggaggagagaatatatatatatattgatggttagaacgagaaaaaaaaagttctacaaaaatagtatacgtgggacaattcttggataaaaatataatcttatattgtctacataccgcagaacggataaaccatcggtctcaagtcgaacgaccccctaatttgaccatcagcctcaagatatgtcgctcacagtgaatcggcaaccagacactggtggagaagtggtttttactcccggttcgtaacccccctttagtcccggtttttcaaccgggactacgaatccgggactaaagatcgctatctttagtcccgggtgaaacagccgggagtaaaaatcgatctctagtcccggttggtaacaccaaccgggactaaagatactttatctttagtcccggttggtaacaaccaaccgggactaaagagggaataacagcagtacagatggtcctcttttttcttttttattttctcccgaatcaagtgggatgcatatccccaaatcccaaatcaaagtaacatcccaaatccacatcacaaatctttaagttacttatacacataaatcaaatacatcacaaatcctaaaaaaaattacacaaatcaaattacatcacaagttctacaaaattcatcgcaaatacatcacaagttcacatcacacacaaatcaaatacatcacaggatcatgcaataaatcacaaattcttaaa

SEQ ID NO: 29982 - DNA, 2065 bp, Oryza sativa
gtgcatcacccacccggtgctgccgctccggcaccgctcgtcggcgtggaagttgaggctgaactcctcccaccggaacgtctcgccgccgaacaccaccaccggctcctcctcccctctcggccgctccgtcctctgctttatccacttgccgccgccgccgccggtgacggtgcggctcacctgctgctgccgccggccaccatggccgtcacctgcgggcaccggcccgatgaagtaggcctcgtcctcgccgccccggccgtggcggtggagcagcgcccacggcggcgcgctcgccgggtcgtcgaggaagacgacgccgtcgacgaggaggcgtcggtgctgcaagtagggcaggaggaagaagcagagaagctgctcgacggacggattgaacttgaaccccggggagagcccctgcgactccgccgccgtcgccattgacgcagttacaaatcgctcccgcctagctagctaggtttgttttttttttctttttctttagaaaaaaaatcatggagaagaaataaccgttatatcgggagaggttggacttttcatcccgattcgggctcgacccctcgtcgttccgactccgaaaccgtccatggcccgtacttttacatctcggtcgtctctcatctcgtcgcccagtgagagcagcccacgccacgataggtgtggatagcttttttcgtaatcctattttagccttatattgcgttcttattttttaatatacgatgccgttgattttttatatatctttggttatttatcttatttaaaaaattatgtgattattatttattttactgtgatttgatttatcatcgaaagttctttaagcacgatttaaatattttttatttgtacaaatatttttaaaaaggatgaatgggcaaacatttataaaaatacaacggcgtcatatatttaaaccggaggtaatataagtttaggttaaaatgaataaaaaaaaagcccactttatttttgaaataactcaattttgtagcctaaaaatttaggctctttaccacccctagcacacgatcaactgaatatgcacacgtgcgtgtagcctcgcgtgggttgagcataaaaccacaatatattatttggttgctcgtattcacatagttggactcatcttacttacttacatgtacacttcgccatgttcactaaaagattattgttttagctaatcaaagatatattaatcaagggattaaaagataaaaacattattaatcaagagattaaaagattgctatgctttcattaatatgcagagaaaataagttcagggagaaaacgaggaggagagaatatatatatatatatatatatatatatatatatatatatatatatatatatatatatatatatatatattgatggttagaacgagaaaaaaaaagttctacaaaaatagtatacgtgggacaattcttggataaaaatataatcttatattgtctacataccgcagaacggataaaccatcggtctcaagtcgaacgaccccctaatttgaccatcagcctcaagatatgtcgctcacagtgaatcggcaaccagacactggtggagaagtggtttttactcccggttcgtaacccccctttagtcccggtttttcaaccgggactacgaatccgggactaaagatcgctatctttagtcccgggtgaaataaccgggagtaaaaatcgatctctagtcccggttggtaacaccaaccgggactaaagatactttatctttagtcccggttggtaacaaccaaccgggactaaagagggaataacagcagtacagatggtcctcttttttcttttttattttctcccgaatcaagtgggatgcatatccccaaatcccaaatcaaagtaacatcccaaatccacatcacaaatctttaagttacttatacacataaatcaaatacatcacaaatcctaaaaaaaattacacaaatcaaattacatcacaagtctacaaaattcatcgcaaatacatcacaagttcacatcacacacaaaacaaatac

SEQ ID NO: 29983 - DNA, 1710 bp, Oryza sativa
ttagtcccggttggtcatacaaaccgggaataaagatcatctagtcctgttgttcttataaaccgggactaaaaatcgtttttagtcccggttttaaatggaaccgggactattgtagatttgggtcgaccgatcaaagatggtttctccaccagtgagatcaacacggtgtatgttctattctgtttaattctcttatttgtttcaatctttgttcggtttgcaacctgcaccaacgatgtattgatgagagtgatctttgttcataactatcagatttttttcatggatattgttaattaatgctaattacattgatctaaccgagaattggccattctgatgatagttcctaattgttgcatatcgtaagcttaaaacgatggttatgcaactgtttgccaatcatagatggagatttaccaatagacaggaataatgttattttgtctagtttggtttccttttaattttggttggtgtgttagctttcatttggattacactcttacatagtgctagattgtaataattggctgtagctcttctgagcaaaggccgggatgttattttattctattattaaaaaaatcaattttttttcatagcatcggctcctgcagtgtgctcgacaaggttcggcaatggaaaagaagaaaaaaaagaacattcatcttcactatgtgccacctttgagaaacggaaacgcccatgtaaaacaaaccgtgaaggggcggatctacttattaggtatggtgggtcaaccgacacaactacaacccgtgtcattccagactctcaacaacccgtgtcattccagactctcaagacacccctaccccttatagtagtcatgtgtcattaaaatttagtataacaaggtgtgaacatccaacagattagtacatctcttcatagcacatgcacgccacaaacaatgatcaaacaatgatcgagacatttatgtgattaattaaattaaaaatatgatatatgttgtgtttgattactcttatcgagtgaacatctttgttctctgtcccatctatattttaaagctgcgtacacttcgcaaatatttacaagaactttatattccttccgcttcaagttacaagtatgtatgtgcattttccgtaaaagatcagttccataagtgcttatatacaagatcattttaatatacaggaatcttgcacattttaagaacacatgttacaagtgtttatatttttggatcagagagattagcattttcatatcaatcttaggtctaacaaaaaggaaacaaaagtccataggaccctatacccaagcatattcacattccctccgacgtccggccctacatgtcttccaatcttcaaccattggagcatttaatgatttgccatttttaaaacggaattgttaaatggctgtcgaatgatttttagcccaaaattatgcagattactaaccatgggatttgctttgcgattcgtgctccggcgacattagctcccggcgacaccttctccaactctggcgatcccgacgacagcaatggaattagggtttagggtcccgggttgggatgggggtgggagggggggtgggggagggggaagatgggggatcaccggcttagatggatggccgtgggaggcggtggcccggcggtgggtggtggacattggcgggcgacgaggcgccggtggcggcgccgaa

SEQ ID NO: 29984 - DNA, 4987 bp, Oryza sativa
  unsure (1)..(4987): unsure at all n locations
ccgatcgatcggcgtgtcagcagcaggaacaccgtgatgtgtcgctcgcaatctcacatgcaaaaatacggcgagaagcaaacggctacgtgcaagaggctaaataagagagaacgcgcgaagcgtccagcgacgctcactcacgctccaaaatcgttgccgcatccctgtcgccgaggagcgtacatacgtagttttcatgtcgtcatgtatgtattgtatgctgctaatcgccatctgaatagggaccttttgttttcttttctgaaaccggtattagcttctccaagtactgaaaaaaaaagtgttgcgatatctgggggttttttgcgttgaagttgcacctcctgatcagcagaaattctcttgcagatagtcatctgtaacttaaaatattcttttaagataatggctctaacttaaaatgtagagtgatttgttagttcttaaggaggtatatcaagagatatcatattttctattaaaattttatatctcttggtacctccgacactaggaaatacggaaatttcttttttttttactttttagtacctctcgaagattataaattttttttaaaatataacattaccaatttgctcctatggctgaagatacaaaccattttcattatccacaattggaaaatttaattatttgtcgttctttagagcatgaccgactgttcctctaaatccaatctcctaaatctcttttctttaaaaaaaatctataatgagaatttaaggcatgaaaatatccttctcttcaagagatatcctcatttaagtccctgaaatgaaataaaaaaggtgagctcccccaattcccgcactgcgatatctcttgcagctggtgcttagattccacttctctttgcacggtgggaagaagctacgagcgaggaatcgggagcgagcacggccccaaacttgtggggaccgaatttgaagggaaaggaaactccaattcttaagcagatggttagagcatcaccaaaagtattccaataattaattccaaaaactatgtgttttggattttctaaactgaatgtagaaagcgagaaaacctatctctcccggagaaagactaaaattgaattcctataatgaaaagtggaccctccctttaactaccaatagagaaaattagtttttctatgcacgaaccgcgttatttttcctctgtgcgcggttatttttgctccttgaagtggggaacgaggtatcaccgcaccgcctctacgcgcgaactgcgttattttttctccgtgcgaagttatctttgctccttgaagtcggaaactctaatgggcgatcgatcaccctgcccatggggtagcgatcgatcccctcccccctccctcccttcacccctccacctggttttcttttttggcaccgcattactttcctattttagtaaatttatacacctcaagtttacacatctaaagtttagagaccaaaggtttataacttaaaagtttatatatccgattcaaatttgaatttgaattcaaatattttttatatatagtatttctatacatttaaagtttatacacctaaagtttatagacctaaagtttataagtcaaaattttatatacccgtttcaaatttgaattcgaattatatccgattcaaatttgaatttgaattcaaatattttctatgcataatatttctatacatctaaagtttatacacttttgtttttttaaaaaaaattgtggtgtactgtagtaggaagagaataaggggagaaggaagggaagaagtgggaggaggggggcggatctgatcgttgggcgatcgccggaagtgggtaacgagatatccggagttaggaacctgtattattggaagacaagttgggaatctattatattattaatggaatagaaaacgaagcctccacgttcgctgtcatggcctagaaattctcacattaatcagagaaaaagaaaatgcagagtccatatagaaatacaatttagaaatagctgaaattcggaattaaaaaataaggaatattagaagaggagactagagtccatgtagaaatacaatttagaaatagttgaaattcagaattaaaaaataaggaatattagaagaggagactagagtccatatagaagtacaattaggaaataattgaaattcggaattaaaaataaggaatattagaagtagagtatagagtccatatagaaatttaaaactaactaaaattcggaataaaaaggagcctccacgttcgcttttatgacctagaaattctcacattaatcggagagaaaaaaagcagagtccatatagaaatacaatttagaaatagctgaaattcagaattaaaaaataatgaatattagaagaggagactagagtccatataaaaatacaatttagaaatagttgaaattcgaaattaaaaaataaggaatattagaagagtagactagagtccatatggaaatataattaggaaataactgaaattcagaattaaaaataaggaatattagaagtagagtatagagttcatatagaaatacaattaggaaataatagaaattcggaattaaaaataaggaatattagaagtagagcatagagtccatatagaaatacaattgagaaaaaaaaagaaattcggaatttaaaaataaggaatattagaagtagagtatagactccatgtaggaatttaaaactaactaaaaatcagaataaacataataaaatgaaaagtagtgtttagagtcccgtataaaatacaatttacaaataacttaaattcgaaataagaaaaaaataggaagaagagtttanagtcaatataggaatacaatttagaagtaattgaaatttgaagttaaaaattaaagaatattgaaagatgagtttagagtccacatagaaatacaattagaaataataaaaatttagaattaaaaaaagaaatattcaagacgagtctagtgtccatataggaatatatatataatttacaaataactaaaatttgatattaaaaataattaataactaatacatatataaaatacaatataaatattatacattagtagtttcgtaaagttattacaaaatttaaaattatgttgtcatttaatatattttaataatataatgagaaaacatatatgctattatatgagagaaaatgtaatgatactagcggcgcaatctgcgcgggccatcatgctagttattagattaaggagggtgttggtcatgctactaaggatcaattggaacaattttttttcacctaaaaccctctacttttaggtttgggaggaatttaggagaaatattggccatgtacttaggtcggggatttgatgatttgccatgctaaaccactcgttactgattcagagtcctgcgtgccattggcaaggacgcaaggtaatctgttgaggggcaaatttggctctaaaatttgacacaagctctactaatttccatgcagagcacaaacaaaagccacagtggatcgagtatcttttgtacactagcgacattatcttacgctgcatgtagatgtaggagtactttacaaataggagtaattttagcaattccacatgttacacatgtgcatgacgggattggaaccctgagtagtagacagaaacatgtacaatcatcatgggcgtctgattactgatgcttcccttgtctgatctcgtgcctcttattgacatcatcacacaccatctctagtcaaattgaactcaaagataaccaaacagtgctgatgattggggtggatttgtaaatccgttctagtccaaaatctgggggaatatgtaaatgtttatgactccgtacattgcatggctccatccatgcatgggaggatggaatctttcttggagtatcttgcttctaattaagtaccccccatttgtcagtggactattggttcactgtacttggccaaaaactgggctctgcctacatggatccataattagtgaaacaaagatgacaaatcatgttcattgttattgtgttctgcttctgcactgctgccccgacagagactcagcaggccaataggttaacgggtcagtgttttcgcactgttcatacagaaaccaaatgttcagttttctgaagaaaaaaaatcaaccgacttttcgctcgtgtgttaggaggggatcaaatgttcaattttctgaaaagatccatcgtttttttttctttgctcgtgtgttaggaggggctacgatttttttagtgtccaataaggtcgagccatgttgatccttcatgtggtttcaaaatgctcatgaacgttactgcgtgcggggttttcttttctagatttgttgtactgtaagatatctatctaaggttaatttttgttagaaacacaccataaatatagacactcacccatataaacgcacaccctacccctatgaagacctccgaaagactaggccgacatatcttgagatcgacgaagtcatcacaggtgcatggactggcatattttgagatcgacgaagtcaccacagacgtctcgctgtcgatggatatgtcaccaaccactgaaaaaataattaactataaatacgagtatatgtgtcaagtctttggacttgaatatggatggattggttttaaaaaaaaataaccaattaagttacgcttacttcgtaaggtggtttattttgagatggaggtactagatgaagcatccagcagaagccatgccgaggcacctgcgacagaaaggagggccagatatagcaagcaccgatggtggcggatacgacagagagtacgtacaggagaaaacggcaaggaagcaggcaatatcatatcccggcaagtgtgaggtgtggaggatggaggccggcccgtgccgtgcgtggtccaagccgtgctagcgcctagcgcccggcccgatcgatcgatcgaaaccacgcgcg

SEQ ID NO: 29985 - DNA, 1679 bp, Oryza sativa
aaaatgcatgggttgataaaattaatcaaatctaccaggtttagcagagtaacgacattgctttgtgaagactctacttcctcctttcagactaaatttgtgcatgtggtgcttgcagttggtcgggtgactcgtcacctctgtacgtgcatctatctcgcctacttgtcgcagtacccactcagtagtcaggagaagctattgtggcgcctccgcgtgagaaatccatgttgctaaagcataaaaagcccatcctgcaggcgtgaacaagctatatattcctgatgcatacgacgatgctgcatgtgttgcgggtaatagaactgtgccgctctattaatgcaggtacagcaaggattgttactcctctatatacatatccgatgtatagaggcaaccaatgttataaaaccagcaccgaaatcgacatcggtagctaaatgtggaagaaaacaccgtagtagatccaaacacgatgacgacaccaaggcactatatttgataacggagttcagccgaggcttacatctccgaagcactgattacgggcgctcctccccgatccagcatattacaacgtatcagagtgacaacgactcacgaccggtcaccgccggcagccgctccctctcgctatgctatgtcgccatgcggttacaacaggcacgcccttctatttatgagagatcctaggatagagtccgactcatactctagtcatacacctaatacaactccaagtcctaaactgtaaccgactacgtacacatattcgacacaaactctaacaaccaagtgaggatcgcgtacgcatagcacggccggcagcatctaagagtgactgagcgagtgcatgcgtgcatgggccgctcggtgcgccgctcacctcggtgacatacaaaaatcagacaacagataaagtactattagccgaaacaatatctacaatcataatcatgaatcattttaatcattgttcatgtactacaactgatattgtgtatttgtcatcttctaaactgtaattgccatctgtcataaagaaagctgattgagaacttatatctagaaagtacttattggcccatatgccaaagagcccctatttgatgaacatccatgtgcaaacagaaatagcaaacaccttattttctctctatctgtcaagtacattagttcatcacttccttacttgcttcgcatggcttgacaccacctcgtgcctttacacaagccatcacgtcacatgttcctgttcctcaccatagcaagacaccatagctacccttcctcctcctccctagtgacacggcgtattacaagaaaaatattttgtagagacatttttctaatactatagagacacttttcaaaaaatacctttacataggcattcaaaaaaatgtctaataagtgtcttatggtgaattatctctataaacgaagagacattttacaaaatgtctataagatggtagagatattttctagagacattagattgtaccacaatcatatgaaaccaatgaaaaaaacaataaaatattttcccttgtttttgccaatcctcgaaacttatgatcaattgcacaaatcattcttatcttcaaggtactaaccaactcaaccccaagtcattacttatatgttgttgccttgagttacttatatttagtcat

SEQ ID NO: 29986 - DNA, 1035 bp, Oryza sativa
accatatatgagttccagtattattttttaatagaaatactccctctatcccaaaatataagactcaccactcgtaacacaaagaccaagaaataatttaatcaccttcttgattggatcacatacatacatgcaagcaatgtgattggaggatttaatggtagatgattcaaaataaaacaaatttgaagaaccaagaggtgatggttaatgtatgcatgccttatatcatgagacgtgggaaaaaagtggttgtgccttatatttttggtagagggagtatgaatgaagactcattttatttgataaattttattgtgaacaactaatgttatattaatattggcatgcacaatatatcgctgtaactaatctttagtgcagtttccttacacaacatataattttctgtttatgtttcaaaatttcctgcatgttttttttttttgaaaagtctttctatgtggcattagagagaaatctcctacaaaaaaaaagaacaaaaatattttgtgtagcacatgaaagatgatttgtataaaaatacaaacgatgtagaaaagtagtctttgtaaataacatacatattttattttacaaaaaataataaaatgcaaaagcatgaaacttatacacacttatattcttatatcatgtgctaggaggctaattttttaaaattgttgatttttttttttagttttgtcaattaactgtcaacccttatatttttaggcattataagaaattctttgtttggttgaatggtatattgtagaaacaattaaaaacatagtcgatgggaaatcattgaattggtgtaaactcaatgtgacatatatatagtatattattttatatttttttaaaaaaatgctgaggtgcatatgtaccaagggcaagccttgctgcaagagggaattttgcgctgcactcttgtttcttggggccttcaccactccactggtatcctacacggcagtggcactcataatcccctgggaaggtggtgcagacgccgtagcagggatattt

SEQ ID NO: 29987 - DNA, 2483 bp, Oryza sativa
gtgttactaaccgggactaaagatcctagggccctgacacggcctgacatggaatcaaccgggagtacaaatgaactttagtcttggttggagttaccaaccgggactatagatgatttttagtcccggttggtaacaacaatcgggactaaagattttcctcttattaaccgggactaaaaatgatttttagtcccagtttttaatggaaccgggactattgtggatttgggtcaaccgaccaaagattgtttctctaccagtgacgaacaatcaaacatatttaaaaaagtcaatgtcgttaaatatttaaaagcggatggagtatatatcttcccgaattaattgctagctagcacaagtagtactatgtattaattaagtcaacctgaattatttgctaattatgtttattgctgtacatgagttgtctacagtataattcttagtgataatgacgtggaaatatagagacaatatctaactttacaacatgatatagtagtaaactgtttaaaactgtacatctctacttctgtcaatgtttaagcatagtcctcctcctatcctctcccctatcatgcgtgtgggcatggtctcgctccttcgcgtttacctaaccatcttaggatccatttttctcaattcattaaaataacaaatttctaatgatattatatggtccgatcagttggaaagcacgaacgtgttagtatttggaagagagcgcacgacagatgtatccatgcaaccaataatccacttctgcatgaaccaaccaagaattgctgcgtattggcagcttgcaatgaatggcattgaagcaggagaaggagttgctatcaaaatttgcattgtgttgccttaatcagattgtcgcctttcaccatgaatttaatagccatatatatatatatatatatatatatatatatatatatatatatataggtccagattatatatgcagaaaagcaaaagcacatgcagcctcgtgttaggtgaatatatatataaggcgccgaacagattgatgaaacagcaaaaccaagtcaggatcaactaattataaatgtttttaggcgactgtttatccttaattgagcaatgaacctatatgtataattatataaagaatggtcccatggattggctgtgacaagcgaattgatggagcagatgcatcatatcgttgccattaattaaatgagccatctggattctgaacaaacacaatattgttaaaaaaaaaattggttgatttgtttatggtttgtagtttgatttcatttgttttagggtgtctttagatcagattttatgccctttttttacagaactaaatctgatttttcctaaaagtccttatatacttcttaattgctccacatgcccttgttgttcaatggacccaaatgactttgtcatgtcagagtgcatgcaagtctaatttgatcagtttagatccattaaagaaaacacagaacgaatacgatttagtaaaaatcatatctgaatcatgctgaatcttaccaaaagctccctgcaacaatgacgtcgatctcctgtttgtgtacgaggtgatctacaaaaccaaactgggatcagtagcctctcataaattaggccaaaacaggttctgcctcccaaatccatggtaacaaaatgtattaaacagaacagaagatcaggaaataccaagataagacagaagccattatgtcactatccaccagtgtgtcatcacatttgaggtaaatatgataaaaagaaataaagaaacaaacagacaaggggaaagaacaaagtccaggtatactagacacaaaataactgatgaataaactcagatgacatagactgggttcgacttaataccataaaacaaattgaggcaacgtagtacttaaaatcctggaagtacttaaaatcctggaaccaggacaattggaaaatattagcaggttaataccataaaaaaactgaagcaaataacaaccatgtagtacatctggaaccaaatcaattggaaaatactctctgtttcacattatactccctccgtcccagaatataacaacctagtaccgaataggatgtatcctactactacgaatctagattcatagtactaggataccgtcccatccggttctaggttgctatattctaggactgggggagtaaaacattttggcatctccattccttttttcagtggcggacctacggtaggacatgggggtacagttgtacccccaatttttttttaacaatctactgttatttaacaagtataatattgtctgatagttcaaaacacctattcttacgcacaaaatcatgctttccaatagtattataatttttttcttagttatttttttattttctataataatcatttttatttgcactactaatccatgttagcacttcatttttttctcactggacgatgcttttgtaggtctgtaccccca

SEQ ID NO: 29988 - DNA, 4505 bp, Oryza sativa
gccccccttggcctagtcagcacgacgacgacaccctactgccacagtggcatgggcgcgacaccatggtggctggcgccgccatgtttggggacggcgccagccactctggtgcctaaaaaggaccattttcgatttaagtttttccaagggtccatttgtaaaataagtttacaaaaaggaccaaaatgtaaaaatttcaagtgagcaagtactcggtctttctattcttcccaaccacagaaccagtgtacttttggaagacgattactcgaaggagtaggttcataactgctgtcaaggatgtccgtggagtggagtcgccacgctgcgagcatcaagttatatagtttagctcactttaattttccgctacatatataagacttttaataatacttgtaagacgtgaatctgtgtatcaactttgtcatttgtgtaccttggccggtcatggacagggtttttatgcacattccgctttgggaattctggttcgtgaatttctaggcgtgacagtaggaaggctgctatttctgaaattttgatgaacaatgtgattcgacttgaattctatattgtttcatcaaattctgtggctccaagttgacgctttgttttgatgcatgttcatactcatctgttggatcagcaatgaaccttacttattcttctcccaaacagttcgactgtaggggaatatatatttcactggtacttttggataactcaaatttactggtgcattacagtcaagtttgtcaagcagactgaaataagggaggaaaaggttatactccatctgtttcaaaatatagtaacgggatacttgattagacaccagctagtactaggctactatattttgatgcctaatcgtatgaatgtgtatatacaaatgcgaactaaaattcgaaatgattttttattttgtttgcacctaaaaatcaaaaactggagattcatttttattggcaactctaaaaaaaccagccgtgaaaatatttattcacgggtgactgactttgctcctgtttaaatgattgattttcacgggttattggttataggcaggtggaaaaacatccatatatataaattatggaccacctaaacaaacggttttttatgtaccgatgagtgtcaaagtctaagtttagaatttaaactatttagatgggtcaaaaaaaaattcctaggagcgtttgcagcagaagttccaccaaatagggccccagcgtagactcgtagttgggacggatggccaaaacctccaatattgctgcaagacaaacttggctcatccccttaacatagaactgtaccattatattatattggcaaatcctttacatgtccagggtataaacattggggtaactcgtatgaatagtccctcaagggttatcattcatgaaaacaaaattttattaatcagagaaaatgattatcttttgattcttagaatctactagcttggtagtggttattataagccgtgatatgtgcctgaagcaaccaggctgcgttcggatgaggggttcccagcccctctctcccgtattccacgtgcatgcttttgaaactgctaaacgatgcgttttttaaaaaaagtttctgtacgaaagttgcttaacaaaatcatattgatccatttttgaaaaaaaaattagctaatacttaattaatcacgtgctaatggaccgctccgtttttcgtgcggaggatttggtttcccaactcatggtatcgaacacagcctaattttagggaggacatatatacctatatattcatagtggtttaaaaaggcaaggctaaaaaaaatctatactagtctaaaaattactaagttttagaaataaaagttggttgtaacctaaaacaattcgtgcaggtggtgcttgcctgtcatagcagagtaggcaccattggtttctctgcttgagcgcttggtatacattcacacacacaacccaagcccccaggaaaaaacattcatgtacggtttgccattttaagtgaaattatttttttcacagaaaactgcacatgagaaaaaccttaaaaatttaccaaataaagttcatgacaacattcacttccaataattttggcacaagtttttgagcactgccaaaggtgtgcatcccatctggtgggaggcacatcgcgcggcaagacaggcttgtagagggggagaggtggagagagaatatgagatgatgggaggcacatcgcgcggcagacaggcttgtagagggggagatgtggagagagaatatgagatggggtatagaggagtgaagggagagtagaggaagaagatgaaaatgacacgtgggtctcatgtgaggattgggaggcttaaatggtgggcagtttgtaccgagggcaatttgggtatttcaaaaaaagaaatttgtgtaacacgaacggcgatggcatttttaggacaagttggttcgtacgatgatatttttagaaagttatgttcatcaatggcattttttttgaagtaagacatttgtcaacggttttattggataaatttcataaaaccctatattatatattttgcgttcaatgtagaaagccaccgaattatggattgtagcacataaaacccgttatttaaattctaaattaatttcagcatatcttaaaaacaatatttttcatagcagtgaatagtaaaaccaacaaacctcaaacaagaattcaacaattaaaattttatatagactccatattttaaaaagttagtaaatgcatgttcatgagaattctggaattggctgggttgttcagtttaagaggggaagcaacttaacatggaaattcatgaaatatctacggcaggctcctaacacagcgtagaatcttatgtattttcctagacttctctctcttgtcctatagtttggagtttgtcaagttctactccatttatacagtacgcatcctaatttcatgaacattctaattcaacagagtgacatggattctaccagcaaacactaaacatatgcatacttatgaaatagtagaacaattttcacatttatttacattttttaaagacttctaatattttttcactaaggtggccaagatctcattcttctggcaattctgatatcaatttcaatgctctgtctgcacttactgttcatctacgagtaatggttcacctcccttagcgccatctaactaaacgagtactggttcacctcccttagctagccatcgaactaaactccacaacgaaccaagcatcaagttgatcctctacatgacttccctatctactcccatgccaatcatgcatcaagaattcaagcagacaataaaatttagattcttctgtaacaggtgaatgaaaatttagattttcgtggcacgcttttcaaactgttaaacttattcaaatccattttagttccgaatctatttccgaatccatttatatatcagttcgtacgtaaactatatatatgaaagttgttctaaagtatcatattaatccattttttaagtttgtaataattaaaacctaattagtcgcacgttattatcacctcgttttgcgtaaaacacttaatctttatcttcatattcatcttcatctttagaagattcaaacactgccaaaatataattcctattgcaatgacagacagattaactcagatgatccatatactgctcggcctatacattattcagaaaggtccagctacaggagtgaccacacttaaacagtgaaactatatatgagaatctgaactacagttgattaattgagactcttcagtcaattcaattctcacctgtcagatttttaactggataaataaaaatgactagtaattgggatgctataaaaaatgggcccaactggtagagctagtggcatgtacagcaacaatttattcaattttcacgcagtgacagattgcatttctgctgacataatggcatatacttcctccgtccctaaatatttgacgccgttgacatttttaaacatgtttgaccgttcgtcttatgaaaaaacttttgtgaaatatgtaaaactatatgtatacataaaagtatatttaaaaataaatcatatgataggaaaagaatcaataattacttaaattttttgaataagacgcactggtggagaaatgctttttagtcccggttcgtaaccccccttagttccggttttccaaccgggactacgaatccgggactaaagatcgctatctttagtcctggttcaaataaccgggactaaaaatcaatcccggttggtgttaccaaccgggactaaagtttttttctttttttttttctgcttttaatattgaatattgatttcacaccatcccctcccatatcgaaatcatcacatatcacagaacatctccaaatcctcaaatcctcaaacaaatcatctccaaatacatcacaaactcttaaaaaaaattacatcacagggttctaaaaaa

SEQ ID NO: 29989 - DNA, 645 bp, Oryza sativa
tggtaaaggttaaagatgaactcattttaaggtggtgtgggaaaactacatgcatggaatgacgacacatcatatggatcatagcatagtatgcagaggcgagtgagccacactgataacgatggtacctggaactttactgcagcccagaatgtcacaaactgtgcacagcagcacaggtcataaccgggacctactgatactgacctactacaccacataggcgatgcatgcatgcatggctgcaagagaaaacctggccaaaatgccagcaaacgacagagataatgtagctgcactgtataacattgatactagtaggtaaaaatacagtgtggcaacagtccagtgagaagggtctctctaattttgcaaagtgatgggagggagaatatgaaaatgctggtgctacagtgactacagacaacgtgcactagacccacatgatagatgcggatcagacagtagggagacaattgaacatccatatcacgccttacaggtcatgtaatcccagacctgggagcagacaacgacaaccgctcacagcctagcaatgataaaagcatatgcatttgcctcccgacaagaatcagtatgtaccgaaattctgaattcatggagctgtccctaaaaccacaatta

SEQ ID NO: 29990 - DNA, 699 bp, Oryza sativa
atgctcacttaataagttccatgcactaaatttacacgggcatatcaagttgttgcactagcatacttacttcttaagatttttttttcactaaattacacccacatactaaatttatgtaatgtgaatgtaatttttacacatattccccatccacccaaacctagccctgtcagctccttaatttgccattttgcctcaatcctctcctctccctctctcgctctctccatgtggcggcgagccacgcctccctgagattttaacaaatctgactgagccacctgctccgtgattggtagcaagagtttaacaacggtgatcagaggctgacctcctcaaactaggtaaaataacactatatttactgtaattttataaattttgaaagattagtattatttgccctttccaacaaataaaatttggagtttttggttatgtacactctgtcatcatgcaaacaaaaatcaaaatacccttaagcagtaagcagcgaaaaagcatctaagcagtatactacatgcatgcttctcgaagatatataattattatatactccctccatattttaatttatgacgtcgttgactttttaataaacgtttgaccttttgttttattcaaaaaatttatgtaattattatttattttattgtgacttgatttattatcaaatgttctttaagcatgacataa

SEQ ID NO: 29991 - DNA, 1141 bp, Oryza sativa
attctaactttgaaggaatatgcgtatcgggatgctgggatctaaccatacttggactaatttcacctctatgcacaattacgaatttttcaagttgtttaagaatttataagaaccattaacatacttgtacgttgtaatagaccaaattcatataattgtgaataagctagaagggtgattggagataaagtattggattcgatggttactcacgtgaaccttacggacacactcatatattgcacgaactgtccaagttgaatgttctattacttgatccagcaattcagaacacgaatatgtgattattacaaaaaaaaataaaagagataaggtttttgttatgaagcgcttgatttatacagcctcgtagtaaaactgttaccaaaattttggcacacggtagacaactcgtatctagatccggctcctctgcctttagactcaaaaggtagagaggtacacagcaaaaatatgtcttgttcaacagtagttcgttcgtttgttgtgaatcgaacggctaaacatacttccaaagtcagagcagtagagctctcagatgatccaaatccctcgcataccacccccggcacgtccatagacttttgagacatatttgtacttcctaggccgagttgctgagttatgatctgctcccaaccgaaagcggcccatctgcgggcccaacccgctccgcattacgcattttcagggttagggtttaggatccctccgcgacgccggtggagacggacgtggtcttgttactcttgtagccgcgcgacacggacccacccccacattatcgtgcttgtcaatctgggccagttggcccagcccaactacggcccaactgctcttgttgccatttgcttttgaaattttcctttttgattcacggtgtttcttatcttgaaacaggtgtaaattgtaagtataatactttttcatattataattataagactttctagcattgtctatatttatatatgtgttaatgaatctaaacatatatgtgtgcctagattcattaacatctatataaatataggcaatgctagaaagtcttatataacttgaaacttgaaacggagatagtaaaagatagtaacatgataaatcaaattttggtttg

SEQ ID NO: 29992 - DNA, 802 bp, Oryza sativa
attggcatatgcaccaactcagtagctatccgaaccctttcaagcaagcccatgtaggcgcccactcagtaatcattgtcctacagttgtttctgactttaagtgccatgtcaatgcccacgtaggcgccatgttagttgaaatcgtcgttcaaatcgtcttgtgatcttatttgcattggttttaggagttaagagatgcgtcatatctggtattacggttatagatgaattttggactcgacgataagttgagagaccaatagtgaagttgtttcctttgcaattcgctaagggccatcccgagctgtttaatctgtattagttgtggtttgggcccaagtggcctaggtgccatatgcactacaggccagactaaatcacaccttaacatggaatgacccgctacattccatgtaaaatggcccgctatattttagtagactattcctatggggtggccttgcgggccagtaaaatggcgccccatttgcatttctattgtaccctgagaaaaaattaagttatatcatcacaaatcagtggattaaagtcacatcataaccactgtccactgattgatttttctcagattgatgtgaatcagaaataaaccactcgcttatttcaggtttaagtcttccttctaaacagtgcgtgcggcaaatccattggttctgtgtggaatttacccaaacaacgcgtcatatgtataatgcacaaaccgtatttactgattaattccttccacacttgaggaaaaccaaaacgtcacaacaaaacttcaatcttcaatcacaata

SEQ ID NO: 29993 - DNA, 663 bp, Oryza sativa
acatagtgtgcaccatgttgtgggttagttgtttgatggaagtatctgcccactttttgtatcgtacttgctttgctttgcaaattaactcatggagctgttattttttgacaagtaatttatcatgatttggtaacacctactccctccatttcacaatgtaagactttctagcattaaccacatacatatagatgttaataaatctaaacacataatgaatgtgggcaatgctagaaagtcttacattgtgaaacggaggaaatattattctcagtcatgtttgtgcgcatgttttaaacccgcaagttattatagtagtaaattgaaaacttgtgaacctgtggcatgaacctgtagtgatttccccctctgtaccatactaccattacaccattactacaatttgtatatttccacgatggaaaaagtagcttgcagatcgaagcatacttaaatcttcgatttagaagcatgattaatacctaaaatatctaaatatggaggtagtgatgaaaaagatatttaagttttctaaaagggttaaagattttcaatgttgccaaattacgtgaaatgttttctttggtaggatttatcctttgttctaaaaggatcatcacgtccgtccggacctggcagcgaggggttttggtctatttg

SEQ ID NO: 29994 - DNA, 707 bp, Oryza sativa
tcacgatcctcacgcgcggacgcgtaaaccttcacgcacttctcgcgcgtacaacagcactatgcccgaggtgtgtgcattacacctacatcgggatttcgggacgtaaaaacatagagcgtactacctacaacacggtttacacatacgtgatggccgatatgctagttcgcgagtcgtgcccgctctacgcatacatggggatcgctaagtgcctacaaggttcacccccatcgctgcccgcggatcgaggatgatgccacatccatcctacgctagctcacagtgtcgttgtacgcgtgagaggcaagacgtacgtgctcggtaaattgagatgcggtgaccacccactctaatctctcgcccgtccgtagacccagaggctaccactgcagaggaaccgtctggcctagatgacgttatccactcgatcgcatcttacgatcgcaaatataattaacctgtaacagccctaaaatttgataactttttaaaaccgatttagtttgctttgattctctaaaaatataaccgtcgagttaatagtttatttaaaatattattttccatgtttattttcgatgttcttttctcgtttaattttgttgcaaagtgcatatcatccctcaaataattcctttgaatccgatttaaatctatcctgaatgtcggaccatctaaattccacatcaattcaaatattattt

SEQ ID NO: 29995 - DNA, 699 bp, Oryza sativa
caagcggtgttaacaattttcagcatgtagccataaatagttccataagcatgctttcagatgcaataataataatatccatattaaatcaatagcatgtaaaataattaacagctcatttaggtgttcctcaaattttatcctaaacttgttagactctagggctcattaaggtgtccataatagcaacagaaagtataatgcaataatagcaatctaattaatttaaaagaattcgtgcagtttatcgtactccaaaggacgagtacgctaccaaaataactctctaactactgggattaaattgttcaagggagggtgcatgtcttacaaccttcgggctcgatgtagtcgtacaaaccgtctcctcctagcgcggagatttcactcgctccgtctaccggaccaacgtcaacgttttctatttacgcaacaatcatccccccaataaataccagaaaaacaaagatacccaaaagaaaatagtatcacaaagtgcaacaatgggtgaaaaggatttaaagaaataattttagcgatttttggaatttcggtgaacggcgaaccctagggctaaaattagggcctcgacaacgggtgctcggattgcaatgaaactgatacggatggattcggaataattctaggagggtctcggattttgttttcgagatcaaaaggatggtcaacttaatagga

SEQ ID NO: 29996 - DNA, 693 bp, Oryza sativa
tcactcttctaagggtgatttttctacatgtgtatcgaacgatcgttattgtccctgaaaagggtaaatatatttggatcattcatgcatttatgtattcaggaccaatattattttcttaagatcatagatttagactgtatacatgggaaatggtagcgactattgaataaaaatgtgtcttggttccagtaactggataagattaacattaaaggtaacttgtctaagcaaccaatggccaaataactcatgaactcaccctttcttttcagaatccttctttgtgaataaatataactgtctcattatggtagtgcccgagttgtgtagttactgataaaaaacatccaaactgaatttggatgctgcatttaggatgtcatcggtatttcatttttttattctctcactgatttggtttcatttcatttgggtagatgttgtgttaaatttgttccaaataaatcacaaacacagactccatccggatcgtcctgctcaccgctctctccaaggtgagtactggaaaccttctctcttgtggcaatttcatttagttatgtatttcattcagctgatgaattatcctttgaccatggccattataaatgaaatataagctggattgcactatgtacatgatataacttatatgcttggacaaccatgttttgatttatattttagggg

SEQ ID NO: 29997 - DNA, 2852 bp, Oryza sativa
cgcgacccgaccatccatcggccatccaatcgcggcgcggagatttctcactaccgatgactcgggtaactcgtactaggtggaagcgagccggaataatcccggaggagcccagccgtgagctgtccccagcctggactccaacgagagaaaacacacactaatcacaggcgcaggtcacgctcacggctcacatcgcgccgctgacgcgcgggtcccccgtgcaagttgccgtgggtgcgcatggctggatgacaacgagggtttagattagatttaatcgtggcatttggagggaataataataatatacttctactccagtatttgtatgacgaggcgattaggataacgtatggaactggacaggtcatcagttttcaaaaaaacaaaaacaaaaaaaactggacaggtcatccatcctttgattcctttccatgctctatgctctattttcccccattttaaaaggctcgcagcgcatatgcagtcaagatcgatcgtcgctttttcgtgctccagctagattagccacctgctgcagtcctgcacccacccgtgcgtgcccttcattttacttaatcttttaattaccagtaccactaatctctacagttcttgcacatgagatcgcatggcggcatgggcatctctatgacgacctgaccttcgacttggaggtactactagtagtacgtgaggttgggcattggatccccgagacattccgggctccgctcgtggagcgcacagtgcgcgcgatcgacagctcgctcgcgctgtcgatcggtcgccgcgatccaagatgtctacagctccggcgcctgactcaccaacgtgaaacggctccgtgctgctgctgctgactggtgaggaatgagtccgcgctcccgaacaaaattaacgatcgatccgtggatggatgatggtgactcgatgccgccttggatttgatgcggtttttccatgtcgtcgttggacgtatatcaagatttcaagaggtgagaacagcacctagctcagctggtagggagctgctaggagcaacgtgctagcctgagttcgaatccgtttgagcaacaggttttctcaccatttcatcacaacacaagttaggccctgtttaaatcccacctaaaattttttcaccatatcatatcgaacacttggacacatgcatggagcattaaatgcggacgaaaaaaaccaattacacagtttgtgtgtaaattgcgagacgaatcttttaaacctaattgcgtcgtgatttgataatgtggtgttgcagtaaacatttgctaatgacagattagttaggcttaataaattcgtctcgcagtttacaagcggattatataatttgttttgttattagactacgtttaatatttaaatgtgtgtccatatatccgatgtgacacgcaaaaactttacaccctggatctaaacaccctcttagtactaaaagtatgacaaagatacacaaagtgttgctaacaaactgttggtcgcagaagtgaaaagatttatcaactactccctcctcccataatatagcaacttagtatcggatgggacactttatagtatcatgtccggttcgttgtactgtgaagtgtcctattcgggttactttattatgggacggagagaatagtacgtgacaagtatatggcatatgagataacaagttagtaaagtatggactgttatagctatagctatagtaacggaagaggaacggtatgtttaacacatgacatggcgaattagtatgacaaaacaaatactctaggtttctattagggctagagaagaaactcagtttatatgttcatgtttcaaaactagtatctagagcatgtttgatatggtttcagctctagctctatttctctttatttctcttaaagttaaaatctaactaacagttccaactatatctagaataggaatagagtggattggagtgatctgaaaaataaagcaaagaggtgaaaacggattaaaccttcatcggttattcatattccctaataagcctatacattacaaagtaatctataggtaaaccttttatatatttgttcgtaatgacttaaaagtcaatattaaaaaaattacgttgaaaataccttaaactcaacttcaaatataaagttcgaaaattctaattttagcttttgatttggtttattatgtcaactgatgaggcccttagccttattatgggatggggtgtctagatacattgaccaatcctaggttgctatattctgtgacggagggagtatttgagttacttttatactccatccgtccaaaaaaaccaatccttgatttgaacctagacacgtataaaaagtccaatcctaacaatgaatctacacacacatgcgtctagatttatagttacgattgtgcttttttatgcaacggaggggtaccttttaaagctattattatagcaccccgtaatggcgataaaactaccttttattttcaccggagttagatttccataaaaaaaccccaaaaacgatttcccacttgggacgaaaattataaatgacatttccatcaatttagttacactgacaggtgggcccggaccaattccgactagtcccaggtggcccaggtcccagcctctgttgctggaaagcagctagtactagtttggaaccagaaaagaagcaaacccaacgaatcaaccaaccgagatctccccactcatctctcatctcgtaacagcccaacccagccaagcaaaagccacagagccgcactgcccgttcggatccggctagctagcctccagctcgccttccccttcatgccagcacgctccc

SEQ ID NO: 29998 - DNA, 6100 bp, Oryza sativa
tgatcggggaatcgcatgattagggttcagggtttaagcgccgtacgggagttcttggggttcgatgtttctatccagtttttgcatcgaaaatttttgggggattttttggtgctattgtggcggcgtgcaggtccagtcctgtctggcggatcaagcgcccggcatcaccggtggcgtgcttgatccgccggcggcgaagcacgccaccggcactgttgcggacaggaggccgccgcttcacaaggacaagccaaccggtggcgccaagaaaccccacacctccagcggcggcggcaggatgtgcgggagcgtcaactcctgcattgggtaccggcaccaagtgagctgccaccgcgccgacgccaaattcaccacgcccgccgtgcctttcggcgacatcctcctcacctgccggctggcttgccaaggaggagagaagtgagagagagagagaggaggaagggggaagaggggaaagagagaatgtgatgacgtggcatcctgacatgtgggacccacataaggtcccacgctgattcagccgccacgtcagataaaacctgggtcaaacccactgagggatctaaagtgaacgttttgtaagatgagacacgttatatatctggttctgcggttggaggactattttgtatctcaatgacaagttgagggaccatcggtgtactttttcctacaaattacaatcgtctagatgcaggcccaagtataatgatgtgcagagagagcactaagttcctcggaccttgaggtttctgcaggctgcagcccagcctcgccctggcctagcgatgttagcacggcccaagtggtgcccttggctgcagcagatcggagcaaacatatacagaaacttaaggaaagagctgcatagcttagaaaatagaatggacattagcgggaagaatcgaacccatgttttgtttagtatatacttcctccgttcctccgtttcacaatgtaagtcattctagcattttccacatttatattaatgttaatgaatctagatagatatatatgttgtctagattcattaacatcaatataaatatgagaaatgctagaatgacttacattgtaaaacggagagagtacgagttacatatactacttataatactagttataatgtactttacatttgactcaaatttttaaaagttgtatagatacaccctaaatatttggtgatttatttgcccgaaagtgaatatcatctccttccatgcatgcatctactttcatggatgcaatgttctgtctaacgtaaaatctaaagcgagaggcctctcgtttcagttgtatcgcgcgacgcgcctacctgagtgaggatatatgatatatatgatatggtttaattactgatgattgggtaaagaatattaaggatcttcatataacatggtctgttagtagaaactcatttactagtatgatctttattttagataacattaataaatcaccatataggaacttctttcggtactgttatatgatccctgtctagaaactctatatatgacatgaacaacaagaaaacgctgtttagataattaatcatatggtaaatttagccagaaatgcattggttaagtgcagcaagaaaatggtgttgggactgcgcaaaaaacacttttagtgtgcaaactacaattcaccaaccggcaaacatatttcacacaatcaacccttcatcttggcatgaactttgaggatagtttcaactggcaaatcagtagcggaataacaataaacacatgcacacaagacacagtgatttacgtggaaaaacctcctcggtgtgaggagtaaaaaaccacgggaccaacggtccactccaagcttccactataatcaacaataggtacaaatgtagtcttctctataatatctaaagacacatcacaacagctacaacatcaagttacatggcattatcaacatctcaaccatcaaagctaacaagaggtatatcaactaacaagtagagaaatagcagattctgtccttttcggttctcagctgagatctccaaaccacagttgcacgaaacttggcagaaatgatggtctatgattcccttccaagctgtcaaaaaacagcctaatcggacaccgtttgaccccctaaaccgacactttattaactattgcacaatctgtaatttagtgactcgagctgacaaaccaccactcaaatccgacgctctactcaactaatcctcatccaaactgaccagattgaagtgctcaaagtgagaaacaaactcaccaagtttggtgccaatccaaccacgtttgagcctccaatcgttgacttgatgaagatcgggtaagagcccccaagctgaacaagttgcacttcttctccactctcctctccctctctcttgtgtttgctggttgtttcttcacctcaaagactgctgctcgctctccctccaatggaggctagggtttttcttcccattcctaaaggatgaggtaatctcaaccgttgatcaacacttggatcaatggctcacatttgttggactttttgggctgcaaatgggctgagaacaaaaggtccatgtggagggaatttagccaacaaatggtatggtaccataaattttatagattatgattacatgaataactgattccattaattcagtaaatggatagagctggattggacagggagggaggatggctgaaaatgaatcggaaacgaatggaaactagctctaccatatccgttttcatatttttacggaatcaaaattaaaatcaaaaaccacggatataaaagtggaatcgaatataggtacaaaacgaatacgaaacggaacaaatgaataacaaatatttgatacaaataaaacccctcaaattaagcttccccatcaacgaggagatacacactggcactgccaagttctagtaacgatgcggcttcgatacgtaatgagacctgtgtccagccatagtattttccgcatcgtcgctactaaaaacgatttttctttcatgcggttgaaaaggggtttttacgtgcggatctcctatccgtccgcatcgaagggtctgcaaaattccggtgctagtcaattaagaacaagaaaactgatcaaaacgagccttaccgtccagataatgtacacatgcatgtatatagtactcgatccgtgtcgtcaatcatatcctatatgaatgctgctaatcatgcattattagttattgcgaaaaatccacgagataatatctggatgacctacgcaaattaactaacaaactgactcctgtcgtgatcgtgatcgatcgaggggatgatcagtaggccagccacaaactggtcgatattccggccggatcatcaaagatccgatcttacctcgaatgcttgatgatgcatggtcggtttaattattagcttgatgctgaaatgcacagtactgtagaaaaacactttggtaccgattgaaaaacctacatataggtaccggatttcacagtcaacaccaactcaatgacactgatgactctagattattaatgtcaattttacaaccggcaccattgacacgcacaagaggcaaaaaaaaaagaagaagaagaagaaggcttaatgcattggctcgatataattcgaaccaatgcgttgagttgctctccacagccccaaattacaattgaacaaaaacaaactcctgctcatgctataacttatgtacaggctgaatcacaaattcaataaaaaaaatgaactgctatcacaactaaatcacaaatccaaaaagatgaacttctcgctattgaagagttggggcggcaatgacgaggaaagaaaaaaggaacacaacgaggtatccgaatctgacgatcgtcgagcttgagacggcgccgtcacatcaccctagccctagggaggagggggggagggggggcgtgcctacttgctgtacacggcgaggtacccagatcttaacgatggccctacaacagcaccctcgccgatggtagcatatgcttctccttccccttctcctcttcctcccacccctcaccttccacttcccgcacggtgagcgacgcaaacgccgtggcactgtgcccacgatccgcataggggctgtcaggagtcatggcggacacgcacaccacaatgtccactcgcaagtttaggtttgagtcatgagagaaagagcatgcgtgaagggaggagaaggtgagatcgacatggctcaacagttcactgctggagaaagggactttagtcccggtttgcaaccgtttttagtgcaactaggaagcacaatccgcccatctttagtcccggttgaaataactgagactaaagatacataccaaggcaaaaaaaaaaaaaaggtgtgcaaccaggacgcacaagtcgcccatctttagtcccggttaaaataatcgggactaaagatgcataccacataaaaaaaatgtgtaggatgtgggattcaaactcaatactctcactttagccctcacgcgcattaccatcccacctaatacacacatctaacttgaatagagatgctttatttttaaactaaccctaaagatatctttagtccagattggtgtcaccaaccgggactaaaaattggtgttaccaactgggactaaaaagttagtataaccaattggtaacaccaagctggactaaagatctttggaggcctgacatggcctgacagctattgaatcatggctaaaaatgatctttagtcctagtttttattcgaaccgggacaaatatgatttttgccatctgagtaaagatcagttctccagtagtggtttgtggtgccggtttattaataaaaaaaaagacacttctaaagttatgatgatatgcatgtgtctgcttttccaaagaaaaacggcacatataatatgtaatattataggtgccggtttttattaagcacaacgtttatatttcttccaaaacaacattccgcgagcgtgctgctctctggtggaaaagccaattccagaatttccagcacctatagtatcattattttttttcgtttgtgtaagtagtggcgcatgcgcagaccgtctactcaccattgattttcttttcccctcaccgcgtggcctccgcgtctgttggaatcattccatgtcaatgtctcatggtacgtacggtacgaataattaatcgtactatacgtggctaatgttaattgcgtgagctcgtgcgcaagcatgctagctctacaacaacgactgtgttgaccgattagggactcgatcatgcatgtctgactctggtcgactttgtttttcttaaaaatgtagtgtatataattacggctcgattattccggtgtcatgagggcatgccgcactttggttctaggcgactccatataaatatataatcctccgccttaattaattaatgtccacaaattaaaagagaggaaaaaaaggtctgggatgatatggtccaagcaatgtacaaaaggtactcgatccctccaaaatatcaactatttctctcaagtttttcatgggaattaagaagagagataaaaacattatatcgccatttattaattgttcctattgaagagaagagggtgaggacagcagagataaggggtgttttaaatatttcactagggatcgtaacgatatcgttcttgtagaactaatatagtaataattttatcaacggttaccgttttaaaatatttgtattccaagtttctattagttagtgtcttattaaagttgttactaaatagttaaaaattccccaactattttcattcgtttccataaaaataataaaaaaatgatactgtttcagatctttttccttcctactacaaacactgtttgttactctagaagccgctatagcctatcagctcatgcctccccgagctctgaaacgacgtcccttgagagaagggagactggctagctagcttgcctgtctgtcttgccacatgctttgcttgctgcatagatgaattcagggtatgatcgataccgatagatctctggaagcctatcatgcatgccatgcaccagca

SEQ ID NO: 29999 - DNA, 739 bp, Oryza sativa
cgtagtagtaaaaaaaatggaaatgatcaggacgttcgtgcggggtgaacgctcacccgtaattttttcgattgataatgccctagtatagagatagaaagagatgacacgataggtaaacacgaacaagcgtagccgtctcatttgtatatgtacaacggtcacaatagtttatttgtcgaaggaacattatgttctttattggactatgttccgccgatgttctgatgtacgtacatattaacatatggagtgggcacaagtcttttatggagtattatctttggggattcccatgtcctattttaagtaacatttaaaggtagagctcggtataaactattagacgatacatattcatttataaggtattctaaccattagtccaaaagataatttttattgctactcttttcattttttcataggctaagagtcgttattaagtcattgtgttaaccgaagtaatgatatttctcttctttttttttttcatgtcaacaaatatttctaattagcatagctatgagttctattattgaccattgtttattttcgtatgttttcatgtaccggaaaagtttgactcaatatcccgatgcttcattcgttctctacaacttgtaataagggatgactagttgaaaaaacatttttctaaaaatgtgacgcccatgttttttttttactgcaatcactatttttttcaccatgcatgtgattgctaaatattctttag

SEQ ID NO: 30000 - DNA, 1718 bp, Oryza sativa
tccctggaattaacaattgcactttagtgatttttaattggttaaaattatttctagggctctgaaaattccactaaaaatcctgttaatgaatttcgacatgtagaactcaagaaaaattccacatgtcaattccgattattatttgcattaccttcttagggttttctcctgatttcctctgcattttcttggggtcatttggaatttacaattttgaccagggaggaaaacttcggggtgtgacagctaaggggggaaaacggcccacaacacccgagggaggtaaaatagacttttgcagggaaagctgatttggagagaattggagtttgtatttggattcaaattcgatattcgaactcgaggtttcagggaggaatcaaggaagactcaaggtagggtttgatatttttcggaattgggagcgagtatctgccgaggattcaaaggacgcgattgaatttcggaatttgatttggagatttgagtcgaaggaggaattacgaggtggaggattttgatttcgatgagagggaacaacgggattgaattgagatcctggcacgacttagactctcacacaaagaacgaaaattttcgcaattaggattttgccgaattagtttttaacgtctcacgaaaagcggagagttacaaaacagggccggccaaaatatcgcagtatggttgcttctaagatttagataaagatgtaaaaaagttaaaatattagcacattcattcgatgtgtattgactttttttgaactccatcatgtatgttactattccaaatcgttgatcgaattaaagatcatgtattatcgagtgcataaaataatcaattatataaagcatgttccatgatgatccacagttaagtcgtttgctttatggctgataaggtgtaaaaaaacaaaactttgtatatatgttcttagcaaattaaaaaggaaaaaaagtacgatttaccccctgaactatcgtggtcgaccgaattacacccttctactcgaaaaccaaacattctacaccctcaacttttgaaaccggacaaataagcccccgaatattgttttgagtggttttgacttgaccttgcacacgtgacgccaacgttgcaatccaatcagccaaaaaaaaaaaatccctggcccacatgtcatacctcttctcaacccattccatctctctcacgctggggctaggtggcggacgaccattggtgggcggctgaggcggagcgggcggccggcggtggaggcagagctccccgtgcggcgggcagctgaggctgaggcggaggcggaggtggagcttcccgggcggtgggcggctgaggctgaggtggaggcggagcgggcgaccgacgatgccgtggaggagggcggcatcggcagcgatgagggagcaggcctccgtgccgtcgcgcgcgccacctccgtgccccgcacgtgccgcccctctgcgtcccacgccgcagcccattgcccgcttgctgttgcgcgcaagagagaggaagaggagaaagagatagagtgatagtaggacaaaaccgctctagattgggtcgaggggggtaatttgtccggtattgaaagtttaaggtgaacgatgtctggtttttgagtttacagacgtacatcggtttaagtttcaattctaaatttaagtttcaaactttaaatttttgttgtagttaataagcaaaaaaaa

SEQ ID NO: 30001 - DNA, 2011 bp, Oryza sativa
gagaatcacaaaccaagagtgataatgatctacaacaccgcaccaaagctcgatcccctccctcacgaatcgaatatggtggaggagacccacaagctcaaatgattcgatcggcgaaggataggagacacaaggggggaggcgataaggggatgcttgcacacaaattctctgcttttttttttgtgtgtgtctgtatttttggggctataatggaaggttgcgcgtaaagcaccactactgtcctgtgctttttcggtgggttaagcgttggcgctcgcaaatacgcatatttatcaccaggtcctcatgttcttggtttttgccgcatgtgattctcgtttttttttatgcttgcgaaacaggaggtgaaaaatctttgaatagaaaggagtatatgcggtcgttgatccatggcgttctatcctggaatcgcccactgtctatttttaacgaggttggagaaccacgttggttagcctacccatgattttgcggctagtaaagcgtgcacttgttttttttaatctccaaaaatgttgtatcgatgcatgcttttcaacttcatatttgcatatttcactccgaaaaacattgtgagacggacacaaaggtttcgaatatgtgatgagttccatcaaacgctcatatgcaaattgactatactggtaagatggctttatctttatagatcttcagtgatatgtagggcctattcattttgatgacattttcaaccttatcaaattttgataaagttgccaagtggctacatttagtttgctgccaaattttggtaactatataaaaaatcctcccaaaattttggcaagttaccaaaattttgacaactatgccaaaatttgttaaggttttttttggcatcaaagtgaacaggcccgtaattgtcttatggtttcttcactatctacctgtgatattttttttcttccttatgttctcattttgtcccttcaatttaatgtttttatttagtagccatgattgctggaaataactcatgggatctattgtttgcactcgtaaataaactagaagttactcctactcctcagcctagatccttgaacaatatacggtaatgtgacatataagtaacatattatagaattgcctgtgttttgaaacttgtagtttcaaagaggcgaatgaaaaattatgcgattgtgatgttttattgtacacacttaggtcgatagacaaatggcctagtgtctattgtttgtgatgattgtcgcttgttttggctttaactctaccatattgatttctatataattttcttaccaaccgacgattggtgtattgaaatagttaggtttaaaatacaaaataaaacaatacaggagctgaagaaaggtgaaatgcatcctgtaaaaaatatatttttactaaaagatggtaagtttgtctcttcattttatgcacaatatctttggcactaccaagaacactggaaagtggaaactactagcactacgaagtttagaacactctgatcaagctccaaaatgcacatctaaaatgaccatatggttccatcagcctgcactgatcccttttgtaggtattgctatttgctaaccctgaaacctggaggggctatttgctaactggccacgttttcattttttttttcttcctttctcagctttttggaaaaagaggggttttgtagtgggaagtggttcgagaggagctcaaccagaggcgtccttattcagcttttgcctagtggaattcagattaagaattaagccaattcaccatctttggtctggaggactagaacaaagcacagacacaagtgcacaaattgcagtagaggtgccaataattggacggaatcgaggacactgttgccatactgcataggtctgcgaggtgatggatgggatgggagatttaacctgaaactgtggatgctcaaatttatgcacctttgatgtggcaggaagcaggatcaacaattttgtggatgtactatggg

SEQ ID NO: 30002 - DNA, 1529 bp, Oryza sativa
gcagcagagcaaggcaagtcatgcttgtcacttgaacatgttgatcctatattgcaaatgctctattgttttctttcaaatattgcattgtttataatatcactatgggatggatacctattgttacagccatgcttttggatatcatgctcctttgttagcttgggttataacatgattagattttggactaggacttgcttagccatgcttagttcaactagcacacattggggatctcatttaaaacctagactatagttttatttgataatgttggtttaataccaccgctctggtgttggttaattaaaatgaaccacatggtgggctgtgggtgcatggttttgctagtcgcacccatggcagttaaggaccggttcgcgggatgccctggaagaatttaccgtgcttaccacaagccagcgtgggcaacggctgggcttgtagtgtagctttcctctagccgacgcatccaggcaagggtgggcgtgatggagtttggatgggccctgcgacggcttatgcggcttccggattcacctaggcacgagaggggactgcccgctgccttgcgaggagtgggggtgaaacctgaggtgtggtgtgcttggttagagggggttatgcgaagggtcctgtcacggcctctttccggtatgtcgtggtgacatgtcggcgcacggaaacgtgtcgtggggctgtgtcttgtgggtacagttgtacacctctgatcagagtaaaactattcgaatagccgtgcccgcggttatgggcggtcaaccagattcaccgtgattagtctcaccctagtgtaatctgtagaacttggatagtttaggtggatggttgggcctgtcgcaacgtgggttagcgttggacagtggatgttaatactgcttaattattacaactgttttcgcattaaattcctgtttataaatgccagtatttatgcaaatgaaccactctagctctcctttgttaattccctgcatcatacccccattccggtatgacttgctgagtacagtgggtagtactcagtcttgctctacttttccccccaacctcagagctcgagtatgtgtccgatggcgggttctccgaggagtaggcttcgtccgtgccgtcgaggatgcctgtggagtggtgttcccgctgccgttcaagtcaaggcttagctccagtttcttttgtttttccgctgcatttctgtaagactttataatgtttgtaagacgtggatctgtatgtcaacattgtcgtttgtgtaccccggctggtcctggacggggattttaatgcacattctgcttgggattccatccgggaatttctgggcgtgacattagcccacctccctctctcagccgtttctcctccctcagcctcgcacgtgcgttgcacgcgccgagccgaaccgagagagagctctctcgctctctcgttctttctctctcccatcttcgctctctctctctgctcactcccctcccggcgccgattcccgccgccgcctctgaatt

SEQ ID NO: 30003 - DNA, 2254 bp, Oryza sativa
tatatatatatatatatatatatatatatatatatatatatatatatatatatatatatattaaaaattgttcgagaaatgaaaacgtgaaaaacaaagagtaaggattgaaaagggaattgctatacacacccttcctgcagcctccagcttccctccgccaatccaccatcgccgttggattcgtaatcgtcggacacctcgaatcgccgcaaaaataaaggcgagcacccaaccgcaccgcaacctcctttcgatcggctctcccctctcttctccttccccccttcccctcctgcaagtaaaacaagcgagagactccccccctcaatggcgtcccggatcgcgaggctgctacagcaccagaaccgccgcctcctctccaccgccgcggaggcctcctcccgccgtccgccgcgcgctcccctcagcggcgccatccccaaggtaaccccgcggcaaccggggaggttgtaaccctaaacccgcttaaacccctgcgcgcctccgaggtgttcggcggaatgccgacaccggctcgcatgcctctgtcgctgtttcattgatagcttcgtgtttaagtgagctttccggtaatgtgatgccctagttaggtccctgagccggacctaacgcatgccaggcgcaggtttcactgaagtattaattgttgcttagggcaatgggttatgcggtgagctcatctggagtcttatcgccattgtagcatgtggttcctgttgaatctatatacttagagcctaaagcaatgcttgatttgttactctaatagtggtaatgaatagtgcctttttatttttctatatagacacaccattatctccgacctttttattttctatatagatacaccattatcctgaccttgtttcaacttttaactgttcctaatccgagactgaatagatccttaagaagattgttgaatctgttcattgtgtgataaactaatagttttttttgtgtgttttctgctctaggtgacatatatgtctttttttacctttcgtcttttttttttcagcatgaagttgcaaaggctgaaggtctaagctcatcttcaatcctgaagctctctactttgttcatcaagtgtctatttatgcaagtttcaaattttcttatatggttgcatccatgtttctaaagatgttctgggtattattgcatctaagaaatgaccgctgtttcttgtgctgagtggcacaacatctcctacactacatgttataaatgttgttacttactttgctttaatttaactgcaaataagcatagaagctaaattgatagtgcaaataagaataacatgttagatgtatctgaatgctcactaaactcacagtgtggtggcaaatgtactcgcatccctataaatttcatctgctacctcaattttggttccttcctgatcatacttttagggacaatctacatataattattttatctgcctacctgctgcttgtcacaattttttattcaaattcttgcaatattttttcagctacatcaaaagaattgctagttgctgacatataatatgctttctttatgaaacatatattatctgctgatcaaagattttattttttgtttttttaatgttttaagcatagtatgacagagagttgcatattctaatttcaaatattgtacgtactctttcatatactggtttagagagcattactgaatgcactgcccttgtaatactaagtcaagcatactcttcatacatcaaacctactagactgaaatgatttaagttgttgcaaaatgatagtatgctatttactcaaaattgaaagacattagtgaatcttgtgttgttggcttctctaacgaaattgtgctgaatactcaataggcattaaacctcagatcaatactcaatagacattcaatgaagttcatatttacagaaaattgtttctcatctgtatggtctcatcaagtcatcataactttattaattttcagacatttaatagtctcacgttcatgttcttttttgttggatcttgaccaacaatgctttgcaagttgcaacatcttatctatatttatttagtgctgagtgaattttcttttgggaaactttgcagcctcatctttaaaaaaatcaaggtggtacatgatcaagtcaaacccttcaagtcctctcacaacacagcgtgaaagccacaaagtatctactcatttagttaggccttttgcatcctactccaca

SEQ ID NO: 30004 - DNA, 2985 bp, Oryza sativa
cttgagtcccccctgcacccacgttggatctgcccctgccaaccaccgattgtgattgttcattgttagtttgtttttaacacgtataggcgctcagcgccaaatacccgccacgtcaaatccactgccacctcagctaggatctcggcgctgacacgttatacctcagcgcaaacctcgatgacgctgagcgaacggcttatttctgcaataagttattggcaagatctaattttaaaataagttttcttaaagggtcaatttgtcaaaattacagccaacaccacccaggaagacaaatactcctactcctactataaaatatatactacgcgcgtgcacgcactgggcgaatgaacgagtgaacagtcacccctgtcccctactaaccagcaccagctctcacaggttttggcccctgctgcatcatcacccatagatgcctacaaaatccatgaggctttattaggttaatccccccaaaaaagatagtattgaggaagaataattttacatacaatagacatgaaataaatcctcttaattcttttatgagagaaattaaccgaacaagatgcgacggggcggtcacatgtgtccttgccccttcacgatcctgttactccgtgtgtataggataaaaacactaatgtcaaactagctacaattggccatcagtttatcacagtgctttaagtcgagctggatgcttttttaacgtttttatcgagcgcgacagtgcaaacatatcgtcgtcgtcggttggttgattatactcacaaacttgtcgttaagagaaaggagaagcgacatggctagacgtgaccggcccatcatcgatctgatcgatcagatggttggttagctttacgtcgttgttttctagtctctccctctgatcgatccatgtatcgtcggtgcaaacggccatatggaggagtacctatggtaacgggtggcttatcatgtatataatgtggctcttatcctgtaaaatggctagtggcactgtgttagaaatagattgagatccaatgcagttgctattgccactgcacacaatttgagccttttatttcttgatccaatggttcaaattgcttgccacagtgaattctgaaatatatatatttttttcagaaaagcgctacagtacttgctacagtattgcggtgcatctggatcattcatttcaaatccagtggtgcttgtgtgactgcttaatttatagtcacagtagcaactgcacctgaaccaaatccgttagaaatccaacggggttgacatgtagtacaccctaaagcctagatccggggaacatctgtacgactgtacttacgtaccttaccagccaggggagctgtaagcctggagaaaatcatgacttcaactgcgagctggttgacttgttgtctcgccgacggccaatacggccaggattcatgtccgttcttctacgcataagcgtaggatatgcaactgtttgggtttgtttctaacagtaacatgatcatttcccgtataaattacaatacagaaaaaaatactaagaaaaagatcaaagaaaccacttaccactctctaccggctttatagataaagttcttttaccatattactcgctccgtcttatagtttactataagagattttgattatgcaattatgggatggaggtagtattagttatgctagtatatagttgaaatctaacgctctttattttgtaacaataaaataatttaaaattgcgcaccatgctattgagaataatttagtccataaacgatattttcttttcctatatgagtctctcgtcgattaatacaggaatgaaaaaggaacaattccggtaggcagtgatttctgtgactgaatggtttcgcaaatcatgattccggatacatgtcctagtaattagtccaagaccgctagcccgttcccactaaacctcgattcttcttttaatgtatatattaccattcagctggttccagacttgcaattatcttatacccgtagcactatctactctatcttgttgttggtgatttcagtcaattattcagctatgcgtttgtctaatgccctgcccatttgttttactccatggttagattgataagtcagtggacagtgggtcaccgaacatcaatcttaaaggaagatgttactagtactatatatacttgcaacggcaacatagacagagcgtctcaggatattaatctcatgctatttcaggcaccaaagacaatcagtctgcgcttgcaagttgctactaaataactagcttatcattccataaaaaggcagggaccaatatcctgatggatcgatgtattgtcacctgtataaggattaggatgtacagcctaccgtaagtggacttagacacgcaagatattagattgaagtgtattgatgaattgatctagcgcatactgacggcgactcgtcaccattatggaagatacaaggagaactgttcttttatgccaaatcacgacttcatgagcacccgtctgcttatcattcctactgctgccccgtgctaaaatataaaaaataatctaggttgaacataatattaaaaaagtattatgtatacatatttttagaaacgcagtataaacgcagaaacttttaacacgcacacactcacccctataaaagcacacacgtacatcccacccgtacgagcacatatgaaagactgggctggcatattatgagattcacgaagtcaccacggagcatctcgctgtctgtcggtgacatgggaccaggagtatcatgactagaggcttgaggcagacacaatcgcccacgtggcctggcaccctcggggggcgtcgggcccgagggtgatgtgttcgccctcctctttgtctccccgagggggtcgggccgcacccgcctcggccccgagggccgaggcgccccgacccctcgtgggtctttgctctgcgtgtatgggttagg

SEQ ID NO: 30005 - DNA, 6391 bp, Oryza sativa
aggaagtccggagcgacggcggcggcgaaccggagctcggcggcgacggcggagagagaggaggacggcgcgagcacgaatccgacgggagagcgagcggcgagtggcggaaacggaggagggaggcacggggaacaattatatagcgtcgggagagggagagagcggccggagagggaggaatcggccgcggagatctcggctccatcaatgacgccggtgaaacttgcgggattaaatccgaacgaatccgagggagagagagagggaaaagcgggggaaaacggagagggaatcacggggaatgattccccccactttattgcgcgcggggacggcgggatgcggcggaatcggcggcggcggcggcgctagggcacgggcgggcggcgggcgcggcgcgaggatagggatgacaggtgggccccacccgttagcgagggtggcgggcgggcccgcctgtcagcggcgcgcgcgcgggggaggaggccggtgggccgcgggggagaggagagagagggagggaattgggccgagccggcccaagagggaaaaaggggggaaaagaagacttttagggatttttctttttataaaaccttttcaactttgtttatttcttctcaattattatttgtgctctgaaaattccactaaaatttgagggctccttttagaccaaggagaatttaacaaaaattctccgggccacatttgaatttttcttgtacgtattttagtgtttgccaatttcttttcgaattttaattaattctattattccttttagggaatgatttttatttcgggatgaatttatcaggacgtgacagttttgctagtcgcacccatggcaattaaggaccggttcgcgggatgccctggaagaacttatcgtacttaccacaagccagcgtgggcaacggcagggcttgtagtgtagctttcctttagctgacgcatccaggcaagggtgggcgtgatggagtttggatgggccctgcgacggcctatgcggcttccggattcacctaggcacgagaggggactgcccgctgccttgcgaggagtgggggtgaaacctgaggtgtggtgtgcttggttagagggggttatgcgaagggtcctgtcacggcctctttccgatatgtcgtggtggcatgtcggcgcacggaaatgtgtcgtggggctgtgtcttgtgggtacagttgtacacctctgatcagagtaaaactattcgaatagccgtgcccgcggttatgggcggtcgaccagattcaccgtgattagtctcacacttaataaatcgacccaatgcactgtagttcaggtgggttggttgggcctgttcaacgtggtgtagcgttgatcagtggagattcaatattactttaattacttaattgttttactgttttgctcaataaaatgttttacaactgcctttatgcaaatagccacaaacccctccttgtatccgcttgcacgtctgcatcattggtgtggcttgctgagtacggtggttgtactcagccttgctattattcccccttttcagaagtgtagtgtttctgagttgaagacgaagttagaagaccaaggctcagaccccagttgagttttgcctgtggagtggagctgaagccccactaggattgcctttttccgctgctgctactttcgtttcggtgtgaggactaagtgcctcttctgtaagtattttacgctttatttaagtttggaactgtatattacttgtcgttttgtgtaccctggctggtcctggacagggatttagtacacagaatagtctggaaatttgggctaaatttctgggcatgacagtgatgaatgggtatttcccaaatggttctggctgggcggggttgaggacgtactccgtgaccagcgttgtcttgaaatttttccaacaattctccatcttgcggatagcctgctgcttgagtcctgcctcgacctctgtagggtattggaagctttccttgaactgcctccaggcctcttctttttcttggaccagatcgatgtggtccttcagaatagtgaagttccacctccctaggactccgcatatcgtagggaactttttgacagcttttgtcggagccgtcggatatccaacatcgtccacctctattatggtgtagactttcttaggaatcttattctaggtcctaggattccgactcgaagtagtcccagtagtggtcgtcgacattggttcgccttgctgcaacatgtcctatgtcactgttgtatggggagaaagtactttttaaacacaaaattgcatctacacacattctctgatagtttgatattcctctatctcctacctgcgttcgcctcgtcgacggaaccatagcatccatgctcaataaggccgaagcagccgggaactcgacctcgacatcagtatcccactcgaacttgctatcaatgtcactaccataagatagtggcaacggtagcaaaatctagtgggatatggatgtcgaggtcaagatcccgtctgctccagccttaaggaacatggatgctacatatctgctgacgaggcagacgcagatagaacacataggcaaccaaaaccctttctatccaagatccctaatgttatcatcagcaaactcctagattgcgtccaagattattttgttagggaacccttattcccatagatacaacaaccagctttggatactgaatttatgggaatggggttccctaaagaaatgaccttgaaagcaatctaggatattggtaacgataacagatttctagaaatgttgtatttgaacgaaatgttctgtttaccaatttttcttggctggtactgtgcaggctgtaacccgaccaaaccagatttggcaaccgggacacttcgtattctcctaaatgccataatttcagtaacttcatttaataacagatttctatgcatatccatcccatttccctcaaaatcacccaaaacagcctatattacacaagtcacatatatattatttttgtacctaaaaaaacacaagtcatgacatataataagtttggcctcagttttgctcagaaattatgcttcaattaccatcatttgcaactgcccccatccccaaaagaaattaagaacaagtgtagagggtctgtccttatgaaaaaagaaacagccatataaaaacagccataataattcaaccatcacagcccacatcaattcatccatcccattggacccaaaatatcccaaaaattatgcaaacaaccatatctctactacttaaaaaataagcgctgcttccatcgtccgtcaaaaaaaccggcgaaaaaaccaggcgagtgagaaaaaaccggcgaaaaaaccataactgttcgatcaaaaaaaggggcgaaaaaataatccgattctgtgcaaaaaaaaggtgacaaaaaaaccgggcaagagaaaaaaaccggccgaaaaaaccgtaattgtccgatccaaaaaaaagggcgaaaaaaatccgattccgtgaaaaaaaaaggcgaaaaaaataaaaaaaaatcggtctgattaaaaaaaaggaatcaggctaaataaaccgggcaaaaaaaatcaggcgaaaaaaaagaatctgattcctacaaaaaaaagggcaaaaaaataaaaataaaaattggtccgattccaaaaaaagagaaatcgggcgaaaaaaccgggcttaaaaattgggtgaaaaaaaccgggcaaaaaaaaaatccgattctatggactgttggtatttcttaacgatattaatagaaatataattcccagcaatggcgtagaaatatttctggtatattatggttacagagttcatccgcaagcgcacggatatatcattgtagtattttacccgagagtattccaagggtatcgtatttattttatcccatggaaagatcatgtagagagaactcaactaataatttatatattacttgtgataatcatattctaagcaggggttaagataatccaagggtagagtgacacacaagcattactactcatcctcataataatttatctaagctaggtggaaagaagagaaaagaaacctattcatatacttctagtatacatattatacatacattctagttagctgatatactagctaataccctctatccaatgccctcctggtacttcgagaagccacccctgactgccgagttccttacgacagcccgtcatgaccatccaaccagggctaaatacggaggaataccctccccaagaaattaacttaggattatatataggcgcggaggaatacctgtactgagctgtcaccatcagcggcccacctctcatccgtaatatataaccccaaataatgatatcccgtaatctagacactacgcctaaactaccagataatactctaatatcatcgtcatgacatagagtaattgcataagcaaacactatacccgtaccaaagcatctcccagataagctagcagcataatcagtataacatgaacataatgtaaagttggtattcatatactcgaaaagtattccaataccataaatttatatagaagaatattctaataaaagtacaaagcttacaaaagaggaaaggaaagctgctagagccatacccgaactcttccaaaggcttccggactcctgattcctattctaattctattccaccagctagatactactaaactaaacttgagaggaatgagagagctcttgctttaggtgtgtgagtgaagtgagaaggtgaagtccttttatagctgaactatgacggttgtgacggttggaatggtcggtaataccctccaaccgtcattggggcttcatctcaaccgtctagccaaaacctggatccaacagaggcgagggaggttcggccgaaccaccaagttgaagttcccaaaattaaaagaggataaacgatattaaaactcccctaactcgaaaagagggaataaaatacattgaaatttcccgacaaaattccctaaattcgaagaaccctaatttagggtaagaaccataagagttaaaatccaaatcaattaaactatgggttcgggttacttaacagacttgaagcccctaagctcaccagagcttcccgggaagcggcaccaccgcaccttcacctcctcacagtcacattgggttccctgtgcgcgcgctgtcctggagcacccctccattgtccttggcgtcgcccctcctgccgacgaggtctaggccgctcggcgctcgttgccgtttgcgcggccgcctagccggaccgtcatcgccgccttcgccgtcgttccacacgctcgtcgcgggagagaaatgggatggggagagagggatttgggagctagggttttgcccctctctctcggtcggcgcttcatccgagcggggaatatcagagacgtccattagatcggacggctcagatatcggcaacgttgggccgccgttgccgattacgctgcgcaaaatgggccgcggaagtgcatcggaccgtccccgcataagtgggccgcgctcagctgctcggcttgcgggccatcgaattgactcggtttgccgaagatgggccaacctaagtttgggccggcttgggaagacctaggccgaaagcaaatttgatcaaacaatgtgactcagattttttaaattaaagtctgttggataaactcctaagtaggctccaaaaaataaatctaaaactaaaccctaaatcctatgctaattcatcaaattagactcggttctacctatttgttaatatatcaaattagacttgatttttactgatttaaggttttcaaggtgtcacattatcaaacaaccatataagaacaagtgtagagggtctgtccttatgcaaaaaaaaaaaacagccatataaaatgatcccatactgccactcccccccccccaaataaaatgaacaagtgtagacggtctgttcttattgaaaaaacccaaaaatcacaagtatatatggtctgttattatgcattaaaaacccacatttaaacctaaacaagaacaagagtgaggccggccaaaaaatgcatccattttgcaaaacatcccatactgccaccccccccaaaataaaatgaacaagtgtagatggtctgttcttattgaaaaaaccccaaaaatcacaagtgtatagggtctgttcttgagcaatcatcattggccattacatcacaaatacatccaacatggcatttccaccaaaaatcatgcaaaattcatcctctgcatagcaatatctagatcatccaactactacaatgcaaaaaacatctactgcatccattgcatccatacatccaattcatccatacactgcat

SEQ ID NO: 30006 - DNA, 1526 bp, Oryza sativa
cctgcagcccatcaagcattccatgcattaattatatctagctaaggaccagtcatgacacaaagtatttgtcacacacaattaatatgagagggaagaaatagaataatatttatagcctttcaatgtgaagcccagtaattttctggcatcgtagaattaataactgatctacatggtacccaaaatatataattggacatgtcacaggacactggatcaaaggtctatgtgaatctagatgtactcaaagaatattgcagagacatacccacaataaagatgaagaaaaaaatctcacaagatcagaagagaggaggaaaataaataaggatgggaaaaatgctgggttataccgtgaaatgagcagatggcagttgactatgttgtccaagcagagatgggcgacggttggtgaggcgttgttgcagggtcgggtcggccgggttcaacagagatgcactcccaaattttataagaacttgactaagtagaaaaataaccgaagtatcattggagcagtaaagaataaaagaaattattctttgcatgatgagagcaaaaagtctgatttttatctgcgacaacagtttaaatatactgaaataagtagcaataacttgaatgtcatgatcattgtgagacaaattatgcagatatataaattgtataaataatcaatttgatttgattcatgaacataaaggagggcctctgaaactgttagttgctgtatttttttagggagagtgaaactgttaattgctgttattgttttcctggagcatcaatcagttcatgacttgcgctccttcatattcagttttatgcaaatttgtacacaccaggcagactcactttgaagcagtccaataaattaacttctgctaatcctaagtaataaacttaaaataaaccatgattagcaattttacagaagtgaacaatgttggccgatgtctgaagaaactgacaaaatcccattgctgttttattgttccagttaagcgaagaaggttgatgtgccactacttcagaggattcttcacataattcaccaggcaagcattatagtgcttcggggaagattgcaccactccagacattttttttttagaaaatgggataaacccggcctctacatcgccaaaccactccagataatgagcgatggtactcgattattgcaattgtttgactgaaaagttaatttgggacctctgctgtatatattaggccaatgtatgattttccactaattatgatatctgattctctactatattcagcacctttatgatatacatgcttcactggtaaaaaaaattgagcagattttcatgtggcagaagggagggggcctggcggcgaggcctaccccggcaatggactgcgggccgagtaattagggttgggtagagagagaagagggagggggggggaggttggggtgaggcaggaggggacctgtacctatagagggagactgtggcgtccaggacggaggcggaggcgacggatagacc

SEQ ID NO: 30007 - DNA, 918 bp, Oryza sativa
ttgctcaacagatccttgaatggttttgcttactactccttccttccatgaatgtttgacgctgtttgacttttttaaataatgtttgacgccgttggcttttttaaacatgtttgaccgttcgtcttattaaaaaacttttgtgaaatatgtaaagctatatgtatacataaaagtatatttaacaatgaatcaaatggtagaaaaagaatcaataattgctgaaattttttgaataagacaaacagttatacatgtttaaaaaagtcaacaacatttagggaaggagggagtacatgtgaaattatcgttggagattagacctcgagattgtttgcactgaaatgtatgcattccaagtgccaatccagatgctccaggtgacccggtcgagtctcctctacaataattgtcatctaaagttggtactgatatgtggtgggtctgccgaatatggggcttttatatgtggcagtactcccaaggtctcttgtgtttgctagatggtattggtagatatacaatgtcacgttctttgtcaatgctagtgctacatgcttacattcttcaaccgtattgatatcgttatgtaaaaaaaaagtttttgattgtttatgaatgtaaaatttagtttttctaatttttgcgggtatggtattgaagttgtcattaaatatactatatgaatataaaaaattcccaatcatacctgtactgttttcttaaaaaataataagagtaaattttacaaaactacacgttttttttatccaagttacagaaaaccacacactgacacttagcgtttaagtacatatattttggtagtgtagttttacaaaaccacactatcaatgaattgattcacctgtgatatggcgtgactgttccacttatgatgaggacatggcatcctat

SEQ ID NO: 30008 - DNA, 1862 bp, Oryza sativa
aaacaaatatatgcaccaacaacatatatcatacaagtcttggccactaatgctttgtcatttgctcctacatatttattagtctatagttatcaagctaaaagaaaacaaaaccatccacacatctaagcaatgtattttaggattagggctgtcaacatgttacaaccaagtgagccaatcaggttttgcttgagatcgatttacgagtggaattttagtggtccaaaaaatacacttaattagcttgtttataatataataataaatttcattgttccattcatttcaaattagttatcattttagtattgtcctaaggcaaacgtatctattcttgacaattaatttctagaaaatcgtataggttaacaccatgtgaattatatattatgaaagtatatatcaaggctaatctacaaacataaatcttatgatattaaactacatgaatgtctagaagttgatggcaaaatatacaaatgtttaaattaaaacaaacctagaataagaagtaatttgaaacagagggattacttaattaaaatgaataaatatttgacttgagtggttagtaactaagctgattactgcttataaaaaatgcaatggttgacttgatatgtatcatgggtcttgttggcatattaattatgattggttaatgtaggttttcttgggcacaaaaacgccaacatgcgtttttctttccaggtaaatttacgacatcactattatgcataagtaacaaaaaatcatcattgctttaatagaccacgtggctggttaaatgcaccaagtcttgagctttgtgatagttacctcgtattttgattttatctggatatttatttctatcccttaatgttagtgatttatcaaaagtagtgattagtgggtgttggatgctccttcatagcttataccaatacacgattaattgtgaaggaaccataactctgatctttctattgtttgcatcattgttgtctgccatcttttcgatgtgttctcattgttacatttttgtacgcaggtgaccaaatggtgttcttcattttgattattattgaatttttggaactcatttggaccttcaaaccatttctgaccatgccatagcaattctcttcaaccccaagtaatcaagctttcagatcatcgataagttgggtggcatgtcatgtttatactgcacatatgcttgtttgggtatttggatggtagctaatgaagatttatgcatatttgaggagcaatacttatgtatcctatcatgtaattgtagataacatactaatacttatccaactacatgtgagatgtatttaaatgacctttctcctttggtttgtaaaatttaaatactcgatttttcacgaagatgaagcataatatcacgtaaattgcaagtgtggataaaaacaaatggcaaggtaccatataatattatatagatttatatttttccatgttaatttctaggtagtaatataggcatgacacattttaaacgatattaccagataaaatcataaagctatgaccttattatgctttgtatctgtatataatgtatgcttgttgtttatcacagtggcatttgattaattgtagcttaatcgaatacgtgaaatttgtatatgttacattaaaccatgattgctaaagatggctaaagaaatgttagtatacatgagaacattcttcaattgatcagtatacaaagtgatttattgctaactgacgaaaacgaggcaacatctaagccactaattaaacatcattactgttgaccaaggtaaaataatgagtatagtactggtttcgcttacacaaagatcgagggttgcactctgcac

SEQ ID NO: 30009 - DNA, 1553 bp, Oryza sativa
tgagaaaaatgcaaaaaaaaaaaatctagccattgattttcattaaatttgatgaacccattaaaaaacttttatctcttgaaacccgatcttacctgggccacgtacgtatgtatgttaccttttttcttttacgaaaatgcaatacgaaaatgcaagtacgggaaacgcgccccccctccacccccacccccccagccgccgccgccgccatcttccctcaatctctttcgcctcttttccacctattcattttcctattttcatgctttgttagttagaaaagaaaaatgcgttaaacaatttaagcaactataatgtctaaatcatacaactaacctttatccgctaattttcactatattttaactttgaaaagaaatttcatttggattatattttctaacttttgtatgccattcaagcaattgtaaacaatatgaactatgatgatgatgatgatgatgatgatgatgatgatgatgatgatgatgatgatgataataataaagattttagagctacaatcataaaataaaataaatataactgtcagtaatatttccaacatatattagtttgaaagcaaaagtaatgctaaaatataggtaactataacatgtaaatcattcaactaatatttgatccgcttatatctttagattattttgcatttaaggacccaaacctactataattcaactttgaaaagaaatatatcactttggggctatattttctaacttttgcatgtcattcaaacaattataaaattattaaaaaaatgatattgattttatcattgtatatatcttcacagtagttaaattagatgtacaatgataaagtgaaaataacctaaatccccccattctaatattataattagtcaaaatgatattattagacttatagtgttcatatttttaacacctactgtgaatataccgtagaaaaagacgtgtaaaaaagatagagtttaattctatttttagttaataaagtaaacaactaaaatagtataacaagtaattatatgcaagcatactctctcccctttcactctgttcgtctcctctctcattcaattcatccatcttctaatttttaactaattagtaaaaatgatcaataattacaaacaacagaatcaactatattagatttttaactaattattattcttaagattataattactccgtagcattatgagtttatttgtatataattgcatatataagccacactaagatagcagtatatagttgttgaaaagttttatttgttactattaaatttaagttttcagattcatgttaactaggtattatcttttaaaaaggataatatagatcatgcatatcacaaggaaatgaggcctatgatacatctttgttaatttatatgtaagtatataacattttgtgtaaatctgaaccatctagaaggaggactaatttggtgggacaaataaagcatatttattaacagtaatagttctttaggatttattttaaaaaatactaaacattcaattaaacaagacaaat

SEQ ID NO: 30010 - DNA, 1601 bp, Oryza sativa
ttttcaaagtatcatttctctatttcttttcatcgacattgcttacataattttaccaaactattcgttagaatttaaatatgtaatatttaatacatccctataaacaattatctatcatctcttcttcatcgtaaagttagatttactttgtttgaaaaacatgtctaataaattaagtgtaaataaaaataaggtgatttgtcttgtttaattgaatgtttagtattttttaaaataaatcctaaagaactattactgttaataaatatgctttatttgtcccaccaaattagtcctccttctagatggttcagatttacacaaaatgttatatacttacatataaattaacaaagatgtatcataggcctcatttccttgtgatatgcatgatctatattatcctttttaaaagataatacctagttaacatgaatctgaaaacttaaatttaatagtaacaaataaaacttttcaacaactatatactgctatcttagtgtggcttatatatgcaattatatacaaataaactcataatgctacggagtaattataatcttaagaataataattagttaaaaatctaatatagttgattctgttgtttgtaattattgatcatttttactaattagttaaaaattagaagatggatgaattgaatgagagaggagacgaacagagtgaaaggggagagagtatgcttgcatataattacttgatatactattttagctgattactttattaactaaaaatagaactaaactctatcttttttacacgtctttttctacggtatattcacagtatgtgttaaaaatatgaacactataagtctaataatatcattttgactaattataatattagaatggggggatttaggttattttcactttatcattgtacatctaatttaactactgcgaagatatatacaatgataaaatcaatatcatttttttaataattttataattgtttgaatgacatgcaaaagttagaaaatatagccccaaagtgatatatttcttttcaaagttgaattaaggtaggtttgggtccctaaatgcaaaataatctaaagatataagcggatcaaatattggttggataattaacatgtgatagtgacctatattttagcattactttggctttcaaactaatatatgttggaaatatgagtgacagtgatatatattttattttatgattgtagctctaaaatcttcaggattatcatcatcatcatcatcatcatcatcatcatcatcatcatcatcatcatcatcatagttcatattgtttacaattgcttgaatggcatacaaaagttagaaaatataatccaaatgaaatttcttttcaaagttaaaatatagtgaaaattagcggataaaggttagttgtatgatttagacattatagttgcttaaattgtttaacgcatttttcttttctaactaacaaagcatgaaaataggaaaatgaataggtggaaaagaggcgaaagagattgagggaagatggcggcgccgccggctgggggggtgggggtggagggagggcgcgtttcccgtacttgcatt

SEQ ID NO: 30011 - DNA, 1024 bp, Oryza sativa
atagacctatctgattaagttatctagcaaaggtggtacctctgtatagtggtttttcttaagtcctcgcgcaggaggcaaatttatgccgtgaagggcaactgtgatatttatcgaggcgcaggtaaatatatgagatgaattgtgcacaaattgtttgtgaaccctgattgcgatgacatggtgtcatacaatcagttctctctaaagacctcgggaacgccagaactcctctcgctgctgataacgttacgttcagagtgcatggggactagagttcatggaacaggtaccactaatgttagtaaccgaaaagctttgccatgacaaggctaatgtgtttggcacgtcatggattgtgggtaaagcgtacatctactgtttcttaaaactattcgaatagccgtgctcgcggttatcgggcattgggactcacaatggcatcttggttagaaacataattctagattttattaaatactgttgcattataaacattatagactttctacttctacattctcaactttctgcaattaaacctagctctacacatatattaccatttcatgcattcattgttgattaatataatagcttgctgagtacgttgtactcacccttgctttaacccccttctttcagagttaatttggaattcttgccgaagccgggagttcaattatataagttagtcttatataagttagtctcatctcaacctaattcgcaaatatagattagatagatggtttaagtctatagccaaacattagggtcaagtcattctatagcttctgttgtaatagttagccacaaccttgtaaataccctattatatcacataaagaagtctcctttggagccttgatcaaatgtatgcaatgaagatccagattgttgaacctgtatcaatctactgatccagggcttgatacagttaaacatgtcggtttccgaatcattagttctgggacccgacagcgttgatatcagagcatatgttttactagagccttaaacc

SEQ ID NO: 30012 - DNA, 692 bp, Oryza sativa
tttaagagtttttcaaatacatccccttaaattatcatccaacataattcacataatatttcaatgtatatctgtattatgttttatgacattctatatacttatatagtttatcctcacttagttagtgcttaaatgattaatatatggttcaagttatctttctccatttttttcctcaaattaagtcatatcacagcctttagataattaatctacggtccaaactatttccctacttttctttttccataaagtcataccagcttactttttacgtttaaatcaccattctacatactatttaaatttaaattatcataaaccacattaatttacttaatctgatgttatctagctatcttacacgttattttttttattgttatcatacagcaatgcgcggggtttcacctagttattgataaacgcaagcccaaagccttgaaaacgtcattagcattctgccaaagctaagttaggacaaggcggcgggaaattgaaatcatccctcgaggagatatcccctcgtgtcatcaaaaaatatatgaaaaaaattaacaacatagattaatataaaatatatcactccacaaatatgtaagtttctcatcgatctttgattaatataaaatatatcaaaaaatataaaatagatcctccacgaacagggtaccgagctcgaattcgcc

SEQ ID NO: 30013 - DNA, 730 bp, Oryza sativa
tatataaattaaaatcattaagctgattaaaaatcaaggttttaaatttaaataaatagttacgaaaataatttggaactttcatagtgatgtcatccatggctttaccaattttcaacttaaaatacgatttatataaagagaaacaaaatattattaagtattaaagtgaacgtctttaatattattttggaaaggtaaaatgaccatcatctcctatttaattggtggtttattgtcggatcgactcaattaaaggtatgtagtatgtacaaaaataaaatctaatatgggctctatgtattaatacatgtcactatactattatatcctattatatcctataatagtagaaattatatcctataatagtactataatagtagaaataacgggatcttttaattattagtgctctatttttttctattatcattctttcgttttctccactatcgtgcaacaaaaaattccgttaataagtgataagaatcgactataagccattgccatacgcaacaacaatgttaatttctgttttatttcctttctctcgtcaccaaatttacttgatgaaaactcgttattgaacaccattttgctcaattgtcatctgcatactatttttgaaactgaccaatcaggcaatatctttgtgattgagatgaagggatatgctaagatgtccaggggaattgtccaaatgctaagattgaggcaaaaggttaca

SEQ ID NO: 30014 - DNA, 728 bp, Oryza sativa
aaaaacaataaggatatgatatttgatttaaatattacaaacttgccaaatgaatctatttgactttttaaaacaattggcccctttatataaattgtcaaattttttgtggcgttagaatttgaaaatattttgaatttgtccattgatgaaagaatatgaattttaattgtaaattcaaattttatctttgagctacgtaggatatataatttattgacagcgtcctgtatatagaagatataatttgctagtcccgtaggagtaactaatctggcttgcctttgcttagagatagatttggtatcttatatggaagaagcatcaaactaatctacataagatggatgcatcgtgcgggaatgcacatgtgggccctcgctttctatacacacagatacacgatacattgagtggggctgcaaatgtgggtccctatatatatcttgttgtgccatgtggcagcttgagatcgttttgaggatgtcacatgtcagcttgagagtgtttataggaaatttaatggacttttagtatataatagatagatagaagatagatagatagatttgttggaactgaaaaaactagacaaaaaaaattgcagaaaggaaataatgtgaggcaatcaataattaagtaatcatgcgtataccgtggtatgcgggcggccagtacagtactactgcatgcatggcacgtacatgtccattaactaatatcgctat

SEQ ID NO: 30015 - DNA, 629 bp, Oryza sativa
gtctaacactcccgtctctagcgagattcatttgtattaaacctttcagtcagtttccactccatgcatttccttaattttctatcactggtgataaccttattacatcaggtaattaaccctagctagctagctactccttctctctttccgttttaaaatataataaacataggatcaaattagatatcatctagtacattaattattacgaatctagatatagcgttactgaaattcataatattattagatggtgtctaatctaattctgccttactgtattctgagacacggggagcaaataactgagatgttggtttggcagttgatggatccttccaacacatgtagcgtcaagtcgtcacgccgatcgagggctccacaccccccgcctgccccgccgacgtcggtcgtatcgtacacccaccacatggccgcgcgcgcacaatgcatggcactgcagctacctacctgcatgctacgccgtgcgtacgccggctggaggctggccggccgggccggcgaccgcgcgtacgtcgtcgttcatcccgaaataccaacagcagcagcaccagcatctactccagcatactccctccatcaaaaaaaaaaagacaaatcctagt

SEQ ID NO: 30016 - DNA, 801 bp, Oryza sativa
tattataatttaaaaaaatgagcaggacccatttgtatcacacaaatataaatgtgggccccacaagtcagccgtcttcattcttcgtcctccctctctctctcccccctcatccctctctttctcaccccctttctcctcccctttggaggaacacaacgagtagggacccagccgccggcggcggcgggcaggggccggggcggcgccggagctgcggaggaggaggaggatggactggtcgaaccttggcggggaggggccggtctctcatcgccgagcgcgtggcgggcttccttcctcggcggcagtggcggcggagcgtgcggaggaggatggattggtcgaaccgcttccttccccggcagtagcgcagagtagcgacgccgtttgccgcccgccgaccccgcccgagatgctgtggtgggaaaggagtgtatggaggcggagtaatgttcgcggcggatgaagagctcgagctccgcgacgtagaggggcgccgccgccacagctggggacgcgcggtgcagagcgctacggagtccgggagggaccgacgggcgggaggatgcgatcaagctcgtcgtcctcgccggagggggccatctcatcgggtgaagcctcgtcgcagaagttgccggcagaccccgtcgtcgtcgtcatttatggaggcatccaacgaagctcacggctatcgccgccactcccgcctctgccgccgctggttcccgccgcatgccgggagagacagacccacatgtcgcgcgcgccgacggctcccttgttagaaattaatcttgt

SEQ ID NO: 30017 - DNA, 1283 bp, Oryza sativa
gatttatactgtctcggcatggtgaccgatgaccgatctatcccaatcacttgatttaagtatatattaatataagaactatatgtctttaatatctacagccgatcgaatagatttagttcctcactgtctatttataaccgccgatcgatttatatatgacatcggctcaaagataaatgatatgtcatcggcacctagccgatcggctatcatttatagatttaactacgaattctttgtctctatttcttgttgattacaggatcaaatcaactggcacgctcatacattcgaaggcgagctttggacctgcactggagttaagcagatctcccaggcctcatgttttctgtcaacagaaatgctagaatgacttacattgtgaaacggaggaagttacctacagctggtaaattaaggatgagaaaattcttcttaatgcctctgaatttttcacaatttctttaatcttcctaagtttttgccatcttttttaagaccattatgatgctctttgctactagtatttttctatcagtattatcatattagaagtgataccaatcgttaatttacgagttctaccagcagaaaaaaaaatattgtaatacaagtagttgatgtggttgtgtaaatagctatgatctattggattaggaaaaataaagggtttagattgattctactagtagaaaatattgtaaaacacttttttttaaccctgacttttgtatattgatgccctacccacttattccgctagttgactgtcaactgactaatttttttttccaaaataactatatatactgccccgttttcactgaataataattttcagttattaaagaaaatattagagtggccgaatctcatggtgtagagaagggatagagtgaaaatttagaagcacgttatagggaattttctcactgaattgaacaatgaccggttttcaactatgcacgaatatgatcaagcaagaaaataataataaaaccatcatatatatatacacacacttttgaggcaatgtctaaaaaaaattgatcacaaaaactatttgaacaaagcaggcattcttgtttgaagaaatatactagaggaaaaaatggaaattgtgagatacctacattatatttgaaattactaaaactatattatattgaaatatatgttgctcatatgggtgcacgggtcgacaaccagtagatacaattaggaatgtcaacggggaatgcccccgcatggaaatgtattctcatctacgttctcacaag

SEQ ID NO: 30018 - DNA, 2672 bp, Oryza sativa
aaaaatacctaaatatttcagaaaatttgtatttcatttaattaaatacctaaatatgttttaattcaattttatcttttttatctttacccgtagcgaagaacgggcattttgctatccattaaaacatcatgtggcatctaaaccgttacatggctctctaataaattagtgaaatctattatataataaagtccattaatctttttagaaatacttttaaaccgtcatggggcaacctacaaatgctcgtaaaccatcacatgacactctaataaattagagaaaatcctagaaattataagaaaaaaagcaaaatatctagccatctgttctaccttaaattgattttatggacctgttattttcaacctttagatcttgagatgatctcaaatatatgtctaaaaaaatctcctttatctcggcatgcgtacttcccctcctcccttaacatacgtgcatgtccatgtgcaaaagttgcgttttgggttagcagaatgaaagaaagggactgtggatgtgaattgttgatcttcgatcaaacggctgtggcactttcaagtgatttagctgaatgtcagcacaggaaaattgatattaactacactaagtggggatgaagtgtataggtttatattcaccgtgctctgctttccccacctcatccgtactcccgctctcgcatcttcccgcgccaccagaccgagtagacttcatggttggcattcaagaaaccatcgccctgcctccacatcgatcatgctcagccgagccgagccgagccccttccttcccctcactgaattcacctcctactgggggtctccatcaccggaaagcgtcgttcaattcggaaggttcgcttgttgaaccatatttgttcactcaatcttttggtcttgatttcttctttcattcacgctctattgatgcaggttgatccgttcctgttgtccctcagattatttaagcattaaaaaatagagagagagagagagagagagagagagagagatttggttttggcaattcttcaggtttctactatccctattcaacaggattcaaactttattcagcctgctgtacactttgttaaaggatccaattcattcgtggtattagatcaggactctaaacatcactggtgggtataccaattttacatcattgctgcacctataatttgttttatttctgaattccgattgcagaacgctgtagtagtagtagcagtgctgctactaaaacaaattataaccgtcagggatgtaacaatccatttactttatgtccaaaaacttacgtcttttgaaatgtgctcaattgaaaagacaaactaaataagctaatttttcatatttataagtggactaaaatatattctacatcctcgtttaatcgactttataagttgttttatataaactttttagtatatcacaaattcatttactttctgtgcactttaatgccattaaaaacacgaagttgtctctgctgattgatttgttggtcttacagccgtgccaagccgccgctaccggccgggaaggggggtgcaagcgacctttgcttgacgccggccttgcattgcctcgtcgccaacaactcgtgggcctctccgccgctggtgtcctgtcccgtgctagctgtctccctttactggacgatcgcctcgcctcatcgcccgccaccccgacctctccaccggccatctccgcaggttgctccacccccaacgctctctattcgcagcgccatccaccggcttgcttgtttaggaaagaagtttggtcccggggggcaaatctatcattttacgaaaattctctctccaaaaatagcaggaaatcattaaataacgcgtatggtgtctatcagcaaactaccacattttgttgagtgtcccaagaaaattcaatcgagttcttacagtgctcccaacaaatgtttttttaagtatcttgtagcaaattttaccagaaaattatgtatatgttgttttaagcatagacaagaaccctaaggcgattaattccccggggcaaggatgggaacaacgttctcccccattgtatttgccggtaataggtacagggatttttttttttgacttgtgagaacgtagatgagaatacatttccatgcgggggcattccccgttgacattcctaattgtatctactggttgtcgacccgtgcacccatatgagcaacatatatttcaatataatatagttttagtaatttcaaatataatgtaggtatctcacaatttccattttttcctctagtatatttcttcaaacaagaatgcctgctttgttcaaatagtttttgtgatcaattttttttagacattgcctcaaaagtgtgtgtatatatatatgatggttttattattattttcttgcttgatcatattcgtgcatagttgaaaaccggtcattgttcaattcagtgagaaaattccctataacgtgcttctaaattttcactctatcccttctctacaccatgagattcggccactctaatattttctttaataactgaaaattattattcagtgaaaacggggcagtatatatagttattttggaaaaaaaaattagtcagttgacagtcaactagcggaataagtgggtagggcatcaatatacaaa

SEQ ID NO: 30019 - DNA, 1032 bp, Oryza sativa
catgaggaaagaataaggaatcatatacatgctactacttcacaaggaattctttgttagggaaggacagttttgacaaaattgatcaaattacaattgtacttcttcttttactgccaggcaagtaccaattccaattgtgcctgtaatgtctaaaaaaaaatgcaaaccttgctatcatgattaagaaggagaacagaaggcatttcagggtaaaggagccagtactacctttgttaacaaagaagatagatgcatgaatgaatgattaattaagctgcagaccacacatgggctacctcaatactgggggcacaaagatccccatcacccatatccacatgctttgcactgccctgcacagtaattaaacagttacaagctagatgcaacagctgttttacttagtagcactaagcacgaagcaaacacttccattaccaggtaccactagctctttctcagtagtaatctactgcataattgagtgctgacactctcaattctcagaaaaaagaatctctgggaccccaaaaatgtgggtccctgactccctgttacaagcttgcaagcaaaaacagaattatttatgtcggaatagggagattgttatcatagcacagtggactgaagcagcactttggcatgagaaatgcagcttttagattctttgctgtgttattttaaacgagctgacctgataaaccctctgattgcaattggaccgttgagcacatttcagcttaacacagccgcgccgcttgggcccacaagagtatcaccaggtgggccccatttgttcttggaattttcaggggatggcaatgaatgggccccaggacccacagaatgaaacagatgttagcaacaccagtgctccactagtactaataatttccagtctcccagttcacaaacaatgggatgaagatgcagcatagattttcagtcacatgtgctgaagaagataacataattaactaacaaggcatattaataatgtatgataagacttaagtagtatcatctact

SEQ ID NO: 30020 - DNA, 991 bp, Oryza sativa
agcaaaaggaatcagattccggccgggcacacgggaactattaatttctccggctgctcgatctctcatcgatcgatgaaaggttcgttcgctagcttcgccatccaagacaccgcactaggaccagtccatccgtttcgtattacaactcgttttgatttttttatcagttaaacttattccctccgtttcataaagactgcattttaaatttattatatgtccaacgttaattgttcgttttatttaaaaattttatgaaaaagttaatcacatatgaaatactattcatatcttttttttatctaataacaataaaaatactaatcatagaaaattcttaaataagacgaatagtcatacattacatctaaaaactgaaaaatagagtatttgtaaggcagaggtagtataaatttgattaagttcataaaaaaaatatagtagtatttttaacacaaagatattataaaaatatattcaattcttgatttaatgaaattattttgttgttttagatgctgctaaacttttctataattttagttaaatttatagaactttaacttaaaaggtagttaaagcgacttaattataagatgaagcagaacggatggattaattaatatcccaggtcgatgcaccgtgacatccatggctcgatcaacgcgatgcattcactcatctgcgtgcagtgcatgcacccaacgtgcttgtataggattttttttggaaataatacgattttaaaggaaaatcgcaaaaatataggtcggttagacgaaatcgcaagtttggcactctatcgaatatccgtggttcgacagggtacctatcgaacaaccgcagttcgacagggtgccggcagttcgacagatgataaaataatttttaaaaagaggaaaaacactgtagcacactgtagctgagaccctatcgaacttgggctgttcgacatgccaccctatcgaagtttgcttgttcgatatgt

SEQ ID NO: 30021 - DNA, 1586 bp, Oryza sativa
gtagccatgaacctccaagcggacacggtgaggaagctcgccactgagcggcgaaatcgtcgtgtactccggcgcgttgaggtagcccaccaccagtgtcatacgtgccaattctgccacgaaatcgatcatgccttctccgcggtggttgggtgggtgaccggccatctagagaagacaaaggagtaggatcaatgcatgctcaaatccaaatttaaataaagcaataaaagactcaaataagagaatcgaatagaagcgaaattttatgcatagatcattttgcatgagagcgaataaataagacagactcatataacgacaaagtaatgagaaattagatacatattaataataacaaacgaagcataaacaccttgcaacccatgttatagagctaggacctaatgcatttcacccatcaaaccccaactgactgacgaataaatcccaataattttactaaaaccctagactgactcgttttgaaaaaccccacttaaacgagcgaccaagatttttcccttgaaccacaagaacagatcccaattttcccggaacaaatccaattgcaaagagcatatgcaatgaaaaggattcagagggctcttaggtttagagggctcttaggtttccatttggcttgtcctacggtcaaggtcggctctgataccaacttgtcacgcccagaaattcccgaatagaattccaagcagaatgtgcattaaaatccccgtccaggaccagccggggtacacaaacgacaatgttgacattcagatccacgtcttacaaacatcataaaagtcttacaaaaaatgcagcggaaaacaaaaggaactggagctaagccttgactaaactgcagcgggaacaccactccacaggcatcctcgacggcacggacgaagcctactcctcggggaaaccttcatctgacacatacccgtcctctggggttgggaaaaagtagagcaagactgagtactacccactgtactcagcaagtcataccggaataggggtatgatgcagggaattaacaaagaagagctagagtggttcatttgcataaatactggcatttataaacaggaattgaatgcgaaaacggttgtaataattaagcagtattaaacatccgctgtccaacgctaacccacgttgcgacaggcccaaccatccacctaaactatccaaattcatcagattacactagggtgagactaatcacggtgaatctggttgaccgcccataaccgcgggcacggctattcgaatagttttactctgatcagaggtgtacaactgtacccacaagacacagccccacgacacgtttccgtgcgccgacatgccaccacgacatcccggaaagaggctgtgacaggaccattcgcataacccccctctaaccaagcacaccacacctcaggtttcacccccactcctcgcaaggcagcgggcagtcccctctcgtgcctaggtgaatccggaagccgcataggccgtcgcagggcccatccaaactccatcacgcccacccttgcctggatgcgtcggctagaggaaagctacactacaag

SEQ ID NO: 30022 - DNA, 807 bp, Oryza sativa
gtacgactaccaaaacccaaccacgcacctcgagcccagcctaaaccattttgggggttttaaaagaggggggggtgtgtgtccaattccaacataagccaaccattccatggtgtccaaatgatatgagaattcccgaagtctaaagttataaaaccacctaatgttgcctaattaatcagcgaagcatctacctaaatttatactagtggaaccatgaatataatgtccactagttagggttttgtttattctagggtgaacaaggtattaatatcaataacaataataataaggtcataacaaaggtaaataggcatggctaaataaaacagtgataacgcgggaatttaaataaagcgataatgcattaatttaaatcaaaataattttataaactgggattcaatatgctcaaggatgatgtgacttgccttgctcgctttcccaaacgccggcttcaacttccacgaagagcggatcttccgaagctgcagcgtctacacgaccaacggaaaagaaaaggcttttactctaataaactccacataacagcagaaacaaagcacaaaaatgggttcttgacttcttaaggaaaaattagagacttgaacggtccaattccgagttcaaatggccaagatatggccatttgaagtttatatgctctttaaatggatatttacgaatttcttcatttaaattttaattaaaaacccatttattgcgtcagccgagggagagggcgcgcggaccgggtccacgggagtggggcccacgcgtcagcctactcggtccacggtggac

SEQ ID NO: 30023 - DNA, 937 bp, Oryza sativa
tttacttattttcttaatactcttatctaattttaaaatctctttggacggaagagattagctagctttcttctttctcctgctgctgctgatgcatatactgtcatatactgtatgagcttgttttattcgctaatgcgtttgcttaagccaatcgttagacagagagacagcagccaagtggacagaaaaacagcagcagcagcacacgcatgcgtgatcacctggctgtattctctcctctctcctctgcgctggtcgcagttgttgccagcagggagttcagatgattgttttgatctgaataattcagatttcaggctggtcttaaacattttggagatgggaagtttacaggaaatctttgctgctgctctcttctggatgatttgtccacttgtcagaagtgaagcaacatctagcttgaagcataagcgcaggaaaacaaatctgaaagacctaattagctgtaattgtaaggcataataacttcgaaaaggtaaatcgtaaagagacagtaagcaatggcttaacagatacccattctatggatgtcatcttcagtttattcccaaggaacaaagtatgtgcatctcatattcttatgccattatgtgctcatctttactttctttttcaagtatatggccccatctttccgttcaagaaaaatctgaaaatgtttatggcctcgtctgctgaaacaggagttgaacaagagtggccgaaaaccgaggcagtgaggaagcacatgggcttgtacgaatgtacaaccagactatgtttcatttaggcctgattgctaagcccatttatttaaattggattatttctgggccttctggtggagcacatgggcttgtacaattgtccaacacaagtttagactagattagtaggatgcctttattcatccttcttttttttttctgtaact

SEQ ID NO: 30024 - DNA, 766 bp, Oryza sativa
actaagatgaccggcaagacgataaaaagtactgtaacctttgaaactgtgtgcttcttcagcttcctacgagctttagacagtcaaaccaagaatctcagagacgctcgtgtgtgtgggttctcctaccgattttcctcatctttctgcgaaatctttcatggcagtccaagatcattgccaccgagacaaggacggggcaccaaccattcggaagcactcacgtaagcatcgatcccctcgcgcaagaaactgtccattcccagcgatcaagcgacctgttcgtcgatacactgtttgttcatcgatcttttcagtttttttcgattcattctccactggtgtcattgtcagattgtcaaattgtcaaatcgatcgatcagcactctcattctctgaactgtccctagaaaaagaaacgactccggcagcgttcataattacggcctgatcgaatcactgattagttcatcatgttcttcttttcctctctcgcggcagcagccggactaacactgatcctatctgttctcttagtgtactgatgacattgtcatgcaaagctatgattgttgagattttagtggcacgtggagatttattaattattatcagtcttcatctccagcgatacgtctcgatcatcgaatgaaacaaattcaaattcaccatgcatcgacatttgatgcgaaatctgaaacttccgggaagcactagacacgtcctgttaattttaatctgtggaagaaatgcatgtcaggttcag

SEQ ID NO: 30025 - DNA, 4593 bp, Oryza sativa
aaaaagtggaggagggaggaggggtttgtgtgtgttgtggttgaaacttggaagtgtggggtctcgaggccgcgtccgctatggaggaggctgcggcgaggggaggagaggaggctgccgcgagtgtgaggtggacgacgagttgggctgcacggcacggttggagacagctcggctgcctgccgcgaggcgggcgcaccgcgcacgcgttggattgcgggagagatggaccaaaaatcggccgcgcgcctgcgccacccgcgaaactggcacggtgccacggataaacatcggttaccttcaaaatcatcgtgtgccctgtttatctcgttttctattaacacgttaaacgatacattttttaaaaaaagattatataagttgcttaacaatcgaataaatccatctttcaagtttacaataattaaatatttaattcattatgtgctaacaagtccttttgttttgcgtgaactatgaaatattcttccctgggcatgaaaagaacgaagactttgttactgatacgtgagtttatcattcatcactataaagtatcctgatctcggttgcacgtgattggagtcttattgttttgctaatgttttcttttaccgtttattagtaaaaaagctaattgatgagcaaaattttatcgtgttcttaacgatttaaaattaaatattgtaaataaattatgataaaaaactataaaatcaatttctaaattaagttttaaaatttaaacgcataggcgaaacaataagggcacatgtgtttgatgctgctgtggcctgtggctgtgttttgtcaggggatcctaaggttgagttcctgtttagccgcgtgagtttcaccacaattattgttatcatccctgatagtaaaacgctgtttcactctcacaaattttatggccaactgctggtacttacctgtactgttgtaccctagcctgaaaccagtactaggatgctgttatatcaaaactgaagattttgaatgtgataaactaataactagcagtactactactgtactagtactgtacaaattatgcacgcatgtatccatgggtgcactggagacagggatgaagaactggcgtgcaagcaacgtagatgtgctgcacctaaccggacagggaagaactgaatccacactctgctactagtggagtatttatacagtagagtagagtgtatactactactagtagtacaatttattttttgataactgtatttgcatttaaggtgtcagtgctgctgttgccatggtggtgtggtcaagtgcatcactggaagttggttggatctaactacggttatttatggcctggttggtgatcaccagcaacacacaatgacacaaacacttcttcttcttcttcatcttcttcttcttcttcttcttcttcagtttgtacttagttttctgggctcaaatcgcaggtcggggcgtgagatttggttaactccacagagacgatgatgcgtgcaatgaagtcacacgctgcgaccattggtcattggagtagcttgcatgtaaagttttttcttgggctacctgaatttgacttctagcacagtgtacgttgcatatgcagcttaatttcctaggtcgttctaaatacattatggttgttgactaaacatatttagtactatactagattgcttacaagattgcaatagtacatgactcaaagaaatggtgcagttgctgtcagtacatggtttgatcatgtgtatgcagaacttataccagaaattcaagggtgtatatgtaccgtataaaaatatatttttttgtaaattttctaccactgaattttcatgcaggtttatcttctactccaccttttgaagtgtctggaagacagatacatggctatcttttttcttggtcttctctaccgatatgatcctggatagctacacctcagcaaaaatgacactgcctagtgcttctggcttgatctgcacttggcattcagtggaatgaaatgacaaggcaattgcgtagtactctttcttggtctattgataattctcaaaagttgcctgcattatgcagcatccagagactcttatattagtaattcagaattgacaacggaaacagttggtttgcctttttcccttgtggatgcacctgctaggcctatctttatcttcaaaagaagaagcaccaaaggggaactatgagaatgatcagctctaaaaggctattttatggtgtgcttttttaaattggaatcatcgtatgctttcaaatcaaaaaagaagaatcactaaggctccttttttatgaaaagaaatcattaatttgctgagcagacatgacgcatgaggaaagaataaggaatcatatacatgctactacttcacaaggaattctttgttagggaaggacagttttgacaaaattgatcaaattacaattgtacttcttcttttactgccaggcaagtaccaattccaattgtgcctgtaatgtctaaaaaaaaatgcaaaccttgctatcatgattaagaaggagaacagaaggcatttcagggtaaaggagccagtactacctttgttaacaaagaagatagatgcatgaatgaatgattaattaagctgcagaccacacatgggctacctcaatactgggggcacaaagatccccatcacccatatccacatgctttgcactgccctgcacagtaattaaacagttacaagctagatgcaacagctgtcttacttagtagcactaagcacgaagcaaacacttccattaccaggtaccactagctctttctcagtagtaatctactgcataattgagtgctgacactctcaattctcagaaaaaagaatctctgggaccccaaaaatgtgggtccctgactccctgttacaagcttgcaagcaaaaacagaattatttatgtcggaatagggagattgttatcatagcacagtggactgaagcagcactttggcatgagaaatgcagcttttagattctttgctgtgttattttaaacgagctgacctgataaaccctctgattgcaattggaccgttgagcacatttcagcttaacacagccgcgccgcttgggcccacaagagtatcaccaggtgggccccatttgttcttggaattttcaggggatggcaatgaatgggccccaggacccacagaatgaaacagatgttagcaacaccagtgctccactagtactaataatttccagtctcccagttcacaaacaatgggatgaagatgcagcatagattttcagtcacatgtgctgaagaagataacataattaactaacaaggcatattaattatgtatgttaagacttaagtagtatcatctactaactaacatgaaacatgatagccgaatcagatgacattactagtccaacatgaacagaatttgattaccacaacacaatgcagaaccctgtctttttctagactgaatcgtattgtcagttttcttttgtcacaggttgcaggtaagctatctatctttcctgcagagagtagattgcagagtttgtcacgatgaagaggcaggggatggaggctgcagggacaaggacatacatgttggtgatggacacgcctaccgactaactagaatcatgtcgcatcagttgatgatgcgatatggacgtagccctggtcctggccgtgttttgccatccaaaccaccggtactgacaaacacctctgatcaactcaagagaaagtgaaagcctcagatgctcacattttagagccatttctccctcaaaatctcatcttttggaggtttcgaattctgaattcaagcgttcttactctcgaatgcagtgataaatatgttgtccccaagagaaacgattagcgatttaaaataagataccggtagtgacaaacactgaaacacctctgatcaactcaaaagggagagccctcacacacctatatttcaacccatttctccctcaaaatttcatcttttcgacatttcaaattctgaattcagacattcttactctcaaatatgaatatatgattacacccaagagaaatcactagcggtgtaaattaagatagttctttttcacatgatgggatatctgtgtaatgcagaatgatcaaacagactggggatagtatatcggtgtacagatagtccaagaaatgtcacaagcatgtacttcggtagcaggtcactggtatgacagaaaagaacatggaaactccccccactacttcatcaggcttttcaattgaatcggacagcatttgggatcatcaaagcatttgggagtagtactttatttcgtcggctaatgagacaaatcggccctgaaaatctcgaccattcgtgagtttcagagatcttaacaacagtagatgcagaaaaaacaaaactcaaattcagagtagctgaacacaaaacttcttctgtttgacttgtgaaaatcataacactagccagcattgtgatctttctgttgatcaatgcatacgcatgcctcaacagctttgctaaacttcaggccatgcaaagacgcaaaagtgcaggttttccca

SEQ ID NO: 30026 - DNA, 1937 bp, Oryza sativa
ggcgtcgtctttattctcgtccccgcgtcgtcgcccgctccgcccaccgctcacctactctgccggccggccggccgctccccgcgccgtcgcccgctcctccagctggccactccgcgcccgcatcgtgccctctccggcgatctgcttggaggggaggggagagaggctgagaggggatagagagaagtggggaagaaaactaggtttcgctgacatgggggcccacatgggtcccacaccgactcagcagccacgtaggataaaaccgggatcaaaaccgccgaaggacctattgtaactggttttatatagttgagggaccccgcatatctggttttatggttggaggacgattttgtatcccgataataagttgagggaccttcggtgtactttttcctaactttagtggggaacgaatctatatacacaagtttccaagtttcctatgcacaccaactaacaatgttatagaaatgttttaaacaaattaaacacatattttttatttattatattttagtattacacctatgtgtaaaatcctatctttaaattcattatattttagcggtaacaaaaagataaaattatctagattttactcttaaaaccggtcagattttcacttttttttgttacagctaaaatataatgcatttgaatatgaaacttcgcatatatgtgtaatactattaggagcacgtgtctaattttttctagaattttctgtgacatttgtttgttggtgtgtacgaaaaacttatgtgcatatgatatgttcctaagttagtgagcctcgcctatcgaattggtattaatgtcacgaggtgagcttagttcaactagttagtttattacttgtggtagaaccaagctactcgagtttaagtcttagacttgacatggatgctcacatttgtaggtaattattattttagtagtaagcagtgtatatatcgatattgatatgcccatggcgacttcattaatcctaaaatatgccaatccaagctttttggaggtgcttatagcggtaaggtgcgcacgcgttgtaacgccccgattttcacgtggcgttaaaaaactaatttaataaaaatcctatatgcgaaaaatttcgttctttaaatccctccttagtctcaattccctaatgtcaaaatcgtctgcccaaaatctctgtccgagaataatctcacatttcgaaccttcgtattcaaatctcctttctaaacctctatcgagaaatttccccttcgaataattccagttcagttcctctccgaagatttgagtccacactcaaatcatctccggttactccttgcgaagggctcatgattgcaaatctcaagtttggcaaattcgaatccctaacctaacttctcaagtcttcgtttcgaaaatagctttgaaatttgaatccttatattcgaattgaatccgcaaatttcatctaatgctcaaataaaaactaagtccaatgattcacctccatatcctaaacttttcccttagtccttgaaatcaattctcgattgtttcatcctctctctctctctctatctatctctatatctatctttatctctatttccatctatctacctatctccctttgaatcctttctcaaaatattcctcccaactccaggatgcaaaatccagtcaaactccctccttgaattccaactttttcatcccctcccccttaaatccctcacaaatactcctccatgtccataataccgaattccttattcggttcccttcgttgactccctatacttctttgagttcaaatataaaatttgaattcaaatcccacatcaaatgcctctcaaattcgttgaaacaactccctggataatatcaagctatttccatcagtttgggacgcctctcctcattttctctcggcccaacccaac

SEQ ID NO: 30027 - DNA, 3889 bp, Oryza sativa
  unsure (1)..(3889): unsure at all n locations
ccacgtcattttcgccgccctctgggagggcgatttttaaaaatcgccctcccaaagggcggtaggcgactatttccgttaattttcaaaatggaaaattatttttgtaaaacttttaataaaaaaaattataaataaaaaaaattcggcagtgtttgctatgatgcggcccagtggagtaagcaagagatatcttagtgggctctccttcagtccttcccggcctttcatgggctcccgtcccgttagtgcgagatggaccgagttctaatcggtgggctttcctactgctcgtgggcctaaaacgacaagagggagagagcggtacgatgcggagtcgaccaatattttcagtgtattgtaggggggcgcctagctcgcgcatacgcgcttccccacctaaccacctatattagtattatattagtattagttaacactacttaacactaataacagtaattaggaaagattttagagatttttttgagatatttttactaacagattgaaaatttttcaagttagattaagaaactttcgatttaagatttaaattttaaagtcaaattttgaagatatttaactcagatttaaaaactttcaactcagattcgaaaactttcaagtacagattngaaagttttgaaaagtttcaactcgagatttgaaaactttcaactcgattcgaaaacttcaaagtccagatttgaaacttttgaaactttcaacttgagatttgaaaattttcatgtctaaatttgaaaattttaaagttaaaatttaaaaattactagtaaaccaaccactagtaaaaatatgaagctaatctaaactaattatatttttttcttttatccgtacgacagggaccatatacggcgaaaaaaaagaaacagcggcgtaaaaaaaagaaaaaaaagagagaagcgcaaaagcatgcgcgtgcatgggcctcgtgggccggcgtgcgcgccagcaacgcgcgcgcggattagcctttccgacgcatgaatctgaacttatgctactaccacgaatttagatatagctcatgttcagattcatcgtattaagatatatcttatattctactagatttatttttacggggatattctactttattgttatattataagacggagcgagtattttagattgcattatcgccgtgtgatgacaaatcagggcgttgctcatgtcgactataggaggaccaacacaaccgcacatcaaaaagatcgaccggctagctactgctccctcatgcatgttttttttcaacgcttggaacctacaaactgcctctcttgtggcattgacgtgctaccttatgatagaatattaatttcattgatcaatattggcaaggattaaaatgcattatagggtagcttcgtcttcccatgtactcctttttgtttaaaaatatactccgtaataattttggctagattcatatccaatatttgtatatgtatatgctcgctcgaaaaaggcaaaaagcacgcacacgcgaaaaggtatagacctgcacgtgatgtccagcgagaagcgatcgaattagcgcacgtatgtacgtacgtatacacatacgctggcctgtctttctcctgtctgtcttatactacctactccctccgtcccagaaaaaggcaaaccctgggtttacgtgtccaactttgactgtccgtcttatataaattttttttataattcgtatttttattattgttagatgataaaacatgatcaatattttatgcgtgacttgtctttttaatttttttcataatttttttaaataagacggacggtcaaatattaggcacggaaaccagagtttatcttttttttgacagagggagtacctaccagcctgcacaatcgaaccgtagatgcgtacatatatacgtgtattgtcctggatactatatatactagtgtgcgtatatgtaggcaggccagagaccagagcaggtgcacatcatataatagtacactcatctttagcttcatacagtatttgccaaaacgacaaaaccacacattccgacattatattccacctagtttagtagctcgatacactttattctgttatgttctatactattttgcaaacaatatgtgtttgttagcatatatagatggatacatgttaattattccacttaacaatgtgtgtgtgtgagagagagagagaggggtagcgtactagatgttgtaatcaagttagttggttaaccacttaacaactcaatagatcgccatacacatacccatcgtcacgatcgaattagttggtgtaaatcaatcgatcgatcgaccgagtgagatatatgcatgcatgatgttgaattgttgacgactaccgatcgatcgaccggccaaatgattaattattttctgtgcctatatatctgtctggttgtttttctttaattttactgcattatatgtgtcactctctgcagatcgagctctctagctacacgttacatcctgcaaccgctctccaactaacacactacacctgcatgctgatgctgggttaataattttggcttcttgtcgattactaaatcttaattagtgaccatcgatcacttctaaatcaagcagctatatatctagctacattggattaatattttcgaatgatccatctcacgaatgtacgcccagtgacgaccatgtctattgattttaaaaataataataatagaaactttcattgaattagaataactacatcaagtttaatcacgagtttggtattatatatactgatactacccatcgtttcacttattcaggaaataaaccaaacagcatatttgcaaatggaatataatttatgaataaaacttttatatacgtgcgtgttcttaactagtataaaaaaaaaggatgaaaaataattttcgatgataaaaacctcaaattaactttaaatttaaagttgaaaattcaaattttgttcaaggaaagttccggccgccaagcagaactgaccgacctcctacttgccggctgaaaatttgactttgtacttctcttctatgaccaataattgattaaagagtgagagaaaataaaatggcatactgttccattcaactgggaattaattgtgcagcgattagttgacaggaaaatgacctggcagcacagccatggatgcttaagcttgcatttttaattaattaatgttgcggcatgcatgaagcagctagcgatggatcacgatcacatcgatcgttttgatctactcatcgtggcaacataatggacaggtttttgcttcatctgctgttgctcgaaacttcacaaaaaagagaggtaaaaaggttattcagaaagtgaaaaaagtgacataaagcagagtggaaggaaggtgcagaccgtgttctttacagaagaataattgtaaaggaaaaagtatgaggtaattaagtcacttgacagtgaaattaggagaaatcagcaactagctagctagcatccagctgtacttaacctagatttagctagacctttatatccttttgctttaacagtagatcattaaaagaactccaattgataagttaattctagaagagattttagctttgcgtgatcgatcgatcgatcgatggagagtatagtagattagtagttggtggtcatgcgtgatgcatatatacttgtctgcacatgcttgcccagttgcccctgttcgaatttcatttcatattcgcctctcatcaactgtaaataattcagaagctggttgttcaaaccgtataataatatattctcccaactaattgcacgtatgcgtgctcacgagctgaacaatacgttactgctcagtccatccccttcacagaatggagtt

SEQ ID NO: 30028 - DNA, 1776 bp, Oryza sativa
tttaatgacacataagcgccacatcaacgccacgtgtaactaagacaaggtcaacaccgccacctaggcgccacataagcaaaatcactctctaagaccgtcgagggagtcaagttacacccttttaatagttgtggttcaaggttatgaatcagattttgtcactagttaagggagtcaaagtgaacttattccttttaggaaacgaggggaatttgctgggaaaagcggcccagtcgaagacagaagatacagacggcccagtctggcccgtgaagttggcacccatatatatacggacgggatatctcttttttcctcgttgctctcctccccctcgagcctaaaccctagccgccgccacgagcgcgcgccttcgagcaaccgcagcaaggccatggcgcgccatggccttgctgcccaaggagatgcttcgtttggccttggccaggcgttgcaccggggtcttcatggcgaggcgtaccatcctcttcaccgcagccgatggaggggcgtcgatgatgctgcagagggcgaggagctctcacgccattcgtcaggctcatgtcagccgcgacttcgtcaaaactactatatatataatacccatatggggcaccatggtgcccgggcaccatggtatcaaaacaactcaaactcaaattcatttgtatgaattcgattcatacaaatacctaacaacaaaacaactcaaactcaactttatttcacaattcattattatatacctaacgaattatatgtttggatgttatatacctagaaccaaaatctaacaaaaaaaaagttcaaactcagttcaaacttgttagtaaagaagttaatgttcatatctaaacatttaaaaaaatttcatactcattcaaattgggtatatactcaatttgaatcttggagcccatactccatgtagccccagttatatatatatatatatatatatatatatattggtaaggatcggcagcatgccagcatcaacatatacgaagatgcagaccaattgcacaggaaagctatgggccagttgtaatcatagctagaggcccaataagctccaagccaggcccaataatactgtgcgcggttggaatggatagagcggaggggagggtagtataggcacatcagcagcagtaagaggtctgctagggtacggtatcccgtccaaacaagatactttatattgatgatgtcagctccgcctcagctttatccactcatgagtccacgacttagcaccgccctacacgctcacgccacagccggtggaagagcacgcgtgaggcgctaggagaaggacacgacactaatagtggattaggtgacaaagttggtccctgcaatagcatgatgacccttgtatcaacaccacattgagaagaaaaaggatggtgatagtgaaaggaatggaagggagaagacgagacaaaacgctggtggtagatggctcaccacccagccaagaggcaacaacgtacgttctctcccgataccttgatacctcgtacttagtacctatgggttatcggttagcacctataggtatcagctggtacccgagacatcaaccatgataccataggtaccaggtctgaaacctgtaggtatcaaccatgataccacaggtaccagatctgaaacctgtaggtatcaaccatgataccattggcaccaggtctagtacctgtaggtatcaaccatgataccacaggtaccagccctgtgtaggtatcaaccatgataccacattac

SEQ ID NO: 30029 - DNA, 5205 bp, Oryza sativa
ttcctgcagccccgcgttgtaatcggctaattagcttcaactaaaaagcccgatgcgagctattcccccatcggttatctaaagaagaaagctattctcccacatgcaagtgagaataccgtcatggccacgccgcatcgggcaaaatcgacaagcgagcaagacagggccatgtccaatcggttaaagctacgggacacatatgggatacagtggacgtgtaccatcgctcagcgcatgcagcagcagccggagcagccggccgattgacggcagattgaggcgctagtatactactactaggtgctgggaacctgtccgtgtcacgcatcacaagtctcgtctcgcagcgccacgcaatagccaccagactgacaaccggagacggaatatgcgtcaggccgtgcatccatcgtgaatagggaaaagggggcggaaaggagcacagtgaacagattgtcggctcccggaggaccatggccagccacagcgatcacatactccctccacaaaaattaaaaaaaaaacttgttttctgtatctaacgttttgaccgttcgtcttatttaaaaaaattattaaaaaaattaaaaagacaagtcacgtataaaatattaatcatgttttatcatctaacaataataaaaatataaattataaacaaaattcatataagacggacagtcaaaattggacacgaaaacccatagtttatcttttttaggatggagggagtagatcagtaacatgggacaacgccccagtttcgagtgaactaccaaagcaatgtagggctggattaatttgaggcctaaattagacttaccaaaattaatcatgtcaaaacttaccaaaatttaacattgacaaaatttagtaaggcttatttagaccacaaaacaaaccaaaccaaccagtcatatcccaaagcctttgattactgattaggtgctacgacgatgaaaacaacacgttcatacgcaactgcacatccctcgaagcctcaaactagcccttgagctactactaataagccacgaaaaaaaatagcaaagtaaaaataattatggatatcttttttctccgtgttttgggacaaacaaaatagggatagatggagaataggtttctcaagctcaatgcctaacggtgattattaatagagttattatctcatttctcattgataatagccgagcagtaaataggaaagttacaagcatattcttaaaaacggaaacccgaggataatcccaaacttcacattttgaggccattaaggttagttgttccttctattcacgatcagagtaaattaattagctcacggccagtagtatattcacttagtgtaagttagaagtatacaagagtgtatactccacccgatttactgtactctcaatccactcatatgtttttcttcccgattcatctgacactcattcccacaagttatatagtttttctatcatcggtttgtaacccccccagagtcactattttctcccagtccctgatagtccccccccaaaaatctctgtagtcagtcccggtgtcatcaaccgggactaaagagagggtagcggcagtccatcagctggtccttgtttcttttttattttctcccgaatcgagtggtatgcatatcatcaaatcaaaccccaaatccacatcacaactccacagcacgattcacagattcaccacaaattcattcacaatatccattcacatattcattcacaacatcacaaatatattcacaatattgattcaaaggttcattgacaacatcgagtcacatactcattcacaacatcacagattcattcacaatatcgattcatagattcattcacagatcaaaacatccaaaccacaaattaaaaaaaatcaaaaaaaaatcgactcaccggccggcctcccatcccgccgccggccggccacccatctcaccgcttcccctccggccggatctgggggaggggagggcgaggccgccggtgaccggcctccatcccgccggcccgcgccgggccgccgccggccgtcctccatcccgccgcttcccctccggccggatctggaggaggggagggcgaggctgccggcgaccggcctccatcccgccggcccacgccgggccgccgccggccgtcctccatcctgctggcccgcgcccggccgccatcccgccgccgccggccggccgccgccagccccaacccgtgcctggcccccaccagcccgcgcccggccgcctccatcctgccaccgccggccggccaccgccagcccgcgcccgtcccccatcccgccgtcgtcggctgcctctgcaagaggaagagggggaggggaggaggagagggggtgagagaagaggaaggggagaggatggagataaggaaggaaaagaaaaagatataaggatgggagatagagagagagagggggggctacgcatgcgcttgtgcgtgggctggtgcgtacgctttattcccggttgatattatcaaccgggagtaaagatccctgggatctttagtcccagttgaccaaccgggactaaagatcctatctttagtcccagttggtgttatcaaccgggactaaagatatcggggggcctgacaaggcctgacagatttagaaccgggactaaagatcatttttagtcccggttggtacaccaaccgagactaaagatcaaatatgcccgctgtagccaccaaccgggactaaagatcatctttagtcccggtttttagtggaaccgagactattgtggatttcgggcgaccgaccaaagatggtttctccaccagtgatatattcgtataatactcctttatttttcatattcctgtattttcttagtcttacgtttcaaaggtaccatataagtatacgctgaaaagtagactacgataaaaacaacctaatcctaaaatcaactttataattaagtgttaaatcttttgttggctgattagctatgaacggatgagagtgcagatccattcatcagttgcacttgaagcatgaggccgggtccggattggacgtgcgctcgtgtgtgaaggtgatcgtgcatgcgagggcccaatcgaaacaaactgactatcctggaattgcgatttgtgggtgcgcggttgcatcggcagctggcggcctggcgatatatcgatcatcatcagggcgggttagcacatgatcgaggcatctcgttgctcccaattatatgcgtgaagctccttttaggaacacaaacaggagcctagatatacaagatatccaatgcggcaaaagctcttgctcttttctgtgtagaccggttacttgattagggaggtcgtaatagtcaaaagagggattagttggcaccagcttgttttggtacaagtttatcctagtttagtaacgactcgccaaatcaggagggaagggcatcgaccccctcgtgctctctagttctcattgacacaggaagctagattccaccaacttaggttattgttttatcggaattgctaaatatttgttgacatatttttatggctaaatctttcactttctaaaccgttggatgtgtcctaaattcatactaacagtttaatacgcatcaagatatgtacttttaggaagaaaaacaaaatcatatttaggaatcgatcatgtgacctcatgggatgaaggcgtgactgccccattgggctactatatttttatgatctagattaaacttacatcttacttatactataattacatgcgagtttatatatgtaattatagtacaaatatagtgtaattatgaaaattacatatgtaattatagtataaatatagtgtaattataaaaaatatattgtaattatgttacaattacatttgacagatttttgggctaatttttagtcgaatgttgtatagatagtcccttgttttatttgagctataaggacgcgtgcttggttgatagtttaacaacacgtacatatataggccatatagtaatgcagccgtggtgatgcatcgcagcttgtccctccaaaaagtccacgaatcccctggatgcgtacaatgcatgtggcgaatggcgatccatctgatctgtaatgttctgcatacttctcaatcatcacacgtacaccaaccacgcaaatcgatctgataaaaaatatactcctactcgtaagatccgctcagtggcattctgcacacgtacggctactttaagctagggctacagttaattaggtatggatgtttgtcccctgcaggctgcagcatctgcattactgcttgaacgtcgagctgcgtgttatcgtcccgtccaagcagcacatgcgcacagtgattcagtgtgcgatactgggtgtgagctgggtggcgcctgtccggtataactttgccgatgcgattgtcctcgtagcgtagcacattccttcatcttctgaacatgttttgtacaaatgcgaaccgtacactacctatcagccttccgatattaattgctgccatgcaattcacctatcagccctaagggcagtagcagcgcgtcttgagattttaccgaacctcacccgtcaactagataaaaactatataagcaacatacttcacgatgcaaagttaccttatagtggatcccaccggtaccgtatttttcccttttcatctcccaatctctctcctcttgttcttttctcacgggaatccgaggccgatttccggctcggcccaggcggctccggcgccaggcagcacggcggtcgagtagcaacagcgtcaggcggccgggcgacctgagcggtgacggcgtcgggcagcccgagtgacggggcggtcaagcggcgacggtgccgagtggatctagctgctccacgacgccctccttctttgctaaactccttcacggccgtgcgagctcgggggatctggcagcgagcccgatgaagctagcaacatcctcacctcccttagccccctcccatcctcctcttcttcggcggctgtcgagcatgaaccttgacggagcggatgaagctacctcaccagacgatagcaccgccgagcttgccagatccgccggctctagccttgggcgtcggcggcagtagctagaccgtcgccatcttccctttctcccttttcatcatctggcacgcgtaaagtttaggcagctctgacaaacactga

SEQ ID NO: 30030 - DNA, 1210 bp, Oryza sativa
ctgatcaaattcttcatagctccagtgtgtagttgatatgtgttgctcatatgtcatatcctgctgctcttctagttctggagaaaatctactggttgttaagatcattgaattctgcaatatcaaaaaacagtagttagtactgatttaaatgactaattagggaattgttacataagtattcataattttttattcttacatcaaatgctggtgtccgaagtagacttgtaaagctttcttgtcctccctgcatattcatagtttacatatcaattcatttattattttctcttttttttgtcaggtatataatgtaagttgatatgcttactgtttgttgctgtatggtgacagttggactatgaattatttggtgtatgaggttagtgtagctcaactgtccttcctgcacagttatatgtttattagtttataactgcatgtataaaatagttttatatgctacatctatgctttttgattagtgtacctgtcttgggtctaagtttagcaatgtgaattgatcatatagcatttgtcctccataattgacaacttctgatgcaattgttcctatggtattgcttaattctggtgaattgaagttttttcctacgtgttgtattttcctgcatcctgcattttgaaaaagataaagatcagaatattagatcagtgtatgttgcaattgttttgttggagcttgtcgacttggtagtttagaaacttagttagtacctaaatggggcattttgctgctgcttccttcaccctcttgcaaattgtagatattaggacttcttgcatatgccagcctccctgtaaaatttatataaatcattagagcatatgttagaatcaacaaacataattgtagttacctttatttattcttagagcaaaatttattcaaatatattttctgacctggagccatgttgatgtttcttttgcttccttcaatctgcattgcatcatttttgctctcctctgattgttgtctaattgtttctccttcttgtattgcttcacgacctgtgccatgggagaaatgaagtatatgaggtactgatttgttaaataggtatgtcttttgagaatcatttgtattttttagcatgtattgagctttaacagtatatgttcagtgtggcatttgcatgttttatgtcaaacatgaatatatttttcaaatacattgtggttg

SEQ ID NO: 30031 - DNA, 1401 bp, Oryza sativa
ttttaatgtaatagaaaagttaagggtttaaagaaaaagttaaaaactaaacaaggcctcggtgattttcttcacgctctctgattagggacgaagagggagtagtattgacttcagtccttgcatatcccggtaccgccaagtctatcttggccatgaagaaaaaacatctgagcttgcaggtgttgataattgtagtagatcgatcttgaagaggacgagcgtggcctcggtgcacaatccgaggagcacgagagctgccgacaccgcagagcgtccagctcgacctcccctggctcgagatctgtggacgcatgcattgcccagcacaaaatggtcactcaactttcctcgcgataacattcatctctagcttcatgttgcttaattaacttcccgtgtaatgttagtattacttaacactgtcagttgtgaccatttatacacgggaaaagctactttccaaaaccgccagggccggggttacagcaccccggcggtaagcacggttactgcgcggtaattgcggtaaccgtgaaaaaccgtatgaaatctatcaaaaatttaaattattttttaaatttatttaaatttaagaaggttaccgttgtatttatattaccgtaccccgcggtaagcgcggttatcgacggtaagtcgaaccctccatccatgtcatatggtctcattcttttctaattgatgcatttcatgaaaaatattttttatatatagaagcttcaaaatatcaaataattatatctttcaaatttagtagaattaaaaacttaattaatcatgtgctaataactcatacttaatcatataatcgtgcgctagttagacacataaaagttgatttcatttgaaacaaagagcatgtaataagtacgttcgtgtagcacgttgtgtgttgcatgattccatagaaaaggcagaagcatcaaacacatccgcacattcagttgcgtgagttcttgtgcgccatacacatatactctccctccgttactaaatatttgacattgttgattttttaagcacatgtttaaccgttcgtcttattcaaaaacttttgtaaaatatataaaactacatgtatacatataagtatatttaacaatgaatcaaataatagaaaaaaattaataattacttaaattctttaaataaaacgaacactcaaacatatttaaaaaagtcaacggcgttgaatatttagaaacggagtgaatacatacgtacagttccaaggcgagagaaagctatgatgctcgttgacattgtgtatttttcctttctggaatcaaatacgagaagactaatttagttttgtgtcaacgcgttgacagtgcaccgccactgaacgaattcgacggagtttagcacgtgccagctgaa

SEQ ID NO: 30032 - DNA, 764 bp, Oryza sativa
gttttagaaaaggagggtcaaacaagcccacttcaaaaagtagggtcaaattggtagttagggtttaaaacggggtcaaataagcaattgcccatatatatatatatatatatatatatatatatatatatatatatatatatatatatatatatatatatatatatatatatatatatatcttttcaggttctcaaattaattggtcatcgtttcagctgagtcaaagttcagccaaagttttgtgacatgcatgccacagaaaccgtgagccattaaaccattgacatataaagtcaaaacatatgccatgccatccgagaaaacaaattcaagcatgactaaatgaaggaacaagcgaccagctgatcaccgcaccaattaggtccagagatttgtttaaacatatattagttctttaattattactaactacagctgcatcggccaaagaggaggctggctttggcgtatctatccagtgtgtgttgggaggtctcgaggagaggaggatgaaggcaaaccttcccacacccaagaaagccaaaactgcctccaattagatctatacttttaatatttgctttctttgttatgcaagcaatgcagagtcctctctgaccacatggaccaaacgattcccacaccgtggtcaccacgcgccaattgcttattttatgcaggggaatggttcaataaactttctatatagcacagtgacgtgtttgatgggcatgcaccagctgttattatatgatctaatt

SEQ ID NO: 30033 - DNA, 2922 bp, Oryza sativa
atttctattgaagtgtaggtagagtacgtatttgttttacgagccagacgacaagcctataagcaatggcctctaatgatgttttgtattatgatggaatagcccagtatgtagaaagtctagatagctacatagcaatggcttctaataatgttttgttcatcatgcttgctcgggaaagcgtacgtgaggcgcggcgatgagggccacgccaaaataaacatgcagtatagcacagcgacccacacaaattaacctcagaaaaaaaaagttacatgacatgcttaacacatgagtttaactagctataccgctattagaataaaatgtttcaaaatatacatcacctaaacttttaatatagcatattgttatatcgctgttttagtccaatatatgtactgttaaaagctttctctaacaaatattgagcaacatgtaatggtatattaattaataactagcactaaggatctccttttacataggcaagactagtcaagtaaccaatgtgacgactatactaggcagatcagatcaatcggttgggccatttaaaatatgagtattcatccaacattgtttaggagaactggtaccgtcactttttgacaactggcataatgcaagaaccttcattgccacaattctttaacccctcttctagaacttctctaaacttaacatgtagtagctagacactgccagttgcatcacatgaagatgtgcatatacacatgtctaaagagctccaaagtcgaacggcgttggagctgagactgttgggtggacctcagaagacaaggattggacgactttgtgtctatttcagttagatgtataatttcatacccgcggcactaaactgccccggccaaatattattttgcaagtaatatgactccattggtgtgtagtactagctttaggtgatcaaattgcaatattcattttacgctctagctatgacgcatgaattccgtgttcaaccaagggaaagaaagctccttgttgacgcaacctcctctatatgccatatcaccaccggagatccatcacccatcaataaatagaccatgaaccctagctacgatagtgaaatcgctgaaatctaagttggcatcttcgttaccacggccaattgatgcttgaatcattcaacccaccaatctagcaaccgattgaaatctctcctatgattttgagttgaaattgaggtttttgtgtatgaacgcaaggtgcctgagtggaaagatgggatgatcaaaatatggcaagatgtagaaaaaaggtaggacgaaagaatgacatattagtgtacaaccattatgtggtatagtgatatatataaataaactccatgaatatgatatgaaaatatgtttacaaccacctcaaaacaatatattccgtcatcatattgtatagttcatgtaaaaagctggaagatcctcgctaaagattgtatttataaaagttagatccatagtgaaaatcaaccaatcaatattttattgtgttgtgattcgaagaaattatacatgtcacaaagatcaacaaatcaaccaaaattaccaaaaaaaattacatgccatatctcttaatatcatgtagaatgtttttggtttacaattagttaatcgttcataaataggaaaagttagggcccatttggtagggctccaatttctaaatttaactccagcatttaggtatggagtggagttgtaaagttgtttaagcccagcttctttcagttcattttgtgggagcacttcaactagctctacttttttttaggtggagatgaaaccgtttggttagatttcagttttaggagagatggagctgaactgaagcggtgtcaaacgcacttaattagatcatataataacagctggtgcaggcccatcaaacacgtcactgtgctatatagaaagtttattgaaccattcccctgcataaaataagcaattggcgcgtggtgaccacggtgtgggaatcgtttggtccatgtggtcagagaggactctgcattgcttgcataacaaagaaagcaaatattaaaagtatagatctaattggaggcagttttggctttcttgggtgtgggaaggtttgccttcatcctcctctcctcgagacctcccaacacacactggatagatacgccaaagccagcctcctctttggccgatgcagctgtagttagtaataattaaagaactaatatatgtttaaacaaatctctggacctaattggtgcggtgatcagctggtcgcttgttccttcatttagtcatgcttgaatttgttttctcggatggcatggcatatgttttgactttatatgtcaatggtttaatggctcacggtttctgtggcatgcatgtcacaaaactttggctgaactttgactcagctgaaacgatgaccaattaatttgagaacctgaaaagatatatatatatatatatatatatatatatatatatgggcaattgcttatttgaccccgttttaaaccctaactaccaatttgaccctactttttgaagtttgcttgtttgaccctccttttctaaaacgaagctcccgtctaaccctgtttccactagtccgttaagttttgatttaaaataaaaaagaaatgcaactaatattcataatatccagaatacccttaggaaaccctatccatccacccaaccttatccacatttctctctctttctccttcctccttcctgctcgctcgacttgtggcggcggtgctagggggcggcggcggcgactgagggggcggagggagggagcagcggcggcgacggctgaagggcgtggagggagggaacggcggctgttgaggtggcgccggtgcggcaactgaggggcccggagggaggaaaggaaggagggagc

SEQ ID NO: 30034 - DNA, 1371 bp, Oryza sativa
cgccgaccgcctttgattcccccattgtcgtccttgtcttcagcctcatcaccactattctccccctccttctcggacgacgggtcctcatcaaaatccaccttcaatgatgacccgttctaccaccactcattatctctacccaactcgttgcctggtgatgatggcggtgttaaggagagttgcttcttgtcggtgttcaatggccttctcctcctcttcgacagtggtcatgtactatggttggcgcggcgagcccaacatggccaaagataaagcagaacgcaaagagaggaagagtgcagtgataaaacccacattacctactttttactggaaaatagatggagagtgagaggtgatgaggcgcagtgtggccagaggatgtaaccggagtccggcgcttagacttcagaggagcccgcatgatcaccaaaggaactacaggtagtggaagtagtgacacaatgaagatgaagagataagtcataggcaagcaattaagagctctacctcggagatgcacatttacccagacgggcttaacgccaccgaatgtgaaaatacttcaattttcttagatgttaccttatgtggtccgcctatattgttagacattaatgcgggcaattgcctaagacgagtgcttgtgtaaatcattgtatttatgtaggcggccatcatatcccgccgcctatgataattggtttacacaaacccgtgaccctctctccccttggtagatataatgcatagagagagagatagagagtgagagagagagagagagatctacaatactaagcttcaatcttctcctatatccttacttcaaacttcctctatccttgtgcagcaacaacctttaaatcgctagtctaagtagaatcttttgatgttaattttttttaccaggaaatggttatatgctgctttgaccttatttattctccagaatgctagcaagtctaatagtctccatttgttcttcttaatttaagaatgatgaccaccatacttcttattcaataaccctttgtttgaggagggcatacatccctgaggaggggagtgtggccgagcggtcaaaagcgacatgccgtaaatctggtgaagattttatacgcaggttcaaatcatgcctatcccacttgttgtagacttaagagttaagagaagagaaataggaagaagcccaggagggccaatcaagcgaggttttttctccctttttttcccgtgccatgaagtgtaattttattatatgcgttttagagaggtttgtcaaaaaagatgatctataaagattcctcatctatatttgatcatgaatagtccacttgtattgtgtgaatcatttacaaagtttta

SEQ ID NO: 30035 - DNA, 2968 bp, Oryza sativa
tgtagcttcaaatggcctcacacggtctatcatgacaaagctgtcactcgtccttcaccaccggatttggttcttcggcgccaagcaccttgattgcccttcaccgccgcatggtccatcgtgaccgagcttcgcttgcccttcaccgtcttgccatagtagccacttcgtatcccacatcttcaatatcttcactttgtcattcttggtatcgttaggtgtaattatatcacttgagcatcaacacctttgcaatccttgggacctatttctttcattcaacccaataaaattattagtcccaatgatccagttgtcaacctccacaagttgaccaaccgatcgcatgtataaaagaatatgaataaatgatgagtattaatcaataccacaagtgccatatactcaaacatacactcaaatgtaaagatcccaattaaatgaaagtgaataacttggatcaattacatgcataactaaagtataggatttgctccccctaactgtatgaaaaaaaatgtttgtgtgaagcaagagtatgcataaaagaatgaaacattaggagcttaccctatacaaggatagatggcatttatcaaatataaacattaaaataaatgtataccttcatcatctttaggttctcaatgtaaagagataaacaagagaaaagactcaaacaaaacattagtctcacatgtatattgttattcacatggaaatattatatatgaacatatcaatatgtacatggagagaaacagtgatacatatagcttgatctccatgcatttcatccttgtgatttaggtctatcatcaatgaatgtttctatctcaactcataagaagtccggtaatcacctctcacacactccactttcatgtccacatgagactaggcaaagaaatgcttataaaaatattagtttcacataattggatttatcattaatcaccaaaaccaaattaatggcacttgaactttcaaaaatgatgggtaatgtggtttttataagcgaggacaaagactactaattctatattgagtatgctaagggtaagggttttattgtgagcccaaaagcaggtgtgcacgcagaaatgctaggtaagatacattgttctctcaacccttaatatccatcgttatagaccagaagtagatcggattaagtagagcaagacctttaaaaactaggtgaagtggaaggattgtatggtcatatggagtcagtttgtatgctcaacttaaggctatatggatttgaaacactttgaaaagacaaaccagaaaagagatccgcaggccctcactcgttgtggttgcaaagctaagcttgacatagagctcaatgaggagagaggagtgtgttgtgttaaggagtttaaaaaccaacatacacgtgaacttgcaaatctctattaagtgacaggtttaataccagagatatgctggatagaagacattgtgcgaaggatgatgatgatctaacatgtcttgtgtaatggtgggcacagggaaactagacttcatcttttctttacttgcccttttagtgtcagatgttggcaacacctgagaattgtttggaacctggaaatttgggagatagtaatatgcaaaagcaattgctctattcgtctcatttttcatcgaagattcttgcatcaatgttgattccattaatttgcaaagctttcctacttgatgattctacaatttgtccccgatagaaataaacatatctaaaatctatggctaaacgaatttgcagtgatttgatctgaagtagactagatttgagacaaaggtaggacgacagacatggcacaagtggaatagcaccttgttggcaaagagcagcgacgctcaaaggcgtgctagctgaagatggatgtgatcgacagacacacgatgacttgcacgtagcccagccaatgcatgtgtggaacagttgagctaactagagttttcagtaaatgaaataaacctggtaaaataatacctagtttaaaactagtaaaatacaacagttaacttactcagtggagattatgggtaccccatacccacacggcatggttatccgaccggtgtagggggtaacttatatctatgaaatatgtaacggatcatgacatgggtattacgtttccttgtatattatggaacggtctaaagtcctggtttggtaatattgtaaaatagattaggaaaccgataccgtattggttaaggtttctatcttgtaatcctgcccaccatcctatataaggtgggcaggaggccctctagggggcatgacataattagatcgtcagagttataatacgcctggcggattcaaatccccaaaaaggagtagggtattacctctcatcgagagggcctgaagctgtctaaattcttgtctcctcatccatccacttttaggtctcgtgcgctacacccttttattattgctgaaatcatgtttcgacatactctcttgtttatttttcaatattttgtaagatcatattattaacttctcacttaaatgtgttatcggctcttgtcctttatgagtaatgcaaattcatcttctttgtttcaacgatttgtctagtaattactatatatggccaaatgggttgttcggtccgacacagctgttggtatttcttaacaacattactagaaatataattcccagcaatggcgcagaaatacttccggtatattatggttatagagttcatccgcaagcgcaagcgcacggatataccattgtagcatttcacccgagagtattccaagggtatcatatttattttgtcccgtgggaagatcatgtagagagaactcaactaataatttatatattacttgtgataatcatattctaagcagggattaagataatccaagggtagagtgacacacaaacatttctactcatcctcataataaataatctaagcta

SEQ ID NO: 30036 - DNA, 646 bp, Oryza sativa
ggcgaattcgagctcggtacccacgggagaaacgcccaccaaacaaccacaaattcttccagaaaaaaaataaacgaggagcagtgacgttctcgcgaccatcatccgaacgtgccaagcatcttctctcaaacaaaatcgtgtcttaaaaagttaaattaaactacttttatactgagccgtttatttactgtgcgacaatgcgatattatattatcgtaatcctagtcgtgatcgcgatcctgacacgaacaaaaaaacgggccgtgtctaggattgtgacgctgacgacgttttgccaagggcgacaccagtaacagcactgtactagcagcggctatcagctcacatgggcatggccgctcgctccgttcaacgccggggaccgttcgtttcaactgcttctgccttgccgaccgccagtgacgaagcggaggtccgctgaaacaggttggcagttggtggcaactctgctgcagaattatttgcagcatgacaggtgaagttctaggcatctagctgcaagtcgtattccctttgtctaaaaaaaaaaatctagaacttaatatgacaacgaatctgaatagaattatatccagattcataatattacgatgtgatttttcatggaacagagggtgtatca

SEQ ID NO: 30037 - DNA, 745 bp, Oryza sativa
cacgtacgaggggtcgcaccatcacggcccgcagccgctcttcccgccgcacatcgcccagccaccgccgccgacgtcggtagtgggcttctccgccgcctccggcgctggcccgccgccgtcgtcgcccgcggcggcggcaaggaagaggaagaactatgtcagggcggccttctcgccgacgacgtccgaggacgacggcgacggcgccggccggctacggccagagtggccacaagacgatgggacgtcgtgtgacgtcgccgagttacgacgacgtggcgacgcggagcacgccgcgccgcgtcgtgtcgcgacggatcgctcgtgcgacgatggcggcggcggcggctcgacctcggcctcgtcgtccgtggcgcgcgctgacgccgctacggcgctgtcctctgactcgccgccgaccatatggtcgtgcctggactggccgtggtcccaggaaacactgtttctgtagctgaagtgagtggggagttgacttgggaagatgactcgatagtacagtactggatatctacttgcaaggtgtaattagttactgatggatacgtataagtagtggacaggtcaaaggatctgaacgtagctacgaaaaaagaatacaacttgtggggttcgcccgacgctggaaagaccaccgagctagctataaacaggttgcacaactaacgaacttaattgctaatacctgatgaatattagaaatatactagtttgccacttaatt

SEQ ID NO: 30038 - DNA, 4610 bp, Oryza sativa
tccatgtgtcaaacgttctcctgtattcatgctttagacatgctatttggactttaaaacttttctttggttcctcgtgtgacggttcttttttcattcttgagattcaactcggtagtttcaattttatttttccggttacaatgtatctccttttcgattttctctttagacttcaaagcttcaactatgttctgaaatgacaatctcctaaattttgtctgaacgtatgctaaccagtttgtgaaaagaatatatttgcttgtgattaaacctttgcatccttttgtgctctgtagtttttatcctagactaatatctagtttctagagttacgtttccatgtttataaaaaaaatatctttattgtgggctagacgtctacatttggttgcatcttattgattttatgaatatcgtagtttgcttctcctgaacgattttatgaatatcgtagtttgtttgaactttttttttctggtttataaaagaaaaatattattttgcattgaagcccgagcgttttattttctctaacgttcattttgaacttattaattgagttttagagattcgttttcttgtttattgaaaacaaataagtttgttgtaaactgaacccatgcattttgttgcaccttaaagcttttttaaaaattgcgatttccttgtatcgatcgtttttaggtttgtcccttcacgctttaatgttccgtccttttattcaaactaaacgcttttagttggatttctttattttcgaacttttctgttaatgcttttgatgttctccttggactttaaagctttaattcagttttgaaatatcagatttcctaaattttgattgaacttatgcttactagtttgtgaaaagaaaatatttgcttgcatttaaatcttgggcttttttgtgctctaccattttcatttttaatttataactcagttcgagagttacatttccatgtttatcgaaaatatattttggttgctggctagacgtctacatttggttgcatcctattgattttatgaaaaccgtaatttgtttgttccgaacgatttattggtttctccgttgacgcttcttttttcatccataagtttaaattttgtacttttaggtggatttcttgattttgtattgttcttgcatcgattcttcaaataacctttttggagtttccaatattttttcgttgtcacgattcatgttccttaagttattcttttgcattgaagcttaactgatttattttgctcttataattgagttgtagagttggatctccctgtttatcgaaaacaaatatctttgttgtgagctgggcccatgcgttttgttgcacgttgaagcttttatgaaaatcaaggtttcctttctcatgacgattcattttctgtcctttcgtttaaatcttttgcatttagttggatttctttattttcgaacgttctcttgtattaatgcttttgacatgctatttggtctttaaaacttcattttggtttctcgagtgacggttgttttttcatccttgagtttcaattttgtactgttaatttgatttcttcaaatacgaagtttctcttttttttttcatcttctctttggactttaaatatttattttagttctgaaatgtcagtttcctaaattttgtttgaacttatgcttaatagtttttgacaagaacatacttgtgtgaatttaaaccttgcagttttttttgtgctctgacgttttaattttggccttatatttaaattctagagttatgcctccttttttatcgaaaaaatattttggttccgagctggatgtctttattcggtcgcatcttattgattttatgaaaatcgtagtttggttgtaccaaacaatatcttggtttctccgttgaggcttcatttttcattgagaaatttatattttgtacttttaattggattcctttattttgaaacattcttcttcatcaattcttcaaatatcccttttggagtttccaatttttgttgttgtcacggttcatcttaagtttgtttgaactttgttttctagtttataaaaacaaattattcttttgctttatgccctgaccgatttgttttgctctgtcattaatattgatcttttaattgagttgtagagttgagtctcccagtttattgaaaacaactaactttgttatgagttggatccttatagtttgttgcacgttcaatcacagtttccttgtatcaaacgtttctaggtttctcccttgacgctttattttacgcatttcatttaaaattttatgctttttgttggatatctttattttcgaatgttctcttgtattcatacttttgacatgttatttggactttaaaactttactttggtttctattttcgagtgttctctagtctctattttgattttgaaaactcttatcttgctctataggaccgagactttttcaaagcttgtacttctgtgaaaatgagattgaaaacacttattaatcataacaaatcagttccagagtgtcttgcaaagttttgaaatccatttgcaaactacacctatgtactagtacggatttgcaaaatatcaggtcaaaaatagcctctagtatataggatttgaaaatggatggataaaatttaaatcttgaaagatatgataaggtttccatctccttacgttatctctgcaccaaaaaaatgaatttggtagattttgaactcctctcttccgacatttcaaattttaccgacatggtctagaacgggtagtttgtgaaggataaaattgttgtgcttaaacctgtagattgttggcttagattgaccacccaaaattcacatagcctctataccaccctaacctaatgtaaataaaatatgaggaatttaggtaacttaaaacatgaataaagtttctttctgtgtcggttgatcgtgttctggaatttcgagtcagtctgttaattttgccaaggctaaactgtaggcgatagacctgagaatttttatgaggaacatgtacgtcaccccaataggcttcatgaattttattgtgatttttggacctttgcatcatagggtaataactcaattagtgtgcataaccgtgttctgaaatctttagacagcggcattcatgtttttatgtagtccaaaccgtaaaagataatcatgctatcttttaacagtagcttgtagacatacccagtagactccatgaattttggctaaattttttgagtctttgcatcatgttctaaaagttcataaaacactacatagtcccaacctgaaaacagtaggtaacctcgttgtcgaatttgtgtagcccaatctagaagggacaaaatcttggttccttcagggtgctcataaggtagctctgtttttcttttaaaaaaattcttttgaacctttagaaattgacctaaaaattaggtaaagatagtagaccagtaaatgccagcactgcatcacttgttttgaccaatttctccaaaataatctatttgcccaaaaaatcaccattccttctcagattggagaaaactttgttaggatcatgaatataaatttttttctaacttatcacccatctaccatagtcttttgcttcagtttgcgtatcgggactggatagtacatcatatggcacatagacctatttagctcatccattaaaatttcttgataaaccccattgcagaattttattttattttaagggggatagagtgccatgaccttacaaacccagagacaaaacatgtaaccattgcaagcccccacaagcctaaatggaaatatcatactaggaacaagtcgtaagcaaactatgtaatttaagttgagatggctcagggtgcaaattttgtgcccctttacggtcggatgcaatatttgtacatcgcaacaactcacaaacatggtttgggaacttgacttttaagttttgaaaacttctctaagatgatccactagataaggagaattgttctatggcatgtatgcaatacaaaatatcttcataagcattgtatcattttatacatgcatcgcatcatttcatacatgcatcgcatcatttcattcatcatgatatcatagcatacatccttgcctttttgagaaaaagaaaagttattgctatacatgccatctagcatcccgttttctacaacgacccaagtttatggatgcacataatgagaccatcccgatgcatccaatatgactcgacaaatattcctagaacaccttggattagattgcatatgactaattagcacctgcagaacaaatattgccaactttatccttattttcccaactgccttacttgctatcctagaacttaaatttatcgaatgtgagattaacaaggttagatcatgaccgtagaccatgaagacttgaatcttgttacatcctaatggttagagatactaaatctggtattcttgaaaagttttatagacatttaaaatcaataatattgtattgttattagaaaacaacatatccatgacaccttagatcgtattccaccaaccaaacaaggataggttgtcataccaccctcaccaaag

SEQ ID NO: 30039 - DNA, 1262 bp, Oryza sativa
tttagaagcaacttacaatgtcttttgtggacagttagtattttttactactgtttggcctgctcttgtcttgatatgtttgttggacatgtagatcctagttactgcaattgagtatcctaattacagatcaacagaagcactccacaagcctttgaccagtaggaaatatgcattagtattatgttatgtggtaggcccttaaatttgcatgcatgagtgtttaggtagtggtcatgggttggattcccactttcccagcctgtaacctccttttctctgaatgcttcactatactattgaactcctatttttcttatgtgcatttcaaaaacatgttaatctaactagcccagtaattttctattatattcttctgcatatttttcctttttttttaatttcaatattttctgaaaatacatccaacacatttcaataacatgttagctaatgagtcaagttcttttttcgagaaaaaaaagaatttgatactgtatttttcttcactttattcttttttgaattagaaaagttgcaactttttattgatggcactattttttgggggaccgttatgcacgtctcaaatacccatcttaaaagtcctgtgtccacaacttctaggagcctgggaggtgtcctaccatatttccttaaaaaagaggagagagggagaggctactgcatgaggtcaccaaactcgcatcgaccagacttattagtgtgggaatttgataccgatgtttcagctgtattaatgcgttcagatttggtactgctctatttcaacttcaacagtacccaaaccaagatttgataccatcttgtttcaacagtattataccttcgaatgcctcttcaaagagatattccttagccaacaattcctcttcacctcttgttatgcatctgaaagtaactctgaaggaatatcaaaaaaaaaaaagaaagtaactctgaagcgaagtacttgctttattgtttttttttaaaaaaaaaactcaactatagaaattgggccctgtgaaagggtccagttaattaatacccaaaatacgctttcatggcccagtcgcaggcacaaattaataaatcaacttgccacctaacttgagcagttagaattcttaaaaactaagaatgtttcagagtaaatgggaagcatctgtgatactattattcctgtaaatgaatgagcactattcttctctactattcttctcttgtcctttttctaatagtgaggatcttacatacag

SEQ ID NO: 30040 - DNA, 1599 bp, Oryza sativa
agaaaatctagcataaggttctaccttatatttttttttcttccaatggcacaagttttatgtgttttcctgtgtgttatccaaacggtagttttggaatttttctatgtttttaatttctataggaatttaatgggcatgacaatattcatacgtttttcttttcatgtttctgtgttttcccaatcctacattttaaaggagcccttaaatatctctctcccagtatgtgcaaagcttgagaaatgatgtatatatccatactgtgaaagtttaataggggaaacttattccagtagttttcacaaaatctgaatattgatgatcttatttgcaactatatcgtatatatacgagcgtgttataatgaaacttattccagtagttttcttgcacgctactatctccttgtctaaaaaaaggacttccaaagaaaggagcctaagctttaaatgctttattccttttgttatgccaaccttggaagccaagggaggaccttggagcccttgttatgagtactaaattttacacgagaatcacatatttatgtgtgatggtttttcaaggggcctttagtaactgggaagaaaaaaaaagtgctttccctatatagttgagatacatttttctcaaatatctgacaagcatattgcttgattcattttagacaaaatgtacgtgtaatgtaacaaatcttagaccttactacaaattaacttacacgggacattttggagaactcgttaaccggtttattatatatcaacggacacaacgacgattttgtagcgaatttggcaattagctccttcaaaacatagggcttgttcactatgctaccattttcaaccttaccgagttttggtattgctaaattttggtaaggttaccaaaattttagcaaggttgttaaattttgacaagatttaaaatttagcaacaaactaaatgtagccacttttttataattttataaaaaaaataaggttgaaaatgataacaaagtgaacaaccccatagggtcagcttttggtcagatactcgagtcctctgtctctacggtgtttctcaaatttgctggatcatcaaggagctgccgtctagtacttccccctgttttcaactgagggcgctattgtttttaactcgtgtttgacaaaattatacagatatactaaaatgccatgctttattatttttcatgataaatgaagtcacaatagaatacataataactacacaatttttttaataaaatgaatgatcaaacaagtgtcaaaaaaatcaatcacgtcacctattacaaaccgaagatatcggagatagtaccatcaaagagggagcctatgcaagtttgcagtcttttattccttcaagcaaggtctacaatcctggtagaaaccggtctgagtaaaaaacacacgctcggttttttggccaaaataaaattaagaaaaatcaaagtgagagttttaaatttttgacaagatttactcggatttcattggtttttatcgatttatgcacaattgcacagttccatgaaatccaaagataccgttaatgaatgtttctagattaggtatcgggactgta

SEQ ID NO: 30041 - DNA, 1469 bp, Oryza sativa
aaatgtagtcataatatagtcatgtcggatctactttggataagcactttttttctaacatcatggtgcaaacggtttttaaaagtagtacatgatgtgagagatattaccctacaaagattgttttttaaaaatttaactctctacaagcagtaatactatatcatatgtattactattgtctgctatgtgttactgcaatcacatcatacgattactacatgatgtagtaacgattataagtttcacagtaacatagtgtgttactgcgatttcttgataacgttactgcacgaatgcgtatagtaagaaaagaagtgcagtaattggctcggtttaaggtgcagtaacgttctatatgttctacagtaacaacgtgttttactgcagttattggatagtgttactacataaacatacggtaatatgtaactgtcaggtggtaacatgtataagccggtaacgtgtataagccgtgcagtaacacttttactttcgtatagtaaaaagtatatggttagcatgtgagactttgaactcatatattttttgtttcaattcctgatttaatgcaattcaccacaatattattgtcaaaagtgtagtaatgtcatatacattcatgcaataacactatattggagggaggagaccgattttcttgagaagagggaggaagaacggtttcttgaggaggggagtatgtagatgcattttgaagttctaccctccacatgcagtaacactatagcatcattgtgaaaacggttttgaaaaataatacttatcttgtgagatattgattttcgaatattggcattttaaactttaacccttcacatgcagtaacagaatatgtaatttgcagtaacaagggcatatacatgcagtaacttagttttaccaaatgtataaaattgttcaaaacactcctacctcaatcagacatcgctcaaagccacctgcagactttacctatagtccacctattcgatcttcatctcgtaaaaatgatatagtaaaactacaattatcgtgcagtaacatagctacttggaagtggtaacatgcacctattatgtagtagcacttctacttttatgcagtaacaagtatatggttagcatgtgaggctttaactcatatatttttgtttcgattcctggtctactacaattttaccatgatgttactgccagaagtgcagtaacgtcctatttgttctacagtaatgtggcatgttactgtacttttacgataatgttactactggagcatagtacatgttatgagtttcgtagtaacatatctttgtttttttgttttacgatggtagagaaagatattagaattgataatcatattactttctcacaaaattcttgaaacaaatagcaccattagataaattggttagaagaatgtgctttgacctatgaggtcatgggttcaagtcttgaatttagcaa

SEQ ID NO: 30042 - DNA, 2507 bp, Oryza sativa
caaaatcgggttaaattagatcttattgcggtatgaattgatttcgctgatataacatcctaatcaacatgagatagatctacgtgaaagtggccacatcaaatttctacttcccctcatcgtcctcctcttcccaagtagctcgccgacggggtaaggggcggcggccggtgagcttatatcagtttttaaccccccatggtttttcactgtgattaccactgggtaacggtgatactcctattcatcaaaacggtaaaggaaacccggctaaaccggggctgatccgccactttgcgggaacacgatgctcccccacgtcgaaacagcgcgtccccaacccaacccaaaaaacaattccccccctccctgacatgcgtcctactcctccccccccacccccactttctccccacattttgccccctagaccaaatccaactcaactcctcctcgcccccgcgcccgcaccaccgcacgtgcacccctcaaactcgccatcgcccatccccggtcaactccacccccacccgccacccagcccccggcgctccaggcaaatgcagagagatcgcgagttcgcgacacgcgcggatcgaatgcctccccgctcccattctcccacagtccaatccgctgtactaggcttgtagcccgtgtgtaaactattccctacttccgttacagctgtctcctcctcctccttctccttctccttctccccccgggcttaaaggatcctcgtcgcggagccgtgcggggtccccctcgccctcgccccaatggccgtgcattcctcggccgcctccgacctcttgccgggatccccgggtggatggtagcaggggtggaggtaggaggaagggcgcgcgctcctggctgtctggctgcggtgcgggcaggggcatcggtagctgcggtgctgctcccttggggggtgggtttgggtggtttttggatcgtgggggagaggagccgaggtgggtatatcttctgttgcattgcattgtgtgcgtttgggattgttgcactggagagtaggtttggggggattcaagattgcatcgtcgtgtgacgtggcgtgtggtttttgaagaacttcggtttcattcagttgtgaaggttggtgtgtgtgctctcgtgttgtttctttctttgtatagcgggtgatatatggatcgtccattcattctattttagttctttttactgctagtacaggagtaaatttgtgtttgctaactttgatttccaaaaatgagaccaagactgaagtttggatttttatgacttgtttagtgttcaacttaaccgctttctcgctacgcttttttttttcaattactgcatggttcatctttgaattgtccatttggtggcattttacttatatatgaaaactatgatgtactgcttgcagattctttgtgatgcactgggctcgtgttcatacttcaaactgacaaacaaaaaaggttctttaaccggcttcagcgattaatggccttcactggggaggaaaaaatgaaggtgacttgctaattacatttccacggttgctttatgtatagaaatgaaatactcgccttcagaaaataggattgtgttccagggttgtcgcccaaaacttttcggagcaaaggagaataaagtctcaaacagaacagacaaaccaagttgcaacaccggttggttcagatcttcccttttaaaaagtttctgttccctttttgtttcattttggatcgttgttttaatggcgttggcagttaggcttatgtattcaaatatcctttttcttaatgcaatgatacacccatcttttgcatattcccgggaaaaaaaatgtatatacagtttcggatgctagttgaattgttccttatctttgccaattgaacatgattaggggttatttggatctccaattttaggaaaagtaaatttaattaagcaagttagcttgcctaaaagtctaatgccttgttggttaaacaagataagactaggatagcaaagttcatttgagttttaaagaaaacagctgcttcctgtttttttcacaaaattcaaaatatgaatatagtaaacaactagaagaaactttatatggcatcattttcatcagtgaatcccttcttgtggagggcaatcccttatttgccgttgtaaagttcatgcgatcccatgttagttatttgcaactgaagtttcattggcatgtgactgcatggcccatgtcagagagggagagagaaagatagacttcttcaattagataattccattaacgagtttccttttgccttgagatcatagaaggaactaactgtgttgtatggccttacataataacagggaagtttggtccaagttcttctaatgctgcgtcatcttcccccctaagggcattttcaggtacactaatatctagtaaatctggctaaatgtttggagatggcccaattttaattgttagtgggctttacttgtcttatgcttttgaa

SEQ ID NO: 30043 - DNA, 3918 bp, Oryza sativa
aatgcggcagtattagcgattgtggaaccaacatagagagtcgtatgatatgataagggcaccatggtgtgaagagtggcaccgaggctgacccaaggcgtgaagcgagggtggaaatgaaggagaaaccgtacctggcgcgcggagctagggttagggtttgcgggcgagaagacggggcaggggcggagcgggtggaggtgcgatcgaggggagaaggcagggaggcgaagggatgagtgggcggcggaggagggcggggaggtgggcggtggaggggggcgggggtcgccggaggaagaggaggcgggaaggagagctgcgtgcctgtatgtatgtatagcgcgaaccaacaagaggagaagagaagagaggcgaggcgagaggaggggggagaggagagggcggccggccggcctgtgtctcgctcgactcggttcgggtcgggtcggactcacactcaggacattttggcagggctccagctcccagattcaacttatttggagctgaagtccaaccaaacggttcagatctgttcaaatctggagcggagcgcatggaatcgctaactggtgggttggagcggcattttggtcgctccttaactccaactccaaccgcgttatagaattgcccacatattttcgatgaaattacccgcaaatgccatcgccctacccctcatccctctctcccgtaccgcttcaccccgtcttccccaacctccatctcgcgggagcgaggaggcgaagcagcagacggcgcacggtggaggaggaagcagccggcggcaacgacgcaccggctggaaatagccggcgcatgggcttcccctttcagtgtcgctcccctccttcccatcccggcgcacagcggttgagggcgagcatggcggcgcatggcggttaatggggaccacaggggcgcacggtggctgagggcaagcacggtagcacaaggtggatggagacggcgcaagacgaccccaaatggcggcacggtattttctcccaaaccctaaaaatttccctcacctcttcccttcagatttggttgagtagttgttatcatgtaatgagcaaatggggaagtttcagatctgaagacttgtctagtgatgaatggtaaaaatgcaatgagcgattgggatgtgtgaaatttcagagcagtgatgaactatctagtaacttttttttgtttagtgttgtaccttgtgtttacaattatatacacacttggttggaattgagcatatcagcaaatggttatatacacacttggtttagaattctttagtataaaacctggcagtggaaagaatgtccttttatgggaggataattggattgggggcatacccctggctgagcaattgggagaaaaagaatagggaggaagctatgactttcaattctgtgatagatttgaagctatacaatatctttttatatattgtccttaattgattcatggggtgttttgcagacctcgacggaaagacaagtcacaagtgagattttcaaatcaagatttggttagagggcacctctacaaaggattcaagattgaactgccagaagtccctttttttttgccgtcatcactgttgtccttgctttcacttgttagtttttcaaatatgtgataccgagatgtttcgcaaaggttctgttggatgtaaagtagcagcacaaaacttcagtgggttatgagatgtcggtatgactgagagactaaaactattgttggtttttttgcttggagctgacctggactcttgcttgcaagcaaggccttgaacttattcatggatggatgcattttaccttgtatacggagcacggcaacagcggcggggtcggagcacggcaacgacagtggtgtgcaaggtttccagatctgtgtggaaggtatctgcatggcaacgatgggttatagcatttcattttgcaggttagcagctggtgaactgcaatctatcaagatttcacgcctgccttcagttttatctgttagctaatgacagctagtgcacctttgtgttttttctgctctgtgtattctgctggtttgtgaatagattactatgaatctcttggaaagtcattgaaaattgtctggacctttattaaaaattgtttgaacctttatcaaaaattgttgtaaattcggttcatcaatcatgttttccaagtgattatctgtgttgtgattctgcatgtagcagctgcacaaattgtgatttggtttgatatcttgcaagagagaggccaatactttcaggatgggataacacaaagcattcatgatgatctagctggtcatactgcacgatgatagaccatattatatgttattttgtggtcttttgctctatcttttgatgataatgatgctacaagttgttaaacatttatattactaaggaaaaatagcatattaatccttcatgaagtaaacgacaagaattacaagggtagtattgtccatctcctccctatcctctctttcagaaatttaggagctgaccaaatgagccaaacacttttacatcatctctagctcctacaagagctagctccagctggagttagagtttggagttaggatctgagagttggagctctaccaaacaggccctcactcttgtgactctgctcctccgtccaatcggatcgatcgcctctcgtttctgccccccaatacgaccatcagtattgggccgaaacggtattcgcttggatcgaaagagtccactttcggtcctcaccaactatgactcgggttttattaattttctgaaatcgggtacagagtatccctcactatcaaaaccctctacagtttatcctacatggcacgttgacttactctttgtccgacataacatttacgtatcagtgaaaaaatataatgggacccacatgttaacggtaactatactacaaatatttaacctacatatcagtcatattgaggggaaaaatcatctctctccctatctatctccatccaagcgagaggaattatatgcatgggaggtagaggtggatctgactatagtgatggtgggcggagacgctcgtcatcgaggttgatgaggtggtgggccctgcggagatcctggttgataaggccaatagcaatgcaagctacgccaaggatgtctctagcccaattgaaaataagaaaccggtcagaggtccccgacgccacagtgcaagtgacctttttgcattggggtgaggtgatgacgagacggagacacgaccccacagtgcaagcgcgactgctttgcaggctgcgcgtggactcgtgacggcgaaagcacttgttgctctgtgtgggggcgagatgctatgtaggggcacacagaaactcgccatgtaggcattcatctgagctggccacacgaagaaattcgccacacaagcgcaccgtgaaaggactaatgtgctcaacgtagatgaagtggttgatgcagtagggggatgacaatggcgcctaactgctggaagccgtattggcgctataagacaatcaatcttatattgaaactaatttagaaagcatatttttaatagtcttacgatttaatgtgcaccatttctttcgctattaaattaagccttccagaatcggaattctaaaagtataataaaatcttattcgttaaaaccaaatatgtatgatcagagagagggagtaattgagaaagacttgattctcatcagattgaacaacgatttcggggaatttaactatttgccacttttagattgggcaattatccaaatgccccttttaagtttgcactttttttttgcccctctttatgagatgtcatcttaactatttgccgcttttgcccacgtggcatgtcaacatggcaaggaggggagaaaccgatgtggg

SEQ ID NO: 30044 - DNA, 3145 bp, Oryza sativa
gtgcatgagagggaatcttgctgtgggcagtgggcacaccaaagtgcaccccgtcagtccccgtcccggttgtatttacatgtatgggtggatggagtagggaaagtaagtaggattggagtgctagatggatcggtataccgatctgaatcattctccagaacggctttaatttgcggtgaggttgatgaggttggggggcccatttccaggtcagttttatttgtctaattatgtttatggtgttttgtcaggtctccagtggaccagttaagtgcagtacagtgctgttggctgctgctgcctgctggtggtccccattcagcaagtggaggaatggatggagtcttgttgccgcaaggggtaagggacgattgatgaatagcttctgctcactaatctgatagtggtatcagatggttgtttggatctctgaattttttttggtactcggagcaaattaaacacatgtcgttatgatgctgtatggtacaacctcatatgcctatgagatgttagacgtagaattaatgtcaataattttgttgttgagtagtactgggctactggcaattaccgttaagacatcttacataactcacacgatcagtactaatgaatcagtatagggtttaaatgaaccaggtattagtcagatattgtgcaacaatttcctagattaagtgcaaatttttgccatggtaattggtaggagtaaatactaaatttctcaggggaaaaacaacactaactccttgttaattttaccttatatgaaatcagctccgacaaaatttgaattttaaaacttaattttgaaggttttttaatcaaagcttatttttcaacattggctaggaacatatatcaaaagttttacaaacaaattcatttgctaatagtcatacggcttgcatatgcccaaccgataggggctaaatataatagctcttccgccctactatgtttgtcctagcctcctcctaggtgtcaagcaagaccaagtgaaaatctagcaatagatggaagctagtgatgcaagcgttcaagttcacactgatgattttaagcccatttcctaatagaaattataatagattattgcaaatattccttacaaatgcgaataaactttgagttactttttaagttactttttctaaggatgtgtctcaaattctcaagttgatattgcacagtagaacactttttcaaggatataatgagcaatattaactaatggtcttgctgtcatcttatcacatctttgaacacatttgaatcagttgaccttgtccttagatgtgttatatgttttcacgtgcagctcaaaaccagcatctatttaactctggttagttcaattttgaaccaatatcatctaaagagaaatgggttctcaaaaaaatctaaagagaaatggagtattacgcgagtgcgcggagcaatatacctttcctatttcctaagcacaaacatgttgggtactcgtcagttagcttcagcccagcgtgtatgctccaatcttaattaactccaacacaaagtagagtattacccatgttgtcttctgcccttaattagttgctgacatcctggaaacccatttgttttcttctgaattctgatgaagtttttctcggtactaagaaacaaatctgatctttcttgtccgcagcctggcattcacaagtttcttgtgcatgcagtagctgaatgctgaattccgacgacccacacagcttacagaatgccctcactggaaaggtagctaagctaacaacaaaacaataacagtgccagtgccagtgcagaaaatgacacaacacataagtaaaacaaacacaaaggcgctggattactagctcattgagctctgcgcctctgccccatgtgtgcgtccaaattcctgtgttgtcccaaccatgagatttgaaatgctcgctatgcttgaagtttcccggggtgaaagtgaactgtagcagtagaaatgatagagaaaagagatatgtgcttttaccagtttatcaggatttaagagtaactgtttccctggactgaagggagaaaaaggtgtgctgtcatgcgctttgcattgatagatgtctgcaatgcagcaatatacggatttttagtcttttcttcccgattaatgtagaagtttattgtctttttactccctctgtattatatatagtcaaatcatagcattccaaaaggcacttaagaagaaagacaaaggcccaaattgttagaaatttggtcataattcgacacattttaatccaaaatattaagacaataaacatgacatacacaatgagaagcaatctagtgataaggctaaacataacatatgagcatgcttaaggtaaaataagtataaacatcattgatattcacataggattgaagtcctatggataacattatgaacatgtaaataacaagaagaaaatcaaataaagttagaatgttataccagagaacggtgcagaagatgttgaggcattcgtattgcctccgttgatgttgtctcctccgttctctctagtagaagccatggtgaagcagaagcagggtgtaacaccctgaaaattcgaccaacgaaaatcaaaactctaaaactatgggccttcaaattttttttaaataaattgcatcatgccgattttattcgcccatttcattggaatttggtttcgaagtttatagatcgcgaatagagaataattgattaggaagaaaacctaaaattaaacgagcaaaataaataattgaaatataatttggaataaagattaggtgatgttggaaatgaataaaatattatcgcgaccatattagtaacaattgaattctagcgcgattgaataagaattaattctaattaatttcaaagaaaaaaattatataaaaataaaatatgggtactattaatctagagtaaatattttgattgaaataacacaagtattatgtaaacgtcatttgtggaaaattaggaattaaaggataggatttataaagaaaaggttaaattaggctagcactgttcattgcactctaggtgctcgacgaggttccctagcccttccccctcccctaccgtgcgcgcctcgcgccccgcgccgctgccgcgccg

SEQ ID NO: 30045 - DNA, 2951 bp, Oryza sativa
agtcccggtgaatgcttaaggagcaatcggttttgatctcagctcgttcgttgccgccgcccgccgcttgctcgtctttcatctggtttgggttttgatttgccgattcctatctgctgttgtgttcgtttctgaacacatgaacgaaccgtggctttctttctctaggctcatgtgcatatcacgcacaaatggtcacaaggataatgtgcacttttgatcatacactttagtatatgcatgcacagttaataatttgatttatgagatatagcatgttcaacaatttctctattgtactagttggctataatatcaactctaaaatgagatggagataagtatagccgactgtactactgaccttgctctgagggcaaaaatggaaggcagccacacccacgtttgcttagcgtgcgaggtaacgtgcaattgcggccgcgcgtgcaccacgccctcccctagtcccctcctctgcttttgcttccgaccaatcagcccaagcgctagtgttacggaagacactgaccaccacggccccacctatgtggttggagcaggtacaatagtagactattagccacctataaatatattttaatgagacaaaagatgagagaagaatagcgggctacagatctgtagccagctacagcacgaactccaagacgtaatatatgcatgacaggtgtgaccatatatattaatagtatagtaagcaactattgtatgaattggctattagattggctatagatgaattagagctagcaatgagctatactattaaacttgctcttactttctctactccacctaggagaagagccattactagctccaaataatctataactaatctaatagcccattcatacaatagttaactataaaaatatactacaccattaatacccggtcccacctctcatacacacataacgttctggactctgtgttgcagctggctacaaatctgttgcccgttttcttctctcttctctttttttctcgatagatatggttatagctggtttataggctgctattgtacctgctcttaatatatactccaaccatttcatcatttcataggggcattttatagagccattaacatattataagtcgtttgattttttcctaaccaaatattttaaaatttaaataaatttataaaaaatatattatgtattttcaacgcaaaacaaacatattatacaatgttagatttactaaaatcaatttgatattttaaattttgttaaatttttctataaactttatcgaacataacaaagtttgaataacgacgtgtagtataaaacgaagggagtaattaattaaatattaactactataaattttaaaagataaatctatttgatttttaaaacagcttttacatataattttttttcataaaaacatgtcatttagtaatttaaaaacgtgctaacagaaaacgtaatatacttactcggttcctttgatcgagttaaaaccgaatatcaccaatgtgcagactttgactatttttattttcaaaaagtacactgcatgctcaatataactatattacttatgtttcattgtaatataaaagatttttgctggtggactgtgaagggaacggggagagttagctagtctgatagtttaattagcttctgttcattttttctttaggaaaagtgttttcgttccccaagtgttcgctagctagctctcaatataatatatttaggagtacaatcgtatatatacgtaatacataaatatggttcgctagctgcgctgcgcagcccaattcggatagaatttaagcaccgaatacagttacgtaacgaaactatcgcaaagtatgaattcgaaggatagttaacagatggatcgtcactcagacattgggacatgacgtgtcggcaactagagcgagttagttacacatgtcacttaaaaaccaattatccagcttacgcactgtacccgtccacctaaattaatttacgtgtcaggtatgctgtcgcatagctgcatactactggttccctaaataaaagagagagacggagttcagaaaaaaaaaagagtgagagagtgaaattaaagagagagtatcgtgtcgttgcatatgcgtacgtgaaaatacctaacacgggtccatgcatgcatatgcatgaaactcgatcgatcgacagataacatacgcaatctcaaatctcatatactccctctagtagatgtagttgatttttttaaatatatttgatcgttcatcttattataaaatttaagtaattattaattattttttttatctcattgttaaatatacttatgtatacatatagttttatatattttacaaaaagtttttaaataagccggacgaatggtcaaatatataataaaaagttaacggtgttaaatatttagaaacggaaggagtatatacatatggaatatgtattcctacaggtgtggatattatctccacacttctttaaaaaaggatttatgtcgattggttgctaaccccacatagttgttggatttggtgaccggtatctagtaggcgacacttagttctctcgagggtgtcagtaactcaggccctgtttagttctgtagcgcccgttccgtcgtggcgcctagtgggaaaattatctcctaaaaaccctagttgcgaaatctgtttctttgcttgttgtctagtgtccgtgccatctcaagatctcaatccccgatctatcgtcgagttaaattccgaatccaaatccttccaaatcaattcctccgcaaaagtctattttgcctccccggggtcgatgggccgatttcctctcggcccatctaccccggtgcggcggaacttacttttgcggaggaattgatttggatggatttggattcggaatttaactcgacgatagatcggggattgagat

SEQ ID NO: 30046 - DNA, 3194 bp, Oryza sativa
gggtacgttgaaatttcagcacgaatggtacgtataaatgatgatgatagggcgcgctgacagatgttttgaaaaccaccgtggtatgtacgttaggccttgtttagtgccaaaaattttttttcccaaaaacatcacatcgaattttggacacatgcattgagcattaaatatagataaaatgaaaaactaattgcaagggggggaaatttagagacgaatcttttgaacctaattagtccatgattagccataagtgctacagtaacccacatatactaatgacagattaattaggctcaaaagattcgtctcgccgtttctaggcgagttatgaaattagttttttcattcgtgcccgaaaaccttttccgacatccggtcaaacgtatgatgtaacacaaaaaaaattttatttcgtgaactaaacaaggccttagtagttagggcctagctaggttcgtacacgactacaatagtatattctcctatccatagccacaattatttttaagaatcttagctgagattaatgtgttttcatgaaatctgatattactttgatgcatgtctcttagaattattacgacagacaatagtactctataaatatgtatatgggataaattttagctcataacacgccgattagctcatgaaatgaacatatccaagccatcatatcttacaattttttatttttttttaaaccccatcacttctttagctactgcagaaagtctcctaataaaattatttccctatggaaagtttatgaatataaacttttcttttgtagaaagtttgtgtgtagagaattttaatataataggcttttatctaaatggagagtttaaaaaattggacaaaaaatattgaacaaaaggtattcacgctccaatggtggcatgctgatttttcaatctgcgcatggagacgataattctgaataaatacaccctagttatatggtagttattcagtggcgcactaattacgtaatgcgtgctagcctttgccctaggtgattgggagattagcaatggaacccgatctatagacgctaaaaaaaactaaaactctctactcataaactttctacaaaataaaaatttatgctcaaactttctacatgaaaaaaaaatgtacgatgaaagtttctacagtaattaaaaatattctagtggaattttaaaaaaaattgtaagactgttaatatgatgaaacaactcagcaaatagaagttattatgatttcatctaataaagaatattctactccctccgtttcacaatgtaagttattctagcattttccacattcatattgatgctaatgaatctatacatatatacctatctagattcattagtatcaatataaatatgagaaatgttagaatgactttcattgtgaaacggaggaagtatatgtggaaacatgcgtgtaccatgggcaaaacgatcttgaaaaaatcccacatggccccactcaaacaaactaattcatccatcccataatataagatttttgaaagacaaacatatttatttaaaaaaaaggtaaaattaaatagaagaatattgtgattggatgagaagtggaagtagcagaaattgaaaggaagagaatgttgatggataagtggttatattttcgaacatctgaagtttaaaaattgttatattttgagatgaatgaagtagttactaagatggagctacacagcatgtgctaaccctaccgcgtgacccgcccacattcccgatctgtttgcatgaatcgaatcacacaaacgttcacacaatacggtttctgcactcgttggcctcctcccctcttgttttggtgcaataagttagcctagagtactactcctacaactacaacaatagctttaccaacactggattgggatgttcatatccaacacctagagctctactccctccatcccagaaagaatcatcctgaagtggatggatcactacctaatacaacaaatttgtggtagtgtcccatatatttctaagttgattctttctgaaacagagggagttctaagttgattctttctagaacggagggggtattgcatagattccacaattagatccttgttatgagtcaacattgatgtgtgtgtattggtatgcttgtcttaattagagattttactgttattgagacaataattgtaggaactaaaattttacattaaaagttttggaacctcgaattacctagtacatgaaatactaaattttatactactactagaaaacatgacacctcggtatcatattaagatgataaaatcaccctagtcttaataaattataaatttcatagaccaattttggatgaaagcatgtaactgttgaccagatctataattttataattttgtagtggacaacttttttaacttaaaaagtttagatgctcaagtaatcgtcaagtcgtttgaccttcagacaaggttaataagtaaaaaaatatttagatggtgaaacggaattatactttgcaatttatcattaaaataaactaaatattcataaaatttctaacaaaataaagtttcaaaaggaaaatactccgtaaaaaacaatttctttttcttggggtatatgtgaatgctactaacattgatatatataggtgaaacagtagatagtcttcgcgtgaaaagagctcatggattgaaatcctagaaactacgcgcgcgtgcctttattctcatttcatgccaaaagtcatatgacttgctgcataaacgacactaatcggcttcgcacctgcaataattagctttcccgtagcagtgtgtacccgattttatgtcgtgatttcacatttcctctttaattcaaatatagtcacatccaactcgtcactcaatgcatatgccaaccacaaagttagcggactagggaaccggataggattttgtaagtctcgcaagaatcatcacggtgaaagagattgcaatgagaaaaaagaacatagtgattccgattggggaaatgtaattctaaaaaatagcatattatatgtatcgcgtcatatatccgctcgatcgctctcgctagctcacgtcagctaagcagacaattgagcaagacattctacagagagcgaagtgagcatgagtataacttaaatcatcatcaccacctgcggtgattaat

SEQ ID NO: 30047 - DNA, 2941 bp, Oryza sativa
  unsure (1)..(2941): unsure at all n locations
tggcaagtactctgttgtatcaattgttctgtgagcaatcgtgttgttggagctgaaaacattcatgttgtagtttgagttagaatgctggtgattttagtttaaattgggttaacgtttatttaaaatttgccttgtctatcattttcaaaaaagaaacaggaaatagaaaacaaaataaacaaatcctcaagggcttaaatttattatacaagtagcaatggatgaggttcagggccggccctgaggcagtgcggacggtgcgaccacactgggccttcaaaaattagagacctccaaaatatgtatattacgatatcaggtctgatagacttagaggaaagacaagactaatcggtgatcgagcatatcgtgactgcttgattgtactttaaacttgttagtgtgaaattcgttaatgacaaattagattttaaatattatcttgtatttttatggtgaatgggggccttctttttttttgcaccgggccacaaaagtcaaggccggccctgatgaggttggctatgatgtttcagcctaccagttacgcgatcaaccaattgtagcagctacatgtttaatgcgtcagctatatttgcctagtgataactagttcatccatgcatgaatatctctattattttaaaagcatagtcattctccctccatcccctcccccaccatgcgcagcgagcttgcacgcgtgaagtaacatatgtacgtaaccaccggatccactgttttattttacaatcacacttacagtctatttttatttatggttctatcctattataacgtaagagcatgtagtgtttaagaaagggtgaagctattttttctaactccacaactccagcttcatatcagattggaagccttcggccttagctagatattatgctacaaataattgaatttttcatcttcaaaacagcacaaaacaagcattttttaaaatcattttgaagcatcgttttattttggtagggcaacacatgtggccatggaatggcaggccacagagatcaaaggaggcagattattggagccaaacggcaacccaactctgacgtggcaacagagctagggcggtggaagggccccacatgcgtcctcacaatgaacagtcctttgcacgnngagtacttatngnggngtntttgggggnnncccccccccccaaaaaaaaaaaccccccattttggggggggggggcccccccnnnnnnggtcgcagtaggcgtgtatccagctcattttgtatgctagataaaccataaaccactttagtatcggtagtcaagtcacnttccttcttnnnnntctactttcgagcaatctatctgtcaagctancttgagttgtattctatccgtcccataatataagaaattttaagtttccgtcccataatataagaaattttaagtttttatttatactgtttaaccactcgtcttatttaaaaaatctgtgcaaatataaaaaaaataaaagttgtgcttaaaatacttgggataataaagtaaatcaaaaaaattctaaaattttttaaataaaacgagtggtcaaacaatacaagtaaaaactcaaaatcccttatattatgagacggagggagtaagttgtaacataatccaactgggcgttcgtttgagcgtaaaggttttgatttttttgctagtaatacgagatgaatcattaactcataactaattaacaattaattattaaatattttgaaaagtgatttaatttaaataaaatcactttgaaaaacttctatatagaaagattttgaagtagcttggcgtgaactaaacttcataatatataatttgcatgttattaaactctataaatttctataaatgatatcaaagatagaaatatttaacttaaaaggaaactggagtaacaaataacttaaaacaagagagtatgatagtatttttaagacaaatctcccccgtgtcatttctttctttttaagcctagctagcatttgatagaatatcgacgaataaagcttcaaaagtttgaatcaaatatttctcaatagaggtgtgtaattgttccaggcttcgggacagtctggacgagacttcaatttcctaccggataagtctattttacctccctctatcttgatcctgattaagtcgcatccctcaaaaacaaattgtataacacatatcccatctttaaaaaccagtgcaaatagactccttcgacgatttggaaagcagtttctcctgacgtggtaggttacccatggttaactcgctgaatcagcaagtgggtcccacatgtcagtgacttccaccttatcccatcttcttcctcacctctccatctctctttctttcctttcttactcctctcccaccttccattagtaacaaaggctgggcggcagcgacggtaccaatctttgtagctcgtaggggagtagcttgccagtcggctgcgcgcggaaggaggagctcatcgaccaagtacacaagcggggaggacctggcctgtcgggcacgcacaggggaggtttcactagccgcaacttgcgcagggaggagcttgttggccggtcgcgctaggagggaggacttgctggctggcagcatgtgaggggaggagacgtcggccggccgtgcgcggatggggggaagctcgttgtgtcctccaccaccttaacgggggcggtcaaaaaaccaatccgcggcaccaccactgtgtccgctaactcccttcagtgtcgaggcctcgttgccaccgagcgtcgcctcctcgtgcgagtcaactcgccaagacgaccatcgtcgcttctgcatgagtaaactcagccagtgtgtggtggttgtggatgtgtttggcggcggcttcctctctctccctcaaaggcctctcaacgacgacgatatttaccaattggggca

SEQ ID NO: 30048 - DNA, 1393 bp, Oryza sativa
cttttaattttattatgtttattttgaattttagttagttttaaattcctatatagactatgtactctacttctaatattccttattttttaattctgaatttctatttttttttcttaattgtatttctatatggactctatactctacttctaacattccttatttttaattccgaatttgtattatttcctaattgtatttctatatggactttatagtatacttctaatattccttatttttaattccgaatttcagttatttcctaattgtatttctatatggactctagtctcctcttctaatattccttattttttaattccgaatttcaactatttctaaattgtatttctatatggactctagtctcctcttctaatattccttattttttaattccgaatttcagctatttctaaattgtatttttatatggactctgccttttctttttctccgattaatgtgagaatttctagaccatgagagcgaatgtggaggcttctttttctattcctttaataatataactagctgggtggcccgcgcaattgcgcggctagcacccaaacaaaatcatatatttttttagtatgattttacttaaaatttattaatagctatctcattgtcttaagactttgaaagactaaaccttatcatccttgtgtttctaattatatattttttaaaagtcacaccagttgctaccccttatatcatctccttctttatttgcttgcttgatctaccactatttttattcattcttcttggaacctttaaaaattggattttgtagtttttagagtttattgtcatgttgggttttatttttataatttctagatgtcccgtcaaacgttgccattatactcctctacgggccatccattgtctctaccctttattgttattgagattttaaaaatcgaacataattatcgtttgggttcatttttactttctagaagtcctgccaaaccgtcagtagctttgccattgtcctcctctacggctcgcctgctgcctaccttctttattgtcattgagattttaaaatcgaacataactatcgttggaattcattctttattgtcattgagattttaaaatcgaacataacttatagtttcattttttataatttttagaagtcctatcaaacgatgccactatgcccctctacagcatgttcgccacctacttctttattgtcattgtgattctaaaaatcgaacataactatcgttggaattcattttttattttctagaagtcccgtcaaccgtcggtggctctgcaactatactcttatacaccccgctcgctgcttctcctttttattatcattgagattttaaaaatcgaatacgattatcaatac

SEQ ID NO: 30049 - DNA, 1815 bp, Oryza sativa
agctttgcttgcctttgtcctggtgtaagtctagcatagcaagccgcttcaaaaaatattttcgtgctaaataaattcattgaataattttaaaattttaattttgaactatatatgtcattagaaaaagaaaactcctggttttaagtcgatactatttgagctttcttcctgttccaaaacttaaaccgatgtaagggtacaatttgtaggattgtatctttttcaaaacaatttattaccaccaccgtgagtgtggaacatgtattcaatacccatgcaaatgtaccattattaaacaaatgtaccattataagaatgtttgctaggagggcgtggctttactgaagggtgaaagaaatataagcacagggtgtaagaatttatattagcatatcaacgagatgtgccaaaagctagcaagatgtagcttgcactcaagtattatttagccacaagttgcagtcaacaattctactgtgtttgtccaatattttgtcagtccacatccaacaattctattctattgtgcagctacagttccttgtattattctttagtaatcatgactgattaactgttgaggtttctaatgcatcatcatataaaaaaacactaacattttttttcataatttataactttttgtgagggcagttccatatcatgagtaaaaattacaataaaagcaggctcttgttaattgatcgtataagagtgctcagtgggaaaagacactttatccaaaaaaaaaaggaagaataacaagcagtttaaatcattttgtttttcctcaaaaaaattagagtaaatttcacaaaactacatatactttacaaaattatcacaaaactacaaatttaaggtgtattacaaaactacagatttagaaataattttatcaaagaactacaaatttaagatggataatcaccaaactacagatttagttttaaaattatcacaaaactatatgttttataccatgttaagtgcaaatttacaacatttataaaactctataacattagtggtaagtatttaaactataaaatctataattttgtgataactctagtattaaatctatagttttgtgatattttactttaaatcagtagttttgtgaaaagcctcgtgttaaatttgtagttttatgagactgtcttaaatatgtagttttacaataatttggtcaaaatacctgtagttttgtgaaattttactcaaaaaaattatcatttgctccaacagctagatagtcaaaagttttacttgtttcaaattgataggtcaattaccaatagagcaaaactcattagatgccaccaagactaagcatatggactggatgccatagaacagactaagggagtgtttgaggagaaggggattgaggagattgggaagatacgcaaaatgaggtgagccattagctcatgattaattgagtattaactattttaaattttaaaaatggattaatatgattttttaaagcaacttttctatagaaattttttgcaaaaaacgcaccgtttagtagtttgaaaagcgtgcgcgcagaaaacaagagccaatctccccttatcaccccttatcacccctaaacgaacgatgcctaaatggctctgtttttgtcatacatgtaataggattgtacagcacaactacaaatcagtgtacaaatgatgatatgctaaatcgcttctgatgtggctaaaaactaaaatggcgtgaattcatggcaagtgaaaaaaattcccactgggtgctaaggataagacttccctaactttgtaccactgacatgtg

SEQ ID NO: 30050 - DNA, 2263 bp, Oryza sativa
taaaaataagcaatattgaaagaaatttccatgtaagaacccaatacgagattaatcaaaattcaaaataaaaataaaataaaatccaaaattagaaaaggaagggagagtccaagtaggaatacaatttaaaaatagttgaaattcggaattaaaaacaagcaatattgaaagaagtttccatataagaacccaatacgagattaatcaaaattagaaataaaaataaaataaaatccaaaattagaaaaggaaatgagagtccaagtaggaatacaatttaaaaatagctgaaattcggtattaaaaataaggaacattaaaagaagagttcatataagaacccaatacgagattaattaaaatttggaataaaaataaactaagtaacaggcctataaaggagtagagtggtggcggttgatacgacatataaaaattgttaataaaacatcaaatagaatcctaatgacgattaaaaaggagggacgtcaggcagcccgtgaagcaaacgagtaaggcggttgccgggacttcttagacagtaaaaaaacaaaccgcattgataatcgtattcgatttttaaaatctcaatgataataaaaaggagaagcagcgggcggagtgtataagagtatagttgcagagccaccgacgtttgacgggacttctagaaaataaaaaatgaattccaacgatagttatgttcgatttttagaatcacaatgacaataaaaaagtaggcggcgaacatgctgtagaggggcatagtggcatcgtttgataggacttctaaaaattttaaaaaatgaaactacaagttatgttcgattttaaaatctcaatgacaataaagaatgaattacaatgatagttatgttcgattttaaaatctcaatgacaataaagaaggtaggcagcgggcgagccgtagaggagtacaatggcaaagctattgacggtttggcaggacttctagaaagtaaaaatgaacctaaacgataattatgttcgatttttaaaatctcaataacaataaagagtagagacaatggatggcccgcagaggagtataatggcaacgtttgacgggatatctagaaattataaaaatgaaacccaacatgacaataaactctaaaaactacaaaatccaatttttaaaggttccaagaagaatgaataaaaatagtggtagatcgagcaagcaaataaagaaggagatgacataagggggtagcaactggtgtgacttttaaaaactatataattagaaacacgaggatgataaggtttggtctttcaaagtcttaagacaatgagatagctattaataaattttaagtaaaatcatactaaaaaaatatatgattttgtttgggtgctagccgcgcaattgcgcgggccacccagctagttatattattaaaggaatagaaaaagaagcctccacattcgctctcatggtctagaaattctcacattaatcggagaaaaagaaaaggcagagtccatataaaaatacaatttagaaatagctgaaattcggaattaaaaaataaggaatattagaagaggagactagagtccatatagaaatacaatttagaaatagttgaaattcggaattaaaaaataaggaatattagaagaggagactagagtccatatagaaatacaattaggaaataactgaaattcggaattaaaaataaggaatattagaagtagactataaagtccatatagaaatacaattaggaaataatacaaattcggaattaaaaataaggaatgttagaagtagagtatagagtccatatagaaatacaattaagaaaaaaaaatagaaattcagaattaaaaaataaggaatattagaagtagagtacatagtctatataggaatttaaaactaactaaaattcaaaataaacataataaaattaaaagtagagttttgtcacgccccgaactagccccgaacggaactagcccgtgacgctccaaattaacctgttaatcgataccagtcccaggaaacagtgctggtatcacaggaagacataatatcacagcaacagaggtctctttattacagagtaggagtacagtcatgttgggctgcggacagatcccgagctcacaactgcattacaaaagggaaagcggaagccaagacttggaccattcatcacaggcgcgacttgggaactaggccgaaaccctaaaactcatcggtagccgacttgctcctggaaga

SEQ ID NO: 30051 - DNA, 2053 bp, Oryza sativa
cccccacagattgttgccgccgccccctcagattggcgctgacttggaccccctcaaagcgctgccgccgccgccctccaccacaacgagtgggcgccggcggggcagtgcttgacgccgccgccgccgtcccctcagctcgccgccaccgccgcccccttagctagccgccgccgcacgcgtaggtcgtcgccgccgctgcacgcacgagtgagagagaggtgagactgtgagagtcacgcacgattgagagagagagagagagtcaaaatagggtttggagggtattttcgtcattaggaactcttgaaacattttcttttttaaaaaaaatcaaaccctaatggagtcatcaaaagagggtcagacggaagcttcgtactcgaaaaagagggtcaaataagcaaagttcaaaaagtagggccaaatcggcaattacagttcaaaacagggtcaaataagcaattgtcccatatatatttgtataaatccgtatgtcacttactatagactcgagtaaaggcaggttctaatttaggttgagaaaaaacagtacacaagattatagtgcttgtattatcatgcaaagaaaaaaaaatgatggcactaagagttatgtcactttggtttgctagttttggttaagcatgttcattaatattactgtacaccgttgctgctactgtcctgtctacatgcatatgactctgctgattcctaagaatgataattaattactaaatattcatcttaattatctattgtttactggtggtctggtgcatggggcatgcaatagaatcagcagattgggggtaattaagcaggtgctatgccttgatgcatggcttgaacccgggcacttgcccatcctagccgggcctcggctccgccagtgcttctaatatatactcatatattaatattgacgcaagtaaatatttctaatatgataaattataaatcaatcagtttgcaagttgcaatatagtaatttattcttgataaataataacgataatataattgacaaatgttttgtgagcacccgacaaatgttttgtaggtaacattgcaaaaactgaaatagtgaaattgcaaagtaaattatacaacaataaccatgaattgaaatgatgaaaattggtatatagtgaactaattgattagcacaccgccctctggcctaggccctacgcaattgcacaaccaacctaggcccagggccggccctgagtaaactaaaaaacttgatcaagtggcataagcggaggtaataatagcaataccttcccgctcatatttgctatctcactaatagtagtgatacatgtgaaaacacacaaaagcatggtctgcaagccactgatgcacaatcatcctagttggctctatgaacatccttgacacataatatgtgcacccctcacgaagtaggggatgtaaacgatccacttggttatcataaacaatagcagcaatctttgtaccctatttataatagataaagtcaaatgctatacagatatcattgcagtgtaacatattaaagcataaaatatatagtaaatagggtatatagtgaacaaattgattagcacaccttcaacagttcagcttcaagagtcaacctcgctctccctggcgtgcgcttaggactcgcacctatgctgggggtgggccccctctagcctgggccataggcggttgcacaaccggcctatgcctagggtcggccctgagtaaactaaaaaacttgatcaagtggtataagcggaggtaataagcaatgtcttctcgctcatgtttgatatctcactaatagtagtgatacatgtgaaaacacacacaaaagcatggtctacaaatcactggtgcacaatcatcctagctggctctatggacatccttgacacataatatgtgcatccctcatgaagtagggaatgtaaacgatccacttggttatcataaacaatagcagccatctttgtaccctatttacaatagataaagtcaaatgctctacatatatcattgcagtgtaacatat

SEQ ID NO: 30052 - DNA, 1639 bp, Oryza sativa
cggcgtcatacattaaaatacggagggagtataatttactttaatatttcactaatcaaactttacatatatataatatgtttgtttcatatcaaaagtattaatatttttttaaaaaatattaaatttgaataagtttaattaaaaaattaaaacaacttaacataggaagttaacaaggaagtagttaactgaacaattcaaaaggagtgtctaaccgtatatacattgcaggagtaattcaatactccctccatttcaaaataagttatgtcacatgtccaaatttttagtattataatatgttacatttcgtattagattaacttattctggaatggatgtagtggataaatactaccacctccatcccagaatataagaatttttagggttgaacacgtttattaagaaagttggtagaatcaaataaaagaagatcgtgatgggatgaaaagtgaagatagaatggttgtgattggttggaaagataatgttgataaaaaagttattatattttatgaaaaatccaaaagcctaaaagttgttatattttggatggagtgagtacatctctattctccatttcataattcaatgacgagataaataggtaaaaaacattatattttactatagaggtagtatcgtacagttcatccggataacacgtctcttgttacaattactactattagagcaaatttaatagaatagccaactattgactccaaatcatctatagttaattttataatcaattcatgcaatagttacctgtaaacatacaccacacaattaatactggtctcacttgtcatatacacatatattttagagtctgtgctgtagctagctataaatttataaatttatagtccgctacttttctctattcttttttattttttcgaaatatgtttataggttggttatactactctgctactgtaactgctcttaaccgctgtgaagaagccgccaaaagcaggggtacgtacttgccttctgcggtccctgccacagcggcgcaatgagtctgaaatgtctccagctttaactgagccacgccatactcatctctcgatcgatcatcagtgtcacagcgtcgcagtacaattgcaaaaccccaccgcatgtgattgttcaaccaggctgctgcagggccagcttggttcgtgttcgctcgggcgacagcttttgacagtgttgctgcacttgttgatcctttctcatcaataacaattattgattcagctgaacaacagtagatcaatggatacccaaagattggtctgcattgacgatggagtaaacaggagtactctatatcaaaagttcagggtaacccatgttacctaataaatcaaaacggtttattaggaaataaaacttaatttatagttaaaacttttatatatttgttcgtagcgatttaaaagctaacgctaaaaaaattatgttaaattttttttaaaattaagtttaaaatttcaaattttggcttttgttgatatttttttcaacaaggcgtttagattgtggacgagcgcgacagaaaaaccgctatgcagggctcggccgtggcccaggcttgtcacagcatgctggggcatgtctgaggctctgagcagagagg

SEQ ID NO: 30053 - DNA, 2466 bp, Oryza sativa
attcctgcagcccaataatatgaaaaaaactcatctagagcagcttattagattataataatctagtttatagattataataatctgctataataatctacttatttatttcagcttacttttaataagctagattataataatcctaagatgaatcaaacagtgccttagattgtttaccaagtgaaaggtttaatactccaagaaaaaagttaaaggtgctaggagattcatcttgaagaaggaaattaaataaaatgcatggaatctatcgcgatattttagccacgagaacaagattgattgatccaatttaagccgcacggagtatatatatagagataaaccgattactttccacggttatgcctttttgtcattacccacttctttttttaatttttcttttgaaaacatcaaactaaaaacaatgaaatgatggagaaatagaccctacgtaccaactaatgatcattgtgttatatattgcgaataattacgctcttattataagaaaatcaatgcccttttgttctctttgtaccaccctatctagcttaattaggttattactcatttaactcgtcctatttttacaaagatgtacaatttgtcctatatatgtcctattgtcatatgtatacactatcttttccacctctttgtcatcgatttttattccccttcttttcccgggaattatatatcttttgtttatttctgggtattaattcaatttcttttgttttgtttgtgtggcagctggcgtgtaaaaacacctgccacaaacaaggccacataatgttctcttcagggagggagatgattaagattaaagcaccagttccaatcagtacggctagctgcttaattatagcttgtgctaataagatcagacaggtaccgagtgtcatatctgtccatctttttatctacctgatgacgccgtcactatctactactccctccctcctataatataaaaaaaattaactttttcttacactgtttaaccactcgtcttattcaaaaatttatgcaaatataaaaaatgaaaagttgtacttaaagtactttggataataaagtaagtcacaaataaaataaataataattttaattttttttaataagacgaatggtcaaatagtgcaagaaaaagtcaaaatcccctatattatggacggagggagtacgtacttcgttcgtctcaaaatataaacaattttaacggaataaaatacatccgacactaatactataaatatgaacatgttacaagtctaggtagttttacgaatatgaaaagttaaaaattgaactaaccaatgtatgacattgcttagttcaaatttgcactatctactacgaagtactatcctttttctatatgacaacgtatgaaagtaaatataggtagtatttaataaattgagttttggtattgaataaattttacaaaactacatgtattttgtacaatttatcacgaaattacagattcagtgtctccgtttatcacaaaactatatatgctttgtacaatctatcagaaaattacatatttaaaaacttatttcataaaactatagattttatatagtatatgtagttttataaaatttactctttagtatttattatcggacattttctggctaatcatataatatgttgtacggttaggtagccggagtagctaacactaatttttgatatccaatcaaatcaacctctgatcccaagttcccaacatctgaaaaaaaagtaccccctctgatcccatcgattaagccgcaaatgaaagagtttgcatgcatcgatgcaccgaaactatttaggccctgattagtttccgtaattttttttatccaatcatattaaatatttggacacacacacacacacacatatatatatatatatatatatatatatatatatatatatatatatatatatatatatatatatatatagtattaaatatcgatctacagtatggagaagggacacatatatagagtattaaatatagatctacagcatggatagggcagatcagcagctaatattagcttgtgagtatttgttaatttaatttgatataatcgatcacgagaggtgattattaattaattagattggatacacaacaacgtaccgtacctacttaattaattaagagtagcaagcaaaggcattgaatgcatgggtgcaattttcatattgcatggttgggcgacccccccacattgcgggagagcacgtgcattcctatggtccatacaaactactattactacacacatctccatctttctatcatatcgcgccacgtagccagccaatagcggatctaggaagaaataacaggagagtacgaaaaaattagataaaactacaaccccttcctatttactaaaaacaaaaaattttaataaatgcttcgtgaggactctcata

SEQ ID NO: 30054 - DNA, 2701 bp, Oryza sativa
cgagtgtcatatctgtccatctttttatctacctgatgacgccgtcactatctactactccctccctcctataatataaaaaaaattaactttttcttacactgtttaaccactcgtcttattcaaaaatttatgcaaatataaaaaatgaaaagttgtacttaaagtactttggataataaagtaagtcacaaataaaataaataataattttaattttttttaataagacgaatggtcaaatagtgcaagaaaaagtcaaaatccctatattatgggacggagggagtacgtacttcgttcgtctcaaaatataaacaattttaacggaataaaatacatccgacactaatactataaatatgaacatgttacaagtctaggtagttttacgaatatgaaaagttaaaaattgaactaaccaatgtatgacattgcttagttcaaatttgcactatctactacgaagtactatcctttttctatatgacaacgtatgaaagtaaatataggtagtatttaataaattgagttttggtattgaataaattttacaaaactacatgtattttgtacaatttatcacgaaattacagattcagtgtctccgtttatcacaaaactatatatgctttgtacaatctatcagaaaattacatatttaaaaacttatttcataaaactatagattttatatagtatatgtagttttataaaatttactctttagtatttattatcggacattttctggctaatcatataatatgttgtacggttaggtagccggagtagctaacactaatttttgatatccaatcaaatcaacctctgatcccaagttcccaacatctgaaaaaaaagtaccccctctgatcccatcgattaagccgcaaatgaaagagtttgcatgcatcgatgcaccgaaactatttaggccctgattagtttccgtaattttttttatccaatcatattaaatatttggacacacacacacacacacatatatatatatatatatatatagtattaaatatcgatctacagtatggagaagggacacatatatagagtattaaatatagatctacagcatggatagggcagatcagcagctaatattagcttgtgagtatttgttaatttaatttgatataatcgatcacgagaggtgattattaattaattagattggatacacaacaacgtaccgtacctacttaattaattaagagtagcaagcaaaggcattgaatgcatgggtgcaattttcatattgcatggtttggcgacccccccacattgcaagagagcacgtgcattcctatggtccatacaaactactattactacacacatctccatctttctatcatatcgtgccacgtagccagcccatagcggatctaggaagaaataacaggagagtacgaaaaaattagataaaactacaaccccttcctatttactaaaaacaaaaaattttaataaatgcttcgtgaggactctcatagttctcacaccaatagtggaggctggagaccccgtcgcccctgcagccagctactgatcacatatacgaaatatatgtatttatatattcaccaaggttttaaatctctgactattagtcactatctctagtactccctccatttcgaaatgtttgacgccgttgactttttaacacatgtttgaccgttcgtcttattcaaaaaatttaagtaattattaattattttcctatcatttgattcattgttaaatatatttttatgtaggcatataattttacatatttcacaaaagtttttgaataagacgaacggtcaaatatgtgctaaaaaataaacggtgtcaaacatttcaaaacggagggagtagtagtttaaggagagtagctatttgcatgctctcatgtataatttagatattattagacactgtaacctcatttagccgctattaactgtttgaaagggtctatacttaaatgttttagctcactatttaaaaccgggatatccacaccaatgtatgcatatgtattttgtacaggaaaaaaagcactggctctaaacctcatcgtaaattacaaaaataaaaacctacaaaaaaagaaaaagggaaaaatatactgtagtactttgtggttcggagaataaaattccaaccctgcgtgacctcattggaagctgacgaactctctctaaccaacagaaggcccacgggaatcccggcctagttctttccaggcccagataaactaaaccgagtttgggccaagatcttggggtggaattgggcccagaaagagcccaaaccattcaaactcgcgaatttaaataaccaaacaaatttagaaagacttttgaaacttcggagtagctatgaattgaagtaacctacgtgtcatgcaattgacaagttcgatgcaaatttgttgaacctattttttttcctttttttttttcaaaaaacgtacatcgtgtcccgtgttaaaaaatctacaattccaatcacggaatcacccccttaaacttgttagcaaacacgaaaaacaaaacagaaaaaaaaaataagcaggagttggagtttaaatctctgaaccctatccatgacctcatttgagaaggcccacgtcttgtatagtttaaccccatccacggttaaggataatgacttcaaacatggccag

SEQ ID NO: 30055 - DNA, 1298 bp, Oryza sativa
tttattatgtcactaatttctactaatcttgtttttatcacatatttttttgtcagagagctcttccactttattgttcaaaacaatataatatcaggaaatatttgatagccatgatgcaaagcaaatattactccgtggtccgctaatttatcaggtttgccggttcaaaattggtgtatgagaattccaatctttggttgaagaaaaaaactctcttcaggatttgtacggtttcctgccgatcaaagttattacaacaggggtttctcaaaaaaaaaagttgttacaacagggaaaaaaagggacacagtacagaattccttacatgtgactgttcatcctaatgtttgcatgagtgcaacaaaaactagcattcatgagcccatatccttgataacgattatctaaaaaaaatatccttgataacgactgagaaaattgactgacagcaaaagtggagaatattttaattttttttactggttgatccaagctagcccattcaactcaaaagctattccttaaatgatgaagatttcctttaaataaaagttgaagtgatggaagcactaaatcccattcatcacaagaaaaataatgcttctatatgtgttgcacaaaatgcatgtttttggcaactagcaaactagagtgagtgctctatcacctgcaatacagatatataatagctgatacttaatgttgacttaccctaaaagtgacaacttgcaaaagtgctccattgatctatatatttatgtgcatgatttttacgatgataagtactacctccatcccagaatacttgtcaaaagttttcctattttaccctcaataaccattccacttctcatcatatattatttaataaggggtattatagacttttgtattaaaccttaatagtatattctaaacaaattgtgggatggagggagtatataagaaaagaatgatggaacatatgaagtgcgaaaagaaatctgatagtaatttctgaatcgattgtggggttgacaaaacatttcgacatacttgacattttagcatttttttttccgaatcgattgttgggttgacaaaaccacgagctacttgcagaaaggccacaaatcgcatcagcatgcttacttgcttaagtactgatggattacaggtagatgccatggtagtgctgagaaaatgccaacttttcccttttttttcacttttcactttatgcacagaaataaatctactttcgcaattgcagtgcctaaagaaatgtaggaagctgtcattttcgggctgcagga

SEQ ID NO: 30056 - DNA, 3029 bp, Oryza sativa
ccatctgtaccgccgctattgtctcttttagtccaggttggtaacatcaaccgggactaaagatcccctctctttagtcacggttggtagtaccaaccgggactaaagatgaatatctttagtcccggatccgtactcccggttggaaaaccgggattaaagggggttcccaaccgggagtaaagatggtttctccaccagtgacatgtgcatgcagtgcagtgtgataccgaaaccttttttcaggaaaatgtgtagttttcatgaataaatctcagatgtatatttttttatttaatggtagatatctgcaggacatatatagcagacttttctatcttttttttatttcgtgttgaatggaagtcaagtactactctctccgtttcacaatgtaagtcattctatcattttccacattcatattgatattaatgaatatagatagatatatgtgaaacggaggaagtagtttacaattgttaaaaaaacgcgtctaacaatcgtgaaccctaaagaaaaggttcttgaaaaaaaccctaaagaaaaggaagtcgcgtgggggtcacatcaaaattgaacagaactttgtaaaaaatggtgttaattactactccctccgtcccaaaaaaaggcaaaccctgggtttccgtgtccaactttgactgtccgtcttatacgaaatttttttataattcgtattttacttgttgttagatgataaaatatgattaatattttatgcgtgacttgtctttttaattttttttcatatttttttcaaataagacggacggtcaaacgttgggcacggaaaccagggtttgtcttttttttgggacggagggagtatgttgcacgaatgatgacatgcatctaacatgagtagttgtaacatctatttttaatgtgttggaatttagaacatgctactatgtctgtttcatattataagtcatattaattttttttctaaattaaatatttctaagtttaaccaaatttatagaaaaatatagtaacatttataatatcaaattagttttataattcttataattttcagagtatatttattttgttttaaaaatattgctatatttttcggtagatttagtcaaacttaaaaaaatgacttataatgtgtgatttatgatatgaaacagaaagagtcctaaactatttgaaacatatagtaggaatggcttatcttttgtgttactgcgtatttctttgtaaagaccagctaactcaagacagcgttgtacgtacttatatcaggagtaaattaattcatatggccaagtggttaattattaaaaaaaccattgcaggcaggcaacaggcattgacggcattgaaattaattataattaatataatcaagactgattaaggcagttcgtatgtattcttgctaatatttttgcgcctcacatgctgtacatttttatctcgtccaaaatccctattattgatgtacacttctgcaggtacgcatggtcaattcatcaggattcaggacgaagtgctctttgattaatttctctccttcaagatttcctgggtgatcagtcaccaagttaaatagtaaggacatatttcaaatcttttgctcatatatgtgtactggggacgacgacctattgagaaggagcgaatgtgagattgtgagaggtgctccactatggattatggaaagacaagatttggataagcccgacatgcttttgatgcaggctgcagggacagaacagccgggagggtccattatgcatgcaatgtcagtttggactggaatcggtcgtacattaattactccttccgtctctctccgttttaaaataaacacataatatgatatatttagtaatcataaatctggacagcattagaatatgcatacacccctaataagttgtacaacattctagcggtagctcttaaatcatataatatatataggtgttattagaagataaaatattgaatctgatggttgcgtacttaaaatattggaactgatggttgcgtacttactctacatgtgtgtgggcatgatggaaggaggggcagaatcaagaaagaagaacaactccgcttttaagatagtagagaaataaatttattttcaattagtcaaacacatattaagaaaaaaagttaaaagaataccttgcttttattaatatggagagaaaatgttaaaagactagtatatttttaataaaaactaaaactatacttattaggaaggaggaagaagcttattactattacaacaatcgtcacattttctttctcttgaaggcaaatttgcatcagaacctcaattatattataatatatattgttcacgtgaaatcccagaaaaagaataaattcagcgaaaaacatgtgagagttttatttcctgcaggagattgtgatatcaatccccagctgctagctactccccccgtttcacgatgtaagactttctaacattgcccatatacatatagatgttaatgaatctaaacacatatatatgttcagattacttaacatcaaaaataaatatgaacaatactaaaaagtcttacattgtgaaacggagaaagtacttggttaatttgagatgaacatattgcaaggtgtgagagtgagacgaaagcgaaaaggagacacgaacaagtccagcagcatcaggatgtgtatagtagataggagtatactataggagactatagagtgagatgagttcacatattacgtgggcaggggatgagttacgtgtgcacacgtgcgcctctcatgcaaaatgcaaactgcatctgccatgcactccaacgatccatctgatatgaatatgatgcctccacctacgtacatctccggatcttctctgcctacaattacaacgtacgttgaaggggttttttttcgcttgtttagatcgatgatattttcgaacattctatttgctaaaattgatagttaaatggctacatttagtttgttatcaaatattgacaacgtgtacgaaa

SEQ ID NO: 30057 - DNA, 2863 bp, Oryza sativa
aaaaaaaaaagatctgctccagatgctgcaacatagatccatgtaccagacggccacgacagtgtggggagaggaaggtagcgagcaacacgaaggaagaaataaactgtgcaggaggaggacatgcaccttgttgggggatgatgtgcacttattggcggcggtggtgcaggtggggaggagatccgatggcgacggatcggagtagcggccgaagacgcggcgatgagatcgagtttccggacggcgcgacttgggaggcgctgctcgcggcggggaaggggacgaggagacctccgggagattaattcctttttgttgagacgagactcgagacgaatcggatattgcttagggcaaattccagacggaattttgttaggattcgttgattccaattccacgtgaagccaaacaggttcaccctcccgtttccaattccaatcgataaccacggtacaacgggacatttaacttttttttttgccactttttaaaagtgacaattaagaatttatcgggatatttaactttttgccacttttaggatgtagcagttacttcctccgtttcaagttatacggagtaagattctgtgtcaggattcattaacatatatatgaatgtgggcaatgctagaaagtcttataacctaaaatagatgtagtaattatttgtcactcattgtttatgacatgtgggctattatgtatctatgacacgtgggtccagtggtaaatcctttatcaccatccgtaagagtgtcaaataattaatttttttgaatttgccactcgatgtctatggcacctgggccctcatgtgtctatgacacgtgagtccagtggtaaatcctttatcaccatccgtaagagtgtcaaataactaatttttctgaattgccactcgctgtctatggcatgtgggccctcatgtgtctatggcatgtgggtccagtgacaaattatttatcaccacctgtaagagcgacaaatagttaattactcccggtataataactagcaaagtgccatgtgttgttacgggaaaagctgtaccaaatcctaactcgctattttttttttgagaaaaggagggaaactcccccgttttcattaaagaaaatgcaaatgattacaagagttccagagaggaaaaaaaatatcaagttcttacagaaaagacgaggaaaacaaacagttataacaggactagaacattggaatttcaagcatcaaaacacaggtttccatcgtcgtcttcaaaactccttgccattagttttagcctgcttctgtttcccatcctattctttgtctgccgcccctccatccaaattttgagtgaaagatctcatttgctacctgccttagtagctgcgccccccactgcattcttcctctgtcttcctccttgctctgcaaaatactccaagagtttaaatttgagcaaatgttgtaaattatttctataggatcaacaggcagaattccatcaaagcaggctctgtttcttgctttccaaatggtccacaagactgctgtagcccccatcatgatcaacttcccattctctttgccaaatttcaaaacccaggagctaaacatttcccccacattcctgccaggcttcacattgagagcgcattcaacaacactcaaaaaaaaaaatcctaactcgctagagaaacgagaaaattgaataatactacgataaaaataaatgagaatcggattgacgaggatggacatatattattgtttaaattcagactcaaaattagtaagaaacatatcctatacacgtaagtttctcgtgcacaccaactaacaaaatgtcaaaaaaaaaatctacaaaaagttggacatttacttgtagtaatattacacatatatacaaagtctcatattcaaattcattatattttagccataaaaaagtgaaaattttaacagttttaagggtaaaattatgtcggaattttaccttgttacggttaagatacaatgaatatgtgtaatactattcgaagtacgtgttcattttttttttctaaaatttcctatgagatttgctagttgggtgcacgggaaacttgcgtgcacaatatatgttcccaaattagtaactacaccacatttagctacttacatcaaactacgcataaaatatcaatagtcaaatcaataccgataattgatcctgaaacgcaagttagagctattgatttttctgaatttatggacctctgtcatatgtatgatggtagtcacggatggaccatcgacagaagaatctcttatattattaaaacaattttaaaagaaacattcgatccgtttacaatctaaatagggcctcgtatagaaaaatctgtaattagtagatgagtttaattcaggagatgttcagttgtactgctaacatttgggtgacaaatctgaatcacgtaattgttgagccgtatgtcatgaacatgatgagcacgttggatctgaaccagccatgggctcatttgggagccaaaggaaaaagggttaattggatccatgccactgcaaatatggcaaatcaaaaaaatgccactactattcacgttatcggctgggtgccactgaaattttgcaaaattcgagctatgccactccgtcacagcaactgccaatacctccgttagctctgttattgcagatccctttcttctccaactcaggtaaaaatctgggggcgctcaggctcatcgacgacggggcagagagggcttctccggtgagggtggaggggagcgccgagcgcccccgcgctggaggaggggcggtgacgagcaggtcggcgaggaactgctgcagctccacgctcgagc

SEQ ID NO: 30058 - DNA, 1530 bp, Oryza sativa
cacaagagagttcttgaaaagttaagagcacatcaatgagtctaggacatttcactgttagaatgcagatttcttgacatttttgtcatggctaagtttgctatactagcacaatttattttatgatttgtattgtggtgctgcaagccggcaacagtagtggagaaccactgaaatcaacttgaaagtaacaaaatggcatgcagctgaatgcagcgagtgtgacttgagagctagttcagacatcgttttttttttcatggaatcactgcaccagtcgatcgaggccgcactctgacttatctgcatttgttcgtggaagtcagacatgcatttttgatgaacttctgcaattataactattactgttagaaattagaaatgtgcatgattctgaattctaatgagtgatgacagtaactgaatgttctgagttctgaatcactggacccgatcgattagcaatccacggcagctagttctgtaaactgggtcgattgaatcactggatcctcctaattgtgtaaaaactcacagcttgaaaggattggacagatttgttttgtttgcagcagcgatcagaagttcagaactctgcattttgtatatgagcaattctatggttcttgaggaggtactatgagataccaaaattttagtgtaaaattttggtactttatggtacctcgtagtacctaggtatcaagaggtaccaaatttgcaatagaaaaaatggtacctccttaataaccgtaaaattgctctttgtatataagatttgcagagtccactgaaatgcaatcccgaacctgcgccgcgtcatttgagcaaattctgtaccacgaaatctgctgcactcactccctgtggtcgggcccacccgtcattgactacggttgaccaaagttgaaacggggacccacctgtcagagagcgacctgcgtcttctcgcgacgccttcaaatgccaccgcctccctcggctaacaaactcttccacggctacttgcctctctcgtcttcctccccacgccacgccaccgaggagtagccactcgccgccgcgcgcgcgctctcgccacgccgcgctctcgcctcgccaccgcgcgtgcatcgatcgctcgcggcgctcgccatggcgtggagacgtgggacgtcgcgcgggtatcgggtggggatggaggttttcgacgacgtggtgttcgcgcggctgcggagccatgtgtacggctcgtacctccacgccgacgaggacgggaggtccgtctaccacggcagcctccgcggcggcgcctcgcagcacaacgcggtgtgggccgtggaggagttgctcgtacctgctcttccgtggaggagttccgcggaggaggaggaggccgccacgcggtacctgctcctccgcagcgcctacggccggtacctcggcgccaccgacgcggcccccggcgaggccgcccgcaacgccaccgcccgcgccgccgccgccagctctgacgtccgccaaccacacgaccgcgagggttgctgcggc

SEQ ID NO: 30059 - DNA, 3845 bp, Oryza sativa
attgtattcatgtgaggttgcgtagaacctcttacccactctacataaaatgttcatagatagaccacctctcaaactacatcaatcatactaggctatatagaatttagtggagcttcatgtctgacccaatttatcctctaataaaccatgataatatatatgcatttagaaaaaaaaaccttacttttactttatgcttacttttactttcggtgacatattttctaaagaaaattagtctaccttcttttcaatgaagaagattataaataattgcttatagatattacttatgtaaataaaaagctaataggttagaaaattataaaagcaattaatgccaatgaaaaagacggagaaatcatggcatatgttctcctgttaatatttcgctcttataagtatctcaaacttagtgtacgatgcatgcccgcgcattcgcgcgggctaacttcctagttatgtaaatttttgaataaaacgaatgaacgtgtaaaaaagagccaacaacatcatctaggtaatagtactaattttcaagctccaatgtactcttgctaattcaatccgactgcattatccatcgtcttgccacgcaagacagttgtggttgttgcgttttggatgaagacacaatcgacgcttccggtaagtcaacgatcaattgatgagttgtttagtacagcacactactgccactgaaaaggatatgaggacacaaggatgaacaggcggattgcaagctgaaagaaaaataatgcatatttttcctcaaccttgccattctaagcaagaaacgtcaaacatcacgcttacgctgctcacattccgattgggcccaggaaaccaatggggataatcagtgcactgaagtaagccacaggttaatgtgaatatgtgatgttcacatctcacaagatgccaatgaatcaacaggcacttgtacaggatgaattgcatgtaggcacctgtaccgatctgcatctgtggatgggtaagacagtaggccgtgtgggatacttcagatggaggtaggagagaaatgtcgaccaattattgcgtgcaggaagaagataaggttttatatgacagtccaattgtatgttaatttgggaggacgtaatttaatccatagttacttatgcataggtatatacacgtccttaacagctgtaaatcttatcaagagtgttcacaatgaaactttccaagatgtcttgaaaatatattatagtaaatttaacaaaactacagatattttgataaaattagcatagaggtacatatttaagctatagtatcataagactatagatttagaaatgattttattacaagactacatatttaagccattgtgtctcaaaagtttagatttaatattgcattttcacaaaactatatatttttaagatatgctatccctacacgtctcatcatggtaaatttttaaaatgtatagttttgcaagaaaatcgatcatccatctgtagttttgtgaaaaaaaacatgacatcaaatttgtagttttgagatataatgatttaaatctataattttttgataaatatattcttaaatttgtagtttagtgataattttatcaaagtatatgtagttttgcaaaatttactcaatatattaattccttgttgatgcataagttactactcttaactttttgacagaagggattttaaccctacttagttttggtactaaaattgtactggtaatttttcaaacttctactctttttttatgttggtcttcgtgtccataaccaacaccaacagagaaactttcttggatgaccttctcttatttttgtatgaaattctcacggacattaaccaacaactgacttcaaaatagatgacgtgaatatttatatgagcgtcagtctttgcttttgtaccaaacttatgaaaaataaaattaaactaaataacttttctgaggaggaagggaggggccacataaacttatttacaaaaatatactactacacgtttatatctcattaccttcacagaaaaaaaaatactactacacgtttatatctcaaggagagatgtaaacagatactctgttttaagcaaatacgacgatcataagggattttacttaatagaacacaacgatgacaaatgacagtgaagagcggagaagcaataggcctgtaaaggagtagagtgctggcggttgatggaatatctaaaaactataaacaaaaccccaaatagaatcccaatgctgatcaagaggagtgacgacaggcatgccgttaagtaacatggtcacgacggttggcgggacttatggagagtaaaaataaactctaataataattatgttcgatttttaaaatttcaatgacaatatggaggtgaggcagcaggcgggctgtagaggagtatagtgtcaaagccactaacgatttggcgagacttatagaaagtaaaaaagaacacaaacaatagttatgtacttatgttcgatttctaaaatctcaatgataataaagagatgtggtagcggacatgccgtagagtagtaaattggagatgtttgatgatacttctaaaaattatgaaaacgaaacccaacaaaacaatgaactctaaaagctataagacctaatttttaaagttctagagaggatgaatagaaataatggtagatcgagtaagcaaataaaaagtaacaaaggagtaaggggtagcgactgacgtggcttttaaaaactataaaattattagaatcatgggaatgataattttaaataaaatcatgtgtaaaaaatagataattttaaattgatactagctgcgcaattgcgcgggccgcccactaggtgatatatctaaaccattgatatatctatctatctattatattattaaaatagccttgaaagaagacatcacgttcgtggaggctagaaattcccaccttaatcgaaaaaagaaaagagagtacataaaggaatacaatttagaaatatctaaaattcggaattaaaaataagcaatatcgaaagaagagtccagataagaaccaaatacgagattaattaaaattctgaataaaaataaaataaattctgaaattataaaaaaagaaaagaaaagttcaagtaaaaattcaatttaaaaataactgaaattcgaaattaaaataagcaatattgaaagtataagaacacaatacgatattaaaaaaattcggaataaaaaataaaataaaatccaaaactagaaatataaaaaagagagttcaaataagtatgcaattttgaaacaactgaaattagaaataaaaaataataaatattaaaagaataatcatataaaacacaatacgagattaattaaaattcaaaataaaaaataaaatgaattctgaaattataaaagaaaaataagagttcaacaaggaatacaatttataaatagcgaaaattcgtaatagaaaataaagactaataaaagaaacgaccatctagaacgcatgacgagattaaaaatagataattttatatgaatactagccgcgcaattactcgggccacccagctagttaacctgaaagtatacctacttaatagaattatagcatgatatgttaggaacagaaacagctggcttcaaaatatttatatgagcatcagtctttgttttccgtaccaaacttatgaaaaaataaaattgaactaaacaacttttctgaggaggaaggtaggggccacgtgaacttatttacaaaaatatactactccacgtttaagaggaaacttagattcaggcgcccgatggtttgggggaaaaatcgggcgctga

SEQ ID NO: 30060 - DNA, 1522 bp, Oryza sativa
tgccgagaccccatccaggctccgaatggcagagcaaagcactccactccaagcaaggagataaggatctggagagccgcggcagcgacctgacctgaacccctgaacttggtggcaagagggagacgaggcgacgcgagaggaacacagtagcggcgagcagcgagccacacaaacccgctttaaaatcgcggggccttcgctgctttaatttctcgcccagcttcggtagccgcctcccagccgcacaaaccccctccccgccacaccaccacaccttaccctcgaaccgagcaagcagcacagacagcacaggttactagtagttccaactcttcaatgcacagcgaccagcaaagctctcccctgaaaactgcctagctaccgccacagcccacagaccacactgctcctctgctcctactatgcaccaaaactcaccggaaagctccaaaagcgcgcgcggagagatatagacgacacgaaacaacgactcttgacgccacatacaacacgtcccccccttgctcatcatcaccacgggaaagaaaagggaggagaaggcgatggagtaggcgcggccactggccaccagctagtgcacgccgctaccacaccacacacgccattatgctagctacttctcccttctccggcggtacaccttcattcatttcattttaaatacagtcgtgaattttcgtgtttaatgtttaattatttttttatttaaatattttatagaaaatataaaaataaccatatataaaatattgttcatgttttatcgttaaataaaaggactaccctgttgccagtattcaacactcgcaggcgattccgaagaagatttgcgccgaacacgagggcggaaaaaacgaaagcatcgcggagtaaaaaataacagctgagctgacccgaatgacgtggagctaccaataatggaaacggccgggccgccgaagacacggagacccggacgcccgtctgttgaccgcccaccgtcgatgacagctcggcccgcgcctccagggtggcccacttgtcagtgaccttctagcacctcgttgcgcgtgagaaaccagcggggtaggagcggattaggaaagccgcttggtttatccaagagagtggcgacttgctggcctttttgtttaataaccactcactccggcgtgtacggggtgcagcattagtgttgattagccagcggagtgttgaaacccaacttaaattacccatcgatcgggtgacgggtcactgtcggtggggccggcgtaacgcacgccactcatgggcccacctgtcagggagcgctgggccggcgagcagctagcgcgcgcctttcggactcgtcttcgcagcgggatacgtggcgcgacgggggccgcacgtcagggttgggggcttcgaggtggctcccatgcacgagccacgtatctacgtttaaataagataacgtacggtttaaaatatggcgtgcaggggagcagatgaacagggcattcggcgtgagttcttc

SEQ ID NO: 30061 - DNA, 1364 bp, Oryza sativa
agagtccatatagaaatacaatttagaaatagctgaaattcggaattaaaaaataggaatattagaagaggagactagagtccatatagaaatacaatttagaaatagctgaaattcggaattaaaaaataggaatattagaagaggagactagagtccatatagaaatacaattaggaaatatctgaaattcggaattaaaaataaggaatattaaaagtaaagtatagagtccatatagaaatacaattaggaaataaccaaaattcggaattaaaaataagaaatattagaagtagagtataaagtccatatagaaatacaattaagaaaaaaaatagaaatttggaaataaaaaaataaggaatattagaagtagagtatagagtttatattggaatttaaaaccaactaaaattcggaataaaaaggagcctccacgttcgctctcatggcctagaaattctcacattaatcagagaaaaagaaaaagcagagtccatatagaaatacaatttagaaatagctgaaattcataattaaaaaataaggaatattagaagaggagactagagtaattattacacattagtagttttgaaaagttattgcaaaatttaaaattatgttgttattgtaatatattttaataatataatgagaaaacatatatgctattatataagagaaaatataatgatgctagccgcgcaatttgcgcgggccaccatgctacttttcataatctcacgagaaaaccctcatatttagggggaaaaaaatataaatatacttttttttcatcgatataacataaatatacaagtttagaagtaaatggcaaaaatatatcattatcacattattagtaattaattaattactaattaggattattaattacgtcgttccagccgtgtctcttcggcaacaagtgagaccgaacggactcgcactctcacctgggtacgcctaatgggcgatcgatcgccgtagggatgcggtagcgatcagaattaagatgaaaccttcccccctccctccctccctccccctggtttcctttttttggcaccgcattacttttcttttttagtaaatttatacacctaaagtttacacatctaaagtttagagaccaaaagtttataagtcaaaagtttatatatccgatttaaatttgaatttgaattcaaatatttttttatatatagtatttctgtacatctaaagtttatagacctaaagtttataagtcaaaagtttatatacccgtttcaaatttgaatttgaattgaaatattttccatatatagtatttctatacattgaaagtttatagacctaaagtttatatacccgat

SEQ ID NO: 30062 - DNA, 2139 bp, Oryza sativa
cgagttaaaggttaactcatggtgacgtggacgaatggcgacgtccatttctcgatccaacggtgtaggatgagagttacattattgcaccgaattaagtgattgcacgagatactttcccctgttgacagataacaatgtatattcttcctcctgtattagttcctcctctttttgattatttaccgtatagctgactcgccggcctcaggggctccgacaactgggagaacagagatagacacagaactagttcaagtgcagcggcagcgtgacatttttatctgtttggtttgctaataacctaataaaacttggtaacaccaaacttttgataaggtagcaaagcaaacactccatcaaactatctatctatctatctatctatctatctattattatatactaaaagtccattaaaattcctataaacactaataaaccaccacatggcacatctataaatactcctagaccgccaagtggcgctctaccaaattaaagaaattccaagaaaaataaaatatctaaccattaattttcatttaatccggtggacccaaattttttaaccgttagatctaacataaaagataccaaatagatttatatttagaaagcggcacgttctttgtcgatccatcccgtacatagttcgtacgtatgctcccttcccttcttttcttttttcttttttttcactctcatgggataaaaaccaaattaataaattcagccaacagttgtaaaaatatatgttattccgagttgtattctagcacaagtccattaaacttcctatgaatgcacaagtcgccatgtgacatcctacatactctcctaagccgtcacgtgacactctaagaaattagaaaaaatcttaaaaattatgagaaaaaagaaaaaaatctgaccatccgttataacttataaatcggtggacctattatttctaaccgttagatatatctcaagtatcggtttcattttcagtaaaagaaatctcctctctctatatacgtactcctccttctgtggtatgtaggtgaatttcctattttatagctagcaaccccatataaaaacataagtgatcataattgttactaagttatataataaaccacaatgatgcagagaaatcaaaatattgaataggttttcaacgtgcgtgctgcttgctttaatttggttatccaaataggctaacctattcttgctaggattatcaatgcaattagcattaggtctactacaaatgagggtgtgcatgcacgtgttttcatcctgctaaactctactagatttatcttttattggctaaacaacaagcaccctaaataatcaacaaatttgcgaacacatctaaatttagatccatggtgtctttaaaaaatttaatgattcaaccgtgtaaacttctactgaaaagaataatttttagggcatgtcatcctaattaccatttaaaaatcaaaaaaattatatactaataatccattaaactttatacaaacacatatatactaccacgtggtacgcctataaacactactaaaccgccacgtggtattataataaattagtgaaccatctattttcaactattagatttatcttttttttcttaaaaaaaccacaatccacatccctcacccctctcccaccggcacaactctcctctccccactggcccacccttcccaccaccccccacgcacgtaagtatacatacatacattttctttatctccaataattctttctcatcttcctattttataaataacaattttaattataaaaaatattatgaagaaaacaaatctaaccatcaattttcaattaaattggcggacttataatttcatcaattttcatttaaaacagtggagttataattttaacaattggatttaaagacataaataattcaaacagatgaacgtattaaatctacctcaataaaaacaaaatctccttaccaaataacaacaagacattgaaaaacatgatatatatattcttgaatcgttttacacagtaaagatcgattaaacgtgctgtatagcactcttaagtcaccacttatgatattgtaaaactttgaacaaaaattgaaattcaaagagaaaataa

SEQ ID NO: 30063 - DNA, 1061 bp, Oryza sativa
tatcaccaggtaaattattctattttcacaacaccctgatgaaaaaataattgaaaccggaccatgacacagactttgagtcgcacatggacacgatctcgacgggacactcaaacccaacccactcaaatctctacttgaataaagaaaaaacaaagtcccaacgttcgcacctatgatgctgtaatcaatcaaaatatgcattgacattgaaaaagcttaagacgaaatttaaaggattagaaagtaaagcgcaaaggaaataagaacagaagctgagggtgagggtgtcactcaggtgatcaacatatcgcatattagtctttgattcatagctggttgatgtgcggggacacatgcatagggatactgacatgaagctgaatcggtaacgcgcatgaaatgaaataaagaaaaatcggcaagacggacaggagcgcgagcgggcgggagacatatggacgaaggacggatggaccaaaattggagtcggactaagttcgaaagtttgctggttcccacgcggttgacgacggatataattaaaaacctactcaaactgacgtaccaaaatcttggcaaaaacatcttaaatttttataatagtagagattataacgagggagtaagagagaggaaattactgcataaaatccaaataggatttctgttcacgcatgcttattactgattcacagtagtatttgttttggtgcactatcttggttctactcggattgttttcccgtaaatatatgagggccctgtttggaagattagcccagggctaatgtttaatcataaattggtaggctaaacattagtctagggtggtatgtttggatccatgggctaattcaaagctaaaaggtggagagagagagagagagtagaaagagaggagagagagagctgctttttgatggtcctcacacaaaattagccccattagcaccccatagagaggctaatgttttgaggggggctaattcactttagcctcaaattagcccacctgtttggatccttgagggctaattcagggctaaaatgtgagggct

SEQ ID NO: 30064 - DNA, 1756 bp, Oryza sativa
ttttatttatggtctttgagattttaaaaattgaacaaaattatcgtttgggtttattttttttactttctagaagtcccgccaaaccgtcagcggttgtgccattgtactcctctacagcttgctcgctgcctcccctcgttattgtcattgagattttaacatcagacatgattatcattgaggtttattttttactttttagaagtcccgccaaccgccgcgaacatgttgcttaatggcatgtccgccgtctctcattttaatcatcatcgagattctatttagggttttgttaatatttttagatgtctcatcaacagtcaacactcaactcaactgctttacaggtctgatcgaactgtcagcggcttcgctattatactcctctacgacccgtctgctgcctctcttctttaattttttttttcagattttattatctgaacatgattgttattagggtttattttttttactttctagaagtcccaccaaccgtcgtgaccatgctgcttaacggcatgctcatcgttcctcgtcttaatcattattgggattctatttaaagttttgtttatagttcttagatgtcccatcaatcaccagttcaccaccactctacttatttacaggcatattatcttccctctttattgttatttgtcatcgttgttttagagatggacttcttttttaaaaaaaattccatatttttttattccgatcttagttctttgtcatgctttatttgcttgctcaatctaccactacttttattcttcttggaacctttaaaaatttgaccacgtggtttttagtgtttctcgttgagttttgtttttataatttttaggagaccctcaactggcgccgccatactcctttacggttagcccattgcccttactatttattatcattaagattttaaaaatcgaacctgccattaccctattcctttgccacccctccacttgccctcttaaaaatataatatgattactgggatcaaatcatatataaattacgtgacttgtgatttacgatgcgtcactgtgtataaatacttcttaaatgaaaatagctattttgagtattattttacatggacccttcttttaatgtatttactcctaattttgacgatttataatttgtataaagagtagtacagtcctgaacttctgaacgtatctaagctagttttaatttatttttattatgatttttttgatttagaattcgtatttaaatttagtttaatcccgcattgtgtttcatttgtttttaatctgtacggtacgtacttggcggtagtaatggcggcaataatcactttacataagtgatgtatatacttacgttaatttgaagcgctgctagggtacataaaaagaagtgcttctctgaagaaaagaaaaggctgagttgcctcaatcggacaataagtcctattcaaattaagctgccttggttaggagtccgatccaagtcagatcgtatatatttctatgtttgatttttataattttattttatttttttatttcaaattttatttaatcttatattgggtttttatatagactcttcttccaatattgcttaatttttaattacgaatttcagttatttttaaattatatttctatatagattcttcttttcttttttattatttactagaaaaaatacccgtgcgttgctacggaaaacttaaaatttaggataaaccttttagaaaatattcttt

SEQ ID NO: 30065 - DNA, 2950 bp, Oryza sativa
ccgattcttgctctgtttccgaaacgatctctgtcttggattccgcttcaatttgatcttcatctctgatacctagattaccaattttggtcattaacagaagctacaatacaaaagtcatcctataatttctccatagatttaaatcttaataaaggcatggaatttaacgagaaaagtattggaaacaacagaataagcaataccaacaatgaagtaacagctcggttctacaggaatgacaacaacaggagcgacaacaacggtagcccatcattgtctgcccggaggatggttgcatgtcctacgaggatttaaaaagcagtgttaggaaagccaagcaaatcaatcgacgttgtatgtataagagcaagtataatagtgaaggagagaggtaacaagaaattaagggtgttggctttcatgcaagagctagcttaacacaagctccaagacaaatacattaaatgtataagtgagagatagagagaggagaagaaaattatagccaattttatagctactctatcggtaaatctaattggagaggcctagttttaaccagagacacccacgtgctagtactttaggagttttggttgctattagtatatccaatagtgcatatcttgttttcttcttatagaattttctcttaaactagttatctaatatacaatctgattacaccattacgttcgttgcaattaaatctttacaacaagatcttacatgattatattacgatgaaaaaaatatttatatttataaattacttttattatatacgtaagttacttttatcatatatatatataagttacttttagatttgactaaattacttctatacattcataatgctctaagttgattatttttattattgtttttagttaattctatattttgtggactttataaatcttctctatactttacttgtgaatctactctacatagtttcttatttcagctcactcacaatataattatttctactacagagagttactctctccgtttcataatgtaagtgtcattctaacattactcatattcatatagatgttaatgaatatagacatagttctatgtctagatgaactatgtctagattcattaacatctatatgaatgtaggcaatgctagaatgtcttacattatgaaacggaggaagtatttcaattgcataactaagttacttctgttgcatataattacttttactgcagaaagttatttctattgcatagataagttacttctattgtatagctaagttacttctgcaatttaaatacattacttttaaattaataaattatttgaatatatccaatatggatcttgcattatcatatgtagagtataatgatgcaaatagatcttaaaaataatacgtgatttaaaatatattagttattaaagagtttaaatctaaatgaaatttatgtatatgataaaaataacttacatatataataaaagttatatatatatatatatatatatatatatatatagaaaaactattctacacctgggtatagaatagctattctatacccccctccctaccaagggtcacacccacctccccctccttaccaaggcccaaaacccacctcccacctcggtcaaaggcccctcccaccggtcaaacccgcttactaactcccccccccacccacctcttctcagctctcgtcccaggacggtgcagtaacacgacgacctctgtgcagtaacactgtgtcttatgtgcagtaacaacgttaaaatatagttgaaatatagtcatgacggatctacttttgataagctctttttttctagcatcatggtgcaaacggttttaaaaaaccttacatcacttgagagatattgttcttcaaagcttgactttttgacaatttatctctctacaagtagtagtaatactatactattacttactattacttgttactacttgtctgttgtacgttactacaatcgcatcacgatgttactacactgcatattactgtattttttgggtagtgttactgcataaacacgtggtaacgtatacctttcatgcagtaacacttttacttttgtgtagtaacaagtataaggttagcatttgaggcttttaacctatatatttttgtttcaattcctgatttactgtaattcaccacaatattactgtcaaaagtgcagtaacgtcatatacatgcagtaacactatattggagggaggagaccgattttcttgagaagaggggggaagaacggtttcttgaagaggagagtacgtagatgcattttgaagtttaaccttccacatgcagtaacactatagcattatggtgggaacgattttaaaaaataatacatatcttgtgagatattgcttttcaaagattagcattttgaactttaaccctccacatgcaataacagaatgtgtaacttgcagtaacaaagacatatacatgcagtaacatggttttaccaaatgtataaaattgttcaaacaactcttacatcaatcagatctcgctcaaagccacctacaggctttacctatagcccacctattcgatcttcatctcgtaaaaatgacatagtaaaactataattatcgtgcagtaacatagctacttgaaagtggtaatatgcgcctattatgtagtaacacttctactttcgtgcagtaacaaatatatggttagcatgtgaggctttaacctatatattgttgctttgatttctgatctactacaattttactatgacgttactcgcagaagtgcagtatcctatgtgttatacaataacgtcacatgttactgtacttttacaacaatgttactactagagcatagtaacatgttatgagttttgatagtaaaagatattaaaattgataatcatattactttctcataaaattct

SEQ ID NO: 30066 - DNA, 1709 bp, Oryza sativa
tggaatgcgtaatcttgtagaagtaatgctggaaaaaaaataccagtcaacaaatggtgaggagcaggaattcatgtatctatctgaaagtttcctagacttctatcatgtcaaaaactctgattctgcctaaaattccatgacagaagtgtaataataataatattataggtgcaaaatgcctcttactggcgctcatgagctcacaggctttgtgacaagtaatccaaatactaatggcccatttggatggcccaggatcctgggctggtccacggtgaactaacttgggccgttaggaataggccgggttcagagtttcggcctccatatgggccctaacactgaaacagtggcgagctctgtgtacttttccattgggccgagatgtaactttaacgggctgggccttgtaacatcattggtgggtctggcccatctaaagaaaattccaaacttctgggcttttgtttcggcctaacttttttcttcttctgaaattccagcttctacagaagagaatgcagtagtagctgattagctccttttgttttgttgcagaaggtgacagacgattatttctactgtcaagtgaagcatctagttcaatctacgcgtctggctaatctgctacagcacctaatctcaaatcctttttgtattcatcattaacgaatactaggaatcaatcacctggcattgcctgcacagttactgatgcattcacgacaagtttctgaatctgaagctagaactttcttcagacaatccatgtgacaaacttacattggattattattattacttctccgttcactgttcaacctctggagctgtggagagagttccagattgtctacaagtacgaatacctgaagatatcagaaaacacaaaagattctgcttcattatcttgaaaagaaaacaagagactgtttaaattgtagctaaaataaaccttatcaaattttagtaatgctaaaattttagcaagatggcaatattgccaaaattttagcaatatttcttatgtactccctccgttttacaatgtaagactttctagcattacccacgtacatataaatgctagtacatgtgtttagattcattaacatctgtgcttagattcattaacatctaaatgaatatgagcaatgctagaaagtcttacattgtgaaacggaggaagtattgattaaatttgataacaaactaaatgtagactaaaaatagtatggttaaaaatgacatcaaagtgaacaactgagacttttgtgtcaccggttttggaaatggactgaaccaattcgggacgatcgacatggtgccaatcatatccacaagtaggtccttttgacatcattctcattgaaaatgagacaaaaagcaaatcaatgggtagatcatgatcgccacacgtactggcaggcactggttgccgctaagacttcagagtaaagttcaggaagattatgcatacagaaagtttaaaaacattcatcctttttgcatagtgattaaagtgggtgatatcatcagtcagcgcgagattttggaagggcgaagtgttcttgcagttataccattttaacgtaattgattgagttcaataaaaatgattattatacaagttttctgaagaaactaacatgcattatctgaataaccaggtgctatatatattattcttccaagcaccgacttaa

SEQ ID NO: 30067 - DNA, 2515 bp, Oryza sativa
ttacaattcccctaatcgatagtttgtctttatagtagtaactatattttgtttaatcattgagcgttcccacagaggtacttattcgttgtagatatcacagatttattaaacttgtaaaatgatgatgcacgataagttcacatagtacacggcaactatctcaaggacagtaaaaaacctgtagcttgtagaagttacgtcgaagccatgggtaccaaggtcttacaatctccatggccgacacaaatgacgtcccaacaattcacgagctgggtctgttgggtcttggaggggagaggctgatctaaattgtatgcgctgatgtctttcttggctcgggtgagtgcgagtgcaaagaagaggggggctcggctccgatgaaggaaaggttcttgctaatcattatggttgtgggccagatgcggtagaggaccggagaaaggatgtcagtgggcaattccactccgcttattagttcatggacctcatggtaacataaattttagaagaaaaaataaattagaagaaaaaataaattagaagtgggatgaacaggaaaaaatcccatttgtccaccccacttacgtccctagtaggatggtatctccacgtacaacagatggtatctcctgccactgacttgcttagctttagtttctttgtttccgccgctaagcaccttaccatcatcgtaatttccacacaggacctaacagaggccgtgtatcaatatcccgtgtaataacagagaactttttcacggtcatgtctttatacaactaagacgtcgggcggttgaagacctacacgagattttgtgcatatatgatatgaagtctttgtaaaatagttttccacgtgtcaatttttccaaggagcaaaaaacaattcagaaaacgtaagagccaaaaacaattcagagtacggagagaagtggaacacgaggttttcaagtttgataatcgctcgttcgtccgttgtgaagccatatataacaagtgtcccggcatccagccattaacaacacggagaaaagactgatcatacaataaaagttatgaacagttcgcgcagcaacagaaccgcgaaaccttgcagggaatctgaacgcgtgagacaggagtcagaacgtttataaacatacatgagcacaaagcgcacagtggttaatttatactcctacattaggcttcgggtgacaaagcattttgttctcattggaaaattacacgtgggtctcaggtctcgttgacagctccagaaatatttcacatcaaaaaagcctgtcgacacaacacaacagttagcccacatcagcaccgagtgcaaactagccaacttggatggcatgtatttggggaaaagacaatatatttggcaaattgacgacgacaaggtgaaatcgtacagacaaagagtagcagcagcagtatacatttacattacgttcgatcaaaggtgggagtcaaaacgttagataggacacaaactttgcagaattcaacacgtcaccgagttacaaataagttatatgcaaacagttttgaaatattttcctttccaagggacgcaaattcaacatgatatgattcgtaggttaccttgcaccagataggtccatcaccgagaatcgccacagtaggtaactgtatctggcacatatggcacaatcgtcatctctggttctctctttgcagtgagtgccttagacgcacgatactctggatcatctgtataacaacaaattaaagcaaacatcaaagttctgcaaatctaaactgaacattgtcctacgttaaaaagatgaacagaggtaaacctgatattttgactgtgcaaagaagactgggacatgagataggcagctctacagagtagaaaatttagtacagagagcaagagagcagatgaaatattaaaagaaggttgcgtacctctatattcaaacgaagttccatcatcatatagaagttaagtaaacagagtgtgattatatcaatgtaaacaaataataatattgtgccagcctagcattcattgacgtggtaccgttaagcacaaatggacttggaattgcaatggaccaacaggtatacaatggaactgtttacaagtgcagaaagcgccctgtaaatacacagctagctatgtaatacatctaacacccctgccccctcctcttgctctctcaaacccatggtgggtcaatcgcactgagtttccacagaccatagctatgttgaattgtagcctaagccttcatgaataaatctgtaactacaaatattatgataataaaggtaaaagaaaggatattgtacgtgacgaagtgtgtatccatagaataccacatcctcttcttgtgaagtatgtgatagagtaaactggtcttcaaagtccaatttacaggagaatgaagtgtcataagatgaaataaccccaagccttttaacttccttgttagatcgaacatgtacatcaatttcttctttaggaatcgcagttgaaaaga

SEQ ID NO: 30068 - DNA, 1575 bp, Oryza sativa
cgtgaacgttgtcggcttaatcacacgacatgattgcaaacggacatctggatatgctacaagttgggtgtgtgagtcatgctggccacatgagatacacatgtaataaaccaactctagcgctttcattgttgttcgagagatgattctactcgctcgctggttctcgaaccagtacgtagcaatctcccacaccgcaacttccattggtgttcgagagatgattctactcgctcgctggttctcgaacaagtacgtagcaatctcccgcaccacaaacctccattggtgttcgagagatgattctactcgctcgttggttctcgaaccaatacgtagcaatctcccgcaccgcaacctccattggtgttcgagagatgattctactcgctagctggttgtcgaaccagtacgtagcaatctcccgcactgcaactttcattggtgttcgagaaatgattctactcgctggctggttctcgaaccagtacgtagcaatctcccgcatcgcaaacctccattggtattcgagagatgattctactcgctcgctggttctcgaaccagtacgtagcaatctcccgcaccgcaacctccattggtgttcgagagatgattctcgctcgctggttgtcgaaccagtacgtagcaatctcccgcaccgcaacttccattggtgttcgagagatgattctacacgttcgctggtcctcgaaccagtacgtagcaatctctcgcaccgcaaccttagatggtcgaggtacgactacagtaataacgcagcagtcctcgcacgacaacttcaaatgatcgagagacacctactcactggttctcaaccagtcaatcgtagcgatctctcgtatatttatttctagtggttgagttacgactactacctggttcttgaccagaggtgtagcgattctcccattacctctacttcaacaaagttgatatcaggtacacaatatctccaagtgttttacccagagatcccttaccacaaaagacacctagcgttgaaacctatcctaatgtccctttacaccgtcttgacaaagcctctgaggaacctaagggaacttcggctggggaagtctagagcggataaggtcttgtcggatcctttagagacgaaagaccatgtaagatctggtcgtgtaagagttcttgccgtgcgtattaaccaagccgtgtaatcggaaatggattttccaacctcacggctgggggctaggatcagtgcttgttcaaccgaggtaggtcaaaggtccaagagccttatcctccgagaacgattctacgacgacaagggtgggggctagggagagtgtataactaaacaaattgactgatcgaagtcggtaaaagagtagatgctcatatacaaaacattggtttgtaaacctaattcattttcagtttttcatacattctataacatgttaccctttgagcactcgctcgggggctatttctatctaatattcttttttgagtattggttttagaaaattctattcggcattatcaaagactccatgtctctatggttctacaccaagggggtgc

SEQ ID NO: 30069 - DNA, 1434 bp, Oryza sativa
gtagtattttgttgattgttgtgtacccctccgtcccaaaaaataagtccaatcctaactacgaacctagacatgcatgtatacaggttcgtagctagagtttgccttttttttgggacagactagtacatgtttaatagtgagaaatagttagtttacgagaatacctatagtaactggcacaaaaattatgttgtggcaaccaaataatttacttgttgataaacttgttgtttacacattcattggtgcactctcaatttatgagatgagtgatagtgttagatccatgactcactgtgccattctggcccttggagtatttatgttcctaaatattgaaaattgtttgtagttatttttgttatgaattgccacccttattttatttgaaatgacgtttgactagattctatatcatggattgaatcattcacaaaaaatgattttcttagctcatctattgttccaccatcttcaatagatcttcagttaatattatatcattttgcttgtgagagagtaagtggtatccacacaaaagatctagtatatatcaattgatagtgtaactctattttgaagatctatgaatggtgtaccaatatgtgatttacgattatgatcatgctttttgtttgtatattttctcccgtttctatgttgcttgatactagtcaatagtgctcttgttcttcactagatttggaacaaattaataattttgtgcattgtttagttttacatctaaatcatttgtgttttcaatctgaatatagtttatctttctaatgtgtttattggaattgaataaaatattatgtaattatttaaaaaaacattctactcttatttgtttgacatagaaaaagatccgaaactaaggttgtagattctgatatacacgtaaatactacaatgtgtgaaaatcacaagtagcatgtaatgaacaaattgaaaagaaagctaaacatacttttcaaaaaacctaatcataagttgaagataaattcgactttctattgtattatcctataatatgaaaattatcaagtgattatgctattttttttgtagaggaaaacaattattacataaacaaaatatgaaattgtattcgctagattttctatgaaatacttttttgaagtccttagtttttatttcaaagaagttatctgaaattgtattcactagattttctatgaaatacttttctggagtcgttagttctttatttcaaaatttgttttcaaactattatgctatttagaaattttatgtgcattatcagtttgttgtatggatttcccatcaagtagatgtaaactcttgtgacatttttgtttgagacatccgttcgtttccactagaaagagtggataaagttttggatattcgtgagcacgcttttcaaactgccaaacggtacgt

SEQ ID NO: 30070 - DNA, 1779 bp, Oryza sativa
tcgatttagggttgtaatttatccggttttgagagtttgggatgttaaatgtctagtattatggtttagggggtaaatcgtactaccgcaatagttcgaggggtaattcgtactttccaatatggaaatatctaactatttgccaaactattggtcatcattaattacaatcttaatttggttgttctcataattctttggaaacagaaaattaaattccattaatatattactctgtatgtttcaaaatattactggtcattctcacatttaaaattattaatttagatcgtggtcttctatcttcacattttatcaatgccatgtacaactgttaatcaaagttaatattgcttttgagaacgattataatgtagttaataagcatagcagtgtaatttgcacatctcctagtttgatgtgaaattttgctagaatgacaaataatataaaatgagatatatgcaaatttaatatatattttgcagatgagccatattacaggctaaattaggcggcacgtcaacagggcgtgcagatcttctagtatctactaatctaaagctagcacttcttgtgccaacgggacatttaactatttaccactatttggtttgacaattatcaaatacccttcttatatttgcacatgcattggtagtgcataaacttgttagatgggtacaatttagtacataatcttgtaaaatgctcgtttcggtacacgaacttgtctagttttgtgcaaacgagggccaaaatagcttggcaatattaatcttacgaagttgatattgattagggtgtgacatgcatatgtatagtgcgtttgcataagactgcaattatttataaatttgatctctactttatccttcatcaaggaagtgatgatatttcatatctttcccaccctagcttatatcattgctctttttttaatctttttctacaatcacaaaaacaataagattatccatgtagtgttcttttcgccttcctccgcacgcacctgacaagttcatgcactagaacaagcgttttataagttcgtacactagattgctaccacctaacaagttcatgtacggcgatgcaatttactcttttttttttcaatccccttctccaaatcgaaccaactctagaaaggggagaaggagctgtcgtttacatggaatgacagaagtggatatcgatctccgtggtgccatggtgtgctatccacacgtttgatccgttgcatgatagcccttctacacagaactcttggataactattacagactttcccattgataagaattgttcggtatagtgaagcagggtttctagatgctttagtggtcgaaaaaatggattagatatcgcagctctttttctcctagctagaaaaataatttctggtagccaatatccaaccccttccattttaatacatcaatatacactaccggagaattgatatttgtccggatgacaaaaatcacattagccccgattcgaataggaaccgagactaaagaatatgtttagtcccggttcaaaagcccaacagaattttttgatatttagttccagttggtaacatcaaacaggactagagatcattttttatgtcccggttcaaaaattgtcaagcctcccactatctttagtcccggttgtctaaaccaaccaggacgaaaaattaaaaaaacagtcgagccacatggggagggagagagcagcgcgcgtcgtcgtccttatttctttctccccctcatccactaacccttt

SEQ ID NO: 30071 - DNA, 994 bp, Oryza sativa
ccctttcacagtgacgattgaccctagcatcctcctatcaaatgaagacaccccttactcacgtagcgatcacaaggaaggaacaatagtgaggagaaagtacgtgcggacaaccgtcaccgccgatgtattgccgtaattgttgtaaactattttggatgtattgaatatgctagttatatatgatgattaacaaatttaaatcatgcatatgctaggtatatataattattagaatttttaaaagttttaaatcatgcatgtggtatttacatatgttaattacaatttttaacaatttaatatcatgcatatgctaattatatatgattattagaatttttaaaagttttaaatcatgcatgtgggatttacatatgttaattacaatttttaacaatttaatatcatgcatgtgctaattatatatgattattagaatttttaaaagttttaaatcatgcatgtgggatttacatatgttaattagaatttttaacaatttaatatcatgcatatgctaatgatatatgattattagaatttttaaaggttttaaatcatgcatgtgggatttacatatgttaattagaatttttaatgcattatttactattttagaaaacatatgcaacgaaattcaatatcagtgctattatctttagacccggttcttaaccctaaccgggtttaaaacagaatttggaaatagcgggaaaatatctttactcccggttggtgagaacaaccgggagtaaagatatctttactcccggttcgtaacaacaaccgggattaaaaatctaaagatatctttactcccggttcaaccgggagtaaagatccgggggtatatatattcccggtgcgcccttgtcttctccaccaacacttcgacgtttttccatcgagatcgagcatcggcttctccttcgccaccactgtctagggcaaccccgcgccgacgccgccgtcgtctctcaccgtcgcctgg

SEQ ID NO: 30072 - DNA, 1395 bp, Oryza sativa
ctaattacgctgtaatgtggtgctacagtaaacatttgctaatgacgaataattaggcttaatagattcgtctcgtagtttggcggtatctataatttattttcttattagtctatccgtatacgtcacaattttttttggctaaacaactaaacacagcctaagttcagctacctggccacctcactgccatgcagaccacaaagaagtttgcgccagctgctcatattcatataaatgtcatacatatgttagaatatatatatatatatatatatatatatatatatatatatatatatatatatatatatatatatatatatatatatataacatctatataaatatggacaatgctaaaaagacttacaatgctaacggatgaagtaccttattaatagccggtattgttagaaaataaacagatcaatatttccttttttgtaaaatggttcatgttttaatgaactatcccgtgtgggtgttcattcacaatggtaatatataattttatttatatagcaaaaatgtcagagggttctaatatctagaagagggttttcggaaaataactggtattaatatatttcgtaatcatggttctttaaataaataatatttgaaaccaaaatagacacatattaccaaatgctcatcatttagcccatgcataacaagaaaacgaaaaataaaatcaaataaattccaacatgcacgggagttagaaaagatttttgattattccgaatttttaattatgtatttcagaattgaaaatttcagggtgttacacttatcaatggcatttcttagattatctccaagttaatacatattgctttacttttcattgtgtgagccacgtatttctacgtaggcagttgtcgatcgacaacaattttcttaagacatgcttgaaaggaggcatcagttcgctgtagaggatagaaattctcgtattattcagtgaaaaatgaaaaggagagttcaagtatgaaaacaatttataaataacttaaattcgaaattaaacaaagggatattggaataacggtccatatataacgtaatacgagattaattaaaattcgaaattagaaaagaaaaaattttaagtaggaatgcaattttaaaaaaactgaaataccgagattaaaacataataaattcctaaattagaaaaggaaaaaaagtttaagtaggaatgcaatttcaaaataactgaaattcggaataaaaataagaaatattaaaaagatagtcaatctagaacaaaacacatgattaattaaaattcaaaatagaaagtaaaataaattcagaagttagaaaaataaaaataagaattgaagtaggaatacaatttaaaataactaaaattcgggggtgcag

SEQ ID NO: 30073 - DNA, 4645 bp, Oryza sativa
tttggatgagggagtatattttattctctctagtaattatggagttagacttagggcctatttaggggagtttaagattctactaagcagctgcttggtagtcaacttctaagaatatggaaaagctgggtttcccagcttatggcttctagttcatttcttggattctacatctatagcttctcagaatctggaccaaaagctgaattgtttggaggagcttttgattttgggataagctgcagcagctagaagctctcccaaacaggcccttagaatagtcttcggtcctctagtcttctcggagattccggtatgtctttagtaccttactcttctattaagactattagtgttcatagttcatatatagtccattagtcatgtgttcaatgagtagattatacttcatctatatgcttcacctaattaggctagtcgatctatgctacaataacggtgcaatgatcttaacggattgcactagttttaacttgtccaccgaagggtgggagtcatggagaaactagtgacattatttattaacataagcatggtgtgtatgttagttagatgccattggatgtgggtatgcccccacggaaagtgaggtaggcaacaagtggtgatagctctgtccgtccgttgtattcctccacgttcaggtatgatgtaagagttcgtaaaatttcacaaccacactggcaaactagcatggagtggcttctcggtagtacctgggtgtctagaattaaattctagccttgcaagcatgtatgtgttcagtgtaaactaaacattaataatatagaagtacatatgaaccttggctttctatagttcttctccactgcctagtgtatatttataagagataaatctcctgtgtgtaattaaacccattatcatttatcaattaacccatatttagactatggcggcgaagcaattattgtttgaactatatctttacaccgccacattccccgcggaaatataaatacggtatccttggaatactcctaagtgaaatgctacaggagtatccgtgcgcttgctgatttatctgtggccataagaaataccaacaaatatttatagcatgttgccaggagaggcactggttaaagatttagtcacatatattcataatcatactatgattagtgaaccttagtccaaacaagttaaccttgatttgtcatggtcttccgtgcgtgcatctgcaccatgcttcctccgccagcgcacatgcgcgcgcgcatcaggcatcaccctacaaaggtgttgtttagaaatgtattaccactcaagtttttctttaatgtactatatttttttcctccaatacactcgaaagttgtatggtattgaaatattaatatcttatttggcatggaagttttggtatcaggaagagaccttgattgggagatctttctgccatctatatatagtaatagaatacggaaaatatactagaaaaaatctaaatagcctaggttttttaaattttaactagctatagttactcaccaattgtttcttgtaatctctactttccctgtacaagacctgaaccgctccctttacgttcctacgattaataattaaatgtgcacttcacaaagtgtctttggaggggcactccaataatgatcggttgtgttctgtagcaggcgtcatacgccatgcctgcaggctgcaacttgtatatatagttgtatttacaaaacaaatgggacagctatttaagtagtcaatcatcccaattaagtagtggggattgacttcaacatgtcatatgcatcatcaatatattccaaccttcgtggagtagtacaatattccaacttccatatgaccatatcctagttttaaaaaactcaagttgtcaaaaccaacttcaattcatcatagcacaaagaatatatcagcaatacacgttatttagatatgcggctgcccagcctagaatacagaagatgacttttctcatgggtgtgttttatgcgagatgtcaaaactcaaggaacttaagattgggacccatcaaatggtggtgtgtatgcatgttcgtcttacatctgttccgatcggaagaaaagggaagagagaaaactcaagattggggcacatatattgatagcgcaaatggaaacgcttcgacaagtgtatagagtagtacatttgtgtggcagttgtaaaatctctggggagaaccttcgaatagaacaagtatcctaaccaagttcctccagctagccagccagttggcaaagtgtgtggtgactcggcgcagtcatatagtccacggtgaatggaaatgttcgcatgaattcgaccgacaaatggacaaggcctcctttcactctctttgatgtgggcattcgttgggcgtttgtgcagtgtgatttgggaagaatggattattcaaacttggctagctacagctgataatgagagttttcggtttctttgcctagagggaatgcattgtgcaaaaaaaaaaacaattttgagtttttctaagggtgactgaaatacatggtggacgtggtcacatgcaaactgaaattgtgctcactttgtatggaggatagaattaccaagacactgatgtaaaacatgattcactacacctttagttcattatcttaaaaactaatgtttaactcaatcccttcgttcatgtcacttgctgattaaattatactccctctgtcccatgttagttatccctccaaagtattacttatcatatcaatcacatctctttcaaatttatccctattctatcctcaaccacccttttattctcaaccatgcattatttgataagggcactataatcttttactctaaacctatgcatatgccaaacaatctagaatactccctccgtcccattttaagtgcatttgcggggttttttccaacgtttgaccatctgtcttattttaaaaaaaattatgaaaaaataaataaaaaagtcacataaagtattattcctattttatcatctaataataataaaaatactaatcataaaaatttaaataagacggacagtcaaacgttggatacgtatatccacaactgcacttaaaatggaattgagggagtaaaaagtaatagtaaggtttaaagtgttatagataacaaaaggtaacagcaatcatggataatgtttaaagtgggtagataatagccatgcattacacatcgattcatttatactttaacaaagtttgtctggttttttccgataaaaggccagaacacagtttatcacgtgacaaccaaattaacttgaatgactctagaataaacaaaattatataatttccttagattccgaaattaattataaaatggagtaatgtccatctgatatgcaagaacggaatgagatatattatccattaatagcaaaatgcctaagctttgctatgggcagaagaaaaaaacatcataatatgtcatagtaaaatatattcttttatcaaatatcttagtatcatttgtttgcttatttgactatgtagtatttacttgtttgaatcaaatgttagactatttcacaatattagaaaaatatataggggcaatttgtaaaaactgtaaaatcaatagtgggagtgatatattcaccaccataccactggatgcttttaaaggagtatatatatgtatgcctccagcaccttaattacaaatctcaattatttcataaaagaaattggagatgttgccttctccatgtgtaccctggacttgaaaagtcaacagatctcaaaataggaagatataggacatttacaatagaaaatcataattcacgaagtagatgattggatggaaatagagccaaaaaaaaaaaaaactctagggaagcacaaaagcaaagtcttcactgtctttctctgctggaaaacgctgggaatcttctgaggggaagcatattccattccaatctgcatttcaaaggaaaagtacttctttttttagataatgaaggaaaagcacttctacacattcatttcatgccaaataggacatcatagactccaatgcatatatttgatcattatttatttgcttatatcataaaaacattaactaaaggaaagtgtttttcaagagaaattttgtactaccattctcccgtaccaaaaatctattttttttcataaattagtaaattaagattttaaggtttcactacatgcattttaattcaacattacttattttctgaatatttgttgtactatagtgcatgtattttctgaataaatagcaagtagactttaggttttttttttatcattctaatttgaaaacatatttagttttgatatttattaaggatagctaaccatcagctgatgcacggtctagttttttttactatttatgttctacctctgtttcaaaatgaagatgttttgttttttttaagtaaaacttcttcaagtttgctcaagtttatagaaaaatgtagtgacatattcaacaccaaaggagtacttcccctctgcaattcctgatgaccactattaaaaatatttttataatacgtttgtttagcattaaaaatattgctatggcctatggtttctataaacttagccaaaaagaa

SEQ ID NO: 30074 - DNA, 1465 bp, Oryza sativa
atcagtccagatatatagattagcacggcttgtcttctcagccctgtaaaaagaagatgggggaaatcgagagagaccactactccctccatcccacaaaacctaatctagatagggatttgaaatagagaaaatctcttaactactcattgaaaactcgtccaattcctttcataccatcaatttttactcgatcctctccatatcctcaaaatttctctttgatcccttctatgtctctcccaataggtttctttatttttccttttatgtgtggttgcaaatgcccataataccattgtagatggaggagcggcagctagattggaaaacaattgaaaaatgttgactgcacagtatgtgtatttcatgagactaaattaatgagtgtataaaaaatttattatggtattgaaaaaatgcaatactttgaaccttttgttttgaaaaaaaaaataatagtatcaggaaaatcaaagtaactgtctgtatggtcgtcatcagtttccaacatacatgaaattggttcctctatagaagaagttctggtacatttacattagaataccagatcttttggctattaaacctctcattatacagggtgatagagaacaatcatcaggaagcaaggacaatggagaaaatctattgcagaacatcaagagcatccatacaaaaacattaggaccattgacagcaccaattgacaagaaggaaatgaaaagagcacccatacaaaaatttctgaaataaaatacatctggatcattaagagcatcaggagcatcgtacaaatcagtagcatcctgtatagaacacttcatatcatgcacacaccaaatttcatttccaccatacatacaaaacagttcatatcatgcacacaccacaatttcatttcaataaccaaaccaactttccattccatacacaatagtgcaatcgacaaaccaaattaactaaatagtacatcatgagcataatgacataaggtccataacagtacatcactacatcatgatgaagcaatccttacaatagcaaaatatgtgaatgtagctatgtctacagcactttgttgggcatcacaacagcaaaatccattaacctccacaagataaatttaggggcgaagccaagatttatggttaggggggtgtgggcagggtgaacaagtcataagtcagagtaagcaatgccgataacaaaacaagatatcatgtgttctgctataaaaaaagcttgaatctagctctttagttgtattattggatacttgacagtttgagacttgaggcaccatgctcgacagcgagatgcaataggaggacggagagacgtgtgaagccgaagcaatgaagacgatgagttgatttgcattgtctctccgtctctttcttattaattaattaacatgctaatgcgctagtcagtatagcagggaggggggtcggataggggg

SEQ ID NO: 30075 - DNA, 2122 bp, Oryza sativa
aacgccttataacctgaaactgagatgatccgtggcgttggacgctgctcttaactgcgtccatatctgggacgttctttttcacctcgtccttcccatttttttaattcctagatcctaatcaccacttatttaattattaaagggattattaattattctatgtatagaaaatgggatatcactgatatgctgagataaattatgtgtgtgtcagtgtgagatcatcgtttcatcagctgaaacggtcgacagcaaccgtgtttcaaagatgcgccgtcgattacttcttacatgtagaagtcaatcacacgctcgttcacgcattcatgttctgcaacgtacgctctgaagtctgaagcacatactagtactccgtcgtagaaatactcctattaaacattaaaattgcagttgctgcttccttgcagcaaagaacttctgccagccatatgtcctgaacgagtgaatggcagcaaacaacacattactacatttcagttgagagttgacaacacaactgctccctccgtatcataatataagctttagagttgaacacagttattaaaaaagtaggtagaaataaatgttggagggttataattggatgtgtagtgaatgtagatgggaaaaatgaatggtggaatattgtgattggttgggaagagaatgttggtggagaagttgttatattttaggacaaatcctaaggtctaaaagttgttatattttaggacagagggagtagacgactagatcttgagcgaatgatttcaagatgatcacgagcttggtctcctctgaatttctatacctatactcctttaaagaccctaataatgatgatcggtaggtctgtcaccacccattacccaacaaggtaggtggattttatccctttcctagcctcgagccatcaaacatgaaaaattttcttttgacgtggagtaaaaatgatgacaaataatatgacctcaatattttacaataaaattttattttaatttttgaggctttaaagtgtatggtggggttctctcatttaagagaaaattccttgtataccccttaaagtttgctcaatcccttctatatccctgagatttgcgtattcccttccatacctctaaattttaatttggatcccttctatacccctttcatcagttgactgttagttgaccgttatattcatatcataaagtccattttaccgtttagtatcaagaaaatataaatttatgaagtatattgatggagtgtataaatttattgtatacaactattatatttatgagtttattttgtgagatattatttaacaaaaataacttttatctcacgtaacaagatttatattataaaaaattccgtattactataacaaactatgctatatatacagtttctaatagtaaaaaaaatattttttttgttttatctaaaataaattttgtatagataaaaaatagttttgttttcctttcgcgaggcgaaactaaaatattactcttgttaaaaatatctcacaaaataaactcataaatataataattatatacaataaatttatatactccatcaatatacttcataaatttatattttcttgataccaaagagttgtcatacataaaaattatttttgttttcccttcgcaaggcgaaactaaaatatttttttggtaaatattatctcacaaaataaactgatacatataatagtcgaacacaataaatttatacaattcatcaatatacttcataaatttatattttgttgatagcaaaaggtaaaatggactttatgatagaaatttaatggtcaactaatggaaggggtatagaagggatccaaactgaaatttagggatatgaaagggaatgagcaaatcttaggggcatagaagggattgggtgaagttttaggggtacacagagaattttcttctcatttaattcctattgcaatgcatgagcattcaactagtttctttaaaagtctctagttgtggtgacatggaatctgccaaccctgtagttttacaatttgtctgctaatatattttagggaaattttgctacaggacactgcttacgtgtgattttagccttagga

SEQ ID NO: 30076 - DNA, 1732 bp, Oryza sativa
  unsure (1)..(1732): unsure at all n locations
gtctttttatctctaacttcgggaatcttgggggttattccacgcccgggttttcgatttgttttttatgggagtgcaccgggtttttgaggacgtagtttttttaggtacgattgtacttggcgacctccaccagttctatggtcccacccacacccggtgccacgcataccgaacaggcccccggtttgtttgctcccgaagatttcacctgaatagtggggtgcatgcatgctttttggtgtcaaattgagaggacgctaggtccaatgcagcaaaacgacgttctccctagcggcgtcaagtcaaacatttttaactttgactatcaatagtaaaaaaataaaaaaaacttaatcatgaaaaattgatgttactagctttaacattaaacaaactatcataatatgtaactttttttatttacaatatcttattttatagatattgttgatcaaagtagcatcttaaagactgtgtcaaaaatccaaaaatacttatattttgggatgggggagtatttccctagtcgaggcagggctcacctcttcacctcccccacctagtctttggccctagtggtggcctcccagagcccaaccgatggtggctgcctctccttttaatgtagatgaatttttacaatcctaaagaaggtaccacgaggtaccaggtaccgatcgaatctggtcattgatttcataggggtaagatagggaaaagtacattctgtaaccgatgctatccgctcatccttagagcttattgatggtccttaaatatcaaattcgactatcaattcctaaataaaaacaatgaaagaatacaataaaatgacaaacttagaggtagttattattactaaccatttccacaagtcttggtgaatatttgtatgcaggtgaaatatggatgaaaattacccaccttgcgatggaatacacctccgtataataggacgcgagtatacatattggagggcccacaaatcagtgcataactgacatattcaagggctaatcaccgtgcactgccgcaaggacccaccaggcagcttcccgaaccacctttacgggcgctcattcccaccttcacatggagtttcccaccgactacaagacttcatctgggccatgcattggtgaagacggtgaatccaagggtcgcccaaactcctagttcggccaaactgtcattggcgcccctcaccatctgctttcatgtggagggctaatgttcactctcaatgacggttgtgggtgaaaccgatgtccacaaccaccataactgccctataaaaggatgtgttcatctaaatctcaaatggcacaacaagtgaagtacaactgacttacacatttagtctactctatagtagagttctaatataggaagagagtgaggggaagcttcggaaggagtgcccgaatggcggctttctctctgggatgttctagagatgttggcctacattcgggatagttctgaaggagcgccagagttgttggtcctctctccaatcttgtatctcgagaatgtttcttcgatataagttatttgtgatatcattttagtatttagtttacttacttaagtcagatatattctcatcgttgtggtttcaccgcttagtttatactgagtgctctagaacaaagactctagataaggaagaagatttttgcccgaggctnnggtgtnnnttgtacagtcagtttgctgtcaaagccca

SEQ ID NO: 30077 - DNA, 2484 bp, Oryza sativa
aaagtattgtcaaatatagcaaaaaagacctattcaaagtcaggaaaaaagatgtgttcaaaattcaaaatgttttctttaaaatttctgagagttttcctaaataacaataattgtttgtgtgatgcatcagtacaagctcgtgaagagaagaaccctatcacaagtccatttgcaagtctgattggtagacgaacacaacgagcggcgactggtgcgggtgatctcggcgttagccacatgcgcagtcaacctcctcctgccaccctctctcacactgagccggcctcatgcctctttcactgatagcctcgcctgctccttcactcggctacagaggataatgggatgggagagaggaagagggtcgtgggagagggaaggagaaagaacttgataaaggatgacatgtggatcttatgggatatcttttatcttaatgactaggagaccacgtaagcgagaggtgactaaaactgtccgaggttatgttgagagatctaaaataaactatttgaatagttgatgggatgtgtagtgttctgttttgggtggatctagctttgggccagaggaagggctcattgcctttttcctagctcctccaaccccctactctcatttctctccccggggtaggaggaactcgagtccccctacatccacactggatccaaccctggtttgaagtgtgtggtggttttagactttctctaaagcttagggtgtgaaatagacttctaccattaaaaacgatataaaagtttgaattcatgagttggaaattagggttcccatggaaattcaaaatttttactagaaaagtttagaaagttcgagctgaaagtttgagtggtattgttgaaagttttacagtagattgctaaaggtaaaaaactcactgctcaattatccacagaaaataaaaaaacaatccctctatttatgtgttagcgatgctaaaaattaaggctgtcaaaagagaaactctaggctcgtgagccacttgagctcagctcattcaggcccagttcgggctcagctaaaacttcaaacaagcttaactttatatgacttacgctatttatttagcttgtttatttgttaattaaactaataggtaaaatatgtattagtactccctccgtttctaaatatttaacaccattgacttttttaaatatgtttgaccatacgtcttattcaaaaaataattaattattaatttttttcctatcatttgattcattgttaaatataatttatgtatacatatagttttacatatttcacaaaattttttttaataagacgaacagttaaacatgtgctaaaaagtcaacggtgtcaaatatttagaaacggaggaagtatatatgtacataatgattcagtttgtgtttgtaccatttttttattgatatgattagaaaaataattaattttatgaaaagcattcttaaaatatatgttatacacttatatactatatactacttactgcccagctcgactgcatgagctcaaattgagcctgcttaatagggaagtggattttttttcccttgagacaacatccccttgttttgtgcatggcgtttaaaaagttataaaaaattttaaaaaattatcaagatggatcaatatgtgatatatcttttcgcaaacatgcgagttaaaattaggcttatacaattcaaaacaaaaatgacaaatttgaccgtgaattacatgttctattaatagttaaatttgttatttttgtttctatttgtataagttaaatttgaatttgcatgtttataaaatgacatatcacattttgatctatcttattaattttttttatgaggagatatcttttttaagggatgaattgagttttaatagctccaatgcggaaataggccggacctagaactagggtttaatatttcgtttttttctccatttgtatcgaaggtgacaatattccaaaattatttttttaacaaaatttggtgaaatgtgaacaaataccgccaaattaaaaaaatcggttaaaataatatcattttttatgggggtggggttggggggaatttttttgaaaataatacgattttaatggaaaatcgcacaaatatatatcagtcagacaaaatcgcaagtttagcatcctatcgaacaaccgtggttcgacatggcacctatcgaataaccacagttcgacaggtgataaaataatttttatgaaaggaaaaacactgtagcatcacacctatcgaacactacctgttcccttgttcgataggtccctaccgagtactgtagcacgtactttttttttttgaccactaacccgtcaaactgcaacagttcatgaggtaagttcgacaggttccctgtcaaaccacggttgttcgacagtgtattaaacttgtaatttcgtccgaccgatctatatttgtgcgattttccattagaatcgtattattttcaaaa

SEQ ID NO: 30078 - DNA, 1252 bp, Oryza sativa
caagccgagcaatgtaccaaagtcagtgtctaattcttaaatttgctcaacaactaaaatgtggaatggttggcctgggttggcttaggacgagctaggacccagggtagggttgccagttcggtccgaatcatcgtaggccttgggttaaggcaggttcgtgtgggttcacggccttgattaataatattggatagttctaggatcgtgtttacaaaatggccttgagcaactaaatgtctttaaatgctgtttactgcaaccctaaccctctatattataattcccttgtactcccttgcatttattctgcatttgtgggtgtgtcttgttgagtacggtggttgtactcagtcttgctcaattttcccaagcccagatgaggagttccttgaagatgaaggctttggtgtctagctcgtgcctgccgtcaagcgcctgtggtcgtcgccctagtcttccgctgtttttcgttgtctttgagtgtgctgggccgttgttgcccgtgtaataattttatatacgcttccgcttgttaaactctgaattgtatcaacttttggtgtaccttgcctcctgggacaaggattaatgcacgcacgtaaggaatgcccgttgggttatttccggtcgtgacaagttggtatcagagccttccttgaccctaggacgagccgtagatcccaagccttagctatattttcaaaaataaaaatcctttattatttgtgaaaacccgctattctctctttgtcttgctgcttcatttatcgtcaaaatctgatcttttaaatgttgtttttcttttgttttgtttgtagatggccggcagcgttacccgtcgtggtttggacatgtctggcttcgtcttggagctgcgaggcatgtgcgtggtcttggggtatccacacggagtggattaccaggccaggccgctcccggagcaggagggtgaggatgcagagcctcacgctggttgggaggtcactgcagtgatcctctccggctctcccgagcggacttcgctggcagtcaccgcgggtggggattccttccccgccgcttgccagaacgccgctctcctcgccatcggcacccttcaccagcgctacccggacgagttgcagcactcgccctaccgctaccaccctcgtcgcggaggagccagcgaccacgccaccttccgagacgccagctcggaggatgacgctaccgtcgtgcacctggcacgcatggtggaagcgtactacgc

SEQ ID NO: 30079 - DNA, 652 bp, Oryza sativa
cccgtgggtggatccgaccgagaggatctgcccgctgccacgccgctgtcccctcggctggatccgccggtgttgttgattgtgtatgttgtttgtattgtttttcttatgtgataatgatgtcgttgttgtgattgattttggggtttttatgcgatgatgatgttgctcctgttcacccctccatctcctataatcatctcttgatattttggatgattttgcgatgattctgattggattgagattgagattttgtttttgggtcggattatgatgatgtgggatttggagaggaggtgcgcgtgatgttacagacggacgaaagatcggtgtgacgaaaggaaaaatacgaatcttttaattagttaagatattgcatagtgcccgtgcgttgcaacgggaaaaacttccgtttcatagtgtgacacctcgagaacctcaaatcagtaaaaatcaagtctaatttgatatattaccaaattggtagaaccgagtctaatttgatgaattagcataggatttaggctttagtcttagatttacattgcaatgcggtggtttggcaacaacggtggcacccgatctagctgcatgggaatttttggatatatttgtgtgtatatgcttagttttccctatctttgatcat

SEQ ID NO: 30080 - DNA, 667 bp, Oryza sativa
tagaaactcaaacgttgaattttccatggtctgctcaacttgacaattactgcgtgtcaagcgatcttatacgcatactatgcgcacaagtgattgtatacggatatgatgacagtataacgtgtgatattgatttttttaataaaaaaatgatgtccctttccttgatgaaggaacaaagactttttttaaaagaagggtattactaaaaccaaaaatgacaaaaacaaaatatcagtgcacatggcaagtgtgctcggcaattttttctctgtactttaaacaaaaatacttctatatgttcttttttataagggtggcacaaatcttttaaatgagccaaatatctacattggatttattaaaaactgtataaattataatttatactctgaaaggttgtgtgcatctctcttggagaaaatgtataagttgcaaacaaacattaatccacgttatgtaactttttttcgccggaaaggccgaaggaggcctgacggagcgtggggctcctcaccgggagaccgcgcaggcccccctttgccggtcggccggggactcagggtgaaattctaagctctctgtatgtggaaggttcgcgaccgtcgaaagagcataagacacgggcgatgtaaaaaggttcgggccgctgagaagcgtaataccc

SEQ ID NO: 30081 - DNA, 664 bp, Oryza sativa
tccatcttcgatcgtcatttgtgatgactgatttccgacattttgaaattgtgattagctattacttttcattctaaagggcagtccaacccatagtattcataagcagtgtctatagtgccatgtcaataagacatcacaatagaaactacactctacaacccatggattcttaaagtatgccattaataaatacatcatctcttttctctaccaatcatatttattcttcatctattatgaagacactattctctccaaatgtaaaacttgatagtgtctagtgcataggttctcgtgttgaagctgtgtcttgcatgagacccagtttcttcctctctccactctctctctcttaattaatatagtgtcacataaactaaaagtcctacatgacaatgtagttaatgtcatagacaccattctaggtggagggttagaaatgccctaaatatagtaaactaatcagattaaagacaacgctcaatcccctatacaaaaattcactcggtcgtgtctcatttattactcggtttctattttaagataatggtaattacatctttaaaatagtcaaggtgaggatcacgaatgccttctccccttcttttattgcaaatgtcttgatttgtttgcaaccatcaactgtcagtcaatcaaaatt

SEQ ID NO: 30082 - DNA, 6159 bp, Oryza sativa
tgacggcggcggcgcgtggagaaggagaagaggggggagaaaatggaggggatgggtgtggggtggagaagaggaggggccgggttttataagggcatgggggaggggcgggcggcctcgtggcgacgcgacgggcggcgcggctggcggtgatggcgacggtcgggcggcgcggcgcggggctcggcgcggctcggcacggggctcggcgcgacggtgacggcgatgcgacgacgacgcggcgcggggcgcgaggcggcgacgcgacgggcggccgaaggcgacggcgcggcagcggcgacgcgacgggcgggcggccgacggcgacggcgcggcagcggcgacgcgacggactggcggcgatgggacggccgatggcgacggcgacggcgatgacgatgatgcgcggcgacgggacggcggcgcggggctcagggcggccacgcgcggggcagaggggaggggttagggctagtgacctcaatcgaacacctatggggcaatgaacagtgacttttcctatttttccaatttggttgattttcctattcaaatcttgtcccaatatttctaatttttgcacaaatcaagtttacacaatatttgtgttgctctaacctagattatcactacccatattttatttttatcattatttttatatttaatttattcgaatttaattagggttaattcttattccatcgcacccaaatttaattgttaccaatatggtcgtgataatattttatttatttccaacctcacctaatctttattttaattagttattttgccaatttaattttagtgtttattcctaattaattattccttattcacgatcggtaaactttgaaaccaaattccaataaaataggccaataaaatcggcatgatgcaatttattaaaaagttttttgaaggcccatattttcagagtgttacacattattaagctaaatgtgtgagattttatttcttctggggtaaattaatagtccaaaaggtggaggcaaggcactagtcgaattgttgtatcaaaggttgatcttgcagattgctccatgtatatatatatgctcttccttttaagagtagtttaactagaccaacattgctaataatctcaataaaatattatatcattcatatctcccctatgcaaaattttgttctcttttgacctgataaaattaaaatcttccaagaaaattcaattttggtcatcatccacctcaatatcgttcagcttggtgacgaagtcatcccttagctcgccagcacatgtacataaatgtttgtcaaattccaggtttctgataagtttgaatttgaggtaaactgaattaggattgcataagtaaactcgtaagaacgttgcaacgtaactaataatggaactattccaaatcactatcagagctccttattttacccttgggaagaaggaagggtagtttgcaaacttatcaaatcttctaggacaaaattttcttaagaatgatgaaattctctctctctttaatttacctgcagacacatgattacacaagagctatccgctatcttttcagacagtgccagaattaattcctctcgcattctaacagagagaatattacactcacgttattttgacttatattcattataatcatcacacaagtccagacaaaggagagtgaaaacgtgtaggcatgtatatcacgaggtgtattcatgggcggcgcacacccaggtgtgcatgggcatctctcgatctcaagattcttaacctggagattgccctagagatatcctactcgatggacataaattgggtgtcaggtagttgtaatcaatcttccaagccgtagattgagacgtacggcgtatgaaggagacgagaaaaacatggggataatgcagaggtgacacgcgattggagaagacgagtcggcagtgcaatgcaaacacaattagcttcatccaattcatcacaaatcaatcagtagcccagctagttcagtccacatcgaaaaataatagtgactccatttgctgagcttccgtaaaaaaattaggtttctcagcttcttgctttaatttttttttttgggaaagcaatagtaaaagtttagttttttcagcctttttattgtctaaattttataactgtcaagtctctcgatgagaatattaaatctgaagtatttagcaagctaagatttttaaaaagagctagctactataggctcttcaaacagaactagaatcacctgtggttcctaacaaaatgcttcaccacatacaccaagaaccatattggaggatcacaattttgagcttccaattctatgtatgtaccttgttgattatcccgaagatcatttctagcacacatgtctatgtagtattttagaatttatgtgcggtggaattgtggattataatagaggcctatgtttggtggtgttcttttctcttgaagataaagatgaagatgaagattaagttttttacgtaaaacgaggtagtattaacataagattgattgagttttaattattacaaaattcaaaaacagattaatatatatgatattttagagcaactttcatataaaaagtttttacacgaaacgcaccgtttaacagtttgaaaagcatgccataaaaatcttaatcttcatcaaactcttgttcgagaaaagaacgggaccttagccctgctttaaaagatatttgatcaaggtaaattcttaaaattgatgctgaaatcattctagtggaatgatgcattaagaccatcactttctcttaattagggctaagctataactaaattttgtgatgttacaatattggcatgttctgccatgtcgtgccctctctttacgagagaatcccttatatgccactgaaaatttgtctgatcccttgaatgccactgaaaattggctcttcccttatatgccattggtttaaattttcgctccctctcatcattgccgtccgttgactagtagttgactgttgataggatgtaatcacttgtcatttttttacagaaatgacaaaaataccctttggcccaaacatgagaatatggcccaatcgtccaagtgggccaagcccaacatccctctgatgcaccatgtcagatgtcagtaagcctgaacatgtattttggtactgtgtcagtatgcattttggtactctgtggtcatttaaacagctccctataatatttgttgcatattctgtgctactgtgtatatctccttgctctagcaaacaatctgtttgttatttttgctgtttagccgtgcattacaaacaatgtgcaattacacattatcttaaatgtctgtcagaagcaatctattatattgcttgaatgttttgtcatactgtgaaaaacagagaaatgttgtgctccctagtaaatattgttgaagcttttgttcgagaagtacgtacatggttaatgtatgtggaaaatacattaatgccataacagattgctttgttctactatgaaaaacagagaaatatgtgcctcaaaattatgtgactgaaaaatattcatatattcaatatatagattaatgctatacattcatatattcatttattccaaatatatgtgatgcctagctaaaatgtagtatataactgacatactaacacctactgcatgcctatcaactcaagaagggcaaatacgtcatttcactctacagttaacagtcaactaccagtcaacggacggtagtggcatgagagggagcgaaaatttgaaccaatggcatataaggaaagagccaatttttagtggcatccaagggatcagacaaattttcagtggcatataagggattctctctttatttatattgtcctcatgggtacctgcctaacttgtacctggcctagggatggacagctcgtctccacaacatttacatttacgacaaaattgaggagatcatgtcaaggatttattgctgaatgaacacacaatgctgctaccacctaatccatccattgcaaaaatataaacatgtttaattcaaaatctatactctctgtctcaatataaattcatttctatcactttaattttctcccaaaataagtgcattcataaaatactacatattccaccaatcatttcttatttaattttctctccatcttacccccaaccaatctacacttttaaccatccctttcttaattgggggcatataagtcatttttctttcctactactaatttgtgcttcatgtgctagaaatgcacttatttagagatggaggtagtatcataatataaacatttgtggagtactactcagaaatccatacattttcaaccaatcatgtgtttggaaggggaatataagcaattcaaaattcataattggccacttagactaaaagagaatatttttctattaacataatatattttggaactaactaatagattaattagttaaaaatatatattttagaaaatccatatttctagtcgaagtcacgaaaaatcatgaatattgtgagtttcacactcctccctttgtttaaatctcaattgattttaccatattcaaacaattattcaaagtagccaagatcgaaacaaataaagttaattggtaaccaataattaaatttctatagataaattgtggcatgaacatttatatgtccaaaagtcatattttttagacgttatacagaggttggaatttttttagactcgtcaccacaacaccatggttaattatattccacatgttataataattgggtttagaaaaatatgtaatacccgggttacgtttaatgcaagttaacaatattaacatgtggttttataagagaaagttatataatataggtgatggctacctctttaattttatccacaccatctctactgattaatttaagttaatatacataatacagaataatgtatcagaaataacgaacatatatacaacgatacatcacaatgatttaccattgaatcataagcaatagaaacagtttgcatgctaaccgtttagggccctttgttggaatgataaaacggaggaatagaaaaaaaaaacacaattgtgataggaaagcaaatacaaaacattgaaaaacataggagtgaaatttgattgaaccacataaaaaatataggaatcaaatgacagaaatggactcaaagaaaatttttcaataggttgaagctcttgctaattttttttctaaaatctctacagaattgtccaatcgataggaaattcaaaggataaggtgtgattcaattctttaattctttgtttgaaagatcttcataaaacattttctacagtatttcaatactccaaaatttccagcatgctttttctctaaatcaattagtgatgggtcggcctgcataggtgaccagccacctcccaacttataaaagttgctgccaaaatttaattttatggttttttaagtcgtagtttatttttaaatatatatttaaataatcaaaacaggtatgtaaaaattttatcattgaattattttaattttgtcggcttatagttatgtatattgcaaagcaacggggctggccaagatagcttatgcgcgtggtttttattcatctgctttaaacatgtaaaataatttatgccactttgatttcatcttaccgttatggcctatatatatacggaatatggattaaccgtactccattatattcaagatttgcatacaactatcactgttccatcacgctaattcttgctaactcttatttcattcatttttccagtcattggattattgcgcctcaaacttctaaaaatacatttttctactgtattatttagaccatattttagctatttctaagtttatttctcaaatatttaatttatctcaataattaaatggataatctatggaaataattaattaaaatatatcttccaaacgggacctaacttaaattaaacttgtctattcagccattaattaaggtcgccaaatactccaatcatgggtgcagatccctggagttggtgccaaattcaccgggtggatttcaacagatctgaaccattagtttctttctaggagctagaaatagccacgtcaccttctttttt

SEQ ID NO: 30083 - DNA, 1660 bp, Oryza sativa
tcctgcagcccgatgatgatgatgatgcatgagatgacttcgatttggtttggttaatttcttcatcagctggccggccggtagcacgagcggcctcggcgagagagagagaagataggggttgtgtttggacaacccaccgatccggtgctggatccaacggaaaccgggccattttttacaccgatcacgatgagatctggggggagtgcacgcacgcagatgagtgcatcataaatcaccgaaaaatctctctctgagatgggagtttggttgacctcgacattggcctgccttcctgtgagctggctcccgtgcaacatttggcctttttttttcttctttgttgcaattgatctagacttcggaccagcacacgggcatgtgttgtagattgtttcgccaacctacaggttgcacggattatgattatagatactataaatattaaaattttaatattatactatatgtttactaactttgaaatcatagcttcttatagtgaaagaagagctcatatcagttacaatttggtaaccgttaatcttaatttttagaactaagttaataaaaatcattaattgaaagtccgagatagatacgatttcgtatttattgattaaggattcgagagttatcaaattagagccatgtcattttcagttacgttatttgacactcaacacgatctacggccacgataatataatcatttagaacatatgaattttatatgattttttataaggttttagtgtctagtttctagctccgaagaaggtctaagatgtcttatcatccggactactccctccgttttaaaatgtttgacaccgttgactttttggtacatgtttagccattcgtcttattcaaaaaatttaagtaattatttattctttttatgtcatttgattcattgttaaatatactctcatgtaaacatatagttttacatatttcacaattttttttaaataagacgaacggtcaaacatatgctaaaaagtcaacggtgtcaaacattttgaaacggatggagtatataataaataaatgcatgtttacttttattatggtgcttatttatactaaatattttaaagtacatatgtagaagacaaaactacatatgttgttctagtttatttatactaaatatttttaaagttatggatggtcaaattataaaagtttgaccttaaccttctttaaaacatcaattattatagaatcggagggagtactatacgggatcaaaccgcggttttgcaaaacaatgcacaaagttgccgcactcccgcatcgcaaatgaccaggaacactaatgactgctacaaattactgtaaaatcgtttgttactccgtactaagcatgtataagagcacaccgtatactaccagtagagattgatcgagatcacagtaaaataactccaactcaaatctactttcccggcacagtttacggccatactcagtgtcctgtgtccgtatacaagtatacaacagataggtgcagtgacaaattctgaggctctctttagttcccacgcaaaaatttttcaccctgtcacatcgaatatttaaacacatgtatggagtattaaatatagataaaaaaatctaattacacatattgcgtgtaaattgtgag

SEQ ID NO: 30084 - DNA, 2322 bp, Oryza sativa
ctccactccagacctaactcctggagctaactttaggagtaggagcttttccaaacaggccctaaggatttgtttgggagtgcatttttctccaatgtgtacgctagtacacattaaggacttgtttgggagtgttttttttctcatatgtgtaaaaggaaaatagtagtgagagattaacccccatattaactgagctgttttggtaaaaccagtcatatacccgtgcattgcaattgcccatatcattataaagcaattttttaatcaactacttgtttttagtttttcttaagagttttttctcttttttttttttttgcagagcgatcagcaaccgcagttttctgttttttttatttaaagtgtaaccgctaattttggttctcttatgactttttcgttttctctcgctatttttattccaacaggcgatgcacgctagcgggagaggtggaaagtaggatgattcctaaaatactgaacacccagctcaatgatttgcacagagttaattactgaactatgaaccatttttttttagaaagagatgcattcttctcctgttcccattagagaaacacaacatttttttttgaatgactcgcacgagacagtgcgaagttctattgatagagcagaaaaaattacaagattacaaccctggagggtcgtaaccaggaaaaaaggaaaaaatataccaccacgaaacacagcattacaattgttcaacgaactgaaaacaaaagacaggctacagggtcgccatccggagcaccaccaccagatgccatccctcagccaatcagttcagaacaacctaggatctagttaagcaaaaacagaatttaggcatccccaggcacagcatctgggtttacaacttcagcaatacaaagactttcactctaggtggtattttgattctccacattttcttataggggaattgcatgttgtgcattttcaaagccctgtaaaaagacttaactgtgaacacaccattctttgttaatctccaactcagcttgtccttttcttttgttagggacagcctatcagcaaattcttctccactttaccttcttttctccatacaggcatcttctgaatctaacttcttctaagcctttttgttttacttttgcaattgttatgtttttttagagttatattatacagctcaggaaagctttctgctagaaacttgcccctacccaccagtcttcccaaacgtgtattttctccaatttccacttttttttctcacaaaaatttagaaacagttttttttttttatctccatcagacctgatcagaagtacagtatgaatcactcactctgtgtatttctgtaagagtgttttgttatttttttaaatatttgtttctcaacacctcttgccataagccatctgtggtttccaacttccactgaactacgagcaataacatccatcccgaaataaaatgtttgacaaccaataacaaatgcagatcgaatcaccatgaaatttgacaagagaacattcaaatagcacaaaagaacaacaaacccattattctccttccccatcctgatatccccaaaccaccaaccaacacaatgacaaaccagagcgaggaagagagcagcagccgacgaaggccacgcatcctcgcctgaagctccccccgtcggcgacggcattattcgcggtctccagtctccaccgcctacaggccgtccctgccgacgtcgccccgccatgggtcgtctccgtcccccgggcgctcctctgcatgaggccctccgctctccgcgccgcagctgctgctactgaggctttgagggagaacggagaaggcgacggtggcggtggggaagggagatggcagcggcggccggcggggattgggcatgcggcggcggagttagaggctggactggaccgaaccttcgttggattgggccataaatgggtgtatgttacacgacccatcaaagcgtgcgtttgagcccagagcatggagaaaatattatgggcctgtagtttacaccagttttgggccaaatactgggcttctaagtgggccctaagtctttcagcaggatcgagtaaattctggtggaataagttcactttgtgacccttaaaaagtgatcgaaatttaatccgtgaccctaaactataaaaccggatatctcgacccccaaactcttaaaactagtgcaatttgacttcctcggtggttttgaagggcggtttcgctaatgtggcacctacgtggcgatattgaccgagtctttgatacacgtggcgttgacgtggcacttacgca

SEQ ID NO: 30085 - DNA, 1399 bp, Oryza sativa
  unsure (1)..(1399): unsure at all n locations
tgcccctttatccttaaaaaaaacttaggatccgattagacattttctaatataaggtatctacacagaaaatatcttatctagtaataagttcttatattttaagatagatgaagtaataaattacaactgtaacgttggagaaataaattatatatatatatatatatatatatatatatatatatatatatatatatatatataagacttaaatgcctctcgttaaacgagtggtggctaggggtaagatgatggtggttgtttgtttttttttctcgtcgtctctataacatgaataagaatgtttttgtatttttttcgtgctagatgatagatggctgctactgcgcaatgtcgagcccatctcaccacgctgctacatcattccatgattccatcgttgactaccgctcgccacccaattgccctctccactaccagtcacaagacatagaacaaccgctctatccttatagcaaaatccagcaaagccaccaagatccaaatttcatgatggatttttggctgaatcatttttttattttctagtgtgatttacctgcgagtaattntatcacttgtgtgtgattgagcctgtaattttttcattcgtacggccattttgtgatatagattaacaatactcttagtataagtttttactcttatattgtgtattgaacacatcagtaaacatattactacatggtggctatgagatcatgggctatatcgagaggaaggtgtaattattttactcgcagactatgaaatgtaaacaatatttataacactagtaaaagaattactagcattgtaagctagtagtaattcttttacgaccatctaggagtgtcgtataatgttggggtatttatgcaagtaaatttgttacttttgaagggggcattcatgcgagtaaatttgttacttttgaatgagcagatgtgggaggctaggagtaaatggaaaacttaacggagtaaattcgttacttttgaaacgtgagacactagaaaaatggaaaactcggaaagaaaaactagacggtaaatatttttctaaaacgcaaaaactgaaaaactggagagaaggaaaaaaaaggaaaaatctggatggttaatattttactgggccctttgatgaagcatggataagatggaaaagtgaaaagaagtatggaaggtgatgtggtaaaaaatgaaaaaaaaatgaactaggaaaggtgggataagaagtaaacgtggggtagtaaaaaaaggaaaaactagaaggagggagcgttatgcggcactcgaactaatattctgcgcgcaacgtgtggattagcgctaccactaaaatataaacacttttatcactatttacagtcatgtctgtcatccatcaatcacat

SEQ ID NO: 30086 - DNA, 4092 bp, Oryza sativa
ctgagccgtagatagtgaggcgttcatggaggagcccaaggatgcgaaaacgacggagtggacactatgggaggatggcgtgctgctcccactgagcaggaggaggacaagccacttggccgtggtgaggttattgtgcactacgaatgctcctagcacaaccaattgtttgtggcttcagcttcatcgccatcgcctagcaggcacgcgctgtatggttttctccaagctagcagctgtggacatgcgatgacggaatgctggcacttagttttcccatcttcttatctaccttttaggcccattattttttagctttctaggagtgcttagaaatggcatggtcatcagctccaacccaaaggacacttggtttgcaccggtagatatactcatacttgctttatatagagatgcggaaacgacggagtggacactaccggtcgatggcgtgctgctcccgctgagtaggacaagccactttgcagtggcaaggtcgtgcaccgtgattgatcctgcgatagccatcgtcggtgcattcatcttcttcttcgccattgcccagcagacatgaatcgtaggattttctccaggcaaacaacggtggatgtggtgatggctaaattttggcatttatttttcccatcttcttgtctaccttttaggcattttttattagttttctaggagcggttcgaaacggtatggtcatcaactccagcccaaagaacgcgtggtttgcagcgataggcatactcatacttgttttatatagagacacgaaaataacagagtggacactacaggtcgatggcgtgatactcccaccgagctagacaagctgtgaggtcatgcaccgtgattgctcctgccaaagccatcgtcggtgccttcagcttcttcgccattgcccaacagacatgaactgtaggattttctccagacaagcaacggtggacatggaaacaactaaattttggcatttatttttgccatgttcctatctaccatttaggccttatttttcgtatttttctagcagtgcttaccaacgacatggtgatccactccagaccaaagaaagtttggtttgcacagggcggtatactcatactttctttgtatagaggcgtcttggcaaagaaaaatgtgtatgaaaggttgctcttaatgactaaacaaatccattcagttttataaagtgaggtttaagcatactagaggagagcaaagtggtttcaacacaaaataaaaatgtgtcttccagttttcggttgcttgtgtgagaatcataacagaagagaagtgtgctataaatttatagctaattgtagcacagattccaagacgctgtgtatacgagaggtgagactagatattaatggtgtaatatacatgaatttataggtaagaaggaaacatatcctatgcacacaaagcttcccgtgcacaccaactagcaaatatcacagaaaattctacaaaaaaattggacattccctcctaatagtattacacgttcgtgtgaaatcttattttcaaattcattatattttagctgtaacaaaaaaagataaaattctgacagatttttacccttaaaactgtcatatttttttacttttttgttacagctaaaatataatgaatttgaatacggtactttacagatatatgtaatactattaggagggaatgtccaactttttgtagaattttttatgacatttgttagttggtgtgcattgagtatgcacgagaggcttgtgtgcataggatatattcccaggcaagaataggccattagattagctatagatcactacaagagtgcaattttcttggcggtccaaccgccaagtctaaaaaggcagggatattacgatttcttggcggctaaccataagaaaatgtcttcttagcggtccgccttttaagaagattgtcaactttcgaaagcgccaagaaaaataaaccttgttgctttggaccgacaagaatatactttactcggcggcaacaaaactttttattcttaacagtcagaaccgcctatgaaatttcttattctattaaagatagtaggtgattatactattaaacttgctataaatgcatgaaatacattagttagtagaggtaaatgcaagcaatccacctcagatgtacgtgggttaaaaaaggggcaaaaatgtttctagatctttcattttttttctttagcactgtactggttcactttataagcatctaataaagtttcctacgtttcggacccccttcacttctccatcataaaacaattcccaatatacgtaagttgtgttttgtgtgctgagtattatgtctgtaccgcttttttttcaaacatacatagtcttatagcatcacaaaaagattacgtataatcttgcccaaaaatttattgttgacttcccccaaaaatttattgttgggcttcctaaagtgaaaatagcaagtaaaaaaaattgatctctccgagagagagtctaaattttatcaaaaactaaaagtgggcccaattctccattttttttctccatatacgcagattagattgcgtgctctcctggcgcgggagagtcacggttgggagtcggaggggagcactccctctccctcaaatcaaaggggcgagaaatactggaaatggaactccaaaacatgttgacgactgtagggttcaaatcaaaggagcgagaaatacagggaaggaaactccaaaacatgttagaggactataagggatatgttggatccgattttctaccttaaaaacccttaaaattagttttgagaagaatataggagaattgttagtgattctcttaaatattttctttcggctgtttagttcacgataccacttgtcgccgtagcgttagcacatgaatattcctaataccagtcaataaatgggtgatgggtgtgtttgatctctacataaccgggaaagtaaaatttcaaatatgttattacacctaggaaattcacctctcttataattattgtgtttttttatcagtgtgaggattttttgtttgaaacattagcagtgtggggattgaaaaaaggattaattggtaacaaggatttgcggaaaattgactcaccgttatgtggcagcgatatgagatgaccgccaaaccaagagcacaaatcatcttaatttattccattgtccgagaaagtgagcaaactaccaaaaaaacaagagaagttggtgattgtcttgtttgattaagcacatacggagtagatttttagaggaagcaactcagaatcgggcgccgatgggagggagaaaaatcggacgccgacgtcatgctgacgtcagtatgatacatgcgtgcaaaactactttaaactatttttctcttaaattatttatctaaatcatcgttgcaattaaatctttaaaacaataccacacatggatatattctgacaaaaaaattagcttattattgaattattttaaatgttgcaacgatgttccaccaagtatattggaattgtttcattaagtagatcgaaaatgtttaaatagtttaaattgggcgttgtttcaccttatataaaaataatggttcagtaaatagcgaaagaatgtttcaattcactgtaatatttgatccatacatagtaaaacgttataagtacactaagtgaaacattttttatgcaaaaaaaaatgaaacgaattcccttaatagagggtttccaaaatatgtgggtgatttgttgcaaaggaatgttgcaattcactgcaacattagatatatacatagtgaaacattgtgagtacactagatgaaacagtgaaacattatgagtacactaggtgaaatattttttagggaacaaaaaatgaaatgaatttccttaatagaggtttttcataatatgtgggtgatttgttgcaaaagaatgtttcaattcactgtaatattatatctatatatagtgaaacattgtgagtacactgggtgaaatatttttttttgagatacatgacaggtggggcagaacacatggtggggcccgggggtatgtgcgcgtcgggggggg

SEQ ID NO: 30087 - DNA, 804 bp, Oryza sativa
tggcccctgatggatggaagaaaacaaagcaaattaaacatatttgactgatgatatatataggttagatggagagggcagggcaggtatatgatggcaaatgtgcatcatgcatgctagcatggtgtaatttgcatcgagtgaaaaaaaaggagtttactaaaccgtctacgtacgtattactggacaataaggagtgtgtcgagtgagttgctgcacagatgttgaagcgtaggggggtcgatattcttacagtgttcattattgttacatgtgtacacatatataacttgacattctcaatttttttgtttaatgatatatatatatatatatatatatatatatatatatatatatatatatatatatatgttgttctatacaaaaataatgttggaattcaatattgtacattgatcgcttaaatataaggacttgctttttcataaatataaaaaaaatgttatgcatgtgtaaagtatcatttttcttattatttagctagacaactagtaagaatatcccagcccaaacaataattctctattgaatttttttcttagtttgacaatctatgtataggtataggaagtaatattttagtatctagtttattaagaaacaaattaacccacaaattcaagacgataaaaagatccacattcttccacctgacagttaaaaccaacatttcccaccagccaagtgagcccaggtgagctaggctcatgatcagagtagtcactgtgggagtgtgttgcaatcggtctcatcgtctttctcgtttgtaccaacaacatc

SEQ ID NO: 30088 - DNA, 1871 bp, Oryza sativa
aacttttgaattctaaattagattcagtcttctatttaattaggatatgctaaacagtgtcgcttagataatttgtgttgccaattggcctgaatactcaagtgttccctagcccaacaatcttccgtggatgcatcggtgcactgcaggcctgccacgtaagaaataaaaaccgagatataatttagaaaatgtgtcgaatcatcatgtcccttattttgttttttatcctacggctatgtgagacctaagaaaaaaaaatctgtcgaaagatatctaactagtcccatagctaaaagataaacttattctgaaacagtagttgttggccatttataaatgccccccatgtgatcaatctgaaccgaaggctttggggcttggacctttgttttgagatcgagtttaaccggcaaagcccaaatgagtctcgcgagtcgcgcgagtcatgagactcacctaacctatcacctatggcatctcgtcattcttttatcccgtcgtacggctttgttcatatgtggtggtctggtggaccgtctctaaagttcatgctcttcagattggtgggtaaattgaacaggaacgtttcatctgaaggaatcagacccaacccttacatagcctgtgtttagatttttttttctaaaaacatcacattgcacagtttgcatgtaaattgcgagataaatctttttagcctaattatgccatgatttaacaatgtgatgctacagtaaacatttgctaatgacggattaattagacttaataaattcgtctcgcagtttacaagcgaaatctgtaatttgttttgttattagactatatttaatacttcaaatgtgtgtctgtatacttcaaaaaatattttggccaaggtactaaacacatccgtagtactcaaaataataaggctgtgtttggaactctaggttcccaacccctctatctcgtattccacgctcacacttttcaaactgctaaacatcctaaaatatagcaacctaagatgggatgagacccatcagcatgtccagattcatagtcctaggatgggacccattctaggttgctatattttaggacggagagagtagtacttaattaatcacacgctaatgaatcgctccgttttccgtgcacaccgtgcgtgttgggaacatatgcttccgaacacagcctagtcctaaatatgtcgttctgcactggcattgttggatatgactgtaaggcgtcttcctctatttccgcctcagtctaagcctggttaggatctgatatatgccaaaaaaaagtcacactttgtttagacttataaaccagcttatggggtaaaaagtctgagggtctgtttggcacagttccatctccacccctcctgtggcaggagctcaatcaaaaagtttcaagctttcagctccacctaaagtgggagtggagctgggtggagctctctcacaaaatgaactagagaagtggagctggattcaagcagctccacaactccactccatactcaactcttggagttaaaattagaagttgaatctctaccaaatgggagcctggcctgtttggcacaactccagctccaactccacctctagaggtggagttcagccaaacagtttcagttccacctaaaatgggagtgcactattaagtcactatctaagttgaacaaatctttttggcttatatgaggtacataaatgatggaactctgtcattaaagttaggatttgatatccattagcttataaatcatataagaaaaaaactaacttaaaagtctatgaaaataaactcaatcaatagccatgtgagaggagagaggaaagataaattatttttatttatttcataaa

SEQ ID NO: 30089 - DNA, 11358 bp, Oryza sativa
gttactaaccgggaataaaaatcaaaacacactatataatccatagtaccgatcctcttttcccgtccacacaacaaactcctccctctatctctttttttcctctctaacttcttatctctttccttatctctaactcccctcctctccttccttttttccttcaccacagtgcaggcggtcggcgcggaggcggcgacgcgggggacggcgcggaggcggcctgcgcggcagtcggcgcggcagcgcgggggaccgcgcggcggcggtggtgggcggccggcgcggcggcgcgggaggccgcgcggcgatgccgggggccgcgcggaggcggcggctgcggtgggcggccgctcggcggtgaccgacgcgacgctggccggccggcgcggatgggaggaggggaggcggcagtggccgccggccggattttttttttgaaatgtgaatctgtgatgtatttttgtgtgagatgtgaatatgtgatgaattttttagaaccctgtgatgtaatttttttaagagtttgtgatgtatttggatatgatttgtttgaggatttggagatgttctgtaatatgtgatgatttggatatgggaggggatggtgtgaaatcaatattcaatattaaaagcagaaaaaaaagaaaaaatatctttagtcccggttggtgttatcaaccgggactaaagattctcccatctttagtcccggttggtaacattaaccgggactaaagattgatttttagtcccggttatttgaaccgggactaaagattctcccatctttagtcccggttggtaacattaaccgggactaaagattgatttttagtcccggttatttgaaccgggactaaagatagcgatctttagtcccggattcgtagtcccggttggaaaaccgggactacagggggttacgaaccgggactaaaaagcatttctccaccagtgaaccgaagtttcatcatggaccgccaagcttatattttcacttagcacagttaccaccactctttacactttaaactagggtttacaagttagcacaagaacatcaaatgtaacaggtatacaacatcctataaaataaatggaattgcattatattactgcatatgaacattcaaagataatatatatttcattactatgtatgaacattcaaagatcatatttcactgcttgaaaattaagatatcaacgcatgttgttcaaccttgtccaaagcgtgaacgattgtaactatatgctgtgatgttacgtgaaaagataaatctagcgtagtctattgggaaactttggttgataaaagtagctcaaagtgaaatttactctaacatttatctgcaaggacatacaaggaaaaaagttgcaaaaatgtcttaaagtaaaaaaaaacagcttacaacttggaaagagtcgagaacttatgttcgagacaggagagtcaaaaaaattaatttagggctttcatggaacaaagaaaaaacataagaccttttaggattgaaatccaatggaaaattttcataggtgctcatttggaagaaagaaatgagcacttgagattcctacgaaattcctatggaattggcttgaatcataatttattttaaggatttctatcatgaggttgggcctcatgggaaactttccttgtgttatctctctcgaaaaatcctgtatttttcctatgaagcatctaaataacatatttcacacaattcctgcattttaggaattatttaaaattcctaagatcaactaaacatgccattttgattcttacgtttttcatgtctagtgtttttagattcctgagcattttttttcttttttgccgataaccacctattaattcaatactcaacagtgacacaaaatgccagagctggcaaagtggagtagctattctatgcaaagatttttccaaacattctctccggttataaacatttgacgtggttgactttcattcatcttattaaaaaaatttatataaatattatttattatgttattacttgtgtgtctatatatatatatgtatttatttatttatttatttatttgcacgaaatttttaaataaaatgaacggttataaaatatttatggttaaagtcaaccgtatcaatatttatggtcaaagagagttcttcgtgaaagaaagaaaaggaaataagctctccaagaattgcatgcaatttgactttcggcactacggtcataaaagaactggagtagtgatcatttttgctacctgacacctcctaggctcctagcagaatctttaattaacacattgcctaaattttcattacatatggcagggaaagagctacagtaatgtcgttactcgttaggccagccaggctcatcgatctcccaacgaggcaatggcttggatgaagctctacagtaaatttgagcagtacatatctacagtattcactgccactcagccagactagcggagtggtgccgttctcaggctcacggtcccggtatggtcgattcttacgggcgatagaagtcgacagtatactaaattgcattggactgactctgtgtttctgtcaaaagctctatatatatggagtagtgtaactcatgtcaatctaggtgtctataggtggtgcgaaatccgcaatttactaacgcgacgctgctgcaaatttgtaaagaatatgataagcagagattggaaagtcgtgagaagggggggcagaggcatggacgcggtccagggaatggaacaggatggcgcagcgcagcggcaggggcgtcgccaggcaggcaggcaggcaaggccatggcgaggagggcagcagcagcagccgcgcagtgctgtcactgctgtgcttgagagacccacacacacccgataaaagcgagcgcgaaagcgagcgggcgaggtggacgtaacaccccccctctactaccgctgcacacacctgcacactgcctgcctccctcccgcgcgcatcgctacgacgagccagctgccagccagccggccggccggggaggtctttcctcttttactccctgttccttgctcgtatagttaacagtagtacgtactcatgcacggctgccagtgccacagcctctctccccacgggccgacggcgagctagcgcgcgcgcgcgcatcatccgtcgcgctcgcgtatggttggcgtggcgcatcattcatcagtagtcaacagtggcagcgccgcagcagcgagcgagtggcagcctggcgcagggccgcagggggggcatcaaaattttggcagctgcgtgcatgcgtcaacaatcgtatacacggccgagtacagagatgacatgggcgcgtcgtcgtagcgtggatccatgatgatgtgttatattccggggaaggaaggatgattggatgcgatgagcgatgtgccaatgtcacgccgcgcgcatctcagcaaattcagcatcgtctccccctgcacgattcggacctgtcttaaacggtttagctatggtcaaaaccaggagtagtttatttagggcagtcccaaccctctatataggatggtgtctatagtattaactacattgttatgtaggactattaacttatgtggcactatattaattaagagagagagtgaagagaggaagaaattgggtctcatgcaagacacaacttcaacacgagaacctatgcactagacactatcaagttttacattgagagataatactgtcttcataatagatgaataataaatatgattggtagagaaaagagatgatgtatttattaacggtccactttaagaaacaatgagttgtagagtgtagtttctattgtgatgtcttattgacatggtaccatagacactgcttatggacactataagttgggactgcccttacatgccacataatgttatgtgatgtcatgctgctgccaggcaggtataaagacatgagcaaggccttgcttagtcctaaaacaaagaattttcacggttatatagattacgtgtaaattatgagacaaatcttttaagcttaattataccatgatttgataacgtggtgttacagtaaatatttactaataacggattaattaggtttaataaatccttcttgtaattttctgacaagatctgtaatttagtttattactagactacatttaatatttcaaatgtatatacgtatatatgatgtgacaaccaaacctaaaaatttttctcatctaaataaggcctgaaccaaccggttgaattggtgttcaatgacggtgcattgatcgggctggccgtgcagtaaggaaattaaaagcagggctagctgggaagaaaggcagtaagacaccgtggacaaaagagtaatagcatatattgactacctccattattgttttctactggcatcgatacacatcttttactttatcgttgtttactttattacaactaggaaggatggaaagatgcgtggatatcttatttattatttatataaataatattagaagagttaagtcatatctcatcatataaatataaaaaaaattatagatttcgtctcataagaaaaaaaatatgttgtaaaatagatagtagactttaatataaacaataaaaatgtttcttgtattaaaaaatcactgttgatcaggatacatttaaactcatctattgtcgccgttacttattagcattatcgctaaatgccttttgaataaatggaactgcatatgtaccaccaaaataagtctaatgcatcattaatacataaaaacattcatcttcgctgcatacctaaatgtttatgtcaacacttaatttttaatctataaataagtaatctgaaaatattgcttctattggttaatggatagcaccgttaacaattagatatgaatgccccctctaacgggtgaagctaccaaggctttatttctcttttgccttcatacataggttccgtatcgatatactcgtgcctctcaaggccagcatggagcacacttttaagacttagttcactgtcaatatcttcaaagacgattgtatcgctaagtaggaagttgagcactattgtcaatggtaccctccactaggactgcctcaactcaaccatatatatgccccatgctatactcatggtaacgcaacaagcactatcatccatgcttgatgcccttcaggggaaagcaagaaaagataaatgtgatgagaatagttctttccataaaaagtatatatatttttattttttagacacaatttgtttgtggtgttaattcaaatttttatggtacagatacaatgctctgttttgaaatgagcaaggttgatccttaaaatcgcaatatttaaccatgataagtcatcaacaatataactatgatggagcggatggttaatggaattttttttatataatatatataccttcccacatctaactgtatactggtgccttacatgcatggccagtataaagtcagatttggtggataagagatttttgatatatttgaatgcaagtaccatgtgccaaaggaagtcgttttggacagcgatatggtctccaaaactcaactttgacttcttgtttctataaaaatatttattgaaaatgatatatgcatacttttatgaaagtatttttcaagacaaatctattcatataatttttacattttcaaactcaacaacttgagagctattcatgatttatattctcaaggtttgacttaaatattgtcttaaacgacttcctttacaagtacggagggattacaaataaaagtagttaaataagtaaatattccactgtattttcttatggcaaagctatcgatatcatttcaaagtgacaacacaaatatttttgttatgtatatgttgtgatcgaagttttttaaaggtatgcatgaactcacatgttctaaaatgacgacaagacctagagagggacaaatagaagttttcaccagaagatcgatcgacaaagagcaattttcacaaataatttatcagcacactaggtagctccaataatgcaggatacaaccatctcagattcacaaagcaaaccaaattattggccccaaaatacatccgaaaagtcataatatcacacacatctaagctagccatggaccacgagccgggccaacaggggggaaggtaacatggcaaccaaaggttgttaacacacacaagaagaggaggatctttcggaaacagctcaacgaatcgtgcccgagatgcagaagaaggccggacccccgggctagctatttactggcgagtactgtgttgtactacacatctatagtagggtggggaagggaaaagacatggacaagaacatgctcagatggctacaggaagttgatagtaatgccaatgtggacggcgcgggggccggttgatgaaggcaccaccagccgttctttctttggacagcatggcccctaaaatccaccatgcatgatcagtgctgtttaattagggttcagccgctcagaggaccagtaagcaaaagttgtgggctttaatttgctttagcaatcagtatccctgctaaaagtgtgcaggttatgtaaagggtagttaaagatgtatataactacatgttcacaatggcatgtcacatgttcacaatggcatgtccttgtgaccaaggagaatatcatagaacaacttcaagttctattatatgaagtcttaaataacatgtgatacactatacattgttcaattgcatgactcggaagatacgcttgttaattagtatatatagtgctaaactaaaagatgtgcttactagtgtagtggaaaaaaaacatgtggttttaacatgtcaacatgtattatattctcggatagtattcacctcattattatctgacatcttatacactctatattgtttgattgcacaactcgggagatgcgcttgttagtgcaatggtaaattaaacgatgtgcttgcatgtgtagtgggaagatgtgtggttttagcctgttggtatgcatcagattctcggatattattattattattattattattattattattattattattattattattattattattattatcaagtacccttttgcacgagtttcattatatgaagtcttaaataactcatgatatactctatattgtttgattgcataacttagaagatgcttttgttagtgcagtggtgaattaaaagatgcacttgttagtatagtgagaagatatgtggattgattagcctatcgacttgcattggatttgatagtattcacttttgtattattatttgatattaagtatttttttaattgtataatgtttttctattgcaaattcggttcctttcatgccatggttgcccattggcgtgtaagctagaatcaacaatcaagttcagccatcaacaatctgccggtggtcaagttgctatccctactcttcccaacttgcacacgctccttacctgactcacgctatctttgaattgtcaccaatgaacatgagttggttgatccggatccgaccattagcttatgatctatgccttgactgatatcaaactaaatgttcttttagttcggcaatacgtagttgttgttatgatataaaactagtggcgatgccaccgctcgataaattctgagcagtggctcggtctcatctgtgaacacataatataactttggtgttatcacaatgatggaaaataggaattttatagttaacatattctatagttagatatggtcgggctctaaggccccctttgattcaaagtaaattattttttctatatagccatttgaatcaaaagaatggatcttatggaatcctatgaaattcctatggaatgcctaatgccttgcaagttttggagaaattctaacatgaggtagaacctcgtggaaactttcctttgagtctttatctctcctctaattcctgtatttttcatgcgttccaatcaaacaaccattcttgtgttttacaattctctgttttacacttacattcatatcaaaatcctacgtttttcctattcctacattttccaatgttttaaatagcgggctaaggcatttagcagtttgctttttaaacagctatagcggcagctatagctagctaaatggagctatagcggctaaattgtacatgagagcaaatagctagaatccttctcaaacagctacaacgggagatagcgcagctatagcgggatatttaaaaccctgacgttttctcattcctgcgattcaaagggttctcgaactccatcattgtgtgaaaccatgaaaaaagaaagttgtagcagtggctacaccaaaatcgcttgagccatatatgaagaagagtccctttgatttggaggaaaaacatttaaattttgggatttttatcttataggagaatttcgtatgaaagcttttgatacaaaggattgaagcctatgttatcctttgaagggcccatttgatttgaaggaatgcataactctgtagagattttgaaggaaatttaacaagatcttcaacttcttggaaatttccctttgagtctctctctcttatccgattcttatgtttttcctgcagtccaatcaaatggtcatccatgtgtttttcctgtattttgcacttacattcctattggaatcccgtattttttatatttctctatttttctattcccgtgatttaaagaggctctaagagatatatagagcctatcatagttggaggcgatgaataagaagggtgaagtaccataaaaagtactcctagtgaaatgctaaattcttcatcagtgtttacctagggggtgtttgggagagaggagcccccctagtactacaatctgaaaatggagctagaatctatcgcagggagggcagctgtttggctgagagataggttccatttcttaaggaaaataagttccacttcatgctgggattaaacaagcaagttactacaactgtttagagataaacatcgatcatgccttcaagcaggaaccaggaatcttactttgttcacgttaaaaccaaaccagaagcacagaaaggtactactatagcagcactcctactttaggagtatatatgcagcaaatcaacattcagaaaccagccaacttttagaaaacaaacctgtagggagtgagaaatgtggccccgcatgttttgccaagactgcagcaaaggcagtaaggcagtgaatcagtgatggaaagcaaagcatgcatgcagcagcattgcgtttttacttctcactgataaagacattatcagcgcttcaccgctgggacagcatcgctgcggcagcctcatccaagcccacctctgccgctgccgcagcagctgcccctgcgcgcccttcactgcgctcggctcccgcctctcgcgctgcctgtctcttcctctcttgccatctcgcccacttcacttcttttactgcaaacgccagtactatgagcaagtaataatgtgataatttaagggcattcatacccctctgcccaaaataacttcacctttcatcgttttatttgttctaaaataattttatctttaaaacgatctaatatatattatattagagtttatgaaagtgagaaaaatacattacgatttgttaaagtagggataattgtattgagatttgttaaaatggagatcattctagtatttttcttttttgacttatattggctgcaatagaggaaaagtaaagttattttaggatggaaataatactgcttatagtgctagctttattttttcatagcattgtttgatacttcctattttagttcacgtattttttttaatttacatataaataaaaaattacaaaactaatataaaatccatgctccctcctattactcatttactccgctggtctctcttctcctattcactccaactcctccctctctaccgccaccatcactacctcttccttctttagccaccaacacctctcccctcaagctatagcaagcttcttcgacacaaattgaaggtggcttagtaccgggtggaccttattttaccaatttaggctgagtttaaaaaaggggagatagagaagattgggaagatacgcaaaatgaggtgagtaattaacgtatgattagttgagtattaactattttaaatttcaaaaatagattaatatgattttttaaaacaactttcctatagaaaatttttataaaaaacgtaccgtttaatagttcgggaagcgtgcgcgtgaaaaacggaacaaactatctcacagtctcacggtggcgaacgcagccttagacatgagacgagagcatcacttgcagcccaacaaaggaagcaggaagggggcgccttctgtggcagttgaggaggaggtagattggcgatgtagcacaagaggatctcattgttccctcaccatcaccggccatcccgttaagctcactgaacagcctaattttatagtcacaacctcactatcattcgttgctacatgtagcatggtgtttcaaccctctaagaccctgtttagatgggactaaaacttttaagtccctatcatatcggatgtttgaaaattaattataaatattaaacgtggactattaataaaacctatccataatcttggactaattcgcgagacgaatctattgagcctaattaatccatgattagcctatgtgatgctacagtaaccattctctaattatggattaactaggcttaaaaaaaatgtctcgtgaattagctttcatttatataattagttttataagtagtctatatttaatactataaattagtgtctaaatacagggactaaagttaagtccctagatccaaacaccacctaaggtatcgagtacaaccaatgtagggagtagtttttacggtaatgacaacccgcaaccatgcagggagggacaacacgtgtcattgggagacacggtttcagtcgaggggagctagagcgtcgatatggatggttggaacaacttacaagtgtcaaaagctacaaactatttttatcagttttcaaataaaatttttgaaaatcacttacactgttttatttttttaaagatgaatattttcgtcacgtacagtacacgctgttttggccagggttgattttaaatatttttattcagaagaaaacaatagaaaaaaaatccaaagctgctggggtcagctcagctcgaaccctgctcccctctgccgctctctttatccaacaatatttgtaggccgtagccctggcctcccctctgccgcctacgagagacacccccacccc

SEQ ID NO: 30090 - DNA, 2179 bp, Oryza sativa
ctttaaattaaataaaaaaatatataaaaacacttatccgcttcccgtccctaataggagtactaacaaacagctgtactgtcctatcctatatatttaatgtattactgctatattattaattactagaaaattacccgtgcgttgcaacgggtaaatacgttttcttagtgattgaaacattgcgatcactatactttatgattaaaaaatttaatgaaaatcctaacactgagattgctatccattataattaaaaatttaatgaaaatcattccttcgttttaaaccgaaaactcactcgttccttcctttaaatccctaggccattatgtaacctccactcaggctgcctcactttgaaccagccaacaagtagagccgcaggctcagaagattattgtctttaacctcccaaagatagaccaatgcccatacgacgtcggagcagatctttcccatcaaatctgactgaattttgctcgatctcccaaaattggttgagggctttcaatccactcgatctactctttccgtcttccaaaatcagaggtaaaactcacgataaaaacaaccggggaagatcgcctatagtcggagattaaatctggtaaattaaaagtcgcatcaaaaggggaaatcatgtagaaaatgatgagagaagagcggggaatcgattttttaatcaattagagtagataatgcgcaatcgacatgaaggcggcatggcgctagggttcggcccgggcagcggcaggaggtgcgcggatggcgcggtggaatagatcggggaataaaacggccaaaaaaaacccagacggaaactgaaaaaaaaatggaccaaaaaaaaccagacggaaattgaaaaataaatggacaaaataaagcggtgcaatagatatcagttgggatcgggataaaaaagctgcaacaaaagaaatgatagaaaccgaaataaaacaaacagaccgaaataaacagaagctgtgattgtggcgtgttcgcgagtcggacaatgcgcgggagtagataaaaaaaattaaaaacctaactcgatacctaatccaacatggatgacgtactaaaattctggcaaaaatatctttaatttttataatagtaaagataaaaaaaaactcgtggaaataaattatatacttgctcactgatatattagtacaattttttttatactagaaaaaatgcccgtgcgttgcaacagttaaaaacattttccagtggtacaaccgctattagaaactgagctatattagtaagttgtttggattcaagggttattttgagagctatttgacctttaatgtatctttccatggagagatatagagaaaagatatttttttagcgggcctacccaaaatagccccaattagcacctcttgggtgggatattttttgggtgggttatttccaaatagccctcaaataactcatccttttggttctttttgggttatttgggctatttgagggagggctagccattatgtagtcctagtatactctctccgtccaaaaaacccaacctataatgaaatgagatatatttagcacaatgtgtcaacctcgttgtattagaatatgtcacatcacatcttaagttttttttactgagggagtaattagtagtagtactccatatttgttttgttattattcttttgtgagagagaattaaattgctactagaaacgaagagggagacgggtaagatgggccgtgctgagcctgggcctgtggcagagagagggagagagatatatgcgtcagatggaaccctaactgaaaatccgaaatccatccatgtccaagtcgatgtcgttcgccggaacaaggatgatggccgcggcggcccggcgcgccgtccactcccagcctccgtccggccccctcaccgacatcgcggaagaatcgcaggttgagatcgtctgtttgtttggttggttttggggatcgatcgatctttggttgctgctcatcagttgattaattgaattgatcgctaggtgatcagctccctttatgaggtggcaaaggcgaagaatctttcccgggtgccacggcagttggatccttcgacgcgggtgcacatcgctctagatatcgagcacaaaatcagcatgatcaggatcggtgctagtccttccgaaccgcaagg

SEQ ID NO: 30091 - DNA, 2116 bp, Oryza sativa
ttagcaccggttttcacttcgtgtagcagatgccatcactgaccgatggtttcccagtcaaaagttccagcaagttgtctccaaaactataaatactggcagccatcgccaacctcattgtgtatgcatattctgcaatcataattcaacagaatttagtttcagtacatatctgatatcccatagatttcggcagtgttatccgctagatgacgggagggggatgggggaagaagaagggcgggagaggcgctgggagggggaggggattaggtgactggtgcgcgggtaggggtggcgctggcagcagaggacgtgatgtcatgataggaatcggatgcggatgaagcttagagaaacgacggacggaaaatctgtggcaattggaaaaatacgaatttttttaagtatatataggttagatatgcataataaaaatgatgatacgtatgatgaactaaaaattgatcttggtttgcgttgcagatcactccgtggggacatttggtttgacaactgttgggcaaacaatctttctttagtttgtcttttatccacattgtttggggtgtgtgaggctcgagccaaggagaatcaacagtctgaccatatgtcctcctcgtcaccaccctcgtaataaattattatgtgtaaaatcatgagttcaaatggattttattagattatagtataatatgtacgtcttgttatcttcattatgattttacctcttgtggtatttatgtactccctccttttcacaatgtaagtcattctagcatttttcacattcatattgatgttaatgaatctagacagatatatctagattcattaacatcaatatgaatataggaaatgctagaatgacttacattgtgaaacggaggaagtattattagtaccaacctccttaatttaaaccttgtgtgttcttaatgcattactacctccttaaatttaagccttgtggtctttattattagtacctcagtaatttaagccttgtggtcttgatgtactaacctccttaatttaaaagccttgttgtcttgatccattagtacctccttactttaatttgtaggcagtgtcacaacttaagagttaagagtaactttaagtggtacaactatatgtttgtctcgaacttttttatttgtgcatgactccatgcacccaaatacaacttgctcacttactttcatgatgccttgtggtgaactgtttgctatgttgttaagattgctgaaatatttgtggttaagacgcatctttgttcattgttaccgacagttaattgatgctttatgaacctcctattctcaaacagcttcctagcaagatgatatcttgttacttttttttttttttgcctataagatgtgcttgttttcctaggtggctgggctggtgccaagcgcctagtcattcttggtggctgccaagcttcttgtttggtgttattcgtgttaagtgatgcataattgcgatgagcaggtgcttttgttcaaataatggttcatactgcaatttccatcgggtgtcctttcagcagatatttcagtgctattggttatgattacctgttgttattttgctccgacgtgtacaataaaatcgccgaggctgagagcctttatgaggcacaagcacaagtatagcaatcaccttatagtatcacccttatactaagtggaaaaacaaaacttgtacaccgtaataacccctcaatttttttctttaaaccgtctgctttatatcctaataactcaattttagtatcacgcttactatggcaaatgctgtaactagaaaatgtggagtgaagctgagatttgtaggtcagtgcctgtttagcacagctccatctcttttaaagttagagtcaactaaacagtttcagctccacctaaaatgagagcggagttaggtagagttttatcataaaatgaactagagatgtgaagctaggtttagacagctgtacaactccacttcagaccaactcttataactaaatttaaaaatttgagctctaccaaacaggctgtctgtactactacccgcttgattttgcaaatgcactacacgctagctgctttctgttccgggg

SEQ ID NO: 30092 - DNA, 1683 bp, Oryza sativa
agacacagactctacctgcaaatgcattggtaaatgaagttaggatatgcttatactaacctgaatgtggaacagcataagtgaaacaaaaccacaagaagtaactctcctaaagacacaaacgtatctttctgtccaggcactagcaaaatagtgtgacgattgcattgcatgatgtttatctttcttatatatctagcaaaatacccatgcgttagcaacagattccacaaaagtataccgtaagtttctaaactcgaaaattatatgtatattaatcaggggggaatatatataacttgcaaccgagcatcaatccacaaatagccaaaccatgtgcataagtgatctatttgttcactcgcataagatcccaccaactctggaggtgatggtgggatagcaggctcatcatcgtcactattcactatgatcgctctactgtataggaacggaattggagaatgtcttttgctaacttatggatacaaggactagatgttaaaggtacaggctttggtttatcctttctccattaaactccttgtataagccatttttaagtgtgacatgagcacttgcagctacctaggggtgtaagtggcaaccagcgaaacccacttattttgacctataagtgggttcgcggctgacccacttacacccctacagctaccaccttggtaggtttggcctgtcatatactagtatcaattgataaaatatagaaaaatcatgcattgatattgctaagctgctctgctaacatatttaaatgcatcaaatggatccacatatattactttatcatgcagaggagagagaaagttctctaaatttttagtgcccaaatgaaattcccatgtaaaattattcttgtaaaaaggctttgtttctaaccgaggaagagcacctagatgacatctataagattgataaaagtgacaatgaaaagcccaacaaatgagttcacaagaaaggatggtttaggatagcaattatctccatctttaacttaaaccaaaactaaagaaagtaaccttaagttcctaaaaccctacagatctagatccacaaacaaatcaccaatatttttttaaaaaaaaaacaacttttagtaggaatgaatcaggtttgcaatatcgtgcggcagtgcggctactgctcggttacaacggttacctcgcacaataatcctcttggtttttaaaacctctcggtttttgcggtaaccatgacattaccacagtaactgtgataacaccaggtaggggtaatccctccccaaatggtaaggtaaatcctcctagatccagtggaaaatcataccattcattaaaaaaaaaacaacttcagaccaatagtggaataacccctgactctaaccccaaacacatgacaccctcaaccactgtttttattaaagcacacgatcgaagtcatgtgactcaccagagatcgaagcacacgagttacactggcgaatggattcacacactctctttgtgctgaacccatctcacaaagaaaatcgccgagaaactctctctataaaaaagcctcaataaaagcaggagaataatgattttatatcaaaccggtaaaccccatccagcgcgcacatggtttggtcttgtagaggttttcttttgggggagagaagggggcaagtcttgatttgtt

SEQ ID NO: 30093 - DNA, 3591 bp, Oryza sativa
  unsure (1)..(3591): unsure at all n locations
aaaacctttttagcatcgtattgctattgacactaaataattaaattagtaaatatgatcaatatgacagaccaaccgagaatcattttcgaagatatgctactgttctcgatcactttcgaccattttcatcccacgcaagaacaatctgtcaatcttccagcaattttacatgttacagtctctgacaatcaccacttctcttgattttttttttttgactcctattcgctcacacgctgcacaattatggtttactaaggggtttcttctacgtatcatctaccaagtaggaggaacctatacgcatgtacatacgtacatgtacagtatctttcacattgtgcaatgtagaatgccctgctccgtaattcgagcaacagaagaagcgaaagtcagggagaggaacaagacagagaagagaactgattaacaccaaacttgccggaaaggggatctaacactgaatggcgatttggactggttttgtagcacaggtcggcagccactgttcaagacaaatcatataacttttagggcactgtattatggtcaatctttgcagtagcatacaattattatacacgtccaacaatataatatggcgattcaagctaacctaattaaatatatatatgattaagacaatttcatagctaataatctgtaaaaaaaagttaaagaagcaacaaaaaaaaatatgagtacaatctattatatatctttaaagtaatagaaaaaggagcctccacgttcgctctcatggtctagaaattctcacatttatccaaaaaaataagaaaaaagaaaaatagaactagattaggattagttaaaaactgaagaaataaaaaaaaaggcatattaagaaactcaaattggacaatcggtaaaaaaaaaaaggaaaacctaatcatactactggaatcggacaatccgtctacctaatgtactggaaagagaatgtacaatcagtaaaaaagaaaagaaaagaaaagaaaaacctaatcatactatacactggaaacggacaatattttgggaatacgcgtgttcacaccacttttagaaacattgaaagacaacaatcctaatcaaactctgccgttttcgaattgtatcagtattgtcatgccaataaatacataaccaagccaaaaatacataaccacgttcgctgtggaggctagaaattcccgcattaatcggagaaaaagaaaagaagagtccaaataaaaatacaataaaaaatagctgaaattcggaataaaaaatatgcaatattgaaagagaagtccatataggaacccaatacgcgggtaattaaaactcggaattaaaagtgaataaatttcgaaattaaaaaagaaaaaaagagggagtgagttggaattccatttaaaaattactaaaattccaaattaaaaattagaaattttggaattagaggccttataaaattccattccagaattattaaaatttggaatggaaaaataaaaaaattcaaatttagaaaaaaagaaaagaaaaagttcaggtaggaatacaatttaaaattaacttaaattctaaattaaatataagcaggtgttgaaaataagagtacatataacaaccttagtagattaattaaaattcgaaataaaaaataaaataaaatccgaaattaggcaaattaaaaagagaggttaaaataggaatacaattttgaaacaactgaaattaaaaataaaaaataaaaatatcgaaagaacacaatatgaaaaataaaataaattttgaaattagaaaaagaaaaatactaggaataccatttataaataactaanattggtgataggaaatcaagactattgaaagaaaataccatctaaaacacatagcgagattaattaagtaacatgactataaagaagtagagtggtggcggttgatacaacatataaaaactgttaataaaacaccaaatagaatcctaataacgggtaggctgtgaagcaatcaatcaaggcggttgccgggacttctaaaaagtaaaaaaaaaacaatgctaatcatattcgatttttaaaatcttaatgataataaaaaggagaagcagcgggtggggtgtatatgatagccaccgacggttggcgggacttctagaaaataaaaaatgaattcccacgatagttatgttcgatttttagaatcccaatgacaataaagagtagacggcggatgggccgtagaggaatatagtgacattgtttaataggacttctaaaaattataaaaaataaaaccaacaagaccataaactctaaaaactatgaggtccaatttctaaaggtttggaacctctaaaaagtaaaaaaaaatgataatcatgttcgattttaaaatctcaatgacgataaagaaaggaggcagcgggcatgccataaaggaaaacaatggcaaagccgctgacggtttggcaggacttctagaaaataaaaaaatgaattccaatgatagttatgttcgatttttagaatcccaatgacaataaagagtaggcggcggatgggccgtagaggagtatagtgacatcgtttaacgagacttctaaaaattataaaaaatgaaaccaacaagactataaactctaaaaactacgaggtctaatttttaaaggtttggaacttctaaaaagtaaaaaaaaacacaatgataatcatgttcgattttaaaatctcaatgacgataaagaagggaggcagcgggcgtgccataaaggaaaacaatggcaaagccgctgacggtttagcgggactttagaaagtaaaaaatgaacccgaacgataattatgttcgatttttaaaatcccaatgacaatatagagaaaagatagttgacgcccgtagaagagtataatgacagcgtttgacggggcttctagaaattataaaaactataagatctgatttttaaatatttcaaggagaatgaatagaaatagtggtagatcaagcaagcaaataaagaagcatatgacagaagtgaggggtagtagttggtgtgacttttaaaaactatattatttctcattagaaatacggggatgataagatttagtctttcaaagtcttaagacaacgagatagctatttaataaattttaagtaaaatcatactgaaaaatatatgattttgtttgggtgctagccgcgcaattgcgcgggccacccagctagttttcatatctatgttattagtggtttttataagctaatgctgaaaaataaattaggataaaaatacctaaagtcaactataaaattaatttaatgataagttgtctaccaatattttaagggcttgttgcagagacaattttcagacaaggtgaactttcccttttcgtgtacccctgcaagccgttcattaaccggcacttagtcctttaaatagcacttaggccggcttgactgtactaaacattccagaaagcacactagacaaaagggaatgaaacagcggcagcattcgtcatcagccgaaatgggcaacaatttgtgtgtagattagcatttagcctgatgcttcagacattacccaaa

SEQ ID NO: 30094 - DNA, 3323 bp, Oryza sativa
ctccccctagccacctcagcatcgccccgccacgtcggcagggggacggcgccaaagaggctggcgctgtcctgttgaacgacggcgccagccactctggcgccctaaaaaggataatttttgggataagtttttctaggggtctagttacgaaataagtttttcaaaagaaccaaaatgtgaaaaatccagggtagctagggtggtacttgtcgttgaccttgacataatttggaattattgggcctttaatagatgtcacaagtacatgtgtgcaaccttgttgtgcatcataacagcagcagagatcgtgacagctcaagttaaccgcatgccccctttcagctttacaattaaatctgagggtccctttgaatcacaggaataagaaaacggaggaataggaaaaatataggattctgacaggaatgtaaatgtaaaatagaggattacaaaacacaggaaaaacataggaatgaccgtttgattggaccacaggaaaaacacaagaatttgaggagagataaagacttaaaggatttcttccacgaggttctacctcttgttaaaattcctccaaaacttatatatgaagaggcattctataggaatttcataggattccatagggttcattcctttgattcaaagggatttgtaggaaaaattcctatagaaatgaaatcttctaaaattcctatgaatttcctttgaatcaaaaggggcctgaaggtttttaccattcctgtagttatgcatgctgcacacctaatccctgttattccagatcagatcagggtgaagttttggtgatcgatccaggaatttttttggatcaatatgattaacaaacagaagatatatgagctatttgattcgaatgattacatttgatcctacatgcccatttttcttttggcttgcgcaatagaatgtaatagtcccatgatgtatcgaccgtctcctttggagtttggaacaaggaattttgcagaaattaaacaagtttttgtaaaattgctgcgttccaaaagaactattgttttgaacagctcaaaccacagcctattcacaggaaaatacagcaagggcttgttcggttttgaacggctcaaaccacacagcctaaggcttgttcggttaatccatataaggaagacattagaggggaattaacttcacatgtggaattaatccctttcaaccttttgaaccttttgggaggaattaagaagggattagaggagattgaaggagatctattccacaccttccccaaattctcctcaatccttaggtgaggaattaacggaacaaggtctaaagcagatgcacatgttactgcagttgaaaaaaaatctaaccctcctacagttccagttgcagtcagcttactgtcacactatgcaaaatggtaaaaggctgttactgtctgaagctgttttcttcctacgatgtcctggtccaaggaatggcatgtgaaaatgaagtgttgagaaaaagatgaaagcatcggccctgaaaagcatacagatgctacagctaaaataaaaatcatatgtgaattgaatcatattagtgtgttgtcaaccacaaatctatgatgaactatgcatgcaatcttcatgaatggtatgtttattgcctttttccctgatgggtaatctaagggtgaaagcatggtgtaacataaagcagtcaaggtacaattttttataacatcagagctgcaatgctctaccaaaataaatcgaccagtctaaaggttgtgatttgtgacaagtcggtccatctgcattattgttgttgtagagtagaaaaatatacaaaaagaaaaaaaaacgtgctaaaatatatttataggattaaaaggacatctagtcatgatcctgaatgagttgtttgctagccctagaaattcctcccagaaacatataattaattataacaaatcgctcactaattcgtttcagtgatagacaggcttgagtatttcgccaaatgatatgattgccctatcaatcacaaccccacaagtagtcgtaaagttcaacagaaagttgtttttgatttcttgatttcgacgccttagggtgacaacatagaaaacacaatatatatatttttgtttccataataaaaaaaagtcttacagttacatgtacagcatagtttatatagacagggtcacataacataacataataggcaataatctaccaatacaatttacatcatgaacgtagcaaagacggaattaattagtatttaagcacaaatgattccgagcaagatgcaacgagttaagctaggctattggtacaccatacacaggtagaaaaaagtgtacaacgatcaacaacataaaaaaaaaagaaagaaattatatcgcccaatgatgaagtacgagagggacatttcaaccaaaagtatgatgttgcatgtaacaaccaatagaaatggacctaggtttttcggtattgcacaaggcaggcaggcagcagggggcgtgtgcccacaccaaaggtaccaacctgaacttgcagacaagcgaaagattccaatacgcataaaaaagttgctttcaaacaaatctgtaaaatcattcaccccttgaaacttttgcaatgcagaaagcaaagaattattgatggggagttcacattattcaatctccatctttacatttttcctttgacaccatcgtacaaaagtcgggcatacttggttgttctgagacgacatgatagctgctaactatttttagcatgttgttgagatgtatcactatgcctttgaatctaaaacagaaggaagttggctgacatctagaacatatatactgtacataccatatggaattggcaacatagaactgtatcaagaaatgattaatctatctgtattgctgtctattattagggttccattttattacgatgtggtactgattaggagggaaaagactttatttagatttagggacacaagaatgagagcacaagctacactgagcttgccaaataacaaaaggttatttgagacactgacaatgaaacaagctgcaaaccacagaacagaacacaaggcaaacatggaaatctcagtttataagcatatgccactggcaaaattgacttgttgctccaactccatatcgtactataattcgctcgcaccttgttttcctcttctggaaaggagagcatctgtagcccctggttagaaaaactcaacaaagcgttcatagggcatactccctccgtttcacaatgtaagtcattctagcatttcccacattcatattgatgttaatgaatcta

SEQ ID NO: 30095 - DNA, 8389 bp, Oryza sativa
tctggcgccccaaaaaggaccatttctgggataagttttttcaggggtctatttgcgaaataagtttttcaaaaggaccaaaatgtgaaaaatccagcctagctacctgctgcgagattgttgtcaaggctcaccaagtgacatgttgttgcaccattctctcttgacgaagtctaaaataaaattgtagaaaatcatttttttttctagtgacaacaatcgctcatcataggtctcacaaggcatgaatgaatttaatagggcgtaaatgagaagtttggagtccaatgacttgagtaaccaaatttcataagtaatcatgagtgtggaatgttgttacttgaatgatcactggatctaaccaagcctaccttcagcttaaaacaaagctatgcatatcagaaattaaaccaccttttacacatatatctagtaccgtgatatatatttctcataccccatatatatatatatatatatatatatatatatatatatatatatatatatatatatatatatagacacacactatatatatatacacacacaccgctcgttgtcttacttatcttacatcctgtaagtaacgctgtgtttgtctgtgcgattggaaagagttattctctcgtttatcgtcaggggcggtaccacccattaggcggggttaggcggccggcccagctacggcccgtgccgccccgaccctccatatccttcttggaccgtctaccaccacatccaattcacaattggcccataaataagcagcccaagtgtccaattttaatcctgcgtatgtgatggtttcctcggtcaattcctcaacatcgttcacccccgtcccttactatagtaagtgcctactgtttttctttctctcccttctaagcaaaataataatcattttattctggtatgcgatatcttcttatatatttattttttaaaagatatctatcaaccatgctttatgaatggactcatatttgtaaattgatatgtttactggtatctttttatgtatgacgaattatgtacggcgcaaaaattattactttattttaatatcatttttgttttttgtttgccttaatttattgattatactatatgttaatatgattacaacataaatatggtattttttgcgtttagttgttcttattgagacgagcatcttcgcctcatctttattttaatcctgcgtccgccactgtttatcgtgatcatgcttttcaagctactaaacgattttttttcaaaaaactgttttgcaaaaataaaaatatatatatttcaagtttataatagttaatacttaattaaccatgtgctaatcagccaatcaacagcatcgaatttagcctatgttacagtctattaaaccatggtgttctccaaaactttgaatcatatactaatatattttttaagcaatcctgttacctgggccggtattttacattcgagaaattgatcagctgagcagattaagagaaacaaagatcaagaacaagagaataaacatttggcacacgcgtgcgccacacaagaacaaaaggccggcaatcgttttgccgttggagaggcagccaagtgcacggtttcatgacaaaccaacgcagacgcagcacaaaaggcatagaatgggatcggaaggaacaaacagcaacaacgaaaaggaggagaaaaaagaagaagaaacgggagggggtgacatcagtgacgccgacgcgtgctgaaactgcgttgcagcaacccacagagaagagaagaggagaagagcagagaaaataaaattttgcaggagcagaatctaatctcacatcacacgcaccacctgcagcaacctcccctctctctttcttttcttttcttttcttttgttttcctttttgttcttttctctcctctcaacctttctcttttctttccttgtagttgtcaaccttattctatatgtgaattgcgtaatgtttttcagttgaggaaagaacggtagaggagtctttgcgcggagtcatgggtgccaacaaaaaaaaacattgaaatatctcgtcggcgcactagcgagttaggctgaattgttttgttagctttcccaacttatctccctcaatttttgcacgcacacttcttaaactactagattgtgtgttttttcacataaaattctatatgaaagttgatttaaaaaaaatcatatcgatctatttttcaaaaaaaaatgctaatacttaattaatcataccctaatggatcgttctgttttgcatgtttggcggagagttcctaactcccactaatgtgtggttcgagctgcatgattgaaacaagagagcctgcgaagcttgtaccatggattattaatgttacatcatttttttctttttttacttttatttgggaacacgcaggagatccgtgcatcattttattaagcaatttctctttttatttgttgtcatttagtatgaataagatgtgcaacatatatagttatgtttatttttgttcatctgttactcagcttacaccaatgccttttatgacaaatccacaaatgctatttctccgcaacgaagtattatgttgcaaagcgtaattaaaggagtgcacttagaacatcagttttgaaaagatgtggctatacattaagctccaacatcatacatgaatatgtgtacatgaagatcataggaccagacactttctctagaagaattgaatctatatctcacatcacacaacctgtacgcaacctgcacagctagctagcccccatctcgctctcttcccttctttttgttcttttctcatttatctcattctattatctttagttttcttttaccagttgtcgaccttgttttttaaactgcatagcatttccagatgaggaaagaacggtacagaagtttttgggcattttaggcccaaactaatgagaaacattgaggtatatctaagctttgtttgggggctcgagattccgaaaaatagagaaactggaaaagctggtcttcatgaactatatctgacctatatcttctaattaattttttattctataactacacgaattcttatattttagttttttatttaaattctcataatttagttgagaatctgaattgtttatgaaagttagagcattcgacaaaaacttagctgatagaaactccaccaaacaaagatgctactggtaacaatataacagtaccacaatgctatttttagaatctgattggctgacatttttttttctgcggtttataagtgtttgaagtaacagaaaataattttaggacaatactttactcatctacaatttaacggtttaaaatccaaagttatgttggaaaaaaaacaattacaaacatatagattaattttcaaattaagattttgttagtgatataccctagaggcaatcatagagatgattgtatcacatactatgtttacatatttatccgactttgttccttgaaatagataattaatgaatatgtgattctttcatgagactctttatgttgtgtgttgctatttctaaaggatccctgatcaaatatcatatgtagaacaaatatatttagatgatcagcacatgtattaattgatgatcatgtctcatggatcatggtatagagataccaaattaataatgtggacacatgttagtgaacatgttattggatagacccaacataatgagacactgcaagagccatatgtgttgtgtcatcagtgatctcatttagtattggtgttgaatccttagacctgagattatcatggttcctaacatgtgtagtagcttacttagggactgctaaacgctactccgtagttgagtagttataaaagtagttttcgggtatgctatgaaacatgtagtgggatatgaataatcaagatgggatttgcccctcctatggagatatatctctgggcccctcgatgttgtagattatggaagtgcatagccatgccaaaggtgattgaggagtcaatcacaagttatataatctattaacaggttcgagtgaacggttgagctgttagaggatggcacatatctagccttgagcttaatcgatatcgtgaggcaaaggggttcatacaagtatacactaaaggttcagccgatatgatctttatgtatgccccgtgggtcaatacactctgctaggggccgctgttgacgcgtgaaccgaaaaggagtttttgggttacagccgagtgtacatgaacctacagagtcgcacgcttaatgggctagaataaggggattggatggagatccaatatgagcttgattcggataaggatccgaataggagtcctacgggccttggaggcccaagtgatggatcctatatattcgtgagaggtgtgaccggcggaggtattgcatcatgtgagaaaccctagccgtcactatcctccctaagcaaaaccctagccgcgcgcgagtgctagcacatttacgcgtggcgttccgtccctatacgtgtggataccggtagaggcgccgctggtttgcggtactgatcagcatgtgaatacggcgaggagaacgcacgaggagaagaagatcgagctggtgcgatcgactacttcctctacatcgacccgctacttcgcgagaattccttcgacttcttagcgccttctttcgctgcgcagcgcgtcgagtggtaacgatctatgatctaatacttgtatggttcctggtttacgcgatagaaaattttaatttatactatcgtagcctacgtgtatcctaacagatttagcctattactgagaaggtcatcaccgatggttcctatatagtaatgccttaacggggtttacctagatggttttgaattatctgataaaatatatgctacttatggttgaaacaagactcatttgtttacatcacgctactattagaaggtcaccaattagagaagtttcgtgaaccgtctatggaaaaagaataaactataatataggattttcttaaatggtatttgaatgattgggaatcagaaagcttttgtgattaagagggattcagatgtgggtagttttgtgaaaccttaccaccaaaattccaattatatatgatatgtcatatatatatagaagtgttcttctaaaacaacgggcaaattttataaacacttttcattggcaaattttactacataacactttaagtaatttgatgttggacaataaaagtgtacgatgaagaaaggacacattcaaatatgtaatttattggatagtacaggcaccgtagctattattttatttaggttcaattggagagagagtttttttttcaaaaatacaagaatgacttttgagccacaagtttctaacctgatgcaaagaagaaatttgatatatggcagcaatatacttggggcgatagtagattgcaaattgcataatgtgtagtttgaaaatttggaaaaataagaaaagaataaacaattgattttttctaaacatttgaaaaagtaaacaaattggaaagttgtaaaatgtactcgtggagtcgtggtcgccattctagatttttgaagggggtcgggcggaaaagatggcattgttcggttcgatcaaaccaaagccgagtaacatacatgtgctagctcgagggacaaattcatcatttcattacggtttctctctcgaattagataaaaataataaagcaatagttttggtgtcccctcaaatatttttatgatgtttgtaatgtttattgtttttcatttcccatccatctagagtaagcttgtataccttgtaaaggacacgtgtgtcatgcaatactaacgagtttttaataccggcagaaaactaaaaagagctgaaaaaaattcatgtcatgtccctacacaaaaggtggtcccacatgattaaccgctttgtcagagacgcttaataataatgtgttggcatcaagtggtgctggcccacccacgcacacagagaatcaggggagggagagcagtgagcgcgagggtttctgggctcaggaatctaaataaaaaaaccaataataaatatactagtggagtagtagtacaataataaatacatgtaaatttatatttacagctaattgtatttaaatttacagttaaactttttagcaggtgatatactcatcgataaggaatggtccgttaatcttaagatatatcagtatattctagaggtgattatagaaatagggtacgtgcgtatacgtttatatgggtgagtgaaacgtacattacgagctcttagtttctcaaaataaataaatgaataatataaataacttttcttttgatttggctgtagcaattgcttagtaatttgcaacctgcagatccgtggtgcagaccaaaagctggaattctctgtggcgcccgtgtgctgctgccccccatctcctgcctgcattctccttctctctctgtggtcccttgtgtggcccaacttgctgcatatattatacaaaattatttatgtacaagagaaaatattagtacaatagtaagttgttgtgtataatggaaaatggcatgtgtaaattgttaatatggtagtaacatttcatgggttcctatgtctacccattactgaaggctaaacacaaggtgactaatattatcttccgtcataaaaatgtttcattttttctgaaaaaatctatacatattaatgttagtaccgtcttctagacgcaacttcgattactaatttgtattgtaggtactataatattatgaaccattttttttggactagcctgcagatatggtttttatgcatccgatctaaatattcaaaagatattgatatcgatgcacaaaggttttaaagttagacttagaacatgactagagtaacatgcttccatgacttgggggagtgtaacaagtacatgcacagtgtatacctgtgttgttttgtacatgaggagacgtatatgtattctctccccaacatattagcaaacatccaacgtgtcactcaccagactgtataattattgttgttgtacatgtcggaaggtctaacccaattattgctttcagggtattttgtgagacaagtttctaaataacattatttagaattagatcttgtgtaaacataatgcaaattatttgcacggaacgatgcatgagaccacaattataaaaaggatcaatgagaccttgacaaattgtatttataactcatgtgcatgaatttcacattaaattatttactcatggattattttccagttacaatttcatcactataaatcacaatgcatactatggcgcccttatttcaaaactcgggactctaagaagcatctattgaataaaaaggaagtcatctgataataattaaaaaaactaggttatttctagttcatttttctgaattgcatgggtctgtttggctgctatatgcagctgctgggctatcacagctacaaatacaaaacaatgttcctattggctgcagtacagtaataaaaattgcagccgaacagagcccatagctatagattcttatacataatttgaataaaaatctatagattggaaactggagatgctgaaagaaactactgagtgctagtaatatttttccttaaagccacatgagatgccaccctatgcttgagcacagaagatgagagctgtgaagggcattgtaattattggggtgggcccgcagggaacctaaataaaggagggccccacatgggagagggacgtgtgtttggtggtggcctgtgatgggaggcgactctcactttcatgagctgacgagagtgaaataaagcatgaaaacgccatctttatttatttacttatttatttttgcaccgtatttatttatttgccacctccaaagtccttccattgcacacttaattgccaaagaaaaccaaacacaaattgatgggaacatcagatcacatgatcaccacaacattttatgccatacgatggattggtcgatgatactttatgagattcgtatatttaaccacaatatcaaagtagtgcacaatagatttgttgatttgatgtccctactttccagagaaaatgttgtgtgctgctgtgattttgagcaagcttgaagtaaaataactataatttttaatgttaatggttcatggcaaccaaaatatctttattttacatttttggcatacaaaatatgatgtttttttatttatgaaacacatataatcataattccttttgaaattagttacagtatagttgaagcttgagcattatatcaccaagcttaagaatcaattgacatagtttaaaattttaaatacctttttttttgcatgctt

SEQ ID NO: 30096 - DNA, 5133 bp, Oryza sativa
taggagctacaagcaccggacataaaagatccctcatccaaccaattaaccaattaacccacccgatgaaatggctttgcctgaattgaaaagggcttatttggctgatcagcctaagaatacaacttaccgatgaggacacacggtgtccttgtgcaatgtctatacgtcgcactccatcttaccgtgatttcagcacgaagtttttcccccaccttctgcagaaatggcacatccatcctaggtgttgtttatttcactgaagaggtagataaagttaggccatgtaaacaagaaaattattagcgtataattaattgatttttaattattcaaatttaaaaaataaatttatgtaatatttcaaaatgacttctatataaaagtttttgcatacaatgcaccattttacagttaaaatacgtgctaataaaaatcgaggtaaaatctgtgttttaatcagaacaactcactagactaaaaacagctatagagaggaggaaaaagaaaaaaaaaagaagaaatctatccaccacaaaagcatcacaagttgtctcctgtctttgtacaagaggggtttgcgatatatttcgcgggacaaagagacattggagactttatgttctctttccccaacttggccaagtggggttcaacatgtcggcgtaggataggaaatgcgatgtagtcctgtgtggcgactctccccggagacggtgatcgatggatggatacagcgatgaaagctgagtagttttggagacagatcgagaggctgattcccgtacattggaccgtggcagtgcaaggcagagcagatacatgaatctgattacgatttacgagttgccgatttcgtagctctaatttgcagccagccactacagtgaaatatagagaggaccaatagatgatagcagctgcagcctgcaggctcaactcctccaattggtcagataattatctcgacagaatgaacatggccagattcaacctgaccctctcccgcgacaccgcgaggccacaaaccgatcgaattggagggatattggaggaaggtggagcgagattcattcatcgccggtgacctcctagagggccttgaggaggaataggcattagggcgtggaggtggatggacgtacattaccattacccctgtcgatggccacaaaggccaagattagcttcatgtatgaaacttgatgattcatagatgagggacgttaaatgtactctttccatctttcaatgagtgtggaatgggtgggccgtaatgggcttttaggtcaatctgctagcaaattattacggtttcagcccaatacatataaatgacttagggctggttttgtttgaagctaaaacttatcacaccaaaatattggtatttttaacggtaattttggcaatgtttggtttgctgccaatactacacaaaatgttgtcaaaatggtgatgctagcaaaaacttgtctatgttttgtattgccaatattttagcatggttataaccaagcaagcctttgtagattttgagctcctcggatcgtattgtatgtgctagtagcccaccaccaccactactactaccacttatacagtagtcataagagtatgtaggccccatttgtttctgattatgatgcacattttagctcggtttttattagcatattttttaaaccgctaaactttacatttcatatgaaaatgttctaattgctataaaataccaaataagtcattttttaatttttatagcaattaaaacttaattaattatacgctcttacgtgaccctacttaattctcatcttgaactgttttatcaatttagccatagtgcaatactcagtactcaatcatttctattataatcgtagttgtgagtttatgtagttcactcctagtactctccgtcctaaaaaaacaaaccatgggttttcgtgtccaacgtttgactgtccgtattatatgaatttttttataattagtatttttatttttgttagatgataaatcataattaatactttatgtgtgacttgtctttttaaattttttttcatgattttttaaaataaaacggacggttaaacgttggacacggaaactcacttttttttttcgacggagggagtactctctaagccgagtccatgtgcgcgttcgctgacacacgtctccaacgcaaaaaatggagtactcctaccggtagaaatgtacagtactcgcagctactcctgcgatactgcgaggtagcgaaacgccatcgtacgcacgcgccggtcgggcggccgatcaggaggaggcgcgacaggatgggacgcgacgcgacgctcgcgcacctcggcacctgtatatccggtggtcggcccgtgcagccaccgcgagcgtcctgggaattcttaaacgttgccacgtctctcggacaagatgggaataaaatttttttagtctctatcatattcagaatatttcgacactaattataaatattaaacgtaaactattaataaaacatattctatatcttgaactaattcgcgagacgaatctattaagcctaattaatccatgagtagcctatgtagtgctacagtaaacatgcgctaattatagattaactaggcttaaaaaaatttgtcacgtgaattagctctcgtttatgtaattagttttataagtagtacttcctccattcctaaatgtttgacgtcgttgacttttttaaaaatgtttgatcgttcgtcttatttaaaaaatttaagtaattattaattctttcctatcatttgatttatttgatttattgttagatataattttatgtttacatatagtttacatatttcacaaaagtttttgaataagacgacggtcaaatatgtttaaaaaattcaacggcgtcgaacatttaggaaaggagggagttatatttttttataaaattgatcaaactttttttaaaaaatgattagaaacaaatgaaaacaaattctaatatgaatgagagaaggtatattccaacggagagagctaaacaaacgcacgtacacatcgcgttaagtttgtgcagtagatggcgatttgttttctgtttattttggcatctgcaggtcattgttgatttgttggcaattattggcatgaaccggtaaaatactaaaatcaacggggagggttggattgacctggcctggctgcctgcctgcctgcataatatatcccagctggcccattataccatgtggtcactgttacaaatctacaatataccagttaaatttagatagtctagttggcatgcacgcgacgggacaccatactgctgctccatgttggcaataactataattgaccatttagaaagtgcagcacatttcataaaccaacttaatatacaatagtcattttgtaaaatgcaacattatcaatttcaacaacttttagtactactccgcactactctcatctaaaccaagtggcagtagacgggggtgaaaatggtcggaaactataggaatcggtagcatctcttcgaaaacaacgctcggttgtccaataattgatcatatttatcatttaaactattcattgtcaacatcaatacgatacgaaaagaaattacgaaaaataaattttcaccccattgctaatgggcccctaggcgagcgtccatacattatattcctctatcttattgttttgaactgaaacaacaaaagaactgtcaagtatattttaataattaggaataaaaacccaggtgtgttacatcaaaagaaaacaaaagtcgatgagaaaatccaacgtcaaacatgacttgctgaacaagcatgccgcacacgtaacaacacttcacactagcccaccgacgcagcatgcacgcctaatctctctaccttattctctctctccaacgcacatgagatggcaactcatcccatccgtgcacaacgaagagaaaagatgcgggagagtggcttccctttggagaaccccctcccctccctctccctcctttggtgagcttcctccaatgaataagagaacactcaacgagtcccctcctccacctccttcccacgagcttctcccagcaagatctggaaactagctcagctcatttctttgtccgccaccactcattgcgccgccacccccctcgctgccgcggccaaaagtggtcaaagtgctagagtgcccaagcttggccggcctacttcccctcctcttttcccaactttgacccaccaccatcacttgtccatcccggccttcatggcaactgagcccgatccgctcacttccctcctctcctccctgcccataaaaaaccctgacctattggaaagctttcgcgcacgttatgggagcggttgtttgcgaattgggatttctagttgttgctcgctagctaactcccacacatacacgtatatacgcgcgtaagcacgcgcaaaaaaaaaagtgtttctacaacgaatcgacttgttgtcgtgtgcatttggcatgttgccgcacactagctaactatgaaaaaaaatatgtagttgcaaattatatatatagtgaaaatctgtaaactaccgttggatctataaatggacgtttgagatttgtccatgttatccagagtgtaagttttactcccggattcaatcatgagtaaaaattttaccaggagtaattttttttacttttgatgacgtgaataaatctcagtcatctatttttgaattcaatgataatttttagatttgcactacatatatttaggggtgaaaacggtcacggaaattcctgatcgaccaggcgccgtttccgtttaagtggtactgtttccgaccatacccttttttgctatttttaaattttgttttttctaatttctttctgcatactgagcagtttaaataataaatatggtctattaccggcgagcatcgtttccaaagagataccaccgattccgaccgtttccgatcgttttcacccctacatatattacatatatgctttgcgcattgcgctgcgtattttcccagctgactcggcttgccaactcgatctaccggccaatctcgcgttcctcgtggcggagatgagatgagttgagatgagatc

SEQ ID NO: 30097 - DNA, 701 bp, Oryza sativa
gcccgtcataggtgacaaattacctgtgacgggcctcggcctatggtctcgtctattacggcctctagttaaagccatcacaagtgaggccttatgtgacgaggcactctggcccgtcacagatgagccgtcacagatggaaagatctggtgtactctattcaattattgccgatagaacatggacattgcttgaatgaaaaataaaaataagaaaagaagagagattctgttatcagtacaccactttgtcgtaccaactttgttggaaaggacgtgatccactcgtttaaaatcatcctgacttagcacgtgcgaagtagctagctactgttttggagtggcaaacaaagcaaaagttcgatttaaaaaaacaaagcaaaaacaaagcaaaagttggtgcagaatatatgcctttgttttcttctgaaattattctgatgatttattcctgatggggaacccacctaaaaattatccgtgctctgtggatttttcaacctcacagaatgtcgccagtctgattgctgagtatatatagtttcaaaacttgcgtactagctagataaatttacctattctagaatgctctcttttatacgctttcttctgtttaatcttggatgaactttggattgacttgctttaacccacattcaggtctcaatatataatatgaaaccgggtaatcctaatgggcgg

SEQ ID NO: 30098 - DNA, 2533 bp, Oryza sativa
actgtctgtggccgtcacccgggaggagccacgccggcacctgctgggaggaaggagtgaagggggagagggggatggagggggaggtctaaggaggagtgaggccttttttgcagccggatgtctttacattccacctgcaaaaattaattttcacatgcgtggtcttaagacgcccgcatataaaaataacccttattttgtaggcataccttttaaaaccatgtatgtgaaaatcgattttcgcagacaggactagttctattcaacctttagctatttttgtaaatggtgatttttgtagtccgtctggaaaaataaaatcatgatgttgggaaaaatagtttttctagtggtgtgattttggtttcacctgtgtggtaaatgcatgattaacatcttctagtcccacaagtcaaaaacccatgcagtgcacgagctagctactcctgaaccattgatctcatttgatcaagtgtttagatctatttatactaccacgctagttagcagtagcagaaacatggaggaacattactttttaaaaaaaggtgcggaggtgtcatgcccagaaattcgctaactcgaatttcaagtagaatgtgtattaaaatccctgtccaggaccagccagagtacacaaatgacaatttaataaacagatccacgtcttacaaaaacaataaaataaatcttacaaacgcaacggaaaaaacaaataaattagacttaatcttcacgaccaaaagcatagcttcctccataaaccacaagcaatcctcgacgttcggaacaagctcaatcctcgaagaactcaccatctaaaccaatctctgcctcggggggggggataaagcaagactatgtaccaatcaccgtactcaacaagtcataccagcaggaaggtatgatgcaagatattctcaaaggaatggctcattggatatttgcaataaaagcagcatttataaatcatattttaaataagtaaaacaatatatataattaagtagtattaaatcatcactgtcgaacgctaaagccacattgtgacaggcccaaccaaatcacctgaactacaccagttttacaagtcatattattatagtgagactaatcacggtgagctagttgaccgcctaataaccgcgggcacggctattcgaatagttttccacaagactcattccacacatgttaccatgcctcgaagtactgccacgatactgcaaagggggaaatcatgacaaaacccttcatataaccctccctaatcgaacatacccacctcaggtttcaccccctccttgtgccaagtcgtgcagtcccctctcatgcctaggtaaatccggaaacaacaaagattaatatccaggcccgaactacaccattgcctctacccttgccatggtatgtcagctaggttaagttatactctagatttagcctaaagcccatgctggttatcatcatataattaaggactaaattataatgaatcccattgtgaactagttgatctaagcatggctaagcattcctaaacatatcatctagtcaattataacccaagttatcaatagcataagatattcaacaggccgagtatgataggcatccatcccacacgacattctaaaacaatgcaatttaatagaaagcaggggattttataaaataggctcaacatgatcaatcctgtatgtatgacttgccttgctcttgtgctgatgaaacctcggcaaccacttcgaaataaactggatcaccgaaactgacagaatctaaacgacaaacaaagcatacaagaaatacaagcaataaggctaccgaaacagcaaaagaatccaattttaatggattctatacattttaacgagttcactgcacttgaatgggttaaaacacttgaatgggttaaaacagagctcagattatttagttatgaattttacaatatgagctgcgttattacaaataaccgaaaaaccttaatcatttattacgtattattgcccaaagataaatagatcaatggaaatatatctccggtaagcaagcctcacgaattagcgactccacaagccaatactttgtgacccgggaccatccaaacggtcaaccgaaccggcgaatggaaccagcggctcaaaacgactataaactaaagaacgactgaacgaactaatactttgacaacactacacgcgaacgaacggttagcggcttaacgaacggctgtggcaaaggcggcaactaagcactattagcggcaacgactcggtacagcaaacgataggccggtaggtatgggcagcgagaaaaccacaacgacgacgcgggaccgcggcagcggcacggctaggtggtggcggctcggctcggctcaggggcggcagcgacggctgcagcagcggctcggcgcgtggcaggggcaaggcgacggcggcgcggttgggcggctgcggctcagcagtgactagggcaacggcgcgcatggcagtggctacacacgacacggcgacacacgaaa

SEQ ID NO: 30099 - DNA, 2014 bp, Oryza sativa
acaaaattgaggagaaagagaggtatagtctgggaagagagattagacaagaggaagcaggagattgggactagagaatagcaattgagaggggaagcagcagcaaggaggaagaagctatcgcctgaggcgttctggtaattgattcatggggaaaatccaaatccccccttacaagtcactgctctttatactctccccccacaactcaatattgttcaaaacactacacataaattaatttctcttccaattttccacccctattcggttttcacgctttctcgtgatgcgctcaatttctcgttatcgtgggcctacagcgcagcccgcgggtagagttgcctcgtgccacattggcggcaaaagcgcgcgcaccttcttccactttccatctttccctgctttaatttcgcgatcgctactgcaacactaaggcagcgaaagaacagcggtacaacggcgaagtacgacgatgatcgcatagtacagagagaagggatatcaaatctcctgcccggcaagagaagtcgtagaaggaagcactgaagcatcctgtacttcgatcacctcgtcaattcattctacaggttccttttttctccctggttttggtcggatcatgttttatgcatgtaattgttgtattactagattcagataatcgaatatttgctctttgatttaggttgcaaaccaataaattggtataatctctgcagatgggtcgaactagtatttccttcattgttcatactggttgtacaactggtggaagccctaggaaatctggtggggaaaggaattgttcatcgatctatcttttagacagggattctctgaaattcatcgatttggaggagtcattgcttatacatggatatcaaaaaggagatggtgtatactacttgaagccttcttatgtccctccacaaggtcttgtactgattctaaatgatgaacaaatcaagatgatgttggatgatcataagacggaaacagagtgctcactgtacatttttgcgaggccgcaggaattagtgactgataatggaagcacatcaaggtttttaagcccaagtagtatcccattaatcggacatcataatagtgtcccaggtgattttgataaagatgatttgacattgcatgaagagtatgtacagcaacagttgagggaaaagaaaaaaggcaaggaacctgctattggcaaggagccagtaatgttcttccaaggagactctgatactgaggacctatatggtactagccagatagatgcagaggttaaccaagcagaaccacatccgggaaaaactacacaggaaaaagaactagtagggaaaaaaactaacaagagaaaagtgaaggatataggccaatcagctgaggtggattatttgtcagatgagcccaatgatgacacaatagatttcaatgacgaagcacctatctatgtgcacagatcaagaggaattgaagatatcattttttatgagtccaccctacggcgtccacacatgcaagttggcatgttgttcagtaatgttgatcttttcagagctgctttgaagaatatgatcatcaacgaggggagggaggtgttcaagggcaagaatgataggaatcaagtttctgtcaagtgtaaggcagataattgtccttggtacatatatgcttcaaaattgcctggtgaagacacctttaaaataaaaaagtatgtttcaaaacataactgtgggaaatcacacaatatagcacagctttactggagatggcttactaatgaatacatggaattctttagatctgacaagaaatgggatgcacatgcctttcaagattgtgtcaggcgagataccaatgtagaagtcagcataagtaaggcatatagggcaaggagggaggcctacaagaaagttatgggcgatcatgatttgcagtttaaaagaattcaagattatgctcatgctgtgctatctgctaatccgggaagtaaagtttttgttaagtg

SEQ ID NO: 30100 - DNA, 1157 bp, Oryza sativa
cctgttagctgtgtttggatcatctgaattttgtggactctagaattgatataagccctgacattttactattttatttcccattgacagattatgcaggtgacatgccgagcaacaaaccggcacactatttttcttctttccggatggagtcacgatcgctgctgcacggacattttgtctatgacgcggtaagagggagggaaaaatagcagtacatattatgcacgtttgcgttgcagcatcgcagttgcgggttagcccgttccttctgcacagagacaaaaacatcactggagccacaccagcacatgttctaaccttcaggattccaattttttaatgtggaggtaatagccattcgcctgcaggtaatcacttttttttttctgtgcaagcttctgttatatgagtatgttttcgccgggtgttttatgagtatgtttgctttttttttcttttttctctctcattgtttttttagaaccaacagtaccagtgttgaaattgatcttgtttatttcgtttgggagaaacctgttagctgtgtttgagacatctgaattttgtgtactctgaaattgatatatgccttgacatttactattttatttcccattgacagattatacagtgacatgccgagcaacaaaccggcctactatttttcttctttccggatggagtcacgatcgctgttgcacggacattttgtctatgacgcggtaagagggagggaaaaaaaacagtacatattatggacgtttgcgttgcagccttgcagttgcgggttagcccgttccttctgcacagagacaaaaacatcactggagccacaccagcacatgttctaaccttcaggattccaattttttaatgtggaggtaatagccattcgcctgcaggtaatcacttttttttttctgtgcaagcttctgttatatgagtatgttttcgccgggtgttttatgagtatgtttgctttttttttcttttttctctctcattgtttttttagaaccaacagtaccagtgttgaaattgatcttgtttatttcgtttggagaaacctgttagctgtgtttgagacatctgaattttgtgtactctgaaattgatatatgccttgacatttactattttatttcccattgaca

SEQ ID NO: 30101 - DNA, 9441 bp, Oryza sativa
aacaacgagagaatatcctctcgagggatcaaaattaatccactctcaactaatagctatagaattcgcaatctcattattgtgcaacgttgaagccattctacgtgtaagtacatattgcatatctcttctctatctctacttatctctaatgttataaaaattaaagatgtttttgctggtactttggtacgtcatccgtatatgagtcggtttttaagtttgtttgcttttgaaaaaatatatatgtatttgagtcaggttttaagtttgttcgtttttggaaatacagaaggagtcatataaaaaatctttttaaaaaactcgcatgctaatttgagatgagtggactcctaattacagctcatgaattcatgatcttttagagaaatatatatccaagcaaatttcgacagtgattttcaccttaattaaaccatatatcaataataaaattaaaataaccttcacctgttgcaacgtatgggctttttttaagtatataataaaagacaaattgcatatataataatagtccggcagcttctctattttattactccactacggctacatgcacaattggggtttccacacagtcgttattgtttccgttgcaatgcaggtgcagacagtttgcgctgcgttcggttggaacatttgggacctttgccacgcatataaaacggaacgagttattagcactaattaagtattaattaaaaattaaaaatatattagtattattttttaaagtaacttttttgagatttttaacaatgagttgttcagaagttcaggaagtgtttgtgtaaaaataaaggagcagaaattggaaaagttcaggaagtgtttgtgtaaaaataagggagtaaacgttggaaagagcaggaaacgaatgcacccttcagagcaaatagctactagtactattaaagagcacctcaatttatctctagaagtttgaccaaatgcatttgtgaaatatcccatacgttggcaatgtcaatggcttcaacgaatgatgtggctcatcctgattgcactttgtgattcacttttactaggtaagatatggatgtatttagtttgttaccaaatattggtaatgcttagagaattttggcaacaatacatttggcctattctaaaagaatgacaatattaccaacttgtttgttaaattttgaaaatgtttatttaacagtaatcctaacaggcccaactagaaagtctctcacgctgggccttgttgaccggccagttagccatgcgttctgggccaccgttgcctttcctcgtcgccaactcacctgcccggtggctcgcaacgtcactctcgccgccttgaactcgtccgtcaaggcctcccacctccacgcacggacccaacaagaattcgaacaagctcaactgaacaaagcccagtgcaacaagaattcatgcactcgcctcgtgagggctgtcaaaaatgctcaaaactcgcgagctgctcgagctcggctcgtctaggctcgattcaagctcggctcgagcttcagacaaactaagcctgagcctctccttaagctcgcgagttttatcgagccaagcttgagcttccaacgagtctagtaatatatatttttttgttatttaataaattatgagatcaaatatgttatttgtatgccttatattaatatcatatatttattttattcttttttcctcttctattaatacgatgcactagaaattaattgttttttaaaagattatatttgaaatatatattgttttacttaaaaattaagctcggtagtcgagcttgtcagaaagctcgaatattttatagactcggctggagcttgtatcgagttcgagcctagacaaacgagctcgagcgagctcgttgacagcccttgccctcgtctgcgtctggccgtctggtacacatgtaggagtagtactgtttcacaggaagacaacacaaataagtactacaggctacagagttgctgagactgacgatggcctcaggattggtagcagtaaatcgtgcgtgcattttgtaccttctaggagtaaaaaaggagtactactcctagcagatggtataaacttgatgtcttgtactgtacttaagtgatcgagtgaaatacagtaatctaggtctagatacccctacattaaccatgaacaacagtacatcttggatgtcacccaagggactgattcacatcatcaaatgacgctactatctggcatctgcagcaaaacacaggggacccaacttaacccaaagcattcaagcccccatcatcaatctgaagcaagccaaaaagaacagaaacaatcaaacgagagcagtagtagcacaaccaaaaaaaccaggaggcatcaaagagtggcaggcaagtactatcagattgatccatttattattttctcccatttgctgacaaccttgtatcgagataccattattctgattccacgtcgtaaagcattttctctgctttttgtagacagcctgttgaacatgatgttcgcgctgtcgtacagttcgaaaaggttcgtcatccttcccttttttttcgttctttctttctttcttttcttcacctgaattttataaatgttgtcacggggatcgccgtggccaacatggagcagggatcctttcctttctcgtttgcaacgtaccaacagctagtgtaactagacaaccgagtcatctggagaaaaagattgagagccaaataagtgagacaggcttgtaaaaagctcatgtcatttggctgctcgctcagcggtttttgcatctctctgacgtttggctatgcatctgtcggcgttgttcgatagcgcatcctagaaagaaaaaggtttcttgtacagttgtactcaaaaggacagggtttgttggttctgtttgtgtgatttttattcacgctgtatacaaacaaattataatactccatagtgactatggctgtgttcggatgcctgagttcccaactctaatagtgcgcacgaaaaacggagcgatccattagcacgtgattaattaagtattagctaatttatttttcaaaaatagatcaatatgttttttaggcaacttacgtatagaaactttttataaaaaaacgatccgtttaacagtttgaaaaacatgcacgcgaaaaacgagaggagagtgttgggaacttagagttccgaacacagcctatgtttttttaagtgtagtacgtatgctggtactggcaccaaacttacatgttactctatttgttgatgtattccaagcagggctcataaaactgatgaaaacctcccggttttggcacaatttttaggtttagagccaccttgagctgataaaccgctctgataagaaaaattcaaagtgcatttcaatttttttttacaggacttacttgaaattcatcagatttcaatgcttttcatgaaaacaggtaaaaccgcttaggagcattttcttattagataaaacctgatttcaagttggtcattggacctcaaatccttcagtggtgaattttgtgctcccaacttatgagcttaggaattaaggatttaatgtgtgcacacgcacgtgcgggtgagggttcaaaaatcatttgctcgccaaatactgcactagcctccacagcaattttgacggtttttgtgaatagtatctaacaaatttgtcgaagattgaatttcagcttatttttttaaaaaaagaatcgtcagtttatcagtttgtttcttgatgcgagctgaagcgaacttgttctttatttccacgtattagaccatcatggaattatctctgctattataaaaattgaagatgtttccgcggtccgtcattcatgtttaagtcggttataaaaattgaagatgtttccgcggttcgtcatccgtgtttgagtcggttttaatttttatgatttggttttaatctatatctcttctctactgttataaaaattgaagatgtttttgccggtattttggtacgtgtcatccgtgtatgagtcggtttttaagttcgtttgcttttggaaatacatatccgtatttgagtcagtttttaagattgtttacttttggtaatacagaaggaatcatataagaaatatgtttgaaaaactcgcatgctaacttgagatgatcaggctcctaactgcagctcatgattttctatatatatatatatatatatatatatatatatatatatatatatactagaaaaaatgcccgtgcgttgcaacgggtaaactaaaattataccaaatataaaagtattagatgattagggtttagttttacatgatatgagctttttaagaaaatctattcctaatgaaataaaaacaattcaacttaagggacctcaagtgaacttattctgtgcgtgcacgcggcccatgaggcgggctacagtgtgggcggcctgagaacatattcggggacgactttagggacataaagtaaatgtattctctgaggagattacaagcggcccaatagtgtgggcagcctgggaacgctggagaagctgagccgtccgatctgatggacggtcttgattgatcacgacctatataaaagttcaatgatccaaaccctaaccctaaaaacatttcccctccctccctctccctctccctcagtggcggcgcctctccccctccccggcggcgcctctcctccctccccggtggtgccgctccccctcgcctccctcgcgtgacagatccggcgacggtggtgtcggcgacgaccgtgggtggatccagccgcggtggtggcggccgaggacagatccggcggcggcggctccctccgactcctctcgcctccctcccgcgacggatcttacggcggtggtagcgtcgacggcgaccgcatgtgggctcggtggctgttgctccccctccccggtgtggcgacgtggccaggagcggtggtgggctcgggagcggcggcgggcttgggaaccggtcacagtggaaggctacgatgccgacaacggcggcgacggcggcggacgacggacgacggcgacgaccacgaggagggtggctctgggagatggctagggttaggatttggattttatttttgatttggaatgttgattttgtggggattcttggttttgatttgggattgcaattgagtgattctgtgattcttgggaattgggggcaaaggggttgggaggctgatctgctcggggattttttttaaaaaagacggacttggacttacacgacgatgacggacgaaacggacgatcggaggccttacatgttttgaagtaggtatagagttataaaaccaaacgagaccattatgtcgcatgcatgaccgtaaatgcattaggtggtatgttttaacttaacgaagagaacaaaaaagaaatcaatggaagagcatcttttaacttaactaccgtaatagagagaaaaaaaattaacgggagggaaggctactcccatggaacagaatgggaaacaacgtttgaaacgcatgcgtccaaatgcgaaacggaaagggacgacgtaccaaaaacccatggtaaaaataagttaaacttttataatagtagagatatatccaagcgagctctcacagtgaatttcatcttaactaaaccatctaacaataataagattaaaatatacttcacccgttgcaacgcacgggtattttttctaatcaattaaaaaagtctaagtctaacttatttttaagctttctcattgtctgctaattagtttatcagatgcaacttaattttaaatattttaaatttaattttaaatttatagccgattttatgtttttctgtatttttcccagcaatgaattttaaaccgctaataacataatataaaagtttttataaaatatgtgttggttgttttgctccttttctatggcttatcaaatatcagccgtaacttaaacgatgagagcattagtttgagcgattgggtctagttgcctgtcatcaaaccatctcacaagctaactttacatgccttttcaagtttaaaaataaaactccacatgccttttgaaagcctgatcaaagcgagcgaaatatgctgcaaattttaatctctcaaacaaacacaagacattaaacaaaaccaaatggaggaaaaaatgtctggcagagaatgattgatgaacatgaagcgagatcgacaaaacaagttgcattttctttttctttcttttctagtaataacaaagagagaatagagagagaagagatacccatatcgaggagacacgatgcgcatacggtacgccgtgtacagtgtacagcctcccgagacaaaattcccaacacaccctggcgcctcggcgtactacgctgtaaagaagagagaacgggaactcccgttctcttgtccaacaaaagttggataaaaattaacaaaagttggataaaaattaacatttttatggcacgttttttaaactgctaaacgatgtgtttcgtgtgaacactttctatatgaaagctgctctaaaatatcatattaatctattttttaagtttgtaataaattaaactcaatcaatcatatgttttgcgtaaaaaacttaatctttattttcatctttattttcagtagaaaataactccaccgtaagagagaacgaaagaaaacgagaggccgcgccgccgccgcgcgccatacatgtggccattaattcccgggtggccccatacgtcagccacgtacatcgcggtggggactggggagcggggtgcatttagcatattttatcccgtcgcgctacgcatagcgaatattcgaaaccccccaatcccaacaggcgacagctcgtcccatgacgaaactctggcacgcgattttacgtaactgccctcgcctggacaaagcatttcaccggaattatctgcaaagctgcgtcatcactcgattgggtgaaagcttatgttacgtttaactgcttcatgttttcttgggcaactgaaagccaaaaactgatttggtcgaccagccaaggtcgtgacaaacaagacgtctttgtatatatcttgtgtgtttgcttaacctacttttagtgttctcctgcatatcttaattcaatcaaacttttcttgctttagtcaacttataatctagtaaatcggcaatgaggtgttagagacttagagttggttacctaagattgtgacatggaaaaacttttgtatggcttcgcctgggggcttaaataaagacaggacggcgtacaaaccaagcaagtcagccattgtacttgcttataagtattcggtattttgtttgccaggtagaagggtaatgtttgtttggtacgtaaacctgaggattgaaaatgacgcgactggtcacggtgtcactataaatttatagaccttctattaaaaaataaaataaccttgtttcgtgacattacatatgtatagatttgttatactccactagataatatcacacaccattatagattcgtttatttcggagacagataaggtataggtttactctcttcaatttgttaagaaaacaactgttatcaactagtattaaattagtattatgtaagtgtgagcgtctatgtatatctcggcacataaaaatataaaatgtgagtataatatttgtttatcttcgagaggagagaagaccatcacacaaaatcgactatactagtgtataatagattgttttctctgattacatatgctgatacacatcatcacatacgggcaatacacacaataccgatgataataaaatgcactcacatatgtacaagtagggttcaaatctattaacagataaacgactaggggcggaggatcaagtaagactagcatgaggggctaaacaatctgtccaaagttatagcctcctttttttaagtaaatactccctccgtttcagactataagatattttaacttttgtcaaaatcaaactgttttaaatttaactaagtttgtagacaaatatagtaatatttataatattaaaataatttcatcaaatcaataattgaatatattttcataataaaattgtcttgggttgaaaatgtttctactttttttcaataaacttggtcaaacgtaaagcagtttaactttgaccaaagttaaaacgtcttataacctgaaacgagggagtatatggcaaaaaaaaaagatagacggtttaatggaaactcctataattttaacgctgataataagggcttgagacccgtggtctccatggcatgcagatccactattgtagacaacccacatttttttagcttgtacccgatcattttggttccattagaggaagtaaaaaaacagtgttgtgcagaaactgaagaactaaaaaagacataccaccttgttaacacgttcctaaagtttcctgattttctagcaacgcccagaatcaaccaataataaagctcctttaacacggattattttgcacacgtagaaagtttaggccctccagtgccagccactcaggctgctgcattgcatagtgtactactagtcgttaaacctataaaatggccaatgctagtccagtactacctctggttctataataattaacgctttggacaagtttcaggtcaaatttttataaatttgatcatcaataactttaaaaatatttagtttaaagaaactagaacaacatatatatatttatctttaaagcactataataaaagtaaacatatatttatttattgtatatattataatagaaaaataagatcaaagatatattttgtagaccgtgttattgtccaaaacataaattaaaataaaaccggagggagtatctctgtcaaaataatagtccaatgagaggagaccagttcggacactcaaaatgatcatcacgtcatcaaaaagcggccgtccagggacgagggggggtaccgtggtcatttgccgcaccgcacgctcccctcgcgaagcgccaccgcttttcagccagccgccccacgtgaaattacccctctaccccccacgctccctctctcctcctcttcccctctctctctctcctcccccgctgtcccgcagcctttcccaaatctagccgcacgacgcaccaacccacgcccgagccagagccaggtcgccgcgccacctcttcggcttcgccgcgccgccgcgagcgggcggggagactccccacccccggtgagtgcccgcccgcgcagatccgcgcggttctttttttgtggggagaggcgggctgtttttttcttgcggtttggtttgggatttctgaggagagggggtttctgccttgggtggggggggggggaggatttcaaattcgggagcttttcggggggaggtttcttggttcttggtaatgcggggggggggggggg

SEQ ID NO: 30102 - DNA, 1789 bp, Oryza sativa
cattaacatctatataaatgtgtgtctagattcattaacatctatatgaatgtgggcaatgctagaaagtcttacattatgaaacggaggaagtaactatgtttggaagtctgggtacaatccacaattgagcagacaagcactaggcctggcgcccctcttgtccctttgtcagtttcatatatattggtccttccctctgacaacccctttgcccaatcccagcacttcatttgagtctgcttgctctcttgccttttttcttggcctctacgatactatgagagagcaggactgtggagcacacaacacatggtgggtggtggggaagctgtgattgactgccagccttttgaggggcagctctacagtacatagcactctctggctccctctctggcaggagggcttcttcatcggcgatcttgcagccatgcagatgggaagcatgtgttgcaagtatgctgcttctcactatgagctttgattggcctggtgatgagttaatgcatgcatggcatgttgtggaagagcagagtggtgctggcctgtgccgatgggggcccatgcgaaagtggattgagaagaagagaagaaaggaggggatgaagacaaattgtagttttgccattattctgaaggcaaaaaatatcatatgccactctttagtttctcattctaggatttcccactcttctagatctaattgataatttgccactcacttgatgtggttgatctatgaatttccacttgatggcatataagtgaatctggtatgacaattttcaagtgccatataagggaactagtgaacttgattgccagattaagaattttctctaagtgatgcctttctattttcataattgtaggagcaacatgaatttgaacttagtgtcatcataggtttgttttggttacgcttactgtttctttgtatgggtttcttcgaattcactttattattggattgatgtgatcgtacttctcagcattgagtggtttcacttagcctttcagttatgaattatactcttttttttctgaattgagtctagttgccaatttatcatcgttagttaactattatactattattaattatgcaaaaataattttgttgtagtctggtgagttcaccctcattgcctggtctatgcattttatttgtacatctgccaagttatcaatttcttttcttcttttaccctaattccagatggaagaagtcaaggaatctccagtacagccaacgactagtacagctcaaacaatcacttcaagtggcacagctgatttccaaggttttcatggagctcccaagtttgctgtcggagttcctaggaatctaccagctgttgctgccttgcctgctactgccccagtgacttctgcttccctggttaccttgaaaccacctggatcatctcctgtaaaatcagttaacaacccttcagttgttacaatgccccatatggctccatcgcatcttaaatcggataaaggagttaatggtcctcctaatctagtacgcaccggaggtactgctccaccttatctacaccatcagttatgcatttattttttgagcattcacttttttttagagtaaatttcacaaaactacgtattttatggtccaagttgcagaaaaccacatacactttgacacttggcacttaagtacatatattttggtagtgtagtttcacaaaaccacactatcaatgaatggattcacccgcgagatgatgtggctcattcacataggacgaggacatgacat

SEQ ID NO: 30103 - DNA, 670 bp, Oryza sativa
tgcatgtcaactggtaattattattgttattacatatatattggcttctcgcctgcctagatgtaccatcaggattgatacaggctatcatcatctgttgaattgattacttatgatgcacttgtttcataatgtagggccacactacaatcctgccggaaaggagcatggagcaccagaagatgagacccgccatgctggtgatcttggaaatgtcaccgctggagaagatggtttgttctttttccctttattccgaatttttatttgttccatacctgttaatgatttaacataaccatattagttgtggtcttgtagtccttaactcattgtcaatttgtagtaatactttattccgaatttttatttgttccatacctgttaatgatttaacataaccatattagttgtggtcttgtagtccttaactcattgtcaatttgtagtaataattgttgctgagagtttatttctctgctgtcaggtgttgctaatatccatgttgttgacagtcaggtaagtaaacattcagaaaaagaacattctccgtcatttgatttatggaaccaataccacacatccccttattattctgctgttaccttgtcttttccttctttctttttcctgtgtgttaacatggataaccatttatctgtgtcagatt

SEQ ID NO: 30104 - DNA, 2044 bp, Oryza sativa
caaaaaaaaacatgtcaagcagcaggacaccacgtcgccgatggcaaactcccgagcccatccgtgcggagcagcagccgccgccactccctccaccctccggctccgctgctctcaccctccacaagccattgtcgcttcactgtgcaccgatgctcccttcctctgtgagccgccgccgccagtgctccctccctcaccgaagcaccaccgtctccccactaagtcccgccaccgccgcgtgcgtgcctcggtgccactagatccgtcgccgagcctccgccggatccaccctaacgctgccgcccctcctcctcgtcatcgtcaagccatcgccactgctcctcttcgtcaagccaccactcctcctcgtcaagccgtcgttgcccctcctcctcctcgtcgagctgccgccaccactcctcctccttgtctagccatcgtcgcccctcctcctccttgttgagccgccgctgcgctcctccacctcatcgagccgctgccagccttcctcctcgtcgagtcaccgccatctgtggacctctccatttgcccccatctgtggacctctcccaattcttgttgacagtcaatgtcaagaaagtggggtaataactgggtgtgtaggtaagaaggtgcttcatgtgggtaaaattttcgtttaactttatatattcatttcattattaaaatatagcaatttagaatccagattagaatattctagtactatgaatttagtttagacagacgattgtttactagtggtatgaaattgtatgctgcaaatagaagaatatatgccaatactatcatatttgatagactaatttctctctaggcttgcatattttctggttcccgccataattaatcctttttaataccacaattaacttgtaaaggaacttttaacaaaaggcattaattaattgtgtgtgtataaacctaaagaaaatatcaaaacggtgatactacccctatgtcttagaattattatttttaagagaaatactattagacctcgcctagtagttatatataatttactcatttgcctcagacatttatttgcttttgcattcaaccaacttggcaccctgaattccgttaaaatgtgctgccaaacagcaagattattcgctagacatctgctcggaaagataaattaactaataatgcttctacacaagccacatgatctagttgaatattcttctaaaaacattagtgtcagctgtctcactatcatgctagacatgagaatgcacacctttgattccaatgtggactacggagcaaactcggccacgagaatctgatcctctttctctctcttcgtttgttttcttcttcttcttctttatgggattcttcttttgtttttacaaactcaaaggtttccatttttataaataaaataagtccctttcatatgaatatatattgccaaccactaattaatccctgagagtaattgattggtcaatgtgtggttatttctaccttgcccccacaaaagatacaagctatcttttcatctcgcttttggcctagatcacgacatacatatatatttggtttataaagactgaagagaaacagaatgattgctgacaggtgcttctcctagcttttctgaaggaaaaataccacattatacagctgaagtcgagctatttactcaccatttgccacaactgtaagccccaatatctgtcaattaatgtcaacaaggtgggggtgagcaggcaagaattaaggcgcttcatgcgggcaaaactttggggttgcagagcttctatactgtttactgcaaaattgcatgctatggatatccctaaatagaagagtatacggagttactgtcctgcttgacaatagtaagatagtttagaagtatgaaaactatatatagatgttaatttgttgagcaacaatagtaaaatgcaaacaggaaattttgggttgacatgggacttttaaatcctttgtgaatatctgaataagaaaaggccctaattaatcgtgtgtgcacgtaaat

SEQ ID NO: 30105 - DNA, 1681 bp, Oryza sativa
gcctcgccatccgcccgatctcgccgcccactgttgggctgcctcctcccccggactatccctctaagccggcaaactcctccccttcccctccccctcccaccccctcccaccccaagatcttaactcatagggtgtcgctggcgctggagaagaagaggaggtcaccggagttggaggagaaggcctggagcatgaatctcaaagctcatccggtggcccaaaatctgtaaaatttgggggatacaatttctgtcggcaggaggttagcaaatccgttttatcaaacctccttcgtcttcgcgtcgtcttcttgctcctgatcatcatcccagatgccgaactaagagtcatcgttgatgcccaggtgctgcttgccgcggtgccacccggaggagcagcctctcccgcactcgatctgcatccatgcctccagtcccgccctctcgctgccacccacgtgatcctccgcttcagccgtgccgtctcatcgatcattgccgtcgctgccgtcatggatgtttgttgtcaccgtcggcggctcgtccgtcatggacttggtggtggtggtgcaggacgggtttgtcgtcgatggacacgcctcttcgccgcgtgtcgtggccgacatggttttgaagcgaaggtttcgacggggtgacgatggcgacggcggtggcgggtttagggttgtgagggacggagacgatgggggtgaaggacgacagcgacgacgggggtaggagtacagcggcggaggcagtactgcgccggcggtggcggcaggatgagggcgagggtggaggcgctgaggcgagggaatgatggaggggatcgagggagagtttggggattgggggtgggggaaggatgttttgcagaaaaatccttatactttccatgtttacagtccaacccctgaaagcggaattttctctatttctatgaaagacaaggggtttcctggataaaacatgacaggggtatcagttggttcaaggatttgtgcgatatttcatgcaaatccaaggagttttttttttttttgctaagtagaccaacacgcgtccatttctccaaggagccaaaaacatttgcaaaaaatgagaaaatcgcagcggtaaggagtgttatgaacaaagtatgtataaggaaggccctttagatgtactgtaggttgtttcatataaaagcatcacatggcattttccccctccttttttgttttaagtgttagaatttggaaggtacaagaaattgaaagtgctatgcatttagcatctgaacttagaacaaaactgtatgtatttggatgtcaagtgtattactcaaacttaatctttagttgtatctttttttttcttacagatctaaatatggcttacaataacaattaaaagaatcagctaaccacctttgttttaacacgtcaaactttcatagtacaaagtttaccatctatgatgcccatccaccatatgatggagctgttgtctcaaaatgtctgagaaagctagctcgtgggcgccgccagtgtgcattttctcttctcctgtaactaactgagttaatttaggataacaatcaagggaatatttttcttttttcggtgatttttttactaacagattgaaaagaaatctatatatatgtgaaagaaactttcacgtaaaatttaaaactt

SEQ ID NO: 30106 - DNA, 1500 bp, Oryza sativa
atttgtcgatgagatttgatagtatatttgtaccatgaattacaagactgactttgcgtagaccggttcactttaatagcacccaaagttcaccccgttcccatttttaacacttttgtcaattctcaatcgttttccgtccgccttggtcgctattgacagccacgtacgcgatatgacgtttttacccctcacaagtacaagtagaatgcatggcaatgaaagacgaatgtatctctattatgccatctaccattctcgtgactaactttctgccactggtcctcccctatactcatggttctcgtgtatgggctgaaacacgcgtgaagatgatttgaagcgaataaatgtatgtaattgattttgcatataaaaataattgattaaaacgttaccagtgcacatcgcgtagaagccaaatatatggtgaggtggaaaaagatatgattatctctttatatggaaacaaacaaaactatgcagttactttcgcgcgaaacggacaatacaccgcgcgttacacgtcagagtacgtggagaatgtgggagtggaggagaaaagctatgagcatgaaacaataccgtgagcatcgaaggaaaacaatgtggtgagatggcatgagtaatagcgtagaaaacaagccacattacacgagaagaacatttgcagctcggaaaaagaccaaaaggaacaattgattcgatttgcagcttatttttaaataaactgcaccatgaagataggaaaaaaaatctaaattttcaatttaaaacaatgcaaagtatttcgacatcatagttaagggctaaggtacattaaaaatataaatatgacaatcctagcgacaagtagatattaaatcaatagagatcgaatcaaaatcgcattattcacaaaatatcatcataacttaaatcataaaatacacaatataacctgataagaaagatacatgagaaataaatgtatcaacatcaacgatcacaaacgttacacgaagccaaacaccaaacagaaaaaaataaataaaggaaaataagtccaaaaaaaagaacacaacacacagctatatactataaagctctgcaggacatggaaggagaagaaaaaaaaagaaaagaaaagcagaggagagagtagcagagagaaagaaaagaaaagaaaataaataaataataaaaagcaaaggaagggaaggaaggagagagagatagaatagagagagacacacaaacacctacaacaccaacaacaacaagagaaagagagaaagaagagaaggaaaggagaggaagaagaggtggtggtggtggtggtggtggtgtgtggcctccttcccctccctcctctcgcgaggttgccatgcctcccccaagatcctagaacgcatccccacaacctcacctcgctcgcaagaatcttcttcccaccatcgccctccctcgggatcgatccaacccgatcatcaatcggtaaaattcatttcgttcgttcgt

SEQ ID NO: 30107 - DNA, 1552 bp, Oryza sativa
aaaccgggagggagagggagaaggaaaaagaaaagaaaagggagagagagaaggaaaaagaaaagaaaagagagagagaaagaaaaaaaaagaaaaagaaaggaaggaaaaagaaaaagaagggaagaaaaagaaaagggaaatagataggaaattagagggagattagggaagtttagaaaatttaaaataattagcatttagttatagactagttatagacgtagaattgcgaaatttaatataaattatggattattcttggtaatttctacaagaaatcaattcgcggtagtagtttaaatgtaattaagaactaaacgattagatgaattcttatagactattatagattattttgggtaatctctataagtaattgattcacggtagaaattcggatttaatcactaggaattttagacgtatattatatttagtcgtttagtactagactaaaattaaatcgtataatattataagataattttaggattccgtccgatatttagcttgcgatagaaatttccaacctattatatggatataatgctcgggtagattaaattaaaaacttatgataacaaaatatctatacccacaaaatagtttagaatataaaaatcgaaattgggtttgccctagttcgcgaatagtaaagttaatataaaagaatcgacttacgcgttcgacttctatttggatttatttggatttttatttgaattctaaccgaattcaaatcaattttcgaacgtaactataaagcccgagggagttgcggatccaagtgagggccaagacccgcaagactttgagcaaggcaagtcatcactattcttgaacatattgatcccaattgcgaaattgttttgtttacaaataaaattgcatgcaatgatgaacatcctacttgcgattatgccatgccttgattattgtataccccttattccttcgtaaccatgtctacgtatgagtccctagtcaactatgacaaatgcttagaaatgctattctagaatcatgcatactcatatttgtcaaatgctatattcttgggtaattacctttgggaaggtaattgagatgcgacatgtggagacatgagcgccacattgccatgatattgaggacatgatttgtgaaaggagaaataaactaaataactgttttcgactagggcggacggaggatttgggtggtatctggaaaaggctagtaccttccccggtcaattaaggaccgagccatgaagttaagcatgaaacgaccctcgtacaaccgcacttctcgtatgggtatagacctagtggagtagatagccgagcagaggcagtatccctgcatagatggttcacccctgagtgaggcaggtgtgctacggtaggacagccgttgaggtagggccgagaggcgtgccctacatcggtgtcgccattggtaggactgccatgagtgtgtgagagagagaacttaacttgaaccataatttaatttaatatgtgtgtgagacttctctttcccgggagcgccagaactcctctcactg

SEQ ID NO: 30108 - DNA, 670 bp, Oryza sativa
ttgatttagtgcctcgcacttagaaagtgatcaatatttcagtgctgggcatatggcacttgcttgtccttaccaccttgaccaaatctgcaaaatagagtaggaaacaaaacatccaacaaagatataaaaaaaatgcagctaagatattttacttcgtttagctgaatcaaatcaaacaaaccactcatctaatttcttcttttaatctttgtttaatgcaaatactatggtaggaacccaattgtttgtttgacataagaaatcagtcatctaatttcttctttttatcttttttatgcaaatatggtatttagtaagaaatgctagagtactaatagtccctctgctcaaattgatcaaatagaactgtcaaataaattcaatatgttgttttggcgtcgttaaatggcatggttgttttataacacacagtaaatacaatgttagacacagtaaatacaatgtgtagaaattaattcgagaagctcaccatcaatgttagatacacctctgaaattagagcaataatggcagatattagatcaatgcacactataggggtcttggggtcttggggagatcgacggccccggtgtcttggggtcttgggtttggttcctaactgaatattgttgtttcaacagctttcatttttgcatcttcccca

SEQ ID NO: 30109 - DNA, 1387 bp, Oryza sativa
cccgttccattgctgcgcgccgtcgccgttcggcctttgcgtcgccgctgccgcgccatcgccatcgcgcgtcgcatcacctgccgcgccgcgcccccgggccccgagtcgccgctgctaccgcgccggtgccgctcctcgcgccccgcgccctgctgcgacgcgtcgtcatcccatcgccgcgtcgagccccgcgccacgccaccccgccgacgccatgaggccgccgcccctctcccctcttccccattatctctctccccccttcccttatataagcccccctactcccactcttccccttcatcctcacctcctctcctctacccacgccaccacgccgccgcctccacgccgctgcgccgccgcctccacgccgccgcgctgtcgcatagagccgccgcgccgccgccacgaagctgccgcgccgcgccgcaccttgcgccgacgtcgccaccgtcgccgtcgctgccgtcgccgcgaccgccgtcggtaagccgccgcctcctccacttgctcggccaccgtcgccgccctgggtagcagagagccgagaaagagagagagagagggagaaaccaagggagagaaagaagaaggaaggaggagagaaaccgggagggagagggagaaggaaaaagaaaagaaaagggagagagagaaggaaaaagaaaagaaaagagagagagaaagaaaaaaaagaaaaagaaaggaaggaaaaagaaaaagaagggaagaaaaagaaaagggaaatagataggaaattagagggagattagggaagtttagaaaatttaaaataattagcatttagttatagactagttattgacgtagaattgcgaaatttaatataaattatggattattcttggtaatttctacaagaaatcaattcgcggtagtagtttaaatgtaattaagaactaaacgattagatgaatttttatagactattatagattattttgggtaatctctataagtaattgattcacggtagaaattcggatttaatcactaggaattttagacgtatattatatttagtcgtttagtcctagactaaaattaaatcgtataatattataagataattttaggattccgtccgatatttagcttgcgatagaaatttccaacctattatatggatataatgctcgggtagattaaattaaaaacttatgataacaaaatatctatacccacaaaatagtttagaatataaaaatcgaaattgggtttgccctaggtcgcgaatagtaaagttaatataaaagaatcgacttacgcgttcgacttctatttggatttatttggatttttatttgattctaaccgaattcaaatcaattttcgaacgtaactataaagcccgagggag

SEQ ID NO: 30110 - DNA, 5223 bp, Oryza sativa
aaaaggaggggaaaaggaaaaaaaagaaaaggaggaaaagaatttccctgggatttaaaaaaaaagcaagctcgattttaaaaggttaaaattatttcgagagctctgaaaattccactaaaaatcttgttagtgaatttcgacatgtagaactcaagaaaaattccacatgccaattccgattattatttgcattgatttaatagggtttactcttgctttgcaccggtgtttttttttagagtctctattaattcaattttaggcttaggaggagaacttcagggtgtgacaagagtagactagagtccatataaaaatataatttataaataactgaaattcagaattaaaaataaagaaattagaagaagagtataaagtccatatagaaatacaattaagaaataatagaaattcggaattaaaaatgagaaatattagaagtagagtatagagcccatatagaaatacaactaaggaataatagaaattcggaattaaaaataaggaatattagaagtagagtatagagtccatataggaattaaaaactaactagaattcataataaacataataaaattaaaactagagtttagagtccgtataaaaaaaatacagtttacaaataactaaaattcgaaattttaaataaaacataggaagaagagtctaaagtcaatataggaatataatttagaagtaagtgaaattcgaaattaaaaattaaagaaattaaaagatgagtttagagtccacatagaaatagaattataaataataaaaatacagaatttaaaataaataatattggaagaagagcttagagtctatatagaaatacaatttacagataacgaaaattcagaaattaaaaaaaatattgaaagacgagtctagagtccatataagaatatgatataaaaataactaaaatttgatattataaataattaataagtaacacgtatataaaatacaatatgaatattacacattagtagttcataaagttagtacaaaatttaaaattatggtgtcattttaatatgttcgaataatacattaagaaaacatatatgctattatatgagagtaaatataatgatgatagccgcgcaatctgcgcgggccagaatgctagttgtatataaaattaaggcaggacaaagctttttgtgcttgttcgaaggtggttgcccatgcataacttaaactcgttcaaataatataagtcttgcatttttttagttgaattttttgtcaaaattcgttggaaaattgtagatgaaattaaggcagggagagaaagctttttgtgcttgtttgaaggttgtcaacttggactttaaatcttaaaactgagatcactctgccacttgacattgatgcagtaataatctgatctatattcggatgattaattgcattaattggtagaaataatttattcatcatgacatttacgtgatctattaattgatgcgattgaaattcccaaaataaaccgatttacatgggaatagctggtgatatcaaaccttgaaattcccaaaataaaccgatttatttgggaatagctggtgatatcaaaccttgaaattcccaaaataaaccgatttacttggcaatagctggtgatatcaaaccagtagggcggggtcggcccaccggccagctaagtgctgcttgggcagagggcatttgccaaataaaataatcgggactgttacaaggtgctaacaaatcatgtgcctgatttctttttggtaaaaattggatgcaatttcaccaagtagatcggaattgttacactaagtatatcgaaaatgttttattattttaaaaaagctgatacacaaccaaatcacctcgtgaaacattttgctacaacgtatgaaacaacggttccaaacaaatcaggcgttgttttaccttatataaaaacaatgtttcaataattagcgaaataatgtttcaaatcactgcaatatttgatccatacataatgaaacatcacgagtatacttactgaaacactattggtagaaaacaaatgaaacggattcccttaataaagcgttctataatatgcaggtgatttgttgcaactacctgtatggtggggcacgtggagggactgcactgaggcgtgggaggtgcgggatctctcactggacacataagatgcggcgggtgccctatttttctccctttgatcgggcgcccaatcgctggcattttccggacggttacaacgctcatactatctcttttcgttttccttttccctagtgccacgcgtggctgattcggaccaataaacagctggcagaagagccaacattagatatattttgactgattgattttttttatcaaatttctttagatttaaccaaattaataaaaaaaattagcaacatctacaatacgaaaatagtttcattaaatctaacatcaaatatattttgataatatgtttgttttgtattgaaaatattagtatttttttcaaacttggttaaatttaaagaaatttgagtaagaaaaagtcaaacgacttataatataaaacagagggagtatatgaaaataatattataataacaaatatcaaatatttcattataggtagataaaatcattctttttaaattaataataccaactaactctataatcagtggatttatatattatcataatgcgtgacacggtttcaagaaaaatgttgaaaatgcaagacttttccttagaaaatttgttgtaattttaaacataattaataaaataagggtatgtgattataatcaaaccgttatatttctttctgcacgcacactgtgtagcatgtgtgtcctatttagaattagtttacaacacataaattccaaaatcatattttttttactgtaaatttttttatggattttgtttattttttcctccttagtcattacattcggcagtcttcctgtttagctgcctgttctgtggcagtaccacaaacacacgacgcagttgggaaggaagtgaaatttcctttcaaagtagcatatacttgtactcgctactgtgtcagttgggaagcttctagcatatgctagatgtgttgctcaaaactttcttttcttaggatttttttctctcatataattcctaaatttatctcaaagattaatactgccacttggcccaagcggctggcagtgtgcgccagctttaaaagtacttatttattgactgatctgcagaagcagaaaggtgatcaaacttaaaaagtcgagacaatgtacaatgcccattttccggtattttgtcgaagctcaaattctcatatgtatttcctcggtttcataaaaaataaatataggaaggaatatgatagattattcgtagtactgtgatgtgtcatatcttgttttatgtttggtttttataggacggatatgaagtacttggattgatgagctacaaaagaaaactagttttttcagttttttccttccccacgtgacaattgaacacttcaaacgcttcactgtcaggtagtaatacactacatctgaataggtcaacttacagtagatcaaaactaaggtcacgaacgaagaaagaccacaatagcgacgcaatagtccagcagtcacttccagccttccagggatcaatatcccgtgaagaattaataaactacagggaaatctcgcgaggtcgggcaaaatcttgttgagagaagttgatttttttaatcagattttatttgaacttgaagcagtttgaacaaaatttaataaaatttagagaaattatattgtattgaactcgaaattttcagccaggattataatatatagcgatggctcgagagcgaaatttcgttgagaaattaattaatccctggtcacatcacataacacaaccgtgggaggaagtcatcacaattgggaccatgatagcactccaggtgagtacatttcgttaattgaagttttcaaaggtaagtgtagctataattttctatcacatgtttgaattgaggagggatgcaaagttaggtgcagtattggcctgtgtcatttgctcataactagatgataccccacgcatagctgcgggacttcttgtttctaaaaaaatattatccacgctaagaatgctaaaaacaaaattaataatgagagcaaactcaaacatatgaagaaagttcaaagttgtaggataaaaacatgtactcatgaaaaaagagcaagattacatttacaaattgacatgtgcacctcttacagctcgcagagttaattaatatggataggactactatataaactcaaaagcactcaggaaagcatggccaaatatgttttcaatgtacaatgagttcagcaagaatgaaactgcttattatcttcactttttaaacgtacacgctgatatgtttttaggagcagtcttacttgattaagtaccaagcatcttcataagatcagacttcccctagcaaacaacatgatcaatggagccacgatgtattaggctgcacaaacccgacctatataggacgtggcattgcaaaatggcatgaaaatagataaaaaaaaatacatgcaaattctaatattgaggcaaggaaagcattatatggtttaaaaaattattgtattcaaattacattttagcaaaaggaagtgaaattcagtattcaaatccactgaaacatccatttaactcatactgcagtattgcacacttcatcagctgaacagatgaaaatatccatcggctgaacagatgaaaatatcctggtagagcttatatctcttcgatgaacccaaaaaaatatgcaatctttgatgcataaaatcagtaaggtaaagggccaatccacatagcataatacatgttctttctcataaggtattcatcaagaacaataaccatgctcagtgaatgatggtaagaaaattctgagaaaatagaaatcgattaaaagaagttctgaacatgccaaatatcaaatatataacagtgcgctgttgcaaatggttatcagttgcagtctttcttatgcttgatcaaatcacttgatgttattatatcattacgatgaaaaggaatgatattgagctgaaagaaatggaagatagagcaaatccttgaatcttctgaaagcaacgttataatattctttagtgacgaacaaatgaaataggaagg

SEQ ID NO: 30111 - DNA, 1950 bp, Oryza sativa
cccggttcaggaagcaggccccacacgccatggccccaccaccactgacacgcgacgaaaacattggtctcgctctcacgcgcccacctgcccatgttagcggagcagacattttacctcgaacatgccgcggagacagctcatccatgatttcctcccccccctcccccccgattctccatcggattctaaaaaaaaaaattctctccacagattgatcgatttctccccccaccgaatccacgagatttcggagatttcttcgcggcgcggtcggttcatcgtctcttacgttcgtcggcctcagcctcgctcgccgccgccatttgggaggggagtgcgtctcgaggtcgtctggttgacggattcgtcctgtggatttgaaactttttttttggcttctccacccccgcaaataagcttcgatgcttttccctcgcgaatcgaatcgctcggttttttttcctcctgtgtgctcggtttgatggcgacgtgaagaggtgggcgtcgccgtcgaggttgagagcagccgcgctggcgatcgcgggcgagccatttgggttttttttttcggtcgtttggtttccgccaccgccgctgccgctaccgccgccgcgtcgtcgtgggtgtggttttgctttgctgcagcagctagtgctgtgtcgtcgtgcggcttgggcattgcggtgcccaaacacatcgccttcgtgggcgcctcttcctcaggccgccaccccggcgcttccgccgttgtcgtcaaaacctttttccactccccaccgccggggctaccggggtgtcctcggtctgcgccaccacgctgccgaggggaattgttgatctgaactatcgccggtggggcggcttcattcattctgagtcaccaccgaggggcgccatagatatgctccatcaccggtccttgatctgtgccgctaccgacgtgtcctctatctggacgacacgattgatcatagtggctgcgaagcacatcggtggctcggtaggtgaagaatatgaggatttccagcttgagtcagttgtttattttgtgtgtgaattttggggactccggcaataatcgagctattggctgacagatcctcgtttatactcacgctactctttgaatggttggaataaggcatcaacttgacgttctgttctgaaattttgatgaacaatgagattcaatctgaatatatttgtttatcaaattttgtagttccagattgatcctatgaactgaaatttctgttagacacaaatgtccatacacattgctatggccatgtaggattcagttcttacaaacagatgaagtagatcctagagggggtttcactgttatttttgggtaatccaaatttacaggtgttttacttaaaaaaaaactaaactcccaagcaggcccttaatgtgtcacaaaattttggttccactaccattctactagtacagtatttagcgatttgttttatgttttgagtttactgttgtgatttttttgttgcattcattgcttgttttggttgtttctgttaacttgcattatattccagctcttattctgatctgtccttagtgaccttttgaatgtgttcccctaatttctttttatttttatccgttttacatgccaccttgagagcttatagtttactatacattggggttacattccagtggaagttgttacttcataatatatcataccttaaaataaggatcccaccttgggttccctagaatttttgatggagtcgttgttgatggtgaccttattaattcctttctcatgtcaccaatagcacgaaggactacgtggaaatatcggctaacagtttcaccggacctatcaaaattagtgccaactaccttgtttctaacattgtgcccgattgtatgtaagaacatagcaacttgctcttcaacagacatatatatagt

SEQ ID NO: 30112 - DNA, 1896 bp, Oryza sativa
agcctaggagagagaaccaaggtttggcccacattgagagaaaaattaatgactcggttaaatattatattatctttaatgatatagaaatgacatgtaagctcatctaatagatggctgcttactctcttattaaacttgcccttatgttcgattctcacatatccaataattttgtatagtttttacactaataaaaaatatgaaaagtcggatttggtatgaacaacggattaattgtatgtttgccatatacaaaagatagacgcagataattcaaaattccaagttgtgctgcgcaactaaactaatcgatcaaaattccaacgaccgccagaccaaatcccaaccctttaatttgcatgggctcctgcctttgccatataggaattcccattgacgacaaccgtgtccggatgtgaactcgaattacgtatatacgtacctgcatgcatgcaacattccagttcacaccatctacaacagataccgggatcaaagattattaatctttagtcccggttcaaaagattagagctactttttgatctttagtttcggttgggaacaccaaccaggactaaaaatgagttccggttcgaaaaaaaatagcaggcggtgtcaaacccctctattatttttattatttttagtcccggttatttcgagtctcgattggtgttaccaaccgggaaataagatcggcatatgcggcagagatgacgaggcgtgcgcgagacccagaggcaatatcagttaataagttctatctcctcctccctcaccttaatttatctctttctcctcttcacccctatctcttcctcttcctcctctcctcattctcttcctcttcctcatcttctcctcccctctcctccccattcttaggcggccgggcagcggcggaggcagcctcgtgcgcggatccgggatctagcgcggccggccgggcggcggcctagcgcggagggccgcgcccggtggaagccggcgcggaggttggtgcggcggtaggcagtggaggccggggctgctgcgtgattttttttttcttttttccttaatgtgtgattcgatctgtgttgaatgattcgatctgtgttgaatcgatctgtgatgaatgtgtgattcgatctgtgttgttgttgtgaatgattttgagaatgatctgtgttgtgaatgttgtgaatgattggggattaactattactgtgaatgatttgggatgaactatataactgtgaatgatttgagataatgggcgtgagatatacaaaatagaaaaaaaaaagaaaaactccgattgaaaaaccgggactacaatgagttaccaatcgggagtaaaaagcatttctctaccagtgatacttttatgtatatatatagttttatatatttcaaaaaaaatttaaataagtcgaatggtcaaacatgcttaaaaaaagtccacgacgtcccatatttactatttagggacagagggactacgctatatagaaatactcgcaacattttgaaaaaaaaatcaaacaataataagaccactggtggagaaagcgtttgtagtcccggttcataaccccctttagtcccggtttgaaaaccgggactaccaatccgggactaaagatagatcgctatcttttgtcccgggtgaaataaccgggactaaagatcgagctgaccttttttttttcatggccctgttgctgcatggtttatatatatatatatatatatatatatatatatatatatatatatatatatggatatatatatatatatatatatatatatatatatatatatatatatatatatatatatatatatatatatatatatatatatatatatatatatatatatatatatatatatatatatata

SEQ ID NO: 30113 - DNA, 685 bp, Oryza sativa
  unsure (1)..(685): unsure at all n locations
cattattacttaattattgactgatttaatagtttaggacataatttggttaggattgaataatctatctggggtcctgtgaccctgggaagctcaacataggcactccattgtatttggtagttgatttgtgtgcacaaccaacctggtctcttttatcctttctgcttctgggatttacacaccatcttacgcatggaataacttgattgcatgaggcctgtgatgaaaccgggcaaagcagccagtgacctttgtaaccaaaatagagaggtcaaaagttccttaagtaggtgaagagggagaattttagtgcctttattacggatataatagaagctagaagcaaccaatacttttgtgggatgtgtggaaagcatccatctggaactgtgagaagtattgtttgcatacttctctgtttagcagggtatatggcaaatgggcacatcgcctgctctactcatttgtttgagatgtttgttatgcattctaccttcactccatatctcctatcactatattgtacaacaatttgtaccatttttttcctctttctagntttccttggaaatgaaactgtgcaaagggagtgagaaggatgactaaagccttgtagagacatcaatttgcatccatttctttcttttcattttggtggggtcaatgggctattaaatgatag

SEQ ID NO: 30114 - DNA, 740 bp, Oryza sativa
tcattagtattgactgtgtatcccactaacgatcttgaatcactgccagtcatagtattgactgtaacttaaataattggcagctgttgtattggattgaaattaacgggtactacatattagcttggcaatgtagcaaaaactgttatagtataaaatattgttttatgtactactgtttgagtagtggagcggtaaatatgagcttttgatcattaaaatgaacggttacaatacatgcagtcctatggtgcagttgtgtctgcatcggatctcaatccccactaaacaactactccctccgtcccataatataaaggattttgagtttttatttgtattatttgaccactcgtcttatttaaaaaatttgtgcaaatataaaaaacgaaaagttgtgcttaaagtactttagataataaagtaagtcacagaaaaaataaataataattctaaaattttttgaataagacgagtgatcaaacagtgcaagtaaaaactcaaaatcccttatattatagaacggagggagtacctcttggagtatggagaaggagaacattagacgcatcagttaaacatttcaagtatactgagcatggacctctaaaaaactcttcattccctccgtaccattatgtttgggttctgttgtgctcccttttcttctcctaacgcaagcgggacacgaaaatcttttacatgtactctagaaaatgaacctcttaattcaatagcat

SEQ ID NO: 30115 - DNA, 698 bp, Oryza sativa
  unsure (1)..(698): unsure at all n locations
ccgagaatatttaaaccgctccccacgggccacctcgtcggtttcgtcaggtaagaganaaccgtttctttttttggcgaatcgcattcgcgcactaccaaacacaacgcgagctcggaaagctactgatggcgtctcacatcattctcccaaagaagaagaagncggcgctgggcgtgccgttgaagaagacccacgactcgcgggcggcgccagggtaccagcatcagcaggggccgccggtggcgaaggcgctgccattctcggccacgtgcgtgcggatctcccgcgactcgtacccaaacctccgcgccctccggaacgcctccgccatgagcctccccgacgacgacgccgcttacgccaagctcgaggagggcgactacggctacctcctcgatgacgtcccgcacttcacggactacctctccgatctccccgtgagcgccgacacccctcctcttcccactcatccttgtctcgcgctggttgttccgctgccagattcgacgcctgcggtgaaaaaaattgcagtatgcagtgctgcttgagattttgatggttcttttggagacgcggatctcgtgaaagctttagatttagttctgccatttgtgtgaggtggagctttatttggatggttcctttatttttggtgtttttggcgtgtcatgccggggatgggttctggaatgaga

SEQ ID NO: 30116 - DNA, 641 bp, Oryza sativa
  unsure (1)..(641): unsure at all n locations
aaatagcacatcctctacagtccacaacagttgactcaaatctcttagcaccaattttctctccttcctcccttggctaacatgcacaagttcattgggaagagaaaagacaaaacaaagagagtagataccagcacggggctacccacatacgacaagaaggaagcaaccgtagggcggcgacatgttggcggcgttggggaccccgacaccggcggttgcaggcattgaaggaagcaggagcaggacccgaccgacggtaacggccatagcagaggctgaaggaggaccccaacgggtagagtcggcgattgcgccacgggaggcacgaggaggggcctactcccttggtcggcgacaaggcaggcggagcactgatgtagattgagagactcgcatcgaccacagcgataaccaatgcaactagttggagtcagcgttgacgagctgggcgacgactagtactcgagggtgacgacccaaatctagatcccgtcgagggagaagcgactaagagcaagtataatagtaggctacaagccggctaaatgctgaggtggaggagagaagagaggagagagaggagaagcggacttgtaacttacagccgacttggacacaaagaacaaganactctatgg

SEQ ID NO: 30117 - DNA, 779 bp, Oryza sativa
gagatcaggtaccgctaaaagtatgggaatcaggtttcttcttctattgtgggacaacaaacaatctatccccgtttcaacatctgactaagtaaacaaggattagccacaatcaccatcaattcctacacggaacgccccccgcgtcgggcgaatcggatggggggttttgcagcgggaaggatcgggatgggagggtgcggtaccttgagagagcgcaagtggctcccggcgatgcggtacatctctgccgtgcgcgtcgcggaggcttggaggaggcgaccggcggagatgaggggagccgccgccggggaggtgggagacgcgggtgcgaccgtccggtgcggcgcggaggttgagctcggccgggtggagacgtggagtggtcggatccgaactgtgcgtaggttttgtgggaatgggaaggctctggttttgtgggcttggtcatgacgggcttccatagaatcataggccgaaggaataagttcatccgaggtcccttaattttacaacaaatccgattttcgtccttaaaccccaaaaccagatacaaccggtccccaatctgtcaaaaccggtgcccttggcggttttgaaggcggttttagctgatatggcgccatttgactaggtctccgtcccacgtgacattgatgtggcgatgaccgtggcaattatatctcagaaaaataataaaaatcatgggcccacatatcaaccacacaaaaaaaatctaaaaatgatggggcccatatgttagctacaaaaataatatg

SEQ ID NO: 30118 - DNA, 1687 bp, Oryza sativa
gaacagtccttgaaacacaccgaaccggcgaggtccctagtttaggttttttccggttgaaccgccggtccggtctggttttttctactgtgatctccacacacatctacatgtatccaacgctttatggctgaacgcccctttagttgagttgaaccgccggtccggtccctgtgatctccacacacatctacatgtatccagcgctttatggctgaacgccccttcagttgagttgaaccgccggtccggtccgattttttctactgtgatctccacacacatctacatgtatccagtgctttatggctgaacgccccttcagttgatatgtgctatataaattatctacaaattttggataggaccttcagttgatatgtgctacctaaattatctacaaattctggatagggctgctaaaaagaatttgctacctaaattatctacaaattttggatagggcagctaaaaagaatttctccaagaaacatatttgtttcttcttgaggttgtagctcctatctaacaaattgatgattgtacctactatctaacaaattgatgttaatcaagtcccgtcatcatcaaattgttaaccattggatgaatgcattagatcgcttttcagacgttggatggaatacaacatagagcccaacccattagtcaccgagtgagtctcttcgccttctcagtgtcaaatgtagcccacatgaatatattgacccatctgcaccatagtataaaaactcggaccggacgtcgaactggtgaggcctcggttcaccggtccaaccgcggtgttaaaatttattgtttattgcacaccacaatggtcagtgtggtgtagtggtggggaacttaacgctccatccaacaatcctgggttcgatccccatgcttcacccgatttttgaacaataaaataaaactgggccttaggacttgggcttcccattagggaagatgctgtccggtggcccagctcgtttgagccggccggttttaggagtccccgcttcagaggtttttcctgaaaaccgtcggttcacaccgggtcaactgcacgaacagtccttgaaacacaccgaaccggcgaggtccctagtttaggttttttccggttgaaccgccggtccggtccggttttttctactgtaatctccacacacatctacatgtatccagcgctttatggatgaacgccccttcggttgagttgaaccgccggtccggtccctgtgatctccacacacatctacatgtatccagcgctttatggctgaacgccccttcagttgagttgaaccgccggtccggtccgattttttctactgtgatctccacacacatctacatgtatccagcgctttatggctgaacgcccattcagttgatatgtgctatataaattatctacaaattttggataggaccttcagttgatatgtgctacctaaattatctaccaattctggatagggctgctaaaaagaatttgctacctaaattatctacaaattttagataaggctgctaaaaagaatttctccaagaaacatatttgtttcttcttgagggtgtacctcctatctaacacaataatgattgtacctactatctaaccaattaatgtaaatcaagtcccgcagcaacgtacggggcatcctttagttatacatct

SEQ ID NO: 30119 - DNA, 721 bp, Oryza sativa
cgtgcgaacaagactcaacggctatcggcggggtggggcagcgaccatcgagcttccggaggagggagagaagggcctagagaagaagagaagtgtgtctgacagtgggcccaaccgtttttcctttttatccttgtccctgatatgtaagtcccacaagctgactcagctagagtgctagacaacgtggacaaagatgacacgtgggacaaaaccacttccgaaaccaccagggtagtagatttgcaacaattttgagagttatatatatatatatatatatatatatatatatatatattatatatatatatatggggttttgcggttgagtgttgcaaatcaaaggacatgagttgagggaggcaaacagacttattcacttttaaaagcaaccgggacggcccagtagcctatggacggccgcggcccaagtgacgcctcctaaaccctaatcctatggacggccaagatgtcccgagcccctcaagctcgcgccatccgacgagctggaagcattcacgtcgtcccgactcttcctctataaaatcaccacctcgcctcgcgtcaccacctctcgccgccgccaccgcctccccctccaccccccgcctcgccgtctcccgttcggaacaccaagctccagcgccccccctccggcgaaatggtacgttctcgccgccgctgccgccgcgtcttttgtgtgccagtgctatcgcag

SEQ ID NO: 30120 - DNA, 1871 bp, Oryza sativa
cccccccccccccgaaattttttatttttgttttatttgtttgatatttttttcacgcttagggacacacaaaaaacagaatcactatatactgtttaacttatatatgtcatttcatgtgattatattttgaattagattaagtaatttcatatagtggtagagtgcattatgtttaacatgctgatcaaagggttttactaaaggagttatggtctaattttagtgaaggtgcaaagtagactaagtggtatgctagatattttcagacttagctaagtggtagttcgagtttaaattttttttgtggttggttgtatcgtgatcctgagtgtgaaaaaacatcggaaagaataaaataaaaataacaccgttgcaactccatacagagaaacaggaatagaggcggcggcgccagcatggctggcgccctcctccctggggcggcgccagcatggattgcgccctccttctccctactaaaggagtattggtctaatttttcgataaacagaaagagagaattcttgatcaatctgtaagaaatacaaaacgagagaaaacgggatggacataccagaatcactcacctgggaatatcccaacggtgcaaaagccgcttatgtcgatggaatcacgccgccggctggcttgacatggattcaagccatatatatatatatatatatatatatatatatatatatatacacacacacacacatatatgtatatatgtgtgtacacatatatatatacatacatatacatacatgtacatatacatatatatatatatatatacatacatgtacatatatacatatatatatatatatatatatatacatatatacatatatacatatatacatatatacatatatatataacatattgtcagggttatggataccacatatctaatagtcgtcgtcgccactgccggtttccggtgaggaggttcgtcgctgccgtcaccgccggtggcgtggtttcgtgtgtaatttattttaatctattcttatattttggcggggtttcggttcaactgtttcgcaggttgagtactataacaatttttctttgtttgtcaagaccttaagacgggaatggatcctactaataagttgttggttcatcctcctagtgatccaataactgtacacgtatgtatatatgttgccacaggatgatcgggagaaaatggtctggtcgtgggtagaagaagcaccagttggatgcacgcgctaggagctagtaggctgttattcacattatgtgttcgatcgatcgagacaggattagttttttgaactgatgttcttagacagtgtattaactttaaaactaatttgaatacaataattctagagtatataaaaagcttgtgtcggataccttgatcgcatctatatgatcacagatttttctagaataagaaaccagctagttttaaacatttgtgttaatcacttatcactgattactgaaaaataattttaaatgtgaagcactaatattaagtcgaatagactcagtcagacaggtttcaccacactcaattcgcaaaatatccaatcatgctttcaaattttagcggaagtttccaagttccatatgcttcaattgcatcggaattaggtatatttgtctggatttttcacattttgattcttttgaaaaacttatttcgcaaatagacccttgaaaaaacttatcccagaaatggtcctttttgggcaccagagtggctggcgccgtcatccaacgggacggcgccagcctctctggcgccgtcctcctgccaccgtggcgtacgcgaaccgacgtggcaggaggagggcgccagccatgctggcgccgcccca

SEQ ID NO: 30121 - DNA, 731 bp, Oryza sativa
attgcccatagaaagagggtttgattttgttaaggaatttttttactgattatgggaacctgatttctctcaagaatatttttactcaccgtgtgaactgatggagtgagaaaaggggcttgaggagggcacgtggagaccgggtggcagttgtgcaggaaaaaaacggaaaacactcttggtgggaggaaaaatacgaaaaacccagaaacagaaagggaggaaggagaaacggaaaaacaggaggagatcgctcctgtgagaggcgctacgtagtttcctagcgtgctacgtctgtgtgtcgcgctacgtagcatgatcgtgttatatatatatatatatatatatatatatatatatatatatatatatatatatatatatgatatccataggggactttatggtgtccgggctctaaggtataaaaaacacaaattctctcaaatttttaaaaatttacaaattgtaagtagatatctaggtatatgaatttaattcatacaaatacctaacaacaaaacaactcaaactcaacttcatttcacaattcattattacatacataacgaattatatgtttagatgttatatatctagaaccaaaatctaaaaaaaaaagttcaaactcagttcaaacttgtttgaacttgttagtaaagaagttaatattcatatctaaacatttaaaaaaaacatttaaacattcaaattgggtatatacgcaattt

SEQ ID NO: 30122 - DNA, 1279 bp, Oryza sativa
ccctcctcctccctactaaaggagttatggtctaatttttcgataaacagaaagagagaatccttgatcaatctgcaagaaatacaaaacgagagaaaacgggatggacataccagaatcactcacctgggaatatcccaacggtgcaaaagccgcttatgtcgatggaatcacgccgccggctggcttgacatggattcaagccatatatatatatatatatatatatacacacacacacacatatatgtatatatgtgtgtacacatatatatatacatacatatacatacatgtacatatacatatatatatatatatatacatacatgtacatatatacatatatatatatatatatatatatacatatatacatatatacatatatacatatatacatatatatataacatattgtcagggttatggataccacatatctaatagtcgtcgtcgccactgccggtttccggtgaggaggttcgtcgctgccgtcaccgccggtggcgtggtttcgtgtgtaatttattttaatctattcttatattttggcggggtttcggttcaactgtttcgcaggttgagtactataacaatttttctttgtttgtcaagaccttaagacgggaatggatcctactaataagttgttggttcatcctcctagtgatccaataactgtacacgtatgtatatatgttgccacaggatgatcgggagaaaatggtctggtcgtgggtagaagaagcaccagttggatgcacgcgctaggagctagtaggctgttattcacattatgtgttcgatcgatcgagacaggattagttttttgaactgatgttcttagacagtgtattaactttaaaactaatttgaatacaataattctagagtatataaaaagcttgtgtcggataccttgatcgcatctatatgatcacagatttttctagaataagaaaccagctagttttaaacatttgtgttaatcacttatcactgattactgaaaaataattttaaatgtgaagcactaatattaagtcgaatagactcagtcagacaggtttcaccacactcaattcgcaaaatatccaatcatgctttcaaattttagcggaagtttccaagttccatatgcttcaattgcatcggaattaggtatatttgtctggatttttcacattttgattcttttgaaaaacttatttcgcaaatagacccttgaaaaaacttatcccagaaatggtcctttttgggcaccagagtggctggc

SEQ ID NO: 30123 - DNA, 1015 bp, Oryza sativa
agggcgccagccatgctggcgccgccccagggaggagggcgccagccatgctggcgccgccgcctctattcctgtttctctgtatggagttgcaacggtgttatttttattttattctttcggatgttttttcacactcaggatcacgatacaaccaaccacaaaaaaaatttaaactcgaactaccacttagctaagtctgaaaatatctagcataccacttagtctactttgcaccttcactaaaattagaccataactcctttagtaaaaccctttgatcagcatgttaaacataatgcactctaccactatatgaaattacttaatctaattcaaaatataaccacatgaaatgacatatataagttaaatagtacatagagatgcaatttttttatttttatttcattttttgatatttttttcacacttaggagaacataggaaccaaccgtataaaaaataaactcaaacggacaaaatatgtgacatgtagaattttccaaaactctaccgaaacggacaaaatatgccatctattaaaataggcgtaactttctcatacggactcggaatcagacaaataatatatgcacggacatctacagaaaatgttacatccgattctccccgctttgccgggttcggcgatattaaaacctccaaattccgcttgcaagattgtgttttcgaggagagaagtttttcggtggagctttggaaaattccacatgccacatatttcgtccgtttgagtttattttttacgtggttggttcctgtgaattcctaagtgtgtaaaaaatatcaacaaaataaaataaaaataaaaaagttgcacatctctctcctctgcactagttcggagagaggagaggagaggaaaaattctacatgtcacatattacgtccatttgagttcaatttttctatagttggttcttgtgtgtccctaagcatgaaaaaaatatcaaacaaataaaacaaaaataaaaaatttcggggggggggg

SEQ ID NO: 30124 - DNA, 1213 bp, Oryza sativa
aattataatttattttattgttacttgattatccgtcaatttgttctttaagcatgacataaatacttttatatttgcacacaagttttgaataagatgaatggtcaaacgttgcttgagaagtgaacaacgtcacacattaaaacattaaagaagtagtttctttataaaatgtaccccacactggctccggtgacatggaggagaacgaaagaagggagggtcggagcaggggagaagaggacgctggagagtgatgaaacggaaactgcagtggtaggagacagctgtcatcttcgtcttttccccctctttctccctctccatttttcacccttcgtaagcttttctttagcgcacttaatagtgggttaacttattttctttatttttttaaatactcccttcgtattaaattttaataaatgtcgtcatttactttttatcaacgtttgaccattcgtattatttaaaaaatttatgtaattatgatttattttattgtgacttcatttatcatcaaatgttctttaaacatgacataaatacttttgtatttgcacaaaaattttgcataagatgaatggtcaaaagttggtcaagaagtcaacaacgtcacaaattaaaacatgaagggagtagtttctttgtaaaatgtatcccacactggctccggtgaaagagaagagaacgacggaacggagggtcggagaaggggagaagaagatttgagagacttggacactggagtgatgaaacggaaactgcggtggtaggagacagttgccgtcttcgtcttttccccctcttcctctctctccatttttcacccatctttagcttttcttcacttactgttaacataacagtcggttaactaatttttttcctccagttttgataaaaaaaactccgaccgtattaaattttaatgtatgtcgtcatttactttttatcaacgtttgaccattcgtcttatttaaaatatttatgtaattataatttattttattgttacttgatttatcgtcaatttgttctttaagcatgacataaatacttttatatttgcacacaagttttgaataagatgaatggtcaaacgttgcttgagaactgaacaacgtcacacattaaaacattaaagaagtagtttctttataaaatgtaccccacactggctccggtgacatggaggagaacgaaagaaggg

SEQ ID NO: 30125 - DNA, 1300 bp, Oryza sativa
atttgggatgggtgaccgaccgggaaattcttcccgagtgtacacgagtgaggacaaagtgtgcagaaaagacatgtgttggtctgtgagggcagtcttatgacctatgaaagctatcagatgtaagcgggcccggcaatttgggatgggtgaccgactgggaaattcttcccgagtgtacacgagtgaggacaaagtgtgcagaaaagacatgtgttggtctgtgagggcagtcttatgacctatgaaagctatcagatgtaagcgggcccggcaatttgggatgggtgaccgactgggaaattcttcccgagtgtacacgagtgaggacaaagtgtgcagaaaagacatgtgttggtctgtgagggcagtcttatgacctatgaaagctatcagatgtaagcgggcccggcctgggggaaggcgggacattacaatctccctctgtattatctttttttctccatttttttaaaaaatactcccaccatattaaattttaatgtatgtcgccgtttacttttttatcaacgtttgatcattcctattatttaaaatatttatgtaattatgattttttttattatgacttgatttatcatcaaatgttctttaagcatgacataaatacttttatatttgcacaaaaatattgaataagatgaatggttaaatgttggtaaaaaaatcaacaacgtcatatattaaaacatgaagggagtagtttctttataaaatgtaccccacactggctccgctgaaatggaggagaacggcagaagggaggattggagcaagggagaagaagatttgagacttggacagtggagtgatgaaacggaaactggagtggtaggagacagttgccatcttcgtcttttccccctcttttctttctctattttttcacccttctttagctttacttcagtgactattaatacttaacagtcggttaacttatctttttttcctcccattttttttaaaaatactccctccgtattaaattttaatttatgacgtcgtttactttttaatcaacgtttgaccattcatattatttaaaatatttatgtaattataatttattttattgtgacttgatttatcatcaaatgttgtttaagcatgacataaatacgtttatatttgcacaaaaaatttgaataagatgaatggctaaacgttggtcaaaaagtcaacaacgttatacattaaagcatgaagggagtagtttctttataaaatgtaccccacattggcttcggtgaaatggaggagaatggcagaagggagg

SEQ ID NO: 30126 - DNA, 715 bp, Oryza sativa
cctctcatcttcttgacgaacttctccatctggatgaacacgaacttgggtgtgtttcagcaccaagtcttcgagctctcggtagagggcgtaacggttgttgcgacgccgctcccgcttgcgttggttctcggtaggtgcatgttgaagtcttggtggaattggtggtgttggtaggagaggaggcgcaacttgtcgtgcggctgcggtagatgcatatgtttcctgtcacctttgtatttggactcctcgtcttggagaagatggaacgtgaggcggcgcctgaattgggggagcccctcgaactcgccattcttgagcagggcgtgaagatgcgtgatgatcttggcgtcttaaccaccggttccagcgtggtggtggcgccgtctgcctttgcctcgtcacttgggctggcaggggtgtatgccgaggagccaatgtgcggctattatgttgaggacgatagcttggttggtatcgtcttgatctgcccccagcatgtgttgatggtgcctcatggtcttgtagccgccttcccagttgagccatccggtcttgcaactcgtgaagttcttgtcgtaagtcttcacttcttggagcaggtgcctcaggtctcaggacaacgaacctgttgttgttgtagtcgcacgactcctcctaccgcggacaagtggaggcatggctcccatgtgctctgctggcaaggggcgtatgt

SEQ ID NO: 30127 - DNA, 897 bp, Oryza sativa
aaaaagtctgtcagcttggatctgttgttgcccatgtgagggtggccatttccatgcgcattatgctgaaaactggctatggctgtggttagtccttgcaagatttgtgtctgaactgccattaagtgttgcatgttggtttccacatgaggtggggaagggaggcgttcttctccagaattgtgactggcagtgcggtgagagcggtgagactgttccatctctgcattacggaaaactgtgcgatgcgagcggttgctgcggcggggttgctcaacctctgcgttgcgggaaacagtacggtgcgaacggttgctgtggtgagactgctcattagctgattcatgattttcttctggctcaactctaccatcctcaaaaccaaagcgggctggtgcacgagctgcacggcggggacggctagccatctaaactcccagaagagggcggggtaagagtcagataagcacttaggagggcaaggagcaaagcaaatagcaactcagatagcacacactaggcataaactggatttttcaaatcataaaaacacctgatacaacgggtgtggacaagtcacagagctacgccgagcttgactgtgcgcacaccacctaggagaaccagactaccaaacaacacccacaacaaacacacgcacgcactacctcgccacgactccaaaagagttggcggcggaacaaaagggcctatcacacggacgactgctgaagactgcctcctctactcctcgtcggcctggctgcctcctgtagtcggctcctcagtcgaagaaacgtcgatcggctgacgcgaagggaccggcggaacctgtcgagggccggcagcagcacgggccgctggcggtgggggagctgggtagtggaaacggaacac

SEQ ID NO: 30128 - DNA, 1118 bp, Oryza sativa
atataagatatatgataactcgtcgaattacataaacaagattaaagtatcatgaagatggaagcactaatcccgagaacgcaagccaccataacaagttttacctcttgttgaagatcgaaacctatgcagctcaacctgaaagcaagaactcgtcgaaacaaaatgaaaataaaagagtggcgatgcgccgagattgtattgaacgtgtgttagtttgattacatggggctcggatctatttatacccgagaattacaaaatatgttcatatcggacacgactcttatctctaacaaactctaagataccataagtctttgcaacagacttttacctaaacatatctctaaggaaattacataaaatatactaactaatagatacaattgccttctcaggactctatccatgcgtggcaatcgtcatgaagcacgtcaacctaaaccgacaacatatgttgtgtcatattgtcggattcggctcaatcggctaaccccgtccgactcgaactctgctgatcttagtcgtagccgattcggacttcagccgatcttcactctgtttccgggacaatctctatctcgattcctccttcacatccgatcctccttcacttttggatatcactaaattacttcttagacatacaaaagtaaattcaataaagtctaaatgtaatttacatatattatagaagtacctttagacaaaacgaaagtaactttgtcataccattaggggtaattccattgtagggataaaaacataactctatctataaactaaattaattagcacaaactatggaattgactaaaccaataataggtagtcacctctagcattatgaatgtataggaagtaatttaattaaatctaaaattatgaatgtataggaagtaatttaattaaatctaaaagtactctaaaagtaatttaatcaacactaaaagaaacctttaagtgtggcgggctggcgggccggggagcacgccacgtcggattttgcaaagaaactctcatatttgttcgtaattccgtataggtctctcagtaacgtatttggagaggagaaatcgcggataggaacctatatgtaaaaagtgaaaataata

SEQ ID NO: 30129 - DNA, 1107 bp, Oryza sativa
cttttaattgagccacatgagatttcttgtttttggctcgaaactttcttcttcaattactggtgtgattgcaaacttatcccaccatcttgcataatagtttcgctttaaggttgctgggaactccattctttgaatattgagatcccactttagtatccaaggcatccgtgtttcggcacaaaattgcataagaaaaaaaggatattccttgagatccttttttgattcttgtgtaataactttgatgatttcttgtggtaggattccaggaatggcccctgctttcagccaccatttgctgaaaaaccacagtggtatctcctcacatccttctttgaagcgaataaaccatgaatgcttcatctgggaattttgtatgaggagtactctttctcaggccttctgataatcccaatagttatatcttttatttgcacaggatgtagaatatatattcctggctacataagaatttgatgatttatcccaatcatcgatacttataattttttggatcaataattttgtgaatcccaattcatcaccattccttgtatggaatatctgtgcacttcttgtctcgcataatagtctcataataattttgatctttccgtggatattcagggataaaatattagtgttgtgggaaatactttcccataatcttgataatattgagatcagagtctccaaattctaatggcagaattacttcctctatattgaggatataagatgaattattccaatacttttctcgaactgtaggggttctaggaatgatatttcctagttcattatatttatgcttatttggtgaactttctgtagttctcccttgggctgataagtcccttttaggtgccatagccctgtaaaaattcacgagataagaaatctggtagggagtttaattctcccttgatatgttctatttcaaagtcaaagcatgataatattgcttgccatctggcaaaaatttgtttggagactaagttctccacatccttttggaggacatcttttgctgccttgcaatctatacgcagcaagaatctttgattcaataattctccttggaattttgatatgacctttact

SEQ ID NO: 30130 - DNA, 3014 bp, Oryza sativa
cgactcgaactctggtgatcctgattgcagccgattcagactttagccgatcctcgctctgtttccgtaacgatctccatcctggattctgctttggttttatcttcatctccgatacttgaattatcaaatttggttattaacaataggtccaaggggaattcgagttttctccattttttaatggaaaatcaccacagaacttcaagcaaaatggaaatttcttttttttttgaaaaagaaaagaaaagtagctattcctcaacgcacaatcccaaccttgtaaacatttaattaggagagtaactatacatcgctagatatttttttaaaaaaaatactttcaatagtataattagtgtttaattatattaaaactatcatgtaaccaatatataactcgtatataacttaaaaaaacacgtttgtacttagttggctagcaccttgagcatccactttcaactgttgcaagttttttttcccaccctacatgactcgaagcaacccaacatttagaaatttgaaagttctagaagaccaaaaaattttctaatgtttagtgattccgataaccatcgcaagtcatcaataatactttatgtgattgatcattgatacaaaacaaatccacccgacatggtgtcagaaatgttgtagccataaaattgcttcctcattttttttgcatatggttcgtatcgccgatcagacagatgacataatagcgttgcttaattatacaaatagcacgaatacactaactaaattatttaccctactatagtttatcaactgcagtcctatagaaactttattcattaaatccaacgacctatatcgtccaacccaacgctccaaatcatctcacgttccccctcccctctctcccactttgcctgcacgggtcgcacgccacccccaccatgcgccgtatctcgcatgcgttgcaccaaatcctagctcaagtatgccgcagcccgcaggcgctgccgcgccatgccccccgaccctcttgccggtctcctcagcgccaccgtcgcgctgaccacatccccttctgtaccgcggcaccaccgaagactgtgtcgtggcaggcgtagtgctgggggacctacacccacacccagccatcgatgagctcctggaggtggagggcatctctcttgccagtggcctgacttctccctcctcggctcctcacctacgccgacctcctttcctccgcagcctacctcggagtcacagattgtcaccaccaacaaggtcagttcctatcacccctgctccacttcttgaagagctgttccatttgatgatttttgtggcagcagagcatatatgtgagcctgacagggaagctcgaggacgtcatgtggcagccatgcaggtggccaactcgacgatggcaggcacatcaggcacaactacaagagattttatgataagtgacgtttcatttacgtcacaaacagtgaaatttacgtcatgttatgtaatctgtgacattcgtcacctatcatgcgtctctaatggcgttctatgacgaaatcttattttttgtcattaatctagtgacgattcttctgtcgtgatagagttatgacatccattttcgtcaccatcaagcctaaaaatcgtaatgagattctatgtggcctattaaggtccatatagtgagcaacttgtttatggggtagacctattgtaagtccaattagattttaataaattcagcccaattatactatatccatccatattaagtgggccatacatattcaaaagggccaataggcccaaccattgcaatgaaattgaatctaggccattgtcacgcccagaaattcccgaatagaattccaagcagaatgtgcattagaatccccgtccaggaccggccgaggtacataaacgacaaagtttacatacagatccacgtcttacaaatattataaaagtcttacataaatgcagcggaaaattaaaaggcaattggagctaagcctcgacttggactgcagcgggaacaccactccacaggcatcctcgacggcacggacggagtctactcctcggagaaacaaccatctgacgcatactcaaactctggggtttggggaaaatagagcaagactaagtacaatcaccgtactcagcaagtcataccggaataggggtatgatgcagggaattatcaaaggatagccatagaggttcttttgcataaagcgagcatttataaacagtagttgaaagcagaaaaacagttgtagtaattaatcaatattaaccatccactgtccaacgctacaccacgttgcaacaggcccaaccatccacctagactattcaattccattagctaactaagggtgagactaatcacggtgaatctggttgaccgcccataaccgcgggcacgactatttgaatagttttactctgattagaggtgtacaactgtacccacaagacacagccccacgacacgttttcgtgtaccgacatgccaccacgacataccgaaaagaggccgtgacaggacccttcgcataaccccctctaaccaagcacaccacacctcaggtttcacccccactcctcgcaaggcagcgggcagtcccctctcgtgcctaggtgaatccggaagccgcataggccgtcgcagggcccaccccgctccatcacacccacccttgcctagatgcgtcagctagaggaaagctacactacaagcccagccgttgcccacgctggcttgtggtaagcacgataaattcttccagggtttcccgcgaaccggtccttaattgccatgggtgcgactagcaaaaccatgcacccacagcccaccatgtgattcattttaattaaccaacaccgaagcggtgtcactaatccaacaataccattagaaccaacagtctaaacattaataggattttccccattatgtactagttgaactaagcatggctaagcaatccctagtccaaagtctattcatgtta

SEQ ID NO: 30131 - DNA, 871 bp, Oryza sativa
actatagggcgaattcgagctcggtacccccggctcttttttttttctcgagcaaagctaaaggtgcttggatagtgcataatatctgtggatgtttgtatgattgattcgacagtgcttctgtgtgctgtgggtgcattcatgatagattggtgcttggatgctatgctgccgcagctagttgcttcgccaagcagcaagcgaagtagccgtgcacagacacctgctgcatcaagcagctgagcaggaggtgtattgtctaatggttaattaatcattttcctttgttcggacatgtattgcaatgctggaattttcttacaccaatacctgcagaatagctgctgaagccacttaattacatttagaggcaggagcactagtttacttacatgatatatgtataaaatatgtgcgagcaaacacgaacggtttaaagaggcatctatcttactctcttaggacctgcaatatcacacatgattagttctagatagtcaatgaacttacatagagtagcttaggtttatcagtatctgtgtggctcttatatcttaagattacaatgcaatatattctatctgtggagctcaggttttaaacttgttatcaatccttgtgtatagatatttttcttattgtttggatcaaggctatataatcttagctaagccacagatatatttctctttaatttagctcagtcagatctacctcttgttttttggaacctcacagaaacatctagtttcacaaagtgtataatttgtggatgctgatactggaaatgttctatcaagtggcaaaggtttggtttcaagattttcttcaaacaacaaagatttgtgtgaaatatggttacttacttcag

SEQ ID NO: 30132 - DNA, 2676 bp, Oryza sativa
tgtctagattgcattcttcacaaatcacaactacccaaacccaccattacatgacaccccgtaaaccaagcagcgcaatcgttgtcgagctcttccactttaggatcaatgtcgagctcttccatcttctcccaaaaatcgatacccaaaacttcacatagatttctcatcacttttaatcgttccatggctgcaagcacgaaaacaaagagaatcagcagagcgagtggattaaaacacgaagaagagatccagcaacagatgaacccaacccagaatcgtgacctgctactgcgttgaaaccgccaaaacaccatgaatcaacagaaacacccatttagggaggaaacaccgtgaatcaacccatgaaatcaacaataaccagagagttttaaacacccattcaggaaggaaacaccattaatcaacaataaccagatatatagttttaaacacccattcatgaagaaaacaccatgaatcaacccattcagcgccgaacaccagcaaggagaaagcgagagagaaaattaaacaggagaaaaccaacgaaatctgcgagagagagagagacagagagagagagagagagaggaagctaaccactagttgatcacgccgcctgcctcccgccgcctgcttcctctgatcaaaggagtcacgcacgctgatacagcgagggaagaatcagatacagagaagaacatggggaggaatcgaaccagagaagcaattcaatctttatagagaggagagaagagaacgatgagagagagagagagagagagagagagagagagagagagagctcactctgcgtttcctcgtgggagagaaggggcgcacggtgcccggcttggagaggccgatagatatttataggcgccgctaactggttagccggatcaacttggggagtactcctaaatcttaccgcctggaagcctggaaccacctccatcagaaactcacaaaaagtagagctattcagtaattatgtgcaggtgccactgaaaaacagttaaaaactctggcccaaaaacactattctgtcactacataacaccaaacacaggtgagcacccaggaaaaatcaatttattgtggtgtgatttaagtgaaccatctttcagttagtgatttaagtgaaacacggaatattaaattctaactagagttaaagcacacaatcaagctaattcattcattctaactagttttgaactcttaaatagttagcaataaaagctcctctttctggcacactggcactgacattaccgccaattatactaggttagaatgaagagtacaaagttacctccaccaacattgcaatacattcttggaacctccctttttcacagctcaaaaggtcttctagaaactgaaactaattaactaactagggttagcctaaaagttaccagaaattatagggcagcattgcaaacggcaagactgttatttaagcaatactttcctatgcagtgagaggttctcctatataaagtcttaagagcccaacaggaaaagcaataatcatgatcattaatggagattatgtaaatacagcatactcactgagaatgagcaaaaggatatctatgagataaacacatgctccttttggaacaaatccgattcatcaccataatttatttgtagctatttcaaaattaactcgttctttttcaaattattccctagaaacaagcaagttcgatagaatcaataccatcatatacacagatgcaacaaaaagcataccagacttaatacaaaacttacatcgaccttcgatacttgttgacctgcatgttcagtttttcctaactggacaccaaaaaccaatctattctggaactttcatgtctagggacagttttcaagctgcacattttagagaatctaacaaagcgaatgctaaatctggtgtgcatgacaacacaaactattgcagaatagtggtcatgtattaacatttgagaccttatatttctcatttgttgaccatgacaaagaaattcaagcagaagatatcattcagatttcagaagtactagagtaagatgtaaagaaacaaaaaaggtcggggcaagacaaatagcttggtactatgcatttgcattaaagaccatacatatataccgcatagacatgctgcatcaggcaaattaaaggaggcttaactgacagtttgacatggtcaatgataaatggagttagttaaccaccagtaaagactaagaaatatacattgtgttaacattgagtgaactacaaccagagcaatcaatcagcagcaagaaaataacagcattaagggggaagggggaagaaaaatagatgggaacagtaaattttccgactgcactgtgatttgtgaagggaaagaactgtagcggtggaactgtagaagtggcacccggccagccgcccagccgtcgatgcgacgatgcgcacatcagctagtgtttacagatgtgcttagcaatatgtaactgcttttgtttgcttcatagatagcgtgcttatttttagcatcagtgcttagtatagcgcttaaccacatgtaagcaccgtgtctgtctaacagtaacccaccagtattaacaagggcactttatatttcatcacacacacacaaactacatatatatagtatactttctt

SEQ ID NO: 30133 - DNA, 1232 bp, Oryza sativa
tcccccgcgacgcgcatgccccctgggccccaccatttgtcctgcctccacctaccacgtgtccctaccaaatatgtttcacctagtatactcacaatgtttcactatatataaatctaatgttccagtgaattgaaacattctttgcaacaaatcacccacatatttttgaaaccctctattaagagaattcgtttcattttttgttccaccaaaaatgtttcacctagtgtactcacaatatttcactatgtatagatctaatgttgcattgaacgaaacattattttgcaacaaatcacccacatattttggaaaccctctattaaaggaattcgttttattttttgtttccaccaaaaatgttttacctagtatactcagaatgtttcactatgtatagatctaatgttgcagtgaactgaaacattctttcattatttgctgaaacattgtttttatataaggtgaaacaacgcccgatttaaacgtttgaaacattttcgatctatttagtgaaacaattccaatatacttggtggaacatcgtgcaacatttaaaaataattcaataataggctaaaaaaaaattccgccggaatatatccatttgtggtcttgttttgaagatttaattgcaacgaatttaatggtgcaatcggatcatgatttggataaataatttaagagaaaaattagttttaaatggttttgcacgtatgcgtggcgctgacgtcatgctaacgtcatcgcccgatttttgcacgtatggatcgggcacccgatcggtagtcccctccataagatttatatgtgtaaacttgatgtgtataaactttaggtgtataaaattactaaaactgaaagataaagcggtgccaaaaaaagatacagggtgaggcaggggaccgatcgcctggggcgatcgatcgcgcattagcagtttcatcaatcaatgaatctctaaagttgccctaagcctcagagcctcttttagctcggtagggagaagccctgccgctgctattagagggcgagtgccctatcccccggtcttaggatcctttaccctagccaatacataacagtcggtgcttcccactttgcagttttccgtaaccaaccatactgcacaacatgaagtcatgatgattagttaacaactacgaaaaaaccaacaaccccaagcctcaaaaccacagtacagaaacaattgtcggtgaaagcaaaaa

SEQ ID NO: 30134 - DNA, 2498 bp, Oryza sativa
atgccattgttatcgttattgatgcaatggtttctcaaggcacgccactctagctagcttgaattttagcgttgtttaatagataatctttgcttctggctacacaacatattcttcaaacaattgaaggacgatgtgacccttacatctagaacattggtcagtgctagtgattgggaatggttctgggattatcttggctcacatgtgttctatatgcctccagtcgctcgactgcatcttatcaaagacctctttgtggctatcaaaacattcaaattgacttgggtgaaacctttctccactgtacttctagattttactgaatttggtgattggacaattggccccatgagtaagacagatgggcaggagtccatctattacaaggttttttggcacaaggttaagccggaggatattgatccaaaaaacccaaagtactggcccaattacggtgacctgctaagttttatccgtaatctgattgaacatttggatgaacacaaacacgtatgctctctctctctccctccctctctctctctctctctctatttgacagttgacactgttgtgtttcgacatctgtaggaggagaatattactgatattgttgacgctgagctctttgcatccaacagttaccaagattttctcccacaatttctgcagcgtgtttcttcagcctgtctaatgcagggcaagtaagttctgtttttgtgtgtgtaccagtattcatctgaacttgtttatcaacaagttatatgtaatttttgtaggtttaaatcatcttgggatgccttcaagggttccggtgagactaatttaaatatttttgttctcttttgaacaagctgcattatattgcttctagattattataaataacactaacatgttagtttatgttcttgctacaattgagtaatctcaggtcgatgtgatatttcaggcaacgtcaacctggctgcataggttgtgatgacaaatcgactactaagaactgaggaagtgattgatggaaaaagaaactaaattgctcatgatactttttttggccatagtgagatgaagtgcttttagcaatgaaccttgttacattttttggatgtaggattgatagatctcttgtggcttatgtcagactcaacatgtttagaatgataattgattttcacacttgacagtgacgactatggcttacatgttcagactggcaattgatctggccagatatgtcatggtttatatagaagagttaacatgttcatgttgacaaatgatgcagccattaggcagttgacgatggaggtctcacttggtataacaagagagttggatgattgctgtaggcccaagcttccctgtgtagtatgctcttttggctgttgataagtcgggtactggatcgaaagctgaaaatcccagcatgcaaagaccttgttatgatccttctgaaaagttggtccttcgtactttgtggatattaggaatagttcaagctgataccacctccgtatattatagggcatttttcttttggaaatatgaatatattaatatagtttttttttagagaaaccgagagatttatattaccaaaccagtagaatcactaggtaccagccgttccagaccaggtgggcaggcgggcagcctgcccaggaagacacggtctggagattaaagccatacgcggcaagctcatgcgccaccttatcaatactagatcttggggcgcgcctttgcgcgccgcctgaacgtgcagcgaagcaatcaagcaggaaacagtagtgacgctatgaacgcgggcatagagcattatataaacacttataaacaggtgcatcagcacaacctagcagctagcacacaagtgttcatacaggtattttactggtctaatagtaataagtacatatatatatagatggtgcttgacatttgtaggacagcacaaactacatgataagcacgtaaggtgcagaactaattagcatagtaatagtgctaggggtggaaagcggtccatgtccattgtgatcaccgtgtttactggtaacaaaaggatgcatctaacataaccatgagtattgttatgttgtttagagaacatcgacattagcttgcaggcaagttgttttatagaagtggaagatgcagactgattcgagatatatgtcattgtttggctgcgaagtctgcccatcctttcatcaagttgcagcgaccgtctggtgacgtggaaaatcatgttggttgaaatacctcctgctacttgaactttaatgttgatgggatagctatacttcagtgttggaggtgtctggtacccctgcatttaatagttgattagtaatatatatatttcattatcacatccacccaaaatcccttatatttatctagttgtattgacaatgataaaaaaaaataataattactaccgcatagtaatcaaatatggaaggtaaaatgaaacagattagtaaaga

SEQ ID NO: 30135 - DNA, 739 bp, Oryza sativa
atcgtatgatgcgacagcttgtgtagtttcctttaggaggatcaattttgcaacaagtgaatggcatttattctttcgccacgtatatgcgcatgacatgtggtccctggacctgattgtcatgtactcgggccggggccacaaataagcaaatgcgactcaactatataaagggtacaagagcacattttcttttcgaaaatggcacgatacgtaatgtagaatgatttcctgaaaccaaaggaaggtatttgtgccaacactcaattgccctgagtatttagggcagtcctagtggtggtggagctagaaaatttttcatggttatttatgtagatttggatggatttatatgaaaatttaagagtctaaggatgaatgcgaaaaggctatggagtcagctcacacatggcagcgccaccaatacatatattactaatcaaatgtgctaatttaatatcacatctcttacatcatgttttcgatactccaggtctcatgccaaacataattccatcatttttttctcatttagtatggagccttcgatgtgcatactccatgtagttgggttcccaaacggggaaaaattctccacgcgtgcatcacttctctttgccatggtgctcacttgtcatattgtgttttgtgacacgctgaggtgctgataaaccttcttttgtgacgctgaattatcatacaaaaaaccattcatttcattttacgcgatgcgagagtt

SEQ ID NO: 30136 - DNA, 664 bp, Oryza sativa
aaactgtaggtcctccttgagttgcaaaatcgattattctaatacgtggcaaagccattttttctaataatattctgcccctggtggcctggtgtgaagttgtttttagttgcatcattttagagcatcacgcacaagtggatgattgagaccgatgtgtgctgttggtccagcctttggttgagacaagtcgtccttgcttgtcgccaccctcgtgcttctattgcctattgccaagtcgtgctagtgtgacatctctgtttcaggtcataagacgtttttattttggttaaagtcaaacagttttaagtttgactaagtttataaacaaatatagtaatatttataatactaaattagtttcatcaaatcaataagtgagtaaaaaactttaaaatcctaagttgaaagttttcaaatatgagtaaaaaaactttaaaatcttaagttgacagttttcaaaatttaagtcaaaagtttttgaaatttgagtcgaaagtttttataatttaattaattttatttttacttttcaatttaaataaagttgtaaatatttcaatagaatgttgtcattttttttaaaaaaaaggagttgacactctttttgaaaaaaaaagaaagaaaaatttcattttttaaggaaaatgatcaacgtacacgt

SEQ ID NO: 30137 - DNA, 697 bp, Oryza sativa
cccttactgagaggtttgggaaactgagaagcaataggtaatggggggtgaggcatcccacagcgcaacataaagtggactcttgtgctctgaataagaagtaaatcgctagcacagtcaatggcaagcactgttcctattacatactccctcgcaatctgattgttatgctggagctcattcaggtacgcttgctacatatggtcacagataatatgaggttgatacagaatattaatatcgtctacatctattggctgctcggcattgaacactgggcctagtgcatgtgcacatgtcaacacatgaatatgcaagggatcctgtagtaatggttctatcacgaaaccagggcaatgcacggggactaggcagtccgccaccctctgagcaagctgatcatccgcttctggatcatcaggaataggaaacaaatgattctgccagtctaaaagaagattaggttctggtcggagctccacacaaacgatagagctgacacagttgcggtatacccatctctctaatgcattggagaaattgtctggtggtgccatctattgaaatagtatacagataattaaaccttaatcagacaaaccagagaactatgaacataagcaattcagccatgtggcgcattgaaatttacagttacaagtctgactaggtagaagcaattccagcacagcatatt

SEQ ID NO: 30138 - DNA, 870 bp, Oryza sativa
atcaggaaagaaacaaaaattctccatctgtctttttaagaaatgcaatatattaagacaaaaccttcctctttcctgctcatatatcccattctctgatttgttcctttaattgctgattggaacaactggctttttcctcactttcttttcttactaatccttgttgaagtgtactatgatttccctttttttttctgcacaaaggatagtatttgtagattttgatatgacaacaaataaatgttattggcctcccatgtgattttatctaatatagttcaattcaagatgcatggcttaagtttaaatccatataaatgtttctgtggagggattctacttgtttggatctacatcccctgatttattagatcataagaaaaatcccggcatctttactacgaaatttgaaatgatacatttccttaaaattcttagagtaacaaataagtggccaaacttttcttttcaggagtcccttatggtcattatactgccatgccatccaaagaatgtcacatggcaaaaggtaagagtgatatactgaagtaacttgataggatcatgggattcatgggagaatgtaaccgttggattcatctaagattttaggcataaccacatctttatgtgatggatgtcctggatttatgtcgcactttatgttagtccattacttagccaagtatcaaagcagtaggagtgatttaacatgaccttccaaatgcctgcctttcatttcttttatgacttttagggagatactgcttatttctgatcctatttcaaatcatccttttcttttcccctagtagaataatacgatgatatttcattttatatttgggaatgatagtttaatactat

SEQ ID NO: 30139 - DNA, 1502 bp, Oryza sativa
cttttataatatatgtcaattacttttaagctttactgaatttacttttgtatgtctaagaagtaacttagcgaaatctaaaagtaatttagacatatcataaaagtaatttgtgatttttcatcaaaatataatcatgtgagatcttgttgtaaagatttaattgttacgaacacaacggtgtaatcggatcgtagatcggatgagtagtttaagagaaaattgtatttgaaatataggtggatggtgtctcttatagatggagtggtagacaaaccagctaccactagctgtgtagtcacgtctaatcaaatagataatccgccaaaataatgtagtagtaatcaaatagaccaagatcgtatatctcctattcatggcccgagcttgtgagttgtgactacgggtatgttcactttgatatcattttcaaccatattttttttggcaaagttaccaaaaaaaatatctacgtttagtttgttaccaaatttggtcaatacataagaaatcctgccaaattttggtaatattgtcatcttaccaaaattttggcattgccagaactttgtaaggtttattttggctacaatctgaacgggctctacatgtccatacacctgaacaaattttcaccatgctaggatctttgtgggctaaaatagtctagggtggtctgggccgtaggccttagcccaagctctaatctatccgcatctatctctctcctatattgtccatgctaaatttggagattttacttgcaagatcgtatatgtaacttacgatgttgaaaacaattgtgatgatcggtcatcacaaacaatttatatgacgacaagtctataagacattgttgatggtttagaaatggttccacgtacaaaggctaacatgtaaagagacacacattagtgtgtaaatctgacttttcaacaaatatgtgcacttgttcattgttcaaaatatattccatgtacccacagaaagttcacatttacccccaacagtcactgatgcaatcctagccgttgatctccgatcctgtggtgctgcgagcacagcacagtagaactgtggaacgaacgaacacgaacgatgccgagaatcaccgagtcctcttcctcctccaatacctcttcttccccttcgtggcttcgtattttccctcttgttcttctcttccctccgccaattccaggcagttctagcaaaaaggtgcctcggatgaatcgggggctccagtagggagaggagatgatcactcgagcgaagctggtggagcagctgagagagcaccatatccggtcggcgcagtcctactccgccgccctccccgtcttctcccccagccctcacatgatctccaggtaaaggtccctcatcttcttgttcctgctaagatctgatgcgacgctgctacaaacatgatgcggttagggcttttacttggattgccctgattttggtggtctccctctattcactgtaatgatcaaaat

SEQ ID NO: 30140 - DNA, 3631 bp, Oryza sativa
ggggggtcttgagaccccactaccgccccagggtccatggagacccccctaagcccccactaaaatttttcacgagatgtggtggctggagcttcgtcaggttggctggagggaaggctggaggttgaagacgatgttatttcgtgatttgggcttgtttcgaagagcagcccacgaccacgagcgcagtcttcaagttttgtctagcccactccaagcaaaggcccacggtggcagattccagtcggcccatttggctactccccctcccggcctcccgcctccccaattccccaatcccactggccacctcctcctctcctaaatccctaaccctaggcgaataggcgcaggcggcgggcggcggccgagcaggcggtggcgtccggcgaggggccagacgggaggcgtgccaggcggtgccccggtggtccagtgcatgcccggagcaggtggcgacctccggtgagctgcaagctggcgagcgccgagcggcaaggtgccgtggcggcgtccagtgagccggcgatgggccagacaggaggcaggccaggcggaggcggtggtccagcactccagcgcctgcgccgccacgccgccgggaaggtggcaagccgctcgctggcgaggtgccgcgagggcgcaaggcgccgaggcaggcaggcagcaggtcagcggcacagtggccggcaaggcagcaacgagtcaacgacgcagtcgcagcctactgtgactgtgattgaagatttgaagttagaaatcggtaaactagtaacctctaatactaatagatagtctaaaattgtgtcttaatgaggttgtgcacttgtgcttgaaacttataattattttctatacatttttagattgtcaacatgtcaaaaagaacattgctcacgtattattttagtttaagcaacacaaatggcagtgatcctccatccagtaaagtgatcctccatccagtaatgagtgtttaagttagccaaagaaacccaagtcagggttttttcaatcggatgaaaaaatcatccaacaatttgaagatatgaaagcgcgtcagatgttagtacctcaacagaaattagtggtatgctctatgcctccattcctccctaaatctctaaattatttgaatccaaaataagtatgtttcgattattcgttaatttgcctttttctttgtataaattactactcatgaagaataatagacgattgggtgtgacacgtcatctattcgatattagtttggtatggacaaaattctcgacatatcattaattcaatgtgtaccttgaactgacatttagccaatttacatgtgagacatgtttcgatttatgctggcgtaatttgttcagcccccactactatttttttctggatccgcccctgtggaaaggtgaagtgcaaccgctgcagaagtcttaaactttaaggctattatcaggtcatcagatttgcatatctgccgtttggtttttttgtaccttgttagcaattatataatacgatcagaacgcaatgtgccaacatgtacaaggtcaagatgttattgctagttgtaagcccaagttgatgcaagcatgacttctacaactcgaccagctattatctgcaagttgattaagttatccttgggctaaaataaattggctaatcataacattggcatgtgattagcttaggtaactaatcagatccaagttgagtaatttgttgttgctgcaaattagctagttgtgtgctagctagcattatatatcatgctggcagcactaccaagttttctaggttccgtttgtaattattaatcaagttggccaatgttagtttataaatttagtcaaccgattaattggtgattagcccatgtggttttggaagattcaagtcactgaatctaggcaaaagaaaaaaaaacatctgaatttcaaacacgttcagtcccccgggcagcaatgttcaccatcagagaggtacaggacccatcaaatcagactcttctgctttctttcggaagtggttagatgagttaagaccatgatgatgatgtaattctgaaaagctagatcacaagctaaaatataccaatccttcttttgttctgctctagtaattaagacttttaggttctctgatttaagtcattagaggtttagatttattagtgtgaagggaaatttcttaaaactacatcttgtaattcattaaaactaatagtgtacatttcataacactgtgtaaaaaaaaagatttgaagggagagacgtcctcctaacactcttttatgaagaaactatgagtatgtttggaattgaacacgggaccctcctaacactcctttatgaagaaattatgagtatatttgggattaaacacgggaccttggggttgaaaccacaccccatatcactgcactatcaagtgtatctctcgtaacattgtgtgttgtcgatagttttacccaaaaaaaactgcaattttgttcacttgatgaatctaagcctacctgtcaggcatgcatttggaactcacacagcccaaatagagcccacctgtagacacatattttttttatataatagatttttattaatccggtttctacatccaccaaagatatacaaaaccgaaaggatacaagaacatttacactcacacctcaataaagagaagagcacacaaccaaaaaagaaaaaaaaaactaacgacctaggcacgcccttgcctttttgcttcctgacatactctcttgaaatgactagatttgatgagtggaagtcgtctagtcgccgccgccccaagtgcgacgtcgctacaaacctccattggtgccatcttcatccgtttcaggtgagctaacgctgcgcgctgccagttagcccactttcgtccgtcgtaattcgttgtttagtcagatttagccaaccggacataagtcgacgggatcggtttccacttcgccggattactaggcctccgccgctcataaggccgccgtcgtcgtcgggggatgctcttctaccttccgaactcccagctcaccgctgtccctagggctgccgccaccgacaaggtcgacctccgtctgctcctcgccgaaagacttccgccggtgctcagatcgatgctatcctaggccgccgctgcccctagggctgccaccggggtcgacctccgcctgctcctcgccgagacatagtgggttaaagttataaattattaataaaatcgttttgatatggttgtagcaaatgcctaactaaaattgcagcaaagtcgtaataggtttaaccaaataatgaagaggacgttaaatatgttgtaatcgttttccttatttaataatatcgaaccatgtttcgttatacatttcaactgcatgttcgtttaccaggtgctatatattacgaaacaggctaatactacctccgttttttaatagatgacgctgttgactttttctcacatgtttgactattcgtcttattcaaaaaatttatggtaaatatataagatataaatcacacttaaagtatcatgagtgataaaacagctcataacaaaataaattataattacgtaaattttttgaataagacgaatggtcaaacatgtgagaaaa

SEQ ID NO: 30141 - DNA, 1173 bp, Oryza sativa
ctctctggcgccgtccccctgccgacgtggcggggcgatgctgaggtggctagggggagtgcgccagagtggctgccccctcccccgaatttttttatttttgttttatttgtttgatatttttttcacgcttagagacacacaagaaccaaccatagaaaaattgaactcaaatggacgtaatatgtgacctgtaaaatttttcctctcctctcctctcctctcctctctctccgaactagtgcagaggagagatgtgcaacttttttatttttattttatttttttgatatttttttcacacttaggaactcacagaaaccaaccatgtaaaaaataaactcaaacggacgaaatatgtggcatgtggaattttccaaagctccaccgaaaaacttctctcctcgaaaacacaatcttgcaagcggaatttggaggttttaatatcgccgaacccggcgaagcgaggagaatcggatgtaactttttctgtagatgtccgtgcatatattatttgcctgattccgagtccgtaagataaagttacgcctgttttaatagatgacatattttgtccgtttcgatagagttttggaaaattctacatgtcacatattttgtccgtttgagtttattttttatacggttagtttctatgttctcctaagtgtgaaaaaaatatcaaaaaatgaaataaaaataaaaaaaaatgcatctctatatactgtttaacttatatatgtcatttcatgtggttatattttgaattagattaagtaatttcatatagtggtagagtgcattatgtttaacatgctgatcaaagggttttacttaaggagttatggtctaattttagtgaaggtgcaaagtaaactaagtggtatgctagctattttcagatttagctaagtgatagttcgagtttaaattttttttgtggttggttgtatcgtgatcctgagtgtgaaaaaacatccgacaaaataaaataaaaatgacaccgttgcaactccatacagaaaaataggaatggaggcggcggcgccagccatgctggcgccctcctcctgccacgtcggttcgcgtgcgccacggtggcaggaggacagcgccagagaggctggcgccgccgccttcgttcctatttctctgtatggtgttgcttcggtg

SEQ ID NO: 30142 - DNA, 15061 bp, Oryza sativa
caaccggaattaaagtggtgatctttgatcatttgatttttagtcccggttgggaacaccaaccggaactaaagtggtgatctttagttccggtggactaaagatcctcggcccctgacattaatttgacaggggatgaaccgggactaaagatgatttttagtcccggttgataacaaccgggactaaagatcatagaatggctctgaggttttcaaccgggactaaagatcatttttagtcccggttctttttggaaccgggattattgtggttttgggtcgacccagcaaagatcatttctccaccagtggacgtgggacaaatcaatccctagctccttcactaaaaagtggccagctgaattaattcagctaacaaaaatcacaaagattggcaattaattctagatgtactatgccattcaatacggagcaaaagactcttagctagtactaccaattttatagtttagcctgctcccgtgaagcaagctatcaaacataaagataaccttgtattcccaccgtactataaaaaaaccaacctagtaccgatgtgacacatacaagtactacgaattcagacatacctctgtctagattcattgtactagaatatgtcacatctagtactagattcctttttttttgggacggaggaagtataggataagacaattttttatatttttaaaaactttatcattttgataataccaaattgaccagactaatacactaactctaaatattttttttattagcactctccttcaccaattttctcaaaaatatttttatattttcgataataaaaatattatttttggttttttatcaaccaggttgtgcaaccgtacaatcatttatatatatgtacaataatctacatactcatggtacatatcaacggctaagtacatgtttgattacatatatacatcacaaaacctagctaattaattaggtttcactatatgcaacatccaaaacattattcatatttacccaagaaaatagtacagctatatgaatcacaaaaggtagtatttctttctttttacaggagggagcactacattaatcaaatgatgaagggattgatatcctgccattattgacgactcagctgtctacttctcagatggcaaacagcagaggcattgagcagtagctggacgacgaaaattaacaaaaagttagtacttgcccactatcagcagcagcaacccccacaaaattttggccattcaccctttgcagttttgcactacgccattcccctaccgatcatccccatccgtggccctacccggcctgcctcctcctatatcgcttcagcagttcaccctttcctctcagcacaatgctagctttgtcatgatatacacattttcacccccttttgttctacatactgcaatttagcgagagtgcttctccggccgtggcactgcagttgcacaattggctgcatttactttgcaataggtaccctcaagaaaactttttgttgcatcatttttaggtaggtaggtatgctagatgcgccagcccccaataggcaataacacagaagtacatcctctgtgcaagaagaaaattctagtagtaattctcttagtcaatcgataggagcagagtatagaatataccatgtcatactatctttttttcatctaaactatactaccttcgtctcaaaaggaatctaccaatctaaataacactatatccagctttgtaaccaggagttgatttattttaagacgaagggtataggctatagtgctgaagattgatttttgaacacaagagttcaatataatcttataagatgtttatagtatacactgaattttccagcataattttctgcagtgatagacattattaaatatataattgaatttgatacacaaccttgcttctatttttataaatactaccgtagttcgtacataattaaaaaatatacctctttgtaatctgggcccatcacaaactcatgatagaacggtgcaactttgtttattataatctttaatttaattttataaagtctttaaaactagactttgagacttaatttctcatctttatctttatctttacttacttaaaaaaataaaatatgcttccaacaaaagaaattagtttgtccgtaaaatatttccatatgtcatgagtacgtgtccgatccgatccgatcccgcgctccctccccctcccgtggccttctcccttgcgccttccctcccagtgcccctttcctcccctacctcctctctagcagccctctccttccaacgccactcttatccctgactctcctcccttctccccggtgcatcctcgtgaagcacgtcggcttcaccgttagggaagacgatgaatagtgttagttgatttttctccgtctttcgttcctcctgcgcattaagaaaaatggaacccactcattggggaatgcgttttgacacaatcacctgaccgttttcaccatcagaacatgttgttgtttgtctctcagtcagagccatgtcattgccatccgtgctcggtgctcttgttgttctagttttctttgttgccaaacgcagcatgttcaaggaaaatggacccccctcatcagggaacgggttttgacacactcaccggtccgtgttcaccaccagagctcgtcgttaccatttctctgccgagaccacgtcgttgtcgtccgcgttcctgttgttttggttttcatcattgccaaccgtagcgtgttcaagtaaaacggaaccccctcatccgggaacgtgtttggacgcactcacccggtcgtgttcaccactagagctagcttttgccgtttctctctctattgggtccacatcgttgttggccacattttcgttgttctggttttcttcgttgccaaccgtcgtcatctatggatgagtcacatcatatggcacatctagccaccagccttgtcgtcgtttggtgaattgaaaaattttaatatatgttgaagaaatgggtacccgtccagaactaatggatctaattttatttatgggctaaaataagttttcttttttttaaaaaatatctagctaattttcaattgttttttcatttacactattagttttactatttgatccactaaaaaattgttgaaacttacaattttccttcatattgaattatttatagctaaatgaaaaaatgaggactttagcactatattgaattatccttccggccaaagttatttatagtttcatgcttatttctatgattatatttccttcgtcatttatgtcccgttgtaacatatggtttaagattttaatgtatatcgtcggtgaatgttatttagaacccgttgcaaggcacgtgcattacgctagttgaatagttgaaatataattcggatagctacgaaaccaatattgcagggcttatatcgatcggccagccggtcggtcgatacgtggtgtagttacgtgcatgatccaacgctcgatcgatctctcgtgatcgagactacgctgcttgctgatcgatcaatgtcgaaccagtcgatgagaaatcaagaaaatccccaaactagcacacgacgtatcggacctgtaaaattgatttggaccgaaccgaaattgattggcaaatcggctcggatccatgcgcggagagccagttttactgacgtgttatcttcggcaaattaaagcagaaacctagctaataaagtaagtgtagtacttgactaaccggctgttacttgttgcccctgcacgtttagcttaatgtcgacattgtcttgtacacttgctcttgtgtgatcagattgattcgtgatatgctgataagtagaattaaacgtgtgtacatgcttcgctgcagggtaaggattacagaaccggcaaaagacgtgttctagcgtaaatgtgcaatcgatgatcaggagttctcgaagcagagagaggtgttttttttttccttcgagaggaagtcccctcaatgcaaattgcttatcaatttgtcgcaagatgtgagctaggaggatgcacaacagagatatttggttgacaggtagttttaccattctagaaaatatactaagaggtaccaggtatcatattttaatttgtagtgtaaaacttgtgtctttagctactaggtatcttgaggcatcagcaatgtaaaattttgatatctacatgtacttttttcagtaccgtaaaatttctatttgttgacaagttaggctagctccggtaacaatttgacgctctatgatttaaacctggcattcacacgtacaaatcggtctacttcaataaagaaaagttgtgagatttattaaatttatccatgcttcgtttgttaagatcgagtacatactagctagggttaacaaaaccgataaaaactggttggttttcatgaaagctggactatttggacaagctcaagaatacaaattgccaggctttttggtcaagttctaaagaaactagattttaaattttttataacatttgacaatattttattgggagtaaatggttttcaagtggtttccacgaaaactgagaaaactgttgacatctggattttggcacggaatggtttagtcaatgttatattgccatgttgcccatatgttagacaacttgggccaagcatgtgggaaaaatattagaaaaaaaatttaactatattttctaaaaataatcatattaattataacggtttggtggtacactttgaaaaaccctggtcccaatggacttttctgggaggatagcagctagaatttaaggtttgtgttatttctcctttgtttcttccatggacgttcacttctatgtaagagttggtttatgtattgctctataatattcgtcgatgcgatggctcccacttttacggtgtgtaacctattactccagtatttttttatttgacgtgagatacttttagggtttcgtgaaaataaaatcttagtaattccctgatattaaggaagcgcgtgcaagcaatcgagtgtgagctgatctttcatgtaatagaaaaaaaatggttactcttatgtttgatactatgcccccatatttttttccctcaagataaagcattattaacaagttgttgtgaactgacttgtcatcacatcacaagctagcttgatctttttagcaggataacgagataaagaaaaactcaatagaaaaatctctctctttcactactcgaggggaaaaagatagaggcgcatcatggagtaaaagcttttgttatcgaacggatggcttgagatgaactgaaggtcaaatgatatactaaaggtatgtacgtcacatgcatggatcgtatataaaaactatacatactgtagtggttagactaccgttcattgtcgcatgagccatcacaggctacaaagctaatatactagtgttagactgcgtagatagatatagctgggttattatcataatcacggccaaaccttgtgattaagatgttaaaacggtcctttacgtttccaccactttacgtgttaggccaaaacgaaattaaagcttgggaaaacacatacggaacaagaaggtaaattttgaaccgtagacctaagtaagtatcagatgcaaagagtacatctagaagccatgaaataaaaatctaatgaaaatgattttcatttgaaaaagctctaaatgcttatctggccggccaggggatgcatgcgtaccctttaatttattcctttttgcatgccctttcattttcaagcatgtaccgaggaattccgccacaaaaataaaataaaatagggaatatgtcttgacctcccaccatgcaaatttgcaaaagctttctgtctgagaaaaggaagcaaatgaagagcatatagtatctttttgtcaggccatcacttttcctctcaagttgacacaatgtgcaccatccaaatgcaaaggaggaagaaaaaaaatatatattctcctgatatatatttccctcctgccaacttgtttatgccgttggaattatgcctgcgccagagattctcccatcacaaaaacaaggagcatccgctgcctgaaacatctctctccatctctctttaaatttttttaaaaaataattttcaatccagatgctatacctgagaatgaattgcaggtgtgccagaatttacaaaatggattgaccaaaagcctaattaattgtactacgtcgacatgtctcctcctcgccgtcacctcgatcggcccgtcaatctgttctctcaatccagaaagaataatatatataggagcagcacccgaattctgatcatgcaagaattcaccatcagcaagttggtgctaatcaagaataaaatgttcggtatacggcaagttgaaatcgatcactgatcacgacgatgacgacgagacaaagggaaaaaaggaaaatggagaagaagaattaagcatgctactactgccacagcagactggctagtaattactactccctccgtttcaaaaatatttgacagcgttgactttttagtgcgtatttgactattcgtcttatttaaaaagtttaagtaattatttattcttttcatatcatttgattcattgttaaatatactttcatgtacacgtatagttttacatatttcacaaatttttttgaataagacgaacggtcaaatatgtgctaaaagtcaatggtgtcaaatattttgaaacggaggagtaatttataactgctgaattcactgaatctctcgcaggctcttagttcacgtaacagtagctagatagctctccacttttgcatggatccgattccgtgcacaaggtaattaagagcttatcgtaatgtagaatttacacttgctgaaacatatgcacaaactaaagctgtcgtgcatctgaagccatcaagagaatgttacggtagtaataaagttgagatagtgagtttggcgtcagatgcacattctcattgaaaagtaaatagtcgttcggttgactcgttgtaaatgtgttatatatatatatatatatatatatatatatatatatatatatatagagagagagagagagagagagagagagagagaggggggggtatatatgtgtgtgatctctcatctctgtgtgtgtagcatcaagactcaagagactaggtagatgtagcctagaaaaaagacgatcgtacgtgcagaaaagcatgagactgacaagtcaagcttgggaggataaaccagagagataaggcaaaactaaccatacagaaatatactcctttaattaatttgtagtttggcattaagttttatcttatagcaccgactttatggatgtggaataatggaaatatataggacgtacggggcactagctagcagcagcagctggatcttatactaagtaccattaatattgcatatataatgtatttgcacttaatggcatcgttagttagggtggcatgtgcatgcaccactagtggtagtactgccatccaattcagcaggctatcccccactatacatatggttgctgtatagagcgaatacaatagcacgttataagtcagctatatatatatgcacatgtggagaagataaaagaagagagaataacagagggctatagatttgtagttagctgtagcatggactccaaaacattgcgtgtttataagaggtaggatcatatattaattatgtagtatatatttataagtaactattgtatggatgaactattaaaatagctatatagtatttgaagctaatagttggctatactagtattaaacttgctcttagcttagcatgaaggactaattaatgagtagttatggacgtagtttaattaacgcacaactgccattatctctataatgatgatggattgtacttttcgtgtcatgttgacagttggatttttgtcaaagctggttctaaggttaagtagagcaaggggcttaacaaagactgggaatttacaaaaggtaaattgcaaggggcactatcaaatagaacacactttgggctccatttcgcattattgcagttgatttttttttcattattgcagcggatacgataatatatattaatccatttaaaatattagcatattcaaaaatctatatgataatattaacattttttatctaatttctcatctcaatcaatcatagtcatattcaatttctccacctaatcactcatcttgacccatcacaatattttttttaactcaaccttaacttctgctaaaactcttgaatgcttctacacattaatttcctttcatatttcaacgcacatggtaagtgtgtcaggaatacatttcttcagcagataaattaccggcccaagcacgtttgtacgtacggtttacattgtgctaaatattgtgcgtacatatattcaaatagaatcaatataaaaaagtaattgagttttttagatatatcaaacaaaaatatataatggaataagttccgctcttctacattataagatgcacacatttataattaacataaaattgagtaattaattgaatggcacaagaataatgtgtttagagcatatattgtactgtttgaaatcaatttaacacaaaacaaaaggttagcaaaattattggaaaaaaagttatctttccatctcataaaggcgttatgccattagaaacaccccaccagtacaaataatttatgttaggggtgctttagacattattaacaattatttagcttaatttaataattaataggatcaaattaccgaccaaactgttagtatagttttcaatatctcttacattagcttccacgcttttaaaagaaaaggaattaactagctcagctcagcacagtacatgagactagggagcatgtggccaaaaggataaacaggacaatcgaacacaaatattattaaaaaagtatcgtcatcatcgccatgataaaacatatattgatcaccacaaccctgcatgttattgcaatacacgcgcatgaactttttactaagacagccactaaactagtttggagataatgccatggacgataggtgtggtgccacgtgtcacactgcaccaaccataaaagtgcagcggattaaaaaagttactagcatcatgtagtcagatgcaaccatgggccgctattggtggaagaatggcaaatggtgagtactagtgcttgtcgggacaaagggagatggagaatgcaactgtaaaatagtactggacaaatagtccatgatatgaaaaaacaattagtggagaaattaggagtaagagcctaattaaccaaacaaacgtcggtccatttgtacggcggcaagccaagagctagctggctatatacaagcatagcaagagtgtgttgctaccactccactagtagtagtgtgctaggagtacttatcatctcttcatcttttatgtaccaaatgtcatgtcaagagccctaggtaggctactgattgatccttatcttcacccaccccatcaaactcttcccacaaaaagagagataatgatccttatatatagggtcaatgtagtttccaaacaaaatttttcatactgtcacgttaaatgtttagacacatgtatggagtattaaatgtaaaaaaaaaccaattacacagttcgctaggaaattacgagacgaatattttaagcctaattacgctatgatttaacaatgtggtgctatagtaaatatttgctaatgatggactaattaggcttaataaattcatctcacagtttcctggtggaatctataatttgttttgttattagattacgtttaatacttcaagtgtgtttccgtatatccgatgtgacatgcagaagcaaatttttttgccaactaaacatgcccatagtctatactagtattaattaattacaacaaatgacatgatcaatattgtcatattgaggattcaaaggaattatgctttgcttcccatcaataagggtgacctatacataggttttagggtttgaagcaccatgcattgcgttacatgtgttcatgagcataccgacaaagtaacagtggttagaaggcggccttcacaagtattctttacacttgtgagctcttatcataaaccggccacttcatgtctccacgaggctaggagaaccttagagcttatgacaagtcaatgcaactttgtatatatacacaccaaccaagccaattatgtaaagccttgaggccagtgggctccatttgtctataggcttcacagcccacgtttgtatccatatgtagatgtgttggaaatccaagcatttctgagcaaggttagctaggctccaatactttgcttggaaaatcaagtgtgttttttgcactgctcgatgcatgcacgtacgtcctcttgaaagggaaattctctgtgaatgtttgctgatcactcgatctctatcatgcatgcgtgcgtggacagtgaacatgtactaaaagttgtctgaaaatttggcatagaatatctaggccatgtgtcaagtccaaaagcaaaagggcctagccacatctctggctcctagatacttggatactcgtgcaacacactcagttgacacgttgtttatatgtatggcccccacatggtcgagatctacacacttatcatttgcaaaagctggccaaaactttctccgatagttagttggatatgcaagcatatgggtacaatccacacattacggacgatattcacatcagcatactgcctcattacgctactaataattacctttcattgacccaataacgcatatccaactcccaagtaattttatatgggcaaagcatctacccaaccacccactacatacacgacgcacaagtgtcaatcttggtcgtaagatctccaatgcattgacaaaaccgatcaaattctccctttctcccgtcagtgtgtggcgctatcgacgaacgatcgatcgatctgcaccgaaatgaaaacggtggcgaaaagaaaaacatatccgtttcttgatgaagcaaagctagggtttagaaagatgtaaaggacggccggacattgctcctttttcaagctccttttgatctctgctgctgcaagctacaaatagcatgagatcatagcacatcgatcgctttggagtttgaacactgaaagtcgcagcaggccaaaagatggccggcttggagcagaccgaccaacagtaatgtgattgggataagttaagctgatcgtttagggcatcgatgcgccatccatatgactttcttttttaccatttttggcaacgtgtgtgcaggctgcaggggcgtcgtcgttggtgagctaattaaggtctttgggctgtatctgaagattctgaacgtccatgctttgtttaacatgtgtgcaacccctgctttcggtttggtttgtcctaattggtggctgtctttgtttcagagaaataaaaaggaaaggaactaaaggaagaagaggatgcttagtatgaagcaattaagcagatgctctgttacaagcttacgtggttggtttaggaaatcacacaccaaaaatagaataacatcagacatatagaatttagctttcatatattcagctatatatatatatgcatgttgattttgatagaaaaatgttgtgcccttgattttacataatattaatagcatataagtatataaccaactagttagtacataagcttgagcattgataagaaaaagtaaacaattcaccgatatacttcaacattccactttgaaccaattttatacgtactccaccctgaacaattctcctccaattagattaaagtactaatgctcgtttcaggatttatacgactgcaacttggttttttttagaacagagaggcactgtctcgcttggtttcgatatctttttcatctttggaaaaggtgcttaaagggcttgtagggcttgatcttctactaatccatcattgcttccgtaatagtaatatgatatacatagttctctctttgttgtcgtgtggccggaagggagggaaagactggctagggacagtacagtcggtctcaccatgatgttcatgcacttgctggtggttcaagttcccaaaccatcagccaaaagctaggaattgaacagtttaattagaagtttgcaagcttaagctcacgtactcctgcatatcttaaagtcgatttgagttgttaagcatgttctaaatcatgcctttctgatcgatgcatgtaaagcttgatgtgtgtcaaccaagaatcaatcttttttgctaaccataaattaatattatcatttctgtttacagatggggatcaaagttggctccgagtcagatccacccgggatctgtctgtacctcaacattttggttcgggacctaattcagagttcgttcagtgtcataggcctggtttctgaaggaattcaccgaggatcgcactttgacagtagcttccatggcacgagaaagaatttcgattagctttgctttgcatatgaatcaatgcctcccatggtggctggcattgtgtggaactaacaaaaaacgtggatggacaattactttcacctagccatcacagatgtcagattcattgcaagacgtatatttcaaggatgagcatatatgtagtaggtcaaagaaaacaacaccaccacagtactgcaactccagagctctgaagctctcgatactgctacgaggaaacagacatacagagcttcctgtatttgactacctggagaaaagaaaaaacagacacacagcgcacattccatcgagaccaatggaataattaaccagtttcgcgcaatgcgctcgcgccactttgggctctttttttggcaagaagttggtcaaaatcaaacacggaaaggcgagagaagagggggggaatgaaggaatggaatggtggtcgccgaagcgaccgaatccacacaagccatagaccatgcatgtgcatgcgccgcaatggggaaaaagaatctcctctccttgcagcttaccggcatgcatgcaagtgagtagcaagcaatagtggccatttcaaactagtgcttggactagcccactcacactaactcccgggccgagatcgatcaggacggcgggcgcagtggggatcgaagaagaagggcaatgcaaaggcgggaccggcctttttctctgaattatgatgtggatcgatggatcaaccacgcagcggctgaccgtccgtccagccgtccggcctcctccgggctctgggtgcgagcccgtcggcgtcagccagccgacagtggcgcaattcggaccgtctcgatcgggaaacatcaaacatgtctccgaaagcaactgctacagatacaatttgtgacacaaaggtagtagacgtatgaagactatagatccttttcttatgcagcatatgccacacattgttgaaaatagtggtgtcgaacaagaggtgtccgtagcgtgccgctactggccatgcaagagaagtgtgccttgctggcgtaatggtgcctgtcaatctgcgagatgatgaatgcaaagcatgcgacggccggtcaaagtttcatgctttcagctagagctcaccgtgtcagtcaaactgaagattaagtagcacatattcgaaagtacagctcacctccaccgcgcgtgcagcaaaaccagctgacgcgtacgtacgtagcacctgaaaatccgctagctacgcacgagcgcgcgagacggatcggacaacgaaacggaataatcttgtgagatctcggaccatatgtacacatacagcgatagcgatccagacggcgagacgctggaccgtgcacgtcgcgcgcgcgcggcaataatccgggcgagaaacgcattgaccggcgcaccgaggcacgcgcgagcgcgacaggctcgatcggtctcgcgcgcggaacgccgcgatgacccgatcgtcgcgcgcggcatgcaggcgctacgtacgtatgtctcggcgtcgcctgcggcccacgcaaacgtgtggaatctgggcgattggaacgaacgagcccgacacgagtctccgcgatcccgcgaattcaagctagtggtggtacgtgactacgtgcgtgacgacgtacggtgccgcatgtggtgtgtgaacccgcagccggcgccaccctactactaacccactcgcgagcgcggggcggccgagtggtgtggtggtgctacgcataatatgcaccaacgttggcgcgcgccgtgttaggctccaactcgacgtgcggtcgtctcggttttcgccgggtcgtcctttgcaacacgcgagtacgcgacggcggcattacatctgctccgcatcaccgatgacactcttcgccggcccggtgaaatcactggtgacgatcgacgaatgtgttcgttgtctacatgggaaaatgggcctgacgatgatgcattagtttacataggaggcccagcatcagtcacgatacatataagcccaatacgatccaagaaataagttggttgaggggagcccattgctgggatggcccacggcgaggcagagcaacggaggaggatagtttttttctttcggccgtttcataatacgattttctggagacaaaatggatcaattagaacggtccatagaagagccgtagtatctcgcagagttaatatggaagtttagcacggaaaaggtcacagattacttgaagttgagcacagattggtcattgtagaaagcatcctaagaaccttccaaatttcatcacaacaaattggaaaggcaggggcggatttgccatgggggcgggggggggggggggccccccccccccccccccccccccgccccccacccccccccccccccccccccccccccccccccccccccccccccccccaccccccccccccccccccccccccccccccccccccccccccccccccccccccccccccccccccccccccccccccccccccccccccccccacccgccccccccctccccccccccc

SEQ ID NO: 30143 - DNA, 16044 bp, Oryza sativa
cccctcggggggactaagaggagggcgaacgcatcaccctcgggcccgacgtccctcgggggtaccaggccacgtgtgcgattgtgtctgcctcaaacctctagtcatgatactcctgatcccatgtcaccgacagcacccacttgtcaagttgttgtacttggacgttcaattctcaaattcttatactatattgcacccacatgtcaagctgttgtaccgtgggtgcaatttactcaaaatccaaaaatacactcctctttttctttcatcgctagctaataatattagtagtataatattacaagtagtgaggatagaagcatctctctatgtattaagccagaaaagaaattttaatttctagtttaagatcaaccccatactccagcaagcttggattaggggtgacttactccgcaccaatacgagtgtacttcactaggtccacgtgttgaaatgggccaaaatggttcgttaaaaaaaatgggggccaaaatgtccgtctaaaatataaagttctcccaaactataaaccgtggacttagacggttaccattttcttaaaaaaaagggggtaaaaatatacacatgtctcagcagtatatcctcatgtgtagcctccactaactaggacaatatggagctgaagagtgcatcagttattgattatagttaaattgtttgtcaaactccgtagcacatatccatattccattgaatagatctgataaaatattatgttttgttgactctgtactcacccatcataagatgtcgtacaaaaggcacgctacattctacttgacgggacaacgctagtgcagtttattttttataacgttgacaaaaataaacgaaacaaaaaaattggttgagctgaagttgataagacgtagagaaataaacggcacaacacaaaaaagtctggtaactttttgtcggagtggaaaatattatataaaatatctcatatagatatattttctagacgaaaataccactgccatgtcatataaatagatcacgaatagaaatactcctaaacgggggatgaccaagacttcttggattcgtatccaacttgccttcagagttctatatggacaatgttgatggtataaatataggtatcctaagaggggagaaagatacaatgcactctatcgcaagctaataaaagcccatcgagtcgacatctatagaagtcaataacacttagctgccggctttatgctgacaaaattataggctagagtagggtcaccaacctatactttacactcttgttattgataaatagtggaacacaaatctcccgccaaatagaatgtatagtcattatctatctcgggaggtcagaatatgtataaaaaatcactatctctcttattctcgttctatctttatggcacccttacacttatcttaccccataacaatgatatactaatgaaattgttcatcagattattgttatgaggtaacaatgatatactaacttaaaacaatgataaaaaaacaagttatctaacaatgatatactaatgaaattgttcatcagattattaccacaaattatctaattgattatatgataacttgaatatttttttttaaaaagaaagtaacatatactaacttaaaacaagttgtctaagcaatgcagtagaaaaaaatatttaagaaaaaatatattttattttaaagcgcagagaagataatctgttctaataatcgagtaaataatctgaaaaggggtcttaggttccatttgatttatattattaaaaagattactggggcagaatattgattcgattatagaaataaaatattttacgaaataaacttaataaatatcttaagttctaagcaatgaagtagatattttttagaaaataacccgtctcaataatacgatgattaagctcaaaagtgccggatgaggaaatcctgacacgtaggcaacaaatgctattttattttattttatttttctaaacaaaggtcaaaatggcaacaacctcagcttctagaaaccgcggcgacgtactcccccgagttacaacccgtgtgccctgcgaaaacgataacatatgatggtccgcgatgtcatttcctttttacagtcagccggggagcgaaaacggaacacgtccaggaattatcgccactggccgcggccggggcacccaccgaagattagcttgacgcactagaaacaaacgatgcgaaagcggccgggcttgatgtggtggtggtgtgggtgagagaaggcgagtgacgtcgtccggctcccgggccgcgcggggaggggagaagagaggagaggagacgggagatgcgaccaagcacccgtgcgggtgcgtccccccactcgcggcgcgacacgtgtaaagccagatgatgatgtgacaacgtgtggggcccacggctggccacacgtgtggggatgtgtcatctggtcgtgccgttgaatgggccgtttttctttttcctttttttttgcttcgttaattaatactcctatgggttggtttccatttcccgatgctaaagttgccgaattggctgctgttaacgtaaatttgcagtacggtgataaagacacatgtagtactcctggaatgctcaacgtcatttggcccggcctactgttcatgtcttttccgaatttttgataggtgcttacttcattttttttaataataaaataaactagcatggtggcccgcatagattgtgcggcagcatcattatattttccctcatataatagcatatatgtttcctcattatattattaaaatatattacaatgacaacataattttaaattttgcaataacttttcaaaactactaatgtgtaatgactactctagtctaatatttcttattttttaattctgaatttcagctatttctaaattgtatttctatatggactctgcttttttttctctaattaatgtgagaatttctaggccatgagagcgaacgtggaggctcctttttattccgaattttagttggttttaaattctaatataaactctatactctacttctaatattctttattttttaattccaaatttctattttatcttaattgtatttctatatgaactctatactctacttctaatatttcttatttttaattccgaatttcggttatttcctaattgtatttctatatgtactctatactttacttctaatattccttatttttaattccgaatttcagttatttcctaattgtatttctatatgtactctagtctcctcttctaatattccttattttttaattccgaatttcaactatttctaaattgtatttctatatgaactatagtctcctcttctaatattccttattttttaattccgaatttcagctatttctaaattatatttctatatggactctagtctcctcttttaatattccttatttttttaattctgaatttcagctatttctaaattgtatttctatatggactctgccttttctttttatccgattaatgtgagaatttctaggtcatgagagcgaacgtggaggctccttttttttccgaattttagttagttttaaattcctatatggactctatactctacttctaatatttcttattttttaattccgaatttcaactatttctaaactgtatttctatatggactctgttttttctttttctccaattaatgtgagaatttctaggccatgagagcgaacgtggaggctcctttttctattcctttaattatataatagattttagcatttacttccaataaactactccctccgtaaaaaaaactcaaattagaaggagatgcgatccttctagtacaacgaatttaaacatagggtcgcatctctttctagcttaagcttttttaggacggggaaataaattgcttcaaagaactcgtaccatttcattacacactcttatttctaccgtacttactttaaataatgtagcaaattttatcagagtggaacaatcggcggtgcatggttcgcgtttagcggcccgcaccatacatgcccctgggtaagaacataaaaatgtgaaaagaaatccttcatcgtaaccgggggcagatctagcataaggacgaggagggctcgagcattaactactggtaatagaaccatgggagccttcacttcttttttttttgtcataaatacatgcaaagaggagattatagctttgtctagtttgttcagaccagtgacgaatctaagaaaaaatagtagggatgtctgaacaaactgaataaagctacaacatctcttcccatctacctacattaaagaaaaaaataggagtttcatgaaaactcctataatcctcacatatgtagtgaagactcaagaccccgtcgccctcatgctagatctaccccggtttcagaccctccgatattttttcatgatccgtcgcttggtcgcaacgaacgggtggtcgtacaaatcagttcggtacgagtcgactggcgaggctgactgatctcacttgtgttctgacccgtagatcggcccgtgcatgcgagctctcgccgctgccacagttaaactgacgccaaatcgccaatgtttgctccttgattccagggcggtcagcgtgacgggacgcgcgatcgacaaatcttcgaccggaatcgcgccatcccaatgtcgatcccaatcatagcggcatatgcacacagggacgacgacgactcgaccgtcgacgcaacctgacacgagtgacaacgatgccggccggcgggccggcggcagttgcaggctcgacgaccgtcaagcagggcttagatcgatattgatatatcgtggtctcgtcgacgatctcatccatccggccggttcgtgacagatagggctgccgttgtgactggctgcaggctggtgaggacacgtactatgctactaccccgtcttttttttaaaaaaaaaaccaatcctatgtatttactccccccgtcccataatataagagattttgagtttttcattgaaacgtttgactactcgtcttatttaaatttttttttccaaatataaaaaacgaaaagttgttcttaaagtaccgtagataataaagtaagtcaaaaaaaatactaattttaaaattttttgaataagacgagtggtcaaacgttgcaaagaaaaactcaaaatcccttatattatgggacggaggaagtagatttgtagctagaaattcgttgttttatggagtagtcgtacgtcctctctttgctctgctagaacttctctttcgatcgaataacgtcgtggcacgtaacactgcacgttctggtctacaggacgttcaacgtacttatgtatcgtagactgtcgtacttatgtatcgtagattgttacgtccaccgattcgccactgctttaatgattttccatgtactactgctcgtctgctcctagattaattagattgtgttgtggccatggattaatggagtggcagtgctattgttatccaccccaatagtcggagcggaagaaccatcatcagatcgaccgaaagagacgtcgcacgcattatcatgtccaaacgcttcgattttgagatggatactgtttctttttctcttcctttggccgaaaaacagtagcgcatacctggctcaacccctgcttcagaatctatagtatgtacgcagggatggggctacccttgtagcgttgtctcgctccgatgggcatatgtatgaggtatatatcgatcgactattcaattcgaggggcttaattactttacgtgggcaggtggagcaccatcgagttctaaaactgtgagctcagccatgttagggtacatattaagggtgatgttacgaaaaacaccactaatactcctacatttttggcgtgcacacggttgaccgatcgagctaggattgccctgaagcgtacgcagtgttggagctttttgttgtttgttaactgttcctatggtgcgtgtcggtgtcgagcctagtagtgagtttccaaccgttgacgtaatatgtatctgagtttttctcctaaactattttgagtcatatgtctcggaaatggatataatatagggaaaaaaataaattacccccctaacggtacgaattaccccttcaatttaaaacggatattcttcactctcaactttttataccagattaattaccctccaaacagactgcagagcgattttgatgctacgtggcgtacacgtgacagttcagtcaacataaaaattgatgaaatggatggttactcaaaataaaaaaaaaactaatgaaacagacgtgtagggaattaatgtagaaactcatacgtataaaaagatagagtgaaacgttaggatatagaagaaattggatgaaatttcaaggatgcacgagaaatttccttgaaagagcggcaaacgcattcttggtgaggtgggcgctaagaaaattttttggccatattaaatgagtgatattttgttgaatgagactgataattgtgttattaattatgcttcactataattatgtgacaggctactctagtctcttctagtgattattttgccattaaagccagagaaaagtaatgcgagacaatgagagacctggagctagggctcagggcggtaagagtattaagcttccatctagctggcaaattgtaacagcttggaatttgattttaaaaagcacatcatgcgataaaatatgccaataaaaaaacagtcaaccaataacgaccatacacggagtatggagatgggaaaacgtcttgtatagtcagtaatgacttaaggcttcttttggaactctcagaaatttaattattctgatttgttttgaaataggggcgatgccccgcaaaaaaaaaaagggcgatgaaatttaatagctcaattgtttgctcttcagtttataagtcgcaagcaaaatttaaaatttaaacttaattttagagttgattttgatgttttttcattgtagtttattttccaatattgtcttttaagttacaaagaacacatgtatgaaagtttaaacaatttagttgttaataagcgttacgacatataattagctgtaaatgaaatgatggaacttctcgaaaagtatgtgccaaatagtatcttaattagatttgtgcggtgctatagttttcctcgaccctggtcatcctacgaccatgcgccctaaccctagaaattaatatttgcctccaacaatgctgtgaaatggatgaagttataatttatatgaggtcttaaaaaattgagcgaattattagccaggattttcttccagccacgtgcgagactgaaaaaagagttaatttggtggcttggatacctggtcacctggaagtaaacccacccaccaacccacagtacgattttctactcttattaaagtagggggtaatccaacttttttttccaatagactcagaattaatataaagaaattaaaccgtgacatgttaatggtctcaccaacagttgagttgttgctagcctttgtatcctcctgttttgctctctcatggcgaacagtacgtagtaacatgctcagatcagtggtcaacggttggccggggaactagctaggcctgatcataggacggcaaatggtgcgaatcggatttccccatgcgccgggcacatgcacacatattgacatcaagagattgcaaagtactattcgcgaatctcgcagcaggttgcccgtagctgactacgtacagtacaccccctgccagctgatgacgcctagctagtcgtagtcggccgggtcaccaactcaccatggactggcggcaactcttgtacaggatcgcgtttcacctgccatttcggtgatgaacttcacgggagttctcacgtgcttaaagaaaaggtgtagtaacagtgcacgcattttgtgtgaacagctcagtgcgtgcaggtgtagggtaggagtcgtcgggagatcggtacgatatcaaggaactaggacagcattgtacagtccccgtacccttttttcttccgggaagtacccaactcacgtcaacattgtggttggcttggctcagtcctagcatgggaggagggaaaaaaaagaaatcaatcggtttctagtgtcaacactcaacacgagtacacaactcgcatctacgaaaaattaagtcccaattataagctacccattccgtttcataatataaatcatttaacttttttaatcaaatttatttaaatttaatagagtttatttttcaataaaaaaataaatgtattatcaaaatatattgaattttaaatttaataaaactattttgtataactattttctataaatttagttaaacctaaatagttttgaaaaaagccaagcaagttataatatgaaataggatcatgcatgcatcctccgatccgatgggctcgctacaggtagcccaagtacgttgcgggtgcatggtgggcaagggggaaacagtagtttatgttgccgctatgcgtcggtcgcgtagtatggctcatcaccaaatgcacgtcgccctcgccgcgcgcacgtgtggtggcgagtcccgccccgcgaccgcgtagtaggactaggagatggatagactttactagtagcattccggtgggccgtcggtccgacgcgcgcgcgcgcgcgagggcgtgcggtgcgagcgccgagagaaagattcccccaccccgcgaacaccgcgcgcgcgcgcgacgacgtcctcatctccttccgttccaacgagcggatcgaacagccacacacaggggaaaaaaaaagcccggccccgccacgccgaagccgacgcgcgcggcggaaagcgacgcgggggcggcctccggaggggatcgatcctgtgtgcgcgtgcgtgcggatgacatgagattctgcgtatccttcgcggggcgccggggggtcgatcgtccatcggccgtattagctggctgcatgcccgggcgcagcggtggctttcaaggcgctactggtcctgacctgcacacatacacacacttatcattggcattggggccctcgcatcgaagctgagagtagagtgggtgtgcgtgtgcccatctcgatcgatcggtgtccaaagccttagctatatcgacaattaagactgcacagctagctgcaccccactgttccaaaggctcgcgatccatcgatgtgtacgtgtgccgatcgatcgattggattatttgggtgcatgcacacaagcccgtctgcacagtgccactgtgtttggagcagtgcgcgtgcgtttgcatgcgtggccgatcgctcctctcacacgctcctcgccgcgtcgacccggcggacgtacgtgtggctttttcgttcattctgctggggacgctgccagttcgactgttggataatagaaccgccgctcggtttcagatgctagtggctctgggctactggtactgatttttgttccttggcactgttcactgttacatcggcaggcgagatagatcagccggtggccttggactatttgccggcacggcttcgacgactactcccgtattttattaatttgctacccaattttctatcggtactccgttttgcaagtgcaaatgtgtgtgcaactcatttatatatgacggctgcggtagtagtactgtgtagatacatatacacgtggtatgcacatacacaaattttggactacaagcacaggacgacccatgtatgactactgcagcatatgattatgcttggactgtgtacatgcacgcatggatatcgagaaagtttgcacagtgccatgcgcagggatggccaaggaaagagtttgaccgaaaaggaggcatgcattgcatgggctacacacctttgcatcatttctgacgaccaccaaaccccatcctgctcctctgaatcgatcaagtggtacttcgtccttgcagcaataaactatatgtgatacttttagcatatagaacaatcaggaagctagacaagaacagagatcttgcttccaaattaaacatcgtgtaatcgagcaaaagctacttaaagaaagagtaatacctaaaaagtaattcaataatcactgttcaagtaattaagaactttgtagcctgaacaggttttctgggattctgtctgatcaaagctatttaaaaagagatatatatgctcgaaaagaattcagtgatcactgtgcaagtgatttatagctctgtataggctgaccagcttttctggagctttgtctgatatattggagtatatatatagtaacaagtaacgggatataggctctgctagatgcgtacctaattgtgcgattgaaccgtgatttgacctgattttactagaagacatgtcggcaatcctgcgccaactatcaacaggttaaaaaggaggaagagaaaatagaatagcaagtgtcggggaaagatgttgtgatgtcgctcgaggacatgatgaatgtgcatgaacaaagatgatgctgatcagaaaagaaaaaaagaagggctccatagattaggctatacttttttacccaaaaatgctaatgcaagtgcacaaggatgtgtcgattgctcaacagacaaataggttcttttgatcaaagggcaactcgatgagcttaccatccgattagtttatagttaatgtgcacaacaagtgaccaggttagaagaaaagcagcttagccgagtttactttagtgcaagctgaagtgtgcagatcgagttgcgtctgcggctagcgacctcaggcctcaaaaggccatgccatcagtcagtgcgggcacttgtcatgaccccctctggtcctaattctgcaacttagcatctccattgggcactcactcgtgcggcacaatatgctccagcttttggctaattcggctcctgcttttggctaattttcgcggcataggagaaggtagctttcaactcgtgaggaagagaacacgcgaatgcaggggctcttcggacagcgaaaggcacaattggtcactggttgggtggtggtcaatgacacactgatattgtttgttgtttgttgtttgttgtgcgaggaaattacgagcccgggaggatatggtaacctaggaggaggcgcccgtgcaacgccctgaagcgtacgtggctctgcgtggtgcaggcctttctgataaaagatgaaagggtcctgccgcttttcggcccaccttggggatggaagcgtgggtggtgggtaggcacatcgcccaactagacgacgcccaagtccaaactatatttgcactacaaccagttgcttactatatagatctttatagcctattttcagctcacttatatagcggttaatatttcactataaatatatggtccacaagtctgtctaacggattttcttagttcctgtgactaaaccagctataaacttacccgcttcttatctttctcctctcctctctcatcaactcagcatttagtcttcttatagccctctattatacttctattatacttgctctaccagtaatctactagcggccgaggtggtttcattcatcaaacgatgaaaagcgtggcagaatgggggcgtgcaaagcaatggagtacacatatacttgctgctgcttgggtgccagattggcatggttacttacttaccggaagactagcgcacacgaaaagcagcaggtcaaatacggaagcactgggcactggctcgagagaaaattttgcaaaagcatgtgctgaaaattttgagtgctcgcttcgggcttgagacagatattttgctcctgtccatttctgacggagctgcggctggatggatggacaggctccccgtgcttccccccctcggtggatggcaaacctacctatccacttgtggtaagatcttacggccattggcttgccctcgacatggtccataataaggtttagtataactcgccaccgaagataatgattccgggaaaacgacggcggtttcccaactcgggcgacgtggcgacgcgcgcggcgcaaaccaatcgcgccgcgggcgagaccgagacgagatcacgatatcgccggaggggttgcgcttgcgccgctgggtagaggttggtgggagagcggcatcggcgagatggcaaccgctgctcccgccgcggataaacgcatccggcaaccggcatcgaacgttccgatcatggcacagagctttgctccgacaagagctaagctcggagctagtaacacagtgtcagtggccctgtgccgaaccatggacaatgatgatggccttatcccctctggtaaccagacagtgcgcttggactgaactgtttctggcctgatagctaatgtaagttatcctggtgcagtggtgcctctgccttttttacaaggcactcaagctctcgaagaacgatgccagcaatcagtactgcagaagcagtgcatctgggaagtatattaaggatttaagaacatagcaggaagtgcaaaaaagtggctgctgggccgacaacagatgcataaatgggctcacattagttgaacttgaaccacaggttgcaacacacttgggaagcaggatcttcagacgaaaagaaaacagaaccgaagcatacggtgtccgtattcatactactccctccgtcccataatataagagattttgagtttttacttgcactgtttgaccactcatcttattcaaaaaatttgtgcaaatataaaaaataaaaagttgtgcttaaagtactttagataataaagtaagtcaaaaaaaaataataattctaattttttttttgaataagacgattggtcaaacagtgcaagcaaaaagtcaaaatcctttatattatgggacggagggagtacatgatatgctaagaacagggaaagcagatcacttgacacagaacaaaacataattccaagtgaccgacaattgaccagttatttcacatatgcattagtgagcataatcacaacaaacaggcttagatatccaaagattcactatcagaaattttctaacggtagcattacctttcaaaggcaaagctcgaaaaagatgggcaaaaactgagacaagggtgttggtgcatatgtatgtgcatgcaccaaaacagaataggtaatacattcagacatttgggtgtaagttgaactgtctgtaaattaagtaaagcaggcaatttcctatttgcagttgcgcggttttactacaatgttacaagatatcaaaaatatattcacatggacaaaggtaacaacaatctcctttctcttttcctcttcagccttctatgcctagatattttgagacctactggaaggagaattccgaaaactacaaagatggctgaaagtctgaaccatctcaagtaaagggcaacatagcaggacaccatgacaaaacaaaacaagatagcatagaagagagcaaccttgagatcccgcctgcaacataaaggatcatggatttaagagcaataacaaaggcctcagaagtcaaaacagaagcagaagcaggatagcaacaaccaacagattatatattgtgctaccggcctaccgaaatgaaaatcacctaggaattccagttgcgaatacctacctaaagctcattttcacaagctatagtatttcctctatcagtttcattatagacaagcaagatactttctatatagtagtttagactttaaaaaatcaacaaggatttccagattgcaaatactaagagctcatttgcattaaccatgctacattcagtttgctagttcttaactctgagaaagggtatgaacaatttcaggactatcgcattcaattggaaaaatgagcacattgtgttcactataaactcgatgtttcctttattcactccagcacaagctaagtatgtcacaaaattgcctaatataatactccctccgtcccataatataagtctccaaaatcccttatattacggggcggaagtagtacaattcaggatagtgaattctatgatagaatgaaaatcctctgttgcaatgaaaatcgaaggcattcattatcaatttgtcttttagtttcaatagttacaattactttggatgcagactgtagggaatcaaacaaaataggtttgtaggggtccaacacaaagcatagtttatgttagcactacaactaaatattttgaagacagttacaagccttaattcagtaccacaagtgtcatcagtcatgtataaaatgacagcaatgctgcatggaaaatataagatgattcactggccaataggttttgcttagacaacattaagtaaatacatataatcagaaaacagagtacacaacaaagtagattgcctagtttctaaaaatcagtaaccggttttcattcagtcaccttcctcgtattggtcacctacctagtagtgttaatatggcttagctggactgtagtctcactggcaacccgacagttatgagcatcagttccctttatgtagcctaataaacagcctagtagacccgtttacagaacactgtagactacacagtaaagtgttcgtgaaaacagtttaaagcaacattcgcttgctcctataagtctggcatccactatattttatatacacatttatgcagaagcatgtataaagcattacagctaaattcaaatattcactgcaacattttcatgactgcctcttcgtatgagaaagggaagctgcccatcttgcaagataaataaaagcaagtttctggcataatagataatagatgtaacaaatagtgggtaaaaaagactctgttcaaaattataaacataaacatactatctctactatgaacttttcatcataagtcctaaaccctaacacaaagcaccattttttaaaggttcttcaaggtcgcaggtttatcttatggtatattgtttgtaaggccacaactcaagtgatggacttgatgttgaactttggaaaatcgtgagtcgttctttttgtagtactaaagaaatatgatggtttagccaatgaaaactaaaccaaaaaatagaacaaacaaaaaaacagaaaaaaataaatggccaatcttttctttaatagaaatgttactactaagtaccaactggaccagcctgtctattcgcatcagttgtagtgacctatttattcctgcttagctccttcaactataatttattttcggacaggccctaaacagacaatgagattcactttattaatccatcaattagccattggctgtcatataagccttccaactggcacgccatgccatgcagacaatccaagtctcttgaagcatgaaatggcaagccatgaattggtgtgatcaacaaacttaaaacatgggttacatacatggacatgaggacatcccatatcatcttagccacctctccattacactgcagtgcatataatggataaagtgctaaacttatgcagtgcttgccacttgctaggcatattcctgagtctagggataactggataagttgtaaaaattaaacttgagcaaactgaggttggcctggccaaggtaggtgggcttggcaagttggcagggcttgaccaggtttagggataggacaggttcttaagtgactaagtgtgaggcctgttagcaaccaaacactattgctttgggtaattttgtcaaacctggaccaacaccaggttgcttaaatgaaacagtctcgatgcactgcaggcatgagttttgctcaggtataggaaactacaactagctgacagtattcagttcccctttcttttccttagttccttcacaaattgttgtattcagctactgacaaaagtgaagacaccatagcttgcatcattattcatgaatgcagttgtttgttctagtactccgttgactatgatcatgggaatagatgaaaagttgcataattaagttgttttatccaaatatactaataaaacacaacagctatgctattgtcttgactattg

SEQ ID NO: 30144 - DNA, 1966 bp, Oryza sativa
ttgaattttttttattttaagtcatttttttgtcccaaaatgtaattttaaaattaaaatttaaaaatctataaacatgcaacaatattttgggaccctaaacagttttaattcaaaaaattttcaactacaaagttgtaggttgcgtcgagggctacaattttgatataaagtttgtcttcattagagttcacatgaaaaagttatgaattattttttatataaagtttttagaccgtcatgtttagggaccggggtgacacaattgaataagttggaggacctaaacgagtgatctgcaagtttagagaccgggatgacacagtcgaacaagtttgaggacctgaacggtcgatttgcgagtttagggaccaggatgacacaatagtataagtttagggaccggtgatggactttactcttttaaattttattttttctaatttctttctgcatcgtattaatgtagatactgaatactttaaatgataaatattgtcaataaccggcctatcgagcatcgtttccgaagtgatgctatcgattccgaccgtttccgatcgttttcacccctaacgccaaccataccgacatggccaaatagcattgtcacactatttagacgagcgtggtaatggtgttttaccacactaacccgcctggcatgatcaataaaattaaagattttttaggttataactgttgtatcaaaatatgaggattcctacaatgactcacatgattccaatcacttcaataattctaaatccaaccacatgcttgcaaaggaaatctaggcaactaaaaattcaaacattgacaactgtagtgactaaaagaaaatcatttgatttaaccatggtacgtgctaaatgaccttacaattcttattttatctaacaaagggaataagtagtagtaccagctaataattaatactccctccgtccctaaatgtttgacgctgttgactttatttaaatatgtttgaccgttcgttttattcaaaaacttttacaaaatatgtaaaactatatgtataaataaaagtatgtttaacaataaatcaaatgataggaaaagaattaataattacttaaatcttttgaataagacgaacggtcaaacatgtttaaaaagtcaacaatgtcaaacatttagggatggagggagtatattacttcctctgtagcagagtactattcttcgtctaaatagtatatccctttagtttaaatttgaactagagaagtacactcattttaggacgaagagagtaccaaattaagcacatccgctatctagttttttaaatttattttggaaccgatggggtacgtgggagtaacgaacaccacagcgaaagcgacggtaaacatacatgatgcgaaaccgctaattcgcatcacgtattatatatatagagagagagagagagagaaaaaacgagggaacaaaacctaccgcgcgtacgttaacgccgatcggccgatcgatgtctgggtcgttttcaactgtatagtagagtgagtggtctctggcgtggcggcacgtgcggccatcgcctaatttcatcacaaaaaggaaagaagaaagaaaggcgaccgatggagacgtggacggggggtcgcgcgcgaacgtacgtgtggattcatcgaacctgactgacccgacccgatcgacccgagcttctggacgcttttgttatctaggccgacggcgacgtatacaggcctcgtgtagtttgcgaaaaaataaattttaggttatacttcctccttcgtattttaatatatgaaaaagtacgaattacctttcgaactattacggtcatctgaattaccctcttgaaccacaaaaccggatatttttcaccccgaactatgtaaaccggacgaattacccccctcgatccaaaccgcggtggttttggtctacgtggcggtccagtcagcaatttatttat

SEQ ID NO: 30145 - DNA, 1103 bp, Oryza sativa
tatagacactatttattttcttaggattaggaggcaccagggacttatgattctcccagaagaggaattaatgaaccagatttagcgaaaagggtgatggagtagtgtttagaagtacagtggtgtgatgtgagtcgatgcagatcgaagaaagacgtcgataacttgcaattagctgtgctagttattatttatctacaaatgagccatgcattgaggtatagctgattagctatatagtcagtggcggaggacggaaaaaattttaggtgtggcctacgaattaccatggaagttagcacagaacgaaaaatctcaatgcacgttattatatgatgcaatattatcttaacaagtctacattaagcatggtaaacaagaactaattacaagttgatgattcatcatctatttgcaaacaagtatagatagaagagtaggtactcaaaaaaatacctcaacttcctaagattcacgctttcaacaatacatcacaaataggaagtacagtactgagtatcgacagatatattaccaaagattgattaatgttcacatatgttgaacctgttgatggagtgatggatgcatggctagttggcttgccgcttgcttgctgtcgccgcttggtgctgcacgcttgcactgctgttgtgccattcgtcccaccctgcctttgtctctgctcttcctgcgctgcgcgcctgcccatttgggccctggcggctggtcgcgccgccgccttgccggagcggatgccgcagccgcagctctggaagcctggtggccacgccctcctcacctcaccctgccttcccgcgcgcggcgcgcaccgcagcagccgccgtccgccgatggggattggcggaggttggaggagatggtcagatgactcagatgggggaaatttgggtctcgtttacactaaacaagcctaatgggcttactagctatcagcgtgaggaccagcactggcatgcgcggacgcgtccacgccgcgtctcggccgtcgctcgtctttctcacgatgcggcgtcggcactctctctgacccggctattgcagtgcgcggaggagtacgcgcggggggggggggggggggg

SEQ ID NO: 30146 - DNA, 1964 bp, Oryza sativa
ttagctaagtataattgcataaagtatagcaggcttaggaggcaatgggaattcagccttcagatcatggacacttttgagtttcgaattgtctccaaagatcatcaaccatgtgaggagtgatctttggacacgctcacgcaggccagtcttcttgtcaagtgtacgagggaaaggataggagaaaagtattgcaaatttgtaattaaaagtcaaacatacgcaactcctatgaaaaaagggtcaaaatagtcaggccaatctgtagaagaaaggtggtctatagtagacaaagtgttgcccaatgggaacaagaccaaagcatgacaatttatttataaattaacttctagttctaatttaatatccatatgcatcattaaggcagaattttatagtttctaacgagcccaagtccaaccataaactttatcgagaattacacacgatacacgaaaaaaactgctcttgtttggatttggtcgttttgtttataacttaaattttataagttcattgaccccataagatagatactttaagaaatattgatgtagattaactgctgtttaccactcctaagccaaatgaccagttacaattatcagcttgaataatttaaatatagctctggtagaatgtctcaaaaactcaaagtacaatgtgaattagattattcacaaaagtttgtcccactccggagatatataataaagtaccagcatatctcttgcctcgaaaagtaattgcaaagtgattttgataattttggaatttcttgatcaatagaccatcataaattttcttacccaccatgtgcttattaattcatccctatctataaggcccgtgcaagtcgatccgttgatccctatttataaactcttttgctagtctcttttctcctttcaaaatttgcaacaccatttggacttttgagcatatatatgtgccttgtgtttctacgacagctagtgcaatgggcataggaggtgccaggattgcaacagcgagttcaaggctccgccgatggagcagatccatgcatgtgtacactgcaaaattgatgggtagacttcatcatgaaatcccaatgcaaatactgtgtgctgatgggatcaaccgaagcccatgaactgcacgcacgcgacgtcgacacattgcagtgcacgcctctctttccatggagacaaatgctgcagcaagaagaacacacaattccagtttttgccgctcgacttgttgcggttgtcttcttggggtttgttcatctattttggtgttaataagctcctcaatgaccggccggtaactaaattaaaccagccgaccctaactacctatgtaatctttaatttcatcatccattaccgaagattttcctatagataattgtgatgggctactcgccgagatgttctgttggatttatttgtgtttggcacatttattttcaattaaatctataatattcaaggcacacgttaaatgctgatgaattaccggacatgatgtgtaaaaggtttctgttcaagaattgataattcaattgacacggaggattgatggctcaattagagaacactataaatgctgactattagtgttgattgatggtgttaatttggcaaattaacaacgtccattaccagtaactgatgttgtccaatgggagtaatcggtttcaacatcatctcctttacctctgtacgcatataatcagagaaggagctagctcctggatgtatggaacaaaaacacatcactccaccctctgttgctgctgcactactgaattctcatcgctagtttctgcacgtacagaaccagcgagagcaggcctccgaaaccatgccccgctgcgacgtttgcacggacgggcgagcgatcaggattttagggagcgcaaggcgtgactgctcactgttcgtttgcttcatcttcttcttggtaccgtcagtgag

SEQ ID NO: 30147 - DNA, 7426 bp, Oryza sativa
acacaaaagagtcttcaaaaaaaagattaatagctgaaaaggaattggagagcaattcatttccccacagtatatctgaattgaatgtccaacagaattcaactcggccaattcagatatccaaaacgaagcctaaagcatcatgcatgtaggtgatcttaataagcgagtaactcgaatacatagagatcatgccaaatgtaaaaatataaaaaatcaagggagcatttgtaaaatttgttgcagattcatccactgctttgttctaacacctccaattggtctactttccaacttcaacatgaagctgtcaaagaacatggttttttgattccagagagccaaatcattccgtgtgcgcggcggtgcacctaggggaagtttcaagaattgcagtccaagattattgtgaatccaggagcactttctggcacaatcgatgaagcacgaaacttggtcaaggtatcaaattatgatcctacacatatcataatttgatcgatgaacacatatcatacatacttggatcataattgttacatttgaacgtagtgttgtgtgcgtacggaaagatgagtaaaatttggattggagtctaagtttgggaagattggagtgtggaattgtatggggatgttctttcccaggtatggtaggtttcctatatatgtgatcaggagtcctagttttagttggattcatggttaggagtcctagttgaggctagaagagatctatttttctggagataaaagttagggtttgattcgaggtttcaatcctagttcgtgagttgagagaggtgtacttcagatacactttgtaaacacatattgatgcaataaagttgatatactttcaggaagcggtttgattggagttcattgggcagtctaaccggtggcttagcgatggtctaactggcgtagagaggcggtccaaccggcggcaaggcggcggtcagaccagcggctatactgtggtcagaccagagatctgacagtcagaccgaggtacagtgcaattttgtcacgcttgagggtaatgttttaattgtgcaaaaagatttgtttttagtgtttctaccattcacctccctttggtagacttggttcttgtattcgatctcacaaaagttttgtagtactgcaatttatagcgaaagttgcattgagtgaaatcacaatatttaaaagcgcaccataggagcaggggcacatgcttattcattcagcaacttttttgttgggaactctcatctgaagtgcaagcaatctagaatgttcaacctgcatagcaacattgctgatccacagctccagccatatatatagctacaaaattttggattgatgttagggttgagaagcatcaggaaattagcgctcgcagcgcattgggggcttctacagttgggttattattgtgtagagaacctttcaaccaagcccgccagccagtgaaacggtgaagtgatccggatgagcctgttagaaaatgctgaaagatagttatccaccactgagtttcatgcgtctagagattgaataggtgaaatatgccatcctgatgaaaccaattactggccctcacttcttgccacactgtaaactctccttcacattcgtgaaacacacattgagaattttcgatagaaattagaagcatatgaaacttctagcagagaaagatagcagcactgctctagccatttgatacccaaattgggtctgagcagttaggactgagaatcaccgggaaattcatcctcacctcattttcatttccagtagggttgttgtctatgggtagtagatgttgtgcaatcatccgttagtgatgaatagaggatattagaaaccaataaatatttgttggtctcaagtagccacatctgattgtgagtagcctatgccctctttgtaaaaccttttgtgaagatactttgcattttttttttcactggtgaaagagcaaaggaagtctgggatctcctaggcttgaaacatataattgctgatgctgtggtagtggattgtgcgggttcagccatgtttgcacatttgctgctaatgatcagtggtggagcttgacccaaaatgcagagggggccaatattatgtgttactgaacacaaaacctctgttttttcgtgtttaatacgtaatacattagataattgttctttttattaaacaaaaaaaatattatgtgttacagagcacacaacctttgtttttcatgtttagtaatccctctgtctctaaatatttgacactgttgacttttttatacatatttgactattcgttttattcaaaaacttttatgaaatatataaaactatatatattcataaaagtatatttaacaatgaatcaaatgatagaaaaagaattgataattacttaattttttttgaataagacgaacggtcaaatatgtttaaaaaaaatcaacggcgtcaaatatttagggacggagggagtaatatattagtatatgatcgtcatggacaaaaatagttttgagcaaaagacacaacagtaataagaagatatttcccaatatatcggtggaagaacaaaagaaatatcttcataggatagaaaatatatcaacgcttggagttggacaaatattccattcaaaggctatgagaaaatgaaattgtctaaataataacagaaatattagttaattggcgttcgtgaaaaatattagttaacaccattaacacttggagaactgaaaaacacatgggcttgagaggtgtagagcagaaggcctcgggtctcactggtgtaggcttgcaggagcttatagcaacgtcagacagtactctcattttgccagtgtcatcttcaagttcactcgtaatcaaagagtatgtggtgttcctttctgtatttaaatcagcactgtcaggagccagattatgaaatgaaaatcagaacaatggacacaccatataaacagagaaagccattatatgtaaaccaatggccctcatttcttgtcacacagtgaactctccttcatcattcaggaaaacaaacattgagaattttcaatgggaatttgaagcacatgaaattcccagcagaagaagatagcagtgttgctctagccatttgcatttgatacacaaattgggtctgagcagagcagttaggactgagaatcatcaggaaatttatcctcacagaattttcatctccaggagggttgttgtctgtgggtaggagatgttctgtaaccatccgttagggatgcatcaaggatatatattagaaagaaatcagtggtggagccaccacctgggcaggtcgggctctgccgatgtcgtctccactacgaacagctgttgacacctattaaaattaatcgatcactgaaaaacgctattagttgtccagacttgatgacaatgctggctccgccactgaaagaagtttttgttggcctcaagccgccatctctgaactggctattccattccaccgagatcgaagtgatcttctgattgtgtttgtttgttgctaattgtcatagcgccttggcttatccctattgatgcgaggccatgtcttgaaagctaacaacatctgggatattatcttgtactcttcagtcttcaagatagcgatcacccactgatggaaggttaagcttgtggttgagccattaaaattatgcataaagtggtagcagccagattcaaaattacaattggtggagagattgcaaaaaaaaaaaagtaagagattttttaccatataacatgccgatgcggtaccaaatcgtcgccattgagtggataggatccaacggctgtcatcactgagtatcgtgaggcacccacttgttcttgtggtggcactgcattaggatgtggaggtggaagggtacttttgtactatcgcatggctgattcggtctcatccacttggattgtttcatttgacaccgcctctttcatctccatctccgcgtaccaactttgcagccccgatgtatagcgagcatggtgtctccgcggtggccgccgtcgcggagagaagagcgggcgcacaactgacggccccggacgagcacgtcgagaaccacaaagcatggctccgccaaggaggagctcatatttactgaaacactcaagtaggtcagagagtgagtagaaacatatctttatttttaggtgacatttatttttctaagttttgtggttgtatataagcatgtgaaccacaaaattataaactcatatttactgaagctacagcacacaggagggggcaatacaggtgccaaattttgaccttttttagtcatttcatattattagtcattttgacctttttctattcaattttttaaaaaattataacagcgttttcaacacaaaataaatatattaccaaaatatatttaatgaaataaaattggtattttggatgttgttctatttttctataaacttggtcaactaaattaaaattgactaagaaaaaatcaagacgacctataatataaaggtaaattttgcttcaggatactcaaaatttgtgttatttgtggacagacataaaaaacgtgtcattaatgaaagatatcctgaatatgataatttgctataggatatatttggctaaattggagagataaattcttaagaaagacgggaatgcccctagaaccacatgtttcaaacatgacgttagagtaaaaatttagatgtcatcaccccaagtacatcattagcgtacatcatattccatcttcactccagtctcaactcaaaagcttttgactctagggacattcttgtatttttttaaaaaattctctctccaattgagccgaaagtgtcctctagcaaattaccagtgttttagagtgtctttcagtcatgacatgtttttacaatgtctaacaacaaattatacaaattttgagtgtcatgtagcaaattttgcataatatgaagggtctgtttggcacaactctagctccttctccacctctcctagagttagagctcagccaaacagttttagctccatctaaaatgggagcggagctaggtgaggcacactcacaaaataaaataaggaggtggagctgagtttagattgctacacaactatactccagacccaacttctgaagctaaatttaggagttggtgcttcactgaacagacccgaaatggagggagcaacagacaatcacacttgtgaagtattcaagagatggaacacaagaaacaaaactttgaaatataagtatttaattcgaattatgtaaattacaagttagttcccaaattaatttctgaaatacattatgtttcctgatatttttcagatgcattaaattgacgatcttcttaactttggtcattattgcgtgccaagaatttgctgtatatattacaccgttgtcagtaacatgtccattgtttttttttccaagacttcacaaccacgaagagctcaaattcatcctcagtgtgagccaatgcagggattgggatgcgtcaggaatatggatgtgccatatctttgtcctatcatctcaggtatgcaaatgatagtgtgcttctgagaaatatcccagcttttgcaagaattgctcatttggttaattgctctgcggctgggatatatacccgtgcaggttcttagatgaacggagttccatagacctgttcgttccgagcactcgtccgcgtatgttcttaggtggatggagttcgggaggcctgcttgcttccgagcactcttgcgtgcaagtgctcagaaccggggaaaatggatgtgccatatctttgttcatcatctcagggatgcaaatgatggtgtgcttctgagaaatatcccagcatttgcaagaattactcatttggttcatcgctcagcggctgggctacaggaagcggattcacctgaccactgctctcaaccaaattgtagagctgtagtagagggtgtgctcttgatccaatcaaaagggattggagagcagttcatttcctcttcagattttaatggaaggaaaagacaatttgtttcagtaaattcagagatccaaaatgaagcttacatatatgagatcttaataagcaagtaagttaaatagatagaggttgttaaagggaatatgtgaatgtgacgtgagtattatagaattttctcatcacttgtacacgttatgcagtctttgagccaaagttaatacatactgatggaaaggttaagctggtgacgaccctttaaaattagagaaaattcactctatgccacgaagcttgcccgattcaacgatttgccattgaaacaaattaaatacacatagtaaaattgaaaaatggatttaaaaaaaatactctatgaaattaatatatagaaagttctataaaagaatagtgctgagctcacctgaaacatgcccttcaactgttgtatttgctaaaaaaacaatcctagtattacactatggaattaagcagggaccatctatataacgagtcatctttattcctcagtagtcgttcagtaatattgttggtgaaaatcatcatctgaacagaagcaatatagaatgtccagcctgcatagaagcattggtgcttcagtcataggtaccaaatattggatcttaggattgagaagtatcagtaaagccgtcatgacagtgttagggacttctacagttgagttattgtgtagatccaaattctagtctctacgcagattcgtgaactcatcctgaaagtcctcttgacatttatccaccacagcgatttatgcagctagacattgattaggcgaaatacgccatcgtgaagaaacaaattcctaatgtccatttacaatgtttttactacgattatatatatgtcagtctcacaaagatgggcatgcacgatggttaaatttagatggctgattaatctctaagatgtgttcctgttaatcttccaagctttggaataatcactaacggtttatgacttcaagctaaatctcagactctgaaatggttctgatagaaccttcagatgttataggggtcaagcattggctgttctgtagtagaagtgtgcaataattctgctatatattatcagatgtaaggaatgtatggaataaacagtatgaaatttgtttcaacaattcatgcatattacaaatggacaacagtttccgtggactaataatgaattctctagtaaaaaagttaatgttcaagttttacactatcaatcaaaatgcacacagtactcccattttgccagcctcgtcttcgaattcattgaaaatcaaagagctaggagttaagaaaaaagaaacgtcagggtttttcagtacttatcatgaaacaaacaaatgatacccgtgctttaatgtggaacatattgata

SEQ ID NO: 30148 - DNA, 3595 bp, Oryza sativa
atctttggtaatatatctgtcgatactcagtactgtacttcctatttgtgatgtattgtgaaagcgtgaatcttaggaagttgaggtatttttttgagtacctactcttctatctatacttgtttgcaaatagatgatgaatcatcaacttgtaattagttcttgtttaccatgcttaatgtagacttgttaagataatattgcatcatataataacgtgcattgagatttttcgttctgtgctaacttccatggtaattcgtaggccacacctaaaattttttccgtcctccgccactgactatatagctaatcagctatacctcaatgcatggctcatttgtagataaataataactagcacagctaattgcaagttatcgacgtctttcttcgatctgcatcgactcacatcacaccactgtacttctaaacactactccatcacccttttcgctaaatctggttcattaattcctcttctgggagaatcataagtccctggtgcctcctaatcctaagaaaataaatagtgtctatacgcatgactcacactagagatataatttcatcaaccaaaaaagtgcaacagaaggcaaggcatgtggatgggtgaaaattttcaagccatctcacacatttatgcacagtagaggtaggtgtgcttcaatgaaaatcctaggaggttcacaaattgaacccttaccccgtctgaatttcacatatttaaaaccatctatcagaaatttcaacatattgcacaagtctatttattatactcaatactattatatcataataatgcgaagcgacgtatataaatgcgtatggtttttgtacatcccgtggctaaatcggtgccctaaagtctttatcttttgtggccgatgaatgaaccgaaaaatcaaataattgatgtttaaaacaaaacaaacacatcctagcagagcaagtgaaagtgtgaagtccaaaatagactaattgagattgcatttgcatcacgtactcacatagtgataaaaaactattattcatggtaaacctaaaaatgatcatctaagcccaaggttttgttcagtagtaagctttctatatcttctaccatctcattttccgcatgcaagtttcctaaaaataaaaaacttttggtgcatatttaaaacaatatagttattttaagtcatattaatctaatttttaagttttttactaagtattaattaattatgcattaatccatagcttcgttttatgtgcgaggaagtttcccaacatgcacaaatgaacatagcctaattaaggctctgttcttatgtcccaactcccctaccatgttttccgcgcccacgctttttaaactgctaaacggtgcgttcttttgcaaaaagtttatatatgaaagttacttaaaaatcatattgatccatttttgaaaaaaaaaatagcaaataactaattaataacgtactaatggactgcttcgtttttcgtgtcggagggataggtttccaacccaggcaaacgatcagagcctaaagacttagcactgctttaagtgacatcttccaggcagaaaattaaatgatatttacgtcacatgtgaacattttgttgtcgttgatgaataattttgttgaaacttaaatgattgatcctttatttttctcactttgtgtctgatgactaggagatgactctgaacataatatatcaaaatcatatctggaagtagtgactctggtcgtacaaaaattgaaaaacactgtaatttaccgagtaccaagaataggagctctggtaactttctggccacgtcagagctccaaccgccgtggtagtgcaacttaggaaacaggcagataccccttgaactttcatcatctagacaatgtcttctcgtggagtgattctactgtgctgagtgagaaattgcaagaacctgatacctcctaaacctattagacagtactgcagcctatctaagagaacttttttttctcgaatacacaggagatctacatatcattccattaagagagtaaaaaaaaaggtggagagaaagatcccccacaaaggccttacaacaaataaaaccaaaataacacacacatccacgccaaccttcctacggagctagcactataggagacattctactatgtgacttatgtgacttgatatgtaagaaaactgacttggtatgtgactataggagacattctcaaattactatgtcctatatatgcgtctatctatttaaataaaaaaactagtaaatgattttagagaaattatgagcactaggagcagatcatatagtgtaatgtaggcattatatataggttgaaatcgaaaccgtacatgtaaatcatttttttcattacatggatgacacacacactagcatattcaagtgtggctcatgtgtgttagttcttcaatagaacaggtacatacatattatatgtgcgggttcttaattaacaaggttgtcacgtataattcagtttagtgaccgttagtgagtcccgtcatatctgtctacttgcgagatgaaatggcactgaaactgtgaaattcaagtcacatataatgggactcactataggtcactaaccgaacttcattgtgaaattcaattgctatccaaaattataagaaataggtagcaaaacatagaacaataaaatcgccctttcgtagatcaaatcattcatgatatctgcacccacatttacatggtcagcagctagctagttgtggatcaagagagcagcctagcattaatgaaccgggagctactttgcatttgagagaggcagcttgcaatgctgaaaaccgggaaacatttttttcatcaccctgacaacaatctgaactgaacgtttcaaatcagcaacctcttcatattctttctggctagggctgtgtttaattagttcagcgcaaagtttagattttggttgaaattgaagatgatgtgactgaaaagttatgtgtgtatgacaggttgatgtgatagaaaaaaaaaactgaagtttagaaacacaacctagaaagaagaagcaccaccgaccgtttcgataagatcatattcaatcgagtatgcagtataatcatggaacagtaccgaaaggtttgtttgttgagaaatttttagtatttaggaaagtacctagaggtaccaagattttacactagaaattttacattggaacaatctaaggttgttttgctaaagataccaaattttacactagaaaatgtggtaccacccggtaccttctaaaggatggtaaaattacacgtgcttgtttctttaaaatggaatgatatctccattagcaacttgggcaaaaaataaacagttagtattgctggaaattctatatgcaattgtggcaaacgagattgtcgcgagggaaacccacctcagaaataaacagtctatgagatggatgagcaagaatggactgttattattggaagttgaattttaaccaagcaatttcattcacggtacaagaactcgtcaggcgggtgtgttatagaaatctcgtaatatgaaaaatgagcataaagtgaatcgtctctg

SEQ ID NO: 30149 - DNA, 7916 bp, Oryza sativa
ctgcagccctgctcgtctcctccgccgcatgccgccgccgctcgcctcctccgccgcccccgccgccgctcgccgcctcatcccccgccgctcgcctccaccgccgccgccgctccctgtcgcccgcctacctccgcggcacgcgtgagtgagagagaatgagaggagagagagaggaatagttggataggagtatgacaggtgggtccacatttttttaataaataaaatgctgactggactgccacgcgtacgccacgtagagcaaatccaccacggtttgggtcgaggggggtaattcgtccggtttacatagttcggggtgaagaatgtccggttttgtggttcggggggtaattcagacgaccgcgatagttcggggggtaattcatactttttcctttaatatatgacgccgttgattttttaataaacgtttgacctttcgtcttattcaaaaaatttatgtaattatcatttattttactgtgacttgatttatcatctaatgttctttgagcatgatataagtatttttgtatttgcataaaaaatttgaataagacgaatggtcaaacgttagttaaaaagtcaacggcgtcatacattaaaatacagatggagtatcggatattagaatggattttttacacgaataaaaatactaattttataactcgtctggaatcttttcagtctaattaatccgtaattagcacttaggctcaaaagatttgtctcatgatttcttccctaactgtgcaattagttttttttaaatctatatttaatgcttcacgtatgtgtctaacaatttgatgggatgtttttaggaaaatttttttgataactaaagcaggccatataattaatactattggcagcgatgacgtcagtgccgacttcatccactcttgcacgtataattaattatattattacttctagattactactgcccggacgggaggtgatgccataggctacagcaatgtgtgtaggtacgtggttcttctgcagccatggaagtgtgtggtccgtttgtgtgcatattctttacctgctttgccggttgaatgtcgatgcaaaagttttcaattacggatagttgttcatgtgtactcctctgtcccttaaaaacataaatctaaaattagatgtgacacattctaatacaaagaatttagacagagacatatctagatttataatactataatgtattatattcagtactaggttaatttttttatgggacgaagggagtgagtgatcttgagaagcatatattgtttacggtatgtggcacttacatcaggtgccatatggcagaggatatcaatatatgaagcactccctagattaatatatatttggggggggggtaaaattgatttttttaatgtatttacaatgaaagttgaccgtgatagcgaagaaaggaaagcacactagcgcggtagcattttgtttaactcatgtttatccatgataaaatgtgtagtagtagtagtatacttgaactttttgtttcattctcatgaatccgtgcggcatcaaatactctctccattccatattaattaatcatcatataaacatatagaaatttcaaattgatcatcatataaacctggtccctttatttgacatgcagtattattattgcatctatgcatgtaaattgagtatccatgcatacatttagggataggtaagcatttgtttcttgtgcatacgaggagttatagcctacatgtttcttgattctttccctccacatacttagattatataaaatgcataatagttttttcttcttagtggaaagacttatatgataactaatatgaaatggttggggtactagctacgggcctatacatcgcacatgatctagatccaccaatcggtactacaagtgtaactgtacacacttgcgtacgtcctactagtagctagtaggtagtaattctatgtcctatagaaactaacatttaaagttttcactaatatcctgcaaaacatgtcattcaacaatataatcaaagaagttccctaaaaaaagaattaatcaataaagaagtgggaccatatacttcaaaaattttaaatatgctaaagattattttgccatgtgtcgtaatttctgtgaccatatagctcctgcgttcgaaatacaacatggcaatgagttgtggaaaggatcgactaattaattaattacacgcggagagattattcgtgctcctgtcaaccacattgcacgcacttgaccataaaatgacagctgagtcttagtaacctggtcatttctagtaggaaaactaatttgcctctaaaaccttcttacaaccgtcgagttttgtgggacgaaagaagtaggtgaagtagtagagtggagcagaagatcctgagcctcgagggatcaatgcgtgcatgcgacagtgctgacctttccctgtcgccctgtcggttccctgttggatgatgattccaggtgatgagagagtggcgcgcaagtagccgccgcctccttccatagcatatccacgaaccacgatggccgtccgtcaaggggagcgaggggccgcggtttattggctccgtagtacgtactacctccgttttaaaataaatacagccgtaaatattcctccctaacatttgatcatccattttatttaaaaattttataaaaaattcaaaaatatttagttacacgtaaagtactattcatattttatcatctaataacaataaaaatactaatcataaaaaaatttcaaataagacgagcggttgaacgttgaacgtgaatagtgcagaactacacttattttgggacggagggagtacgagctaggcagccgcgtgcaattttggctgtgtttagttacacactaaaaatgaaagtttaattaagttttttaaaaaaattggaagtttatgtatgcagaaatgttttaatgtgatgaaaaagttagaagtttgaagaaaaaattgggaactgaactcagcctttacattctctttcaatgaacgaacgctcgatcgcaggttgttgacggacgcatgcatttccacgtgctgaataaaaatcatactccagcaatgagcctgctgcctacttcgatgcgtcgcatatggatatgggccatatgcaatgcagtgcaccccacatcgttccatatacgcacggcgcacaccctgctaattaatttggtcaagcctgacctttactgctcgtgctaatactaatattcaggcccacttctattcttcagcttcaagcacacttaatttccaactattagatgatactttttttttaaaaaaaaaaatctttatagaagttgttcaaaaaatttaaataaaaccatttttcaagtttataattattaatacttaattaattatatgctaatgagatttctcgtttcgtgtgtggtacaaatcttgctcatccacctgtaatagaacgaatcataagaatgtgttctgttggttgatttatcaattccatgccccaaaaaattaaaaataaaagataaagttctattttatatttttggtgcaaaataaattcgcatataacatggcattaaccccagctcaccaccatccctgtaaaaggaagagtaggaggggggacgccccaactctctcaattctaaaaccctagaacctaagtcgtccgatcaactgatgcgggaagagattagtgaggtgatctatataattttcttttgttttattgacagaaaagccaacgccctatacttctcctacagtgagaagaattacgagaagatgagaaaagaaagaacaagaagtaaatcaaagtgaccggcttcaatggcttcatcctcaagttagcagataaataaattctgcattgagtaaaagtgatcatgtttaaactaaatcattgagattatgtaaattagactcaacacgttcaaaactccattttagtttggctacttcctcaatttttgttagcacacatttaaaattgctaaacgttacgtttcttctaaaaacttcctatataacgagttgctttaaaaaaataaaaaatatatgtttttcaagattttaataactaatacccaattaatcatatacttatcacgcttctcgttttacacatggctaatcatccgttcaaaagcactttagaatgcaccctaataatagcatcttctaactaaaaaaattatctcaaaacatatcaatttctagctacttcaatcacaatcatctctcatttaatttctctatttttactttctcatgtcttaacttatcacaaacttttctcatttaatttcacattttcccttaatttccgtaaaaaaatacttatatatttttagatggagggcgtagtccactgtgatgctacaatttgtgattttagattttcgggctttcttcattgttttttgttactcaacttttatattgttatgaagaaaagtaaaagaagatgacctaaaattattattaaaaagagttaaaatccaaaattagcttgaaaaaagctgtaccaaatttaaaagctacctttgcaaacataggtagagggaggaatagcttcaaattaacatattgtttttcaacgagcatgccaacttcgctgtgttataaggtgagggtggggaaacttccctttcagcatgagaatcgaaacgatggattagtgcacgattaataaagtattataaaaaaactctaaaaataggttaataaacttttttaaaacaacttttctatatttattatttttatttatcttaaaaaaaggcatatcttttagtagttcggtaaacgtgcgcgtgaaaaagggagcgagttgcgaaagagaagaaaaaacacacccaccactatatgtcttcaccgttgacagcacggcatgtacgccaagctgcatcttacatatgcctcctcaatatatattcggattccttatacttttaataaaaatcagcgcataaaaatctcttatactactgcagattcttcaacttttttacacctaaaagtctgaaaaacctttttgtccaatgtaaaaacatgggaagaaaggcttttaccctcgtgggattctagacacttgagtacatgaatccaaaaaaaaaaggcaaatggaccttttggatttagtgagcataggcgcagaccatacacgactagatgtggaatttacacttacatcttccctaattgaaaaccgaaaattccttcttgttaggttgaatgaaccgtcaaactttcgtataccagtagagaacacagtaaaaagcataattaacttattactctaaacaagtttcagatgctgatcgactccaattaccacatggttggtccacatgtaaatcagaaaagagagtagcgtcgcccaacacatatttttaacagacataatactaggattaacacagcaacttaggcaagcaggcagcatcaagttaccagatatggaagctgcagcttccagatgcctccactatctaaggctcctttcatcttgaaagaatcagcacccaaaatttcacactagatactgcttttcacttttctcaagttcagaacgttttacatgtaaacaacgcagaatcttcagattttcttggtataggcactgaaagaataacccagtgtcaaaagcaaaaggtgatctgatttggagacaaagatggagagagagccccacacctctcagatctggcacatttttcttaccaacgtagtacatggtatcttgtcttccagaagggttgggccctgagatatgtagccacctttgtcttccagatgtctgaggcatatggaagaggacatgagattttggattagtatgcaatcacatcaaaggactacacatgtaattcatgcttagtgaagacgacagtggaacaatggacctaagcttgaccacagcagcaccattaattcaaatgttattctaggatttgacgatttgttactgattctgcaggagcctaagggggataagttactagcgagaatgacctggccaacttttgttttgattaaatgtaagattattcgtcacaaactagcataccggttcacacaattgattattctttggtagtattgcctgaaccatcaatcaacatatatgaccctccgtacacacaaaaagacattccgccatatgtaaaaggtggactccattctggaacagagaatgggtttcgtgaaaatgcattattgagcaatacaatggttggtttaactccacgagacctacaaaaaatcaaactaacaccagccttgaaatcaaatacagtgtcatgttatctacctatccaatatccaggtgctcagctgccttaatatagaaatgcaggaaacctattagtagcattgaactgaccgggatgttaaggtctatataaactccttgcagttcaataatttattttgtttatatcaaagatctcgatcatgcaaagtaatttgtaggtacttacaaaaatatttttttgtaaattataggtgaggtgtttgattaaaaaaaattataagtgagggttttctaatgttaaaaggctcttcataattttggttggttctgcagtgtaacatcagtagcatgtaacaactagtttcactacaaatggattgcatcaatgtcctctccaaaagagaaaagaaaaaaaaatatttgggaaaaagatcggaagggtgtgaattgcatgcactgagccactgactactccactaccagcaatactatttcaaagcttgtgccatttagtattgagataccatacaagcgccagacaaattattaaagaaaagcttcattggtaaatgatgagaaactaagcaactgacaaggatgtgtaagatcataaaattggggagattaaaagcatgacagcaaatctgaaagttctatcaggcttaacatttgtgattgtctcatgaaatgtttgatacgaagaaacaaagtacatcactgatgtgcgtacggcgtaccatctagtgccagaatgctaggaccacagcaatactgaaaagtatcaacaaagcaacattcccaccaggcaaaatatcttcacatgaaccagacgatctgtatgaagaaacatacacaaaactggtcattacacactaaaatgataatatgtcgaacactaaatcatagaacaccaacagtttagaaactcaagttttttttgtgttactgtagttttataatattttatattacaaaacataacatcatttaatcattttaaaaaaacatgtcttgcatctggaaccaatgatcctatgtcacatatattgcatcatgttactcacacacacataagataagatgtgaaacaaagtcaaagatatctctggtttgccaagagaatgaaagggatggatagctacttaattttagaattataaagctggcttggttgttactaattcacaccagtgactatcatagttcttgaagagtgacaggtttaaatctagaaaaaaggtacaactaatgtctcgaaaaccatgtgattgtattgacaaaaggaggtgaaatgtcctatcttgaggctaacttgagtagtaataatggtttgttacagatgtgaaaagaatgagacacatgattcacaaagaaagtacatcaatagtgatgttaagaatgatattttgagctggaggttgtggacaggcccaaagctctgatccttgaataaaatgcatgatttagtgccttccaatggttttcgtattcagtacatgtcaatcttgctttcaatccctaattgttacttttacaacctcttttttaatttcctacttgacccagtacaatatgaaatttcagtcttgtattttgtcataagttttcttagttaccatgcaccatgctg

SEQ ID NO: 30150 - DNA, 9762 bp, Oryza sativa
agatggctgattaatctctaagatgtgttcctgttaatcttccaagctttggaataatcactaacggtttatgacttcaagctaaatctcagactctgaaatggttctgatagaaccttcagatgttataggggtcaagcattggctgttctgtagtagaagtgtgcaataattctgctatatattatcagatgtaaggaatgtatggaataaacagtatgaaatttgtttcaacaattcatgcatattacaaatggacaacagtttccgtggactaataatgaattctctagtaaaaaagttaatgttcaagttttacactatcaatcaaaatgcacacagtactcccattttgccagcctcgtcttcgaattcattgaaaatcaaagagctaggagttaagaaaaaagaaacgtcagggtttttcagtacttatcatgaaacaaacaaatgatacccgtgctttaatgtggaacatattgataaatatatgttaaatattataaaatgatagatagatttgttaaaatattgctaaaatatatgctaaatattacaaatacttgcatgccaatttgtggaaattaaatagattacaaatgatgttgcatgtttgcatggggttaaatatgtagttattgctagtgggtaatgatgtgacatggttgcgtgttgagatttagagttaatgggctgtaactttatagaaagtataggtcaaccccttcaggatatagattatatataagaagaaagtcacaacaaacgacacaccacgtaattattggaataaatgggctaggcccaatttaattcaattaaaatatcaagagcccacaagtaatgttagagacaataatactgtcttgaaaatttaggtggaagaacctcgacttaaatagggtgatatggagattcactgttgaccagtataggtgatggttggactgccacgcgcgcacgtgccaagtgggcctcggccgtgggcgtggcgaggcgaggtggccgaccgagctgagcctgcctgctgctcttccgttttgtaacagatgagaataaagtcaccattaacaaatgaaattcattgtgttataacctccccaacaaatgagagattcattgtgttataacatccacaacaaatgagagatttattgtgtggtaaccttcacaacaaatgagatttattttgtggtaaccatcacaacaaatgagatttatttgtgtgttaatggagatgtctctctctatatataacgcaaggcagaggctctcaaagattgtgtcttcctcctgctgttgtttcttggcgatactctccttctgttcctgcgttgtctctctgtttccccagttctgttcgtcccgcatgcacgggtgatcggaacgagcaggtgcctccaaaactccgtccgcttgagaacctgaacgggtaggcgggcgatcaagtttttgggtaacgcttcaagcgcgactgctctgcatcatcttcaccaacatattgacaaccggcgacaacaacaacactggagacaaggagaaggagcctcccgtcaacaccaacggaggcaatactgcctcaaactccagcggagggctattttcggggtataacgtttcactattaccattcgttcttcgtttcctacaactgtcagtcgcaatattattgcgttctcttatctatgttgatgcttattctatattaaacatgctcatgttgtacacatctagcactgccactaaatctactcaaattacaaatgtcatgtttattgtcttaatattttagattaaaatataccgaattatgaccaaatttccaacagtaaacagataacctccaatgaccctcattcttgccacattgaactctcactcacttccaagaaaacaaacattgagaatcttcactgaaactttgaaggcatctggaattcctagcagaaggaagatgacagtgttgctctctagccatttgatacctgaactgggtctcagcagataggactgagaatcatcaggaaatttaccctctcggaaatactgtttactttctcaggaaatttaccctctcggaaatactgtttacggtaggttttttgcacaaaattaggatgtgatttatactataccgcccattttgtctcaagcagccatatgtgcccgaaggctgttctgttttacctaaattgtatcctccttgtgagggattcatacaatgctcaatttggtcataacctactgatgcagattggagaggttaagcttttggcttagccattaaaactatgcacaagtttagcagcaagattcaaactaatagctagttgtatgaaattgcacacgaagtaaatttagacactaaagtaggccagagagccagagtacaagcatatcttcatgtttaggtgaaattcatttttgttgttgttgtatattttgcaaatgcatatgcgaaccacacaagtagccaactcaagttcaatgaagccatagcacactatccatgcatgttactgtcttcaaatttaactgaaagctttgtactgctgcactttaaagcaaggttgcattcagtgaagatcactatattggagatcacaccatggatgaaagaccatttatatagccacatgtgcttatttttctcagtaacatatcttgttgtaagcaatccagactgttgtaaacctgcatggcaatatcaattgctgcttcagtcatatgctcatagataccaaaattggatgtaaggattgggaatcatcagaaaattagccctcgtaacattgggggagaagctgcgaaaaaatttctatgcaacacggactaatccctcatctctggaggcctcttctggtattgtgacaggtagctgacgaggatcttaaagcaatctccttcccaccactcatcctccggcctgcgcgcttgatggacgttggtgtggcaactgccggcaccaccggcctcctgccctggttctggtttgtcgcttcatggatgctgcccatacttctacattggtgaaatggggctttctcccccactggaaatatagtcatatataattcggcatattttaatccagataaataacatagtaagcatgacatgttaataatggagtgatccaatgattagtactaaacatgaacatgctaataacagtaatagcatcatctagtaacatatttaacactaatatgagtagagtaatatacccagtgaacactcgagagaatgatgaggcattggtgttgcctccgttgatgttgacgttctcggttttgcctcctacagtgctaccattccctcctcctccagtagcactggcaccgggtagacatgacgttgtagagagagaagaccttgacaaagaggatgcagtaccgagagtagttgtgcgaagaacacgctcccaaaaacataatcgctcacctaccaatgcaggttcttaggtggacagagttccggaggcctgctcgttccgagcactaatgcgcgcaagtcctcaggtggacggagttcgggaggactgctcgttctgagcactcgtgcgcgcaagtgctcagaactgaggaaaagcagaagtagtgcaggaacagaccagaaggtgtggtgtaccgaggaagaataggaggatcataggagagatgaaccgagaagtgagttctttctgtctatctcagaggaagtgataaggatgcgcgagagacagaggaacgttacaggtgtctatcccggaggaagtgataaggatgcgcatgagagagaggaacgttacggccttacggggagttcatagcgattaatgatgatgatttcgtccattattggagaaacatcatcattaatcaccgtcggttacacctttactttcagtaacatcaccattaatcactggaggaggaatgttacggggagttggtgtggtgtaccgataaagaacgggaggatcacatatgagatgaaccaaaaagagagttctttttgtctatcccggaggaggtgataaggatgcatgcaagaaagaggaacgttacagggagttgacacaatttattaatgatgatgattttgtctgttattgaagtaatgtcatcattaatcgctgtcggttacgcctttgctcatcaaagcattatttatgatgatttcgtccatttttgagtaacgtcatgattaacgccgtcagttacgcctttgctcatcaaagcaaaatgttagggagacaggtagccgtccgcaccgcactgcacccatgcttaggcctcggccatggcttggcttgacgcgcgcatgtgtggcagtcctaccatcacctcaaccgctcaacaagtgctctgaattagcagtgtatataaggtggtattaatcctttaacattatttgtcggcccatgaaatttactaagattaaatggggcctagccgatttaattctaacatgatcatggctacatatactggaattcaccactgcaccactatcaaagtctgtctgcagtagtggatataggatttcaagctaggctgtgtattcactcaaccattgccgataaaattcatcacagggaaataaataatgttaggaggaggaatttctagataatggaataaatatctcggtcggcctctacatcttgcgatatcaatgaacacaacctcagcaaccacaccatgaaacagtaaacaatccaatagaaacaaacttcttaataataatcacttgtccacaaatcctatgttattatgaagtaaatgcccactaacctctaaagttcaacatgcaagcatgtcatatcatcacccattagcaattattatctagagtattttaaattacatgccagtgtaccatattatcacccactagcaattattatctagagtactttaaatatcatacaaacatgatatatcattttcaattttgttatatttttagagcttaatatgcaagcaatgtcaaatcattatctccacatcattttcacattatttcatcctatacatatatcatatctgtaatgtataacatacattctttcacatattccgcaacaaagcgcggggtatcaactagttctattaataaacttccacccatgattggtggaatgttcccatcaaaagtttccaaatgaaaacgcacacctttatatttccattccaccttttgtatcaaggataaagaatgaatctagtgagtaaccttgagattacctgcatggcaaaagtttgtacaggagatatattgcatattgtagttgattgtattgagcttcagtggccagtgtatatattgggtacaagagataaggaagactactatacaaatcaaccatattataatatctttctaactatcatatactctaacatcccccatagtccaagcatgagcagcttagacatttagagacttagactggagaataaaccggtgatagtgctgaacgatacccttgtgttgttgtcgaggggagccgaagtgaaggcacggtggagtcatgattgatgtagttgtgtgcagagtagccatgatcaaagtagccagagtcgggttgccgatgatgtgcgaggtagccaagctataaaggcacaaggagcgccatggagtggccatgttggatggtgtcgtggaccaaggtgtgcgtgaggactcaccaagaacgaagatggtgacacgatcacagtattcgctgaggaagccgactatgcattgctggggaacccatctttactcccggtttgcaaaccgggacctcgaatccgggacgatttttttattttttcatgttttttgctgcttgcatattgatttccataaatcgagttgctctctacatccgcaaatcaaagattcacagataacatcacaaagcacaaataacatcacaggtccacatcacaaattctcaaaaaaaatacatcacaaattataaaaaaaatacatcacaaatgcatcatagattcacatcacagatcaaatacatcacaatttttttaaaaaaacatcacagattcgtatcacagatcaaatacataacaaattctaaaaaaaagaattcctggtgctgccgcctgccgcccgctgcctgctgcgtgccgacgtagagggaggagtggacgaggaggagggcccccggcggctcggcgagccgtgggctgctgcctgccgcctcccatccgccagaggggagggtgctaccacccgctgcgtcccgcccaccaccgcctgtcgccactcggctgagggctgacggagtggaggaggaggaggaggggatcggaggagaggggagaggggaggagaggataaggaagatagagagagagagagagagagagagaagaggatgagaagataaggtgcgcggttgcgatgccgaggagataaggaaaagagagagagagagagagagatgccaatgacgtgggagagatatttatcaccaaccggaactaaagtttgttgggggcttgatagctattgaacaggaactaaagatcaaaaagtacctataggcttttgaatcgggactggtgtgatttttgcatgacccaacaaagatcacttctccagtagtgatggaaccatggaggatgagacgtcaccgggcttgccaaaattgggtgacaacttaaaaggaaggagcacaatggtgttgcaaataccgtgtgaacgaggtaggataccagcatgaaccttacaaaattgtcgaattgaactagaagagaagacctccaagacagttgcgcagtggtgttgccaataccgtgtgagcaaggtaggataccaccatgaactttgcacaattgttgaagtgaactagaagagaaagccaccaagacacttgtggtgcacagggtgatgtaaaggtggtgcacaggattaggaagaattaggaaatgagctctcgcaccatgggggggattttgacagttgagtttgtgcagatctatcaaagatgccaaaccaagcctgccagccagtgaacctgcgaactcattctcaaaatactctagaataagcagaaagataattatccaccactgggatttatgcaggttgagagtgatttactgaaatacgccatcataaagaaaccaaatatcaatgtttttaatacaaatattaatgccagattcataaacatggaaatgcatgatggctcaatcagaaaactgattaatctctaaggtgtgttcttgttaatcgtctgatattagtacatattactaacggtttgatttcaagctaaaccttggtctccagaatggttatcaaagaaccttcagagataaggggtcgagcattagctgttttgtacatacaagtgtgcagtaattctgctatatatattcttttgaacaatatgaagtttgtttgacgtcaaggaatgtatgaagtgaacaatatgaatttcgtttgaacagtgcgtattcagatggatcataatttccgtggactaataaggaattctgtaatagaaaaattgaaggttcaactatgatttctttgttactagcaagagaactggtacttctgctatttgttaccagattttggaaaccaaaatatctgtcatgtaggatatgtgtaggatccaaatttgatataatcgatcaaaacgcacacagtactccaattttgctaatgtaggatccaagtttgagctgatcaatcaaattccttggaaatcaaagagcatgtggtgttcctgtctttatttaaataagtgctgtcaggagccagattatgaaatgaatgtcataagaatggacgcatcatatagacagtgaatggccattatatgtaccaatgccctcatctcttgccacacggtgaacacacattccgaaaaacacacatcaagaattttaaatgaaaatttgaagcatatgaaattcccagcagaagaaggtagcagtcatgctctagccgtttgataccccaaatttgtgtgagcagttagcactgagaatcaccaggaaatatatactcagaagaatcttgttaggtggtgatctgaactataccatcagttagggatgaatcgaggttactacaaaaagaagtgttggactcaagctgccatatctgacccaaggttattcagctctgatggttgtttgtatgccaactgtcatagcgcattggctcatcccaattcgttgaggacatgatttgaaagcttaacaacatttgggatcttcaaaacttcaagatggcaatcgcccagtgatggaaatattaagctcttgtggtcgagccattaaaattatgcacaagtgctagcagacaaattcaaactaatagcctgatttctgagattgcattcaaagtaaattaaaacacacgagtagtcggagagtcggtacaagcatatctacgtgttttggtggcacttatttttctgattttgtagatttatatcagcatgtgaaccaagaaattatctaactcaaattcacacatggaggtgtgcaattcaagtgccaaatttcttagttgtttaacagagaatagcattcgtgaatcatgataggctgaagccttgaagggatggaacacatggagcaacgcaagaaacaaaactcaagtattaatttcacttctgtaaataactcgttagttccacagtaattaatctgccaaatctctccagtttcttgattcatatgcattaaatcagatattttttttaactttgatctgtaaatcctctatgtcagtaactttgatattgtagtttttcaaacacttcacaaacgcggagaactcgatcaaatttgtcctcaatttgatgcaatcattcatggattgggatgcgtcaggaatatgctcccatcatttcagggatgcaactgacagtgtactgctgactaatattccattcccagggaagcaccacatctagtactagcttgcatcactataatcgccaaccataggtagcttgttgatgtttcaactgatcttaaccagatcactataattgctgtagtggaaggactaatgcaattcatctctttatatttgaactgaacgtccaatgcaattcatctcagtcgattcagagatccaaacagagcctaaagtatcaaatgtttgatcgtaataagcaagtagtataaatagatacagatcacaccgtatgtaaaacacaccaaaaaataaaaaaaccaagggagcatgttctacaattccatgtaggccagctgtccaattccaacgtgaagctataaagaacacaggggtttttaattcctgagagccaaagcattttggtgtctaaaaagttcaagaatgttgctccaagaaagtttaagaacacattccaacatgatcagtaactaaagcacgaaacttgaccagtctatgtataataccataccaaacgatgatccattgtcttttaacgtttcaaagcaccctctccgtttcagattataaatcatttgactttggtcaaagtattttcaagtttaactaagtttgtaggcaaatatattaatatttacaatactaaattaatttcattaaatatatttttataatatatttgtcttgtgatgaaaatataaattcttttttctataaatttgatcaaacttcaaagtcaaaacgacttataatctaaaatggagggagtacttgattatggtttttctttgtcaagatttcaaataaccgtttgacaggttgcacatttcactatagacttgtcaatctcaaatacatgatgtt

SEQ ID NO: 30151 - DNA, 1208 bp, Oryza sativa
ggcaaagcttttcgataacctcgcattggcagtacccgctccatgaacttaaatcctcatgcactctaggcgtccatgtttctagcagtgagaggagttctggcgctcccgggaaaaaagaagtctcacacgcatattaaattatggttcaagttaagttctctctctcacacactcatggcagtcctaccaatggcaacaccgatgtagggcacgcctctcggccctacctcaacggctgtcccatcgtaacgcacctgcctcactcaggggtgaaccatctatgcagggatactgcctccgctcggctatctaatctgttaggtctatacccattcgagaagtacggttgtacgggggtcgtttcatgcttaacttcatggctcggtccttaattaactggggacggtactagccttttccagataccacccaaatcctccatccgccccagtcgaaaacagttgttttaattttatttctcctttcacaaatcatgtcatcaacatcatggtaatgtggcgctcatgtctccacatgccgcatctcaattaccttcccgaaggtaattgcccaagcatatagcatttgataaatatgagtatgcatgattctagaatagcatttctaagcaattgtcatagttgaatagagactcatacgtaaacatggttacaaagatttaagggttaacaataatcaaggcatggcataatcacaagtgggatgttcatcattgcatgcaattttatttgtaaacaaaataatttcgcaattgggatcaacatgttcaaggaatagtgatgacttgccttgctcaaagtcttgcgggtcttggccttcgcttggatccgcaactccctcaggcgctatagttacgtgcaaaaattgatttgaattcggttagaattcaaataaaaatccaaataaattcaaatgaaagtcgaatgcgaaagtcgattattcgcgaactaaggcaaacccaatttcgagttttaatatcctaaactattttgcgggtataaatattttgttgtcctaagtttttaatttaatctacccgagcattatatccatataataggttagaaatttctatcgcgagctaaatgtcggacgaaatcctagaaatattatacgatttaatttagtctatgactaaatgattaaatataacacatggctaaaatccctagtaattaaatccg

SEQ ID NO: 30152 - DNA, 667 bp, Oryza sativa
ggaaagatgatgccatatcaataggataccatgaaaagttccattgcttgatgcttcttacggcttatgcttattgatctgcaggaggaaaggaacaccatatggccacataaccctcaaaccggatggagttactgtgtgatgattccttcttggatcgctcagacacctgaagctagtgcgactgctgacaacttcttgaaatccatagttgtgagtactgcttatattatcatcacgttatttttgtcagtcaatttggattgacgtacagattggaaatgttgtgtctctggtattaccgctatgctacaacataaatgtgcttggagtggattacaagtgagaaaaccttgttagaccaataaaaaggacaaaagaagttcagcacttatcaacgaagaactgagcttctttcaaaactatctcatattgggtagtggatgccaactttctaatgtattacctttttattgttctttcattttgagtaaatcgtgtcactttccaatattccaccatacttatcaaactagtttattaggctgctggactcacaaaactgtacttttctttagatcactaaagggtcacttttggttgttagcacactgtcctgactcttaatgacaacatggcgtgttgacgcacccccctgtatggggtg

SEQ ID NO: 30153 - DNA, 951 bp, Oryza sativa
ttaacccaaatttccagactattttgcgtattaaatccctgtccaggaccagccagggtacacaaaacgacaagtaatatacagttccaaacgtaaaataagcgtaaaatacttacagaagaggcacttagtcctcacaccgaaacaaaagcagcagcagcggaaaaaaaaacgatcctagcggggcttcagctccactccacaggccaaactcaactggggtctgagccttggtcctctaactccatcttcagctcagaagcactacacttctgaaaagggggaataatagcaaggctgagtacaaccaccgtactcagcaagccacaccaacgatgcagacgtgcaaggggatacaaggatggtttgtggctatttgcataaaggcggttgtaaaacattttattgagcaaaacagtaaaactgttgagtaattaaagtaacattaaatctccactgatcaacgctacaccacgttgaacaggcccaaccaacccacctaaactacagtgtattaggtcgatttattaagtgtgagactaatcacggtgaatctggtcgaccgcccataaccgtgggcacggctattcgaatagttttactctgatcagaggtgtacaactgtacccacaagacacagccccacgacacgttcccgtgcgccgacatgccaccacgacataccggaaagaggccgtgacaggacccttcgcataaccccctctaaccgatcgcaccacaccttagggttcgcccccgtccccagcagacaacgggcagcccccctttcgtgccgcggtgaatccggaagccgatcaaccggacaccccggccgacccaactccatcacgcccaccctcgcctgggtacgtcgactagagaaaagctacactacaagcccagccgttgcccacgctggcttgtggtaagtacgatagggtaccgagctcg

SEQ ID NO: 30154 - DNA, 618 bp, Oryza sativa
acgtcgacggcgtgtgaaaggaccggtgacggcgtgcgtccggcaggggcgccccaaggtgttcgataaaatgtcgataagggagctcgtggcgtggagctgacaaatctagccaaacactttgacaccaacctcagcttctattggatccagctgttggtatttcttacgatcacagataaatccgcaagcgcacagaataccgctgtagcacttcaccttcgggtgacccaaaaaagatatcgaactcagggaacgtgtgtaatctacctaaggctaagactatccaaggacaacaactgatggtaggtaggctaggctagagatgactttctatgagttttaattatctaaactaagcaaaggtaatttttcaactgatggtaggtaggctaggttagagaggattttctatgagttttaattatctaagctaagcaaaggtaatttcctatttgttgcttcgggtgccgacccctgctagtctgctagcattgtttcggctatagctctatgatgtatccgaacgtggaggattaggattacttggacgggattcagggctgtcaccacctgccgcctacctctgacaaatctgtgggatacacaacaaacaaa

SEQ ID NO: 30155 - DNA, 7716 bp, Oryza sativa
agatgaacagtatacgggacgcaattagactttcgtcttgggctggctgaaaaacaaaggaaagaaagaaagagaaggggagctcggctgggccgacttgggctgcacagcacgcgcgcgaaggagagagatgttgggctgaaatcagcccaacggcttaggagaggatttaacaactttccaattaaaataatcactgaaatgatctttgaattgttaaaaatacttccaatgctcaaatagtttcaagaaaaatcctgaaaatacttggacactcaaagtacttaaaaaaattataagcagaccatttaatgattaatttaatatgtgaataattactgaaatgttctttgtatggttaaaattaagagttgagctccgaaaaatccgaaaaaattccagagaatataattaaccatggagaatttaatagaaattaaatccagccatgctttttatttagaaaattttatttcccacatttaacttctcttgtaaattaatgaacatttaatataacttctaataataatttattaaataatttataaatcctgaaacgaaaatcaggatgtgacaggaggggagtgagaatgacatgttgggcccacgcggacccctccattttaattattttttgttgtaactgacatgtgggcctacaatttttattattttccagatcacattgccacgtctttgccacgttggatgaagacttagttaaaggagccacgtaggcatcacgtcaaccaaaaccggggtcagcactaccgagggatctcgtttgcactagttttgtaaattggggatgtgttgtttccggttttttggttcaaggatgaaaatcgtattcggtgtaagttaagggacctcgaataaacttattccttttgggtacatgacatctcatatcggtgtttgctgtgtcggccttatgccagcatcctgcatcattattggtgttacttctgttattattgatatgtctgttgaaagttggaaccatgtatttattgtatctctctgtatcctctttgatgaactaatggtttgtgtacatttctgaattcttatttatagccttatggtccagcttcagacatctgagactgatagctcagtcaataaattcagacaactcatctcacctcgtgaattgtgcagtaatttagatagtttaagcattatggatatgatttcgttactagaggtgtaatagcgtgttacatcgggtatattatatagggtatcgtatgggatgttcgggcactaataaaaaaactaattataaaatctgccagtagtccgcgagaaaaatttattaagcctaattaatccgtcattaataaatgttttactgtagcaccacattgtcaaatcatggagcaattaggcttaaaagatttgtctcacaaattagtcacaatctatacaattagttatttttcagcctgtatttaatacttcatacatgtgttcaaacgttcgatgtgatagggtaaaatattttagggtgggatttaaacaggcccataatctaacttttttattattatgaacaaaacaaggaccataattgaggtacaaaatgtgcctttttttctcttttacttatatcatcaaaaatatattttctcacattatccttatatcatcgcaaaccatcctttttccattattttgtgttctaacatgccaaaatcattttgtatttaccttctcgatattcgatagacatggaagtattatttgtattcgtcttcgtccttcattataatgttcacattatggcttacttttccatagtgagaactattcacagtccagaaattatacagaggccaatttgagtatttctgtaccaactatttgccttaatatttatgtgctattaatgaagcaccgatatgataggttctctagttacgagtgtatatttagtactcctgtatgttgattatttcatttggcaattttcaggtaattataaatcatctgcataagcagtgttatcccccgaccagtgattgacccggtcaggtcttcggttgaaccgtaggttttctttgcatacgttcattcagggattatgggcttgcttactttgacgttactaccaatcctattaaattttgatatgagtaaattgcatattcacggtacatcaacttagtaagttggtgcaatttagtgaaggaatttgagaaataagcatgctatgacaacaacatgctaagtggatgcaacgtagtacaacaacttaataaatgagtttatgggtacgactatttgaaaggtgggtgtgattttgatgcaataacttgagaagtggtgtaaaaacttaattatgtatttttggctatatgtaaacagtttttacttacccagttgttaataaacttatgtagatttgtacaagcatattttctttgtcattctagtaactaaaagtctgagtaaaaaaatttaaaagtaaaaaaaattactgtgtagaaattttctagttgatatttgagatggtaaaaaaaaatctaaatcaatggtgcaaattaggtgaacaatatattcttacagattacatcaaacattataagattaattatatctacggaattgctatgtgatgacatattaacatcgtgaaaaaacttacatagcactcattaaccaaggtagcacatatctagccaagttattgcaccaaaatattaaattatcaaattcttgtattaaagtgcacccacttgctaagttattgcactttagacgtcacattcttcttgtcctaaatagaacccacgtatcaacgtgttgtactgtgggtgtaatttactcttttgataaagtaaaaaactgaacttatacatatatagcaatgctatcttaccaatatttggtaactttacggcttactcggtttggaggaatttgaatccataggaataggaaaaatgaaggaatataaatgtttgtacacatcaatctattggaatttttctaagagatttgactggatggaataattcttatgtttcctctatataacttgtagaaaaggaattttttttctttggttttcttatacttcaatcatataaattgaatgacactcataagaattgatctttaggaatccaaattctttgtttttcctccaaaacgaacaagcccttacaagatttcactattgaaaattccctcaaattgtaaggttttaaactaaacatatccaacagtattaaaatttgataatgtacaaatgtggcaaattttagtagggtaaaaagtggctacaaagttaacaagcccttatatatgattggttggttgtatcacgtgggtcagaaaagactaggtagttctatgggttttcgctggtctaaatcgactcgactccagagatattcccttcgtcctaaaaaaactcaacttctggaatttgagttttatctcataaaaaatcaacttctaacactctatctactctcagcatataaaacgacaagttttatcccttaaataccctatacctacctatcactattactactttttctaataatgataggtattttggtcatttttactctccactactttcttaggattatagggtttgatattttgtgggactgagggagaagtctaatagcctggactgaacaggtgaaggtgttaggtctggccaaatcgtggtcctagcgtttcgagtgacttgaaacgataatttactcgttattctttaaaatgattttcaaattactaaactgttattgtgtgaaaaaaattatatagaaatttctttaaaaattatattaatctaattttaagtttgtaataactaatatttgattaaaattatacgctaatgacttatctagttttttctcagccaacactgctggagagatgcacatctctcccagttcgtaaccccctttattcccgggtaacgaaccggaagaaaaaatccgggattaaaaatggatttttagtcccggttggagactccaaccgggagtaaaaataaaagcgccacgtagcgctttctctttctcttttctttttttattttttttgctactttcatattgattttgcactgaagtcaataataaattcatccacacagacaaaatcattcaacatcacagattcatttgtaacttcatagaaatatctgaaaatcatccacaaatttacatcacaaaatcatccacaaatccacaaatccgtcagcggccgcctcccatccgcgccgccttctccctgcgcccgccgcctctaccaccgcgccgtcgccacgcggggccgctgtcacccgccacgcacaggcttgcatgcctgcagcgcgacgcgggcggatccccaccacggtcaccgcctgctgctgctcaccccgccgggcgcggccctaccgccgctggccgcctgcccgctgccgcggatgacaggaggggaggggacgagaggaggaagggatctgaggtgttggaggctctcaaatccaatcttatctagatattttggtgaggaggaaagtctcgtctgggacttaaccgaacaaatatggtagagaaatatttactcacggttagagttaccagccggaactaaagatggattttcagtcccgggagtaaagatctaaataatctttaatcccggttggtagtaccaactgggactaaagtggtgatctttagtctcggttggtatcaaccgggactaaagctcctcggccccctgacaggggatgaatcaggactaaatatcatctttagtttttaaccaggactaaatatcaaaaaaatttaaaccgggactgaagaacaccaaccgggattaaagatcaatttttctttaactgggactaaaaacattttttgttagaaccaaaactattatgaaaatcagccgacccagtaaagatcacttctcctgtagtgcaaaatgctaagtagaacttaccctaataacacaatacaccagtactgtacaaggttaaaagacccataaaattgtcctgaattacatgaaaaataataaaagtgaacagcgatcaatatttatgcgtataatatgatatttaacaagttagtatctgaatgcatttactttcggctgcaaaatgcaaattacaagttgcttttagaagaagcttgcacatatattttcacgccaaaattggaagtttggttgaaattggaatgatgtgacgaaaaagttgaaagtttgtgtgtgtaagaaagttttgatgtgatggaaaagttggaagatcgaagaaaaattttggaactaaactcggccttatatagactttacgcctttacttgccaggaaaatgctctctgttgtacctgggcacattttataggtgtatgctataaaattgtgcacatcttatgagtgtgttaagttcacgctaaaattggaaatttggttgaaattgaaacgacgtgatgaaaaagttaaaagtttatgtatgtaaaaaagttttgatgtgacgaaaaggttaaaagtttaaaaaaaagtttggaactaaactcggcttaggtatctacatatgtgaaagcaacaagctttctcaaaaagccaggtcatgtgaataataatagccccctaggatgagagtaggaataaaattgggccgttggatccatttgtgttataccaatcacacatcaggaaagttccagattaataggtcctatgcatcgatcggtgtatatacatatagtttcatatggtagtagtgaaagcaaaactagtatagatggagagcaccagcagctcgtctcattgacccgcaactacagaaatccatccaccgtagtgccaattctattaggccctgtttagttcaaaaataaaaaattttatgctaccatatcgaataaattggacacatgcatggattattaaatgtaggcaaaaaaaaccaattacacaaattacgtgtaaattgcgagatgaatcttttaagtcttattctgccatgatttgacaatatgattcaacagtaaacatttgctattgatggattaattaggcttaataaattcgtctcgcagtttcctaacggaatctctacgtttaatacttcaaatgtgtgtccgtatatccgatgtgacaaccaaacccaaaaattttccccagttaaacaaggccctactcccttcatctcaaaatatagctacctttaatatatataatttatcctacttcacatattccttcatctcaaccaactacaaccattttctatttaatttcatcatatacttctttatcttaatcaaccataaccttcacagtttctatcaaaaacaaaaataaaacacaaccctcccatttaattttattgccctctccttaatcccttcaaaaaaacataaaggtatctactctctatctacaaatataagcatcacaaatgtttaaaatttattcaaaaatataaggatttatataataacttaccttcaatctaacctcccattaaagaaaaaatatcttactctcgactattttctcaactcctatcatttctcggtaaagggatataaagttttatatgatcgaacataatctttcttaaacaatataaaaatccttatatttgaaaacagagagaatagtctcacaaaaattatcctgtaattatcaagatcagtcgtcaactcctatatgctggttatgccagcgctcagggtcgcgcgaagcgggactgggtggctagtttaggtgcttctagctgcaacaacaaaaaatgcgaacgctagctgcaacaaaatcactgcaatgaaagtaaatctctgataccgatttctgggtctaggctcttgtttttcattaggcgcgtggcaccctacaaatttagttagagctcactcaaaaactgccatgtgtgatgggtgaagtattcgcatcgaaagagatcgggaaaaaaaacgtaaacgtttgcctgcgtgcgtgtgcgggatgggctttgcatctagctagactgtgcgaccttgggcctgggcctggccctggcgccccacggccttttctgcaatatgtaccgcagtccgcagtactggtgcatggcctcttcacgcagcggtaagcatgttcgttcaaaagaaaagggaagaaaaacagcgtgaaggactgaagtgtatagagccagtatagaacaaaataatagtaataaaaagaaaaggagaaaaactaaaaataataggattatgcaatcaactacaattactcaaatgagggaaagtcacttcatgttagcatcatgtgtttctagaaaattagaaaaaatagtgaaattaaatggaaaaaaatatagcagcagcaaggattgtgttaggacaatcgaaagcctccaaataaatacaatctagaatgtttacttcaaacgaggaaaatacctaaaattctatagaatggaaagaataaaaagtgaaattagatgaacagatgtattctctgttaaccgacaagttcagcactactttcctattaattcagagcattttgtttttcctttattaatcctcaccttatactttttctggatgctaggaatccatttattttggaacatgggtaagtaacgacaataattttgctatattttttgtttgtgaaacacaatgtagatgatatacacacgagcaccttttaagactaggccgtcagacatatatttggattgataaa

SEQ ID NO: 30156 - DNA, 1741 bp, Oryza sativa
attgcatgataagtagaagaaataatagtaaataaaacttgttacatattgagcgcaaatcaaacatggtgcaaacaagagtctacacaagaagtatccttactctttgcacctggttagttaagaatggaagttaacacctccaaggctctccaacacttgtttatcctcaagataaaatatgttcacctatataattcacctaatagcacagaaaacaaacggcaaaactcacttctaagtaaatgtgtttgcagctagctcatttgacatacctttgagagtttgcatgtgtgcagctttttctttgcagaatttatcatgtgttgcttgaaacttggtgtactcgttcttcagtaaaccttcacactacatcaaatacaaatgaagctgacattagcaaaaactaagaggggattgttaccagatgagcatcactgcattggatacaggtcagtaacctcctttgaagtctttgatagaactttcagataattttgcctgctaatgcaaataaaaaacagttgtcagagttcatagtatatttgaatgatgcacagtaaacatttccaagaattagcttcatattcgtgttatcggaatgagtcaaaaccactttaaatctcaccacagatgtacaacaaaaaggaactgcactcatacaagtagaagttcacaggcaagtgaaatgaattggtccttcacctttctttctcaacttgcccttggcatcctgtacgatagtctgaatttctgttgcaacactgaaaattgagcagaacagttagtcatgtaatctaataatgcacgtggtagataacttcagaaacaggccacattgatacaccacattaatattgtcatgtggatatgaaaaccatgttagatgaagctatttttccatatcactggtctcaactcattttccatgcttcgggagtgattcaattagcgcactctatatgcctcacgtctgctaccttgagtacagcctacgggagatccaagacttgcacagacttctacagtctaaaatcagattcaggagataagtaacataagcagttggcgcacttgcacatcctactgtatcactggttcataaaagatagacctaaacagtatctgttcacaattccacagaaattaaagtgacgtggaccaactactgatggtcaacacaacagaactcataacatatcattggtgtatagaaacttgagcacaattctgcagaaattaagcaagtgtggatcactgatgttctgtgtgtactagcttgtgtatcctgggactggtacatgttgcacaggtacagtactgtggccgccggacccacgaggtttgggggcgccacatagggtcatatatgtatcgaggaagagctacgtcgaagaagagctacgcctcctgcgccgtcccttgtgtcttctcctatgccccttaggtgtagatctcttgtcatacttagcatccacaagtctcttgccaactaatcttccatcaaattcaaacgatgtctcaatgtcggatatagtgatgaattcttcccgcccccgctgctccttactcgggtggtcactccccaccaccttttcttgtccctgctgctggtcacgctgacggctcctctgctggtcacactccacactcctatgctggtcacgcttcacactcctatgccggtcacgctggtggctcctctcctggtcacgctccacactcccctcctggtcacgct

SEQ ID NO: 30157 - DNA, 1521 bp, Oryza sativa
ttaaaatacggagggagtattaattagtacaacttgattaacgcgcatattgatcagtgcttgttgcatgataccccaagaaaactttaatttttgccactcacacacatttcctccctccctgcatgcgatgcttactgtttaggaactgatcagaaaggaagcaactgcaagcagtcctgcatctcatcttctcaataaagctctcttcatcagatgatgccaatgttaaatacatcaccttgcatgctagctgctagtgaggggagagagccaaaaaagcaagttgtgttttctgtcttgattatggacaaggtgcattttggcaaatatataggagatatggaatgatcatttgaaaaatatgttgggaatggaactttgggggaaaccaatactatctttagatataaaaacattattatgtcgccacaagagtaggaaacaaccaaaactgaacatgaaaatataattgattatatgtatatatgagatctagagctaggttgtctaaaacagtgaactaattaaaataactatgcataaaggattgtgccacaacatcagtaacttatgtattagtttaatttggcaaacatttgaataagaaaatggctgatgaatggatgaatgccaaaattcaaaatattgtgaaatcaatgttttttatttatattttttgtgatgaacatttggcatgagaattatattggttttgatatttggtagatatttgtctgtggtgagatggttaataatgatcgtacgaagacaggagtttgtttgatgcttgtggtcaaaccggtcagggtgcgacggttagaccggtgtagtgcacgcagacggcagactgaccggctagcccggcagtctggccggctggctcctattaagagttggtttcgggttgtttctttggatacttgtgattacttcatgcaatttctatgtgtgtagtactattgtgcgctaatgttgagccaagttggaaattaacttgtgctcaatatgtttcttgttcattcatgtgtaggtgtgtgatgtcttgagagagtgttgccggtgatagatcgggagttgacttgggagaagttgatgtccggatgattaggagatcatgtgggacttaggctaaagaacaatgtatgtggtggtgaatattccatatcgcacacaagagagattgtgtgcgtatggaaagttgagtcaaatttggaaggcgtccaaatttgggaagattgacatttgaattgtagtaggataggtttgttacttgtatggttaggtttcatattggattagtactaattattcatgtaggattcatggcttttgggctgccaccttagggtataaatagaagaggggttgaggtctctcggcatcgatttaatttgtgagacaggattgtgagagaggagttgtgagaaaaattagggtttagcgcaaattttgagtttagtcgaaagttgagagaggggtgttgttgtttcactttttaaacataattataagcaataa

SEQ ID NO: 30158 - DNA, 6108 bp, Oryza sativa
  unsure (1)..(6108): unsure at all n locations
tgatggtgcacctttaaaatccaatcaatggagtggatgaacaattgacaggagtgacaaactaccatagtaaacaaataagctagggacagtacagagtacattgtcatggttcaagcaaaaataaaagcaagtagatatctatactccttttaatagggagtagtggcggtggtgagaggtgaatctgccaccacccccaccaccaactccctacttttttttggaatgaaaaagaagggaccctgcatgtcaacactcctaccaccgacttcctactttttgtggtaagaaaaaatagtgggttaatgataaatttctttaactagtcttctgcccgtgcaacgctacagcgatattttatatacaaactatatacaaatcaaagaactatacagtatatgttttaggaagcaatgataataagataatttaaattcacacaaaaaagaaataatagagaatcattattgtcaataaattatatagcatgttggacatttggaatccatcctagtaatatatcatttggaatcctgcatgtgaaatacatcatgtttctgttttgttttttttttaagttgggaagagaacatgtttctgaaattgctcatctgcccgaatggctcgatctggaaaaaagaaaagcaaggtcctcacagcccagcatgtttatagtatgaacagtttcaatcaaatacactccatcaatttttctaccctgctgcatcaacgaagacatggcagaagaggaggaactgaaggagccactcacttaggctaggagttcagatggtgaattcccaggacgatggtggtccagagccgtgtgcggttgggggatcagcggcgacgtagtcgtggatgacgggcggtgactcggtgaaggcggcgatggaggatcggcgggcggcgtggtcgtggtcgtggtcgtggtcgtggtcgacggggatcggcaacggaagacgggcggcaactcttggaggcgcgacggagatcggcggctgcgcggaggacggggatcgcgaggagctagggtttgcgagagagagagagaggggggatcggagccgggactgggcggcggattggatcgacgggagagaggcggcggtgggagggcagactggggcggcgacgggagtcgatagcggcgatgcgatgcgggagaggaagcagcggatctcggagggaggcacgggagagagagagaggcgcggatgcggtgcgggagagagggagttgcggaagggagaggagcggatgccgtccgatgcgggagagagcgcgatcaaagggaggtgcggagccatccgatctaaggttgcgttccgaacagtcttccctacacgggcaggatatgcgcacggaaaacggaacggttctctagtgtgtgattaattatttgctaattttttaaaaaatggatcaatatgatttttttaagttactttcgtatagaaacttttttaaaaaaatataccgtttagcagtttgaaaagcgtgggcgcggaagacgatggggtaacgccgaacacagctgtatccacaaatgaatttggatcgttggatgtgtcacacgataaacaaataaaactatttgttgaattataaggtaggtagattaaacggatgggcaatatgctagttaatgcaaatggcacaagacaagttatgttgtgtgtcaaggacaataatacttttcttttcttcgatacttcgatccagacttcaacagtttgtcaccataaatttacagaaagttgattttgatataaaaaagactactgacaagttttacagccatgcataactcatacagagtagaaggcagcattagaaggtaaaccatttccagtagatacaagaacgcccagatattgagcataatccactccaaatttgataatctaaacttgcaaactatacttcaacctaaccacatttatcggctacatatgatcgagcagtgccattgtttttttaccctgaggtgtcaaatgtcataaagcgttatctcctactcggcattaagcctgctaatggactgggttaaatggactgggttctagtttggattatctttggttgggtgaaaatgggttgctacttcaaatggattggatcggtttgggtgacacagagaagtggattggtgcgcccaggatttgattcggtgatttccggttgaaaatggatttaacccatggatgtatagatggccaaaaggcccgcctggtacggcccggcccaggcacggcccaccagccatcgggctggcacggctcaacaaagtgccgggccatgccggcccatgggctgctcctctcgcctaggtcgggccggcccgaaggcacgagtggcccatcgtgccttttttttaaataagtctattttacttccctcctctttgggtcgtgacatatatatatatatatatatatatatatatattttgctacattaagtctattttccctccctcctctttgggctgacatatatatagctaaaataagtctattttacgtctctattctttcgaccgtggcatataatatgtctatttttactccctattgtttatgtgtcgggcttggcctgtggcccatcatgccttgccggcccggtccaacatgccggtggaggggcccaggcacggccccaacccccatcgggtcgtgccgtgcttgggccgggccaaaatgtcgtgccgtgggccgggccatcgggcctcgggcctcgggccttttggccatctatacatggatagcaagtggattcctttaatggactgagtctgactactttctgtcgtcctctgccgcaccgcacatgacctggacttggcggctgctgctggcggagaggccgcgcatggcgccacctcatccgtgggagccgagggccgaggcagccggtacgtgtgcagttgcatctcttcaaactcctcccgctttgccgcctagagctagccactcttgagccaactgggcttctcgctgttgtcccactgctcccacatggggacagggcctccttgccgtggccggtgatggcgcgctgagcctggacaacatctactatggcggggacggcgccgctgggcatgtccaccacatctaactgcaggtgtgcgacatgtacgagggaccagctgcgctgtcggcccgtcgctcgccgccgtcgtcgaggagatggtcgtggccgctgctgttgtggtgagctggctggcctcacgctgcgcctgcaccgacgtgacagcagctgagaacggcgccggtgtcctgtcctccgccgccgccacgacgccacagctacagccatgcagcacatactttgtccggctgcgtcgccgccagcaaggacggcatggctaatgaaggatcgaagtggatttaaagtgggtttaaatggtttggaaggtggattgacaccataaaaagaggaatgggttggttcggtttggactgacgaggaaaatggattggtctggtttggattttatgggatggatagtggattgggatggtttggatagaattgttagctgttgtggattggattcgatatggggtggatcttgccctacattggactctagaccctaggccatcactctgtttattgaccttatgaacgaaacctccccatgttgccaaccaaaaattggatcaagctacagcaacatcagaacagagtaaactgcaagagaagaattaccacacgagctaacagcaacggagcaaccccatccccatgccaaaatccttgtacatgccctttcccaagacgaaaaagaaaaataaaccgtgctgatgtgaaaacatctgcacaacccggattaggatcctctgacgtgaagtcagagggacgtggtgactgacatgtgggtccccccgctngtggacccacatgtcagtgaccacgtcatggggcagttcacgtaagaggaacggcttccgcacaacccatatccgcagcacagcagagccgagcaagccggattagccgtccgttccaaggatacactgggcatttgatcgcatggctggtttacgagatccagtgacatgccggcggcgtctacagcaaccccgcatacacacacggggatcaaatcatgggaagcgcaagagatattgtgaactggggggaggagcgtcgggagaagggggaaccaatcaccacggaggtcgggagaaggggggaaccaatcaccgcacacacgcaccgtttagcagcttaattgagaagcgtgcgcaccagaaacaacagagtggagccatggaggttgggaaccggccaccacagacgaacttagcctatgtgtggttaatgctatttctattttctctcgttaagctatgtcacttcaattgtttctagctcctagatgattgatctatggtccaaattacttcctccctccctcctattcttctcttatgaattcatatcactttgattttatctttagataattaatctatgttacctttcttcttttccttctctcaatgagtaatatcacattagttttgcattcgaatgatcaatctatatatgatttaaatgttataagccacattatcttagttgtttatagatttttctcaatagttaacaaatatgaaaattatataaagtatataaaattatatcgtctagctatcttacatattatttttattattatgtaacccatgaggttttagctacttttaatactgaaggagtgcaaatcatcataagttcataaccacgccacatggacacttgacaagttgggtggtttaatttagggcacgttctaattagcacattgggattatagctaggattgttgtaccacgcttccaaaggtaaaggcaaattttgctacagaacacctaaattttgtgtaatttgctgatagatatcgaaaaaacatatcacggctgaaagacatattaaaaaactggtaatttgctagatgatactttcggcttaattggattgataaattcttaataaagacgagaatgtccctaacaccacatgcttcaaacatgatgttagagtaaaattttagaaagtatgcaactctaaatttgccatctccccaagtatatcactagcatacattatatttcaccttcgctccagtctcagcccaaaggcttttgacactaggggcattcttgtctttttgaaaaaaaattccctccaattgagccaaaagtgtcctccagcaaattatcagttttttagagtgtctttcagccatgacacgtttttacaatgtctaccagtaaattacacaatttttgagtgtcccgtagcaaaatttgccggtaaaccaagcaaatctctctgcatcagcattacctacgtaactttttctaagctattttcaactttataatgtataagtcatcttataagtaattttggctaatctatcattttagcatgtgtttggttgggagcatatcccgggatgcgatgggatcatcccatttttgcatatgtatggttgagaaactaggagggataggatggttccaaaagagaatattccttcaatattcgggatagcctcatccgaaaaaaagtggcggacgaagccatcccacctccgcacccatgactcgcgcctcatgtgcggtaaccctttcaccgcatctcaattttccccttcgttcttttctcctcacgagtctgttcctagggttagcagcgggagcagtgcgcgaggcggctgcgcgagcgggggtgagccggcgagacaaggcggcgggtgtaacgccccgattttcgttcgggaataaaaatcaattaataatacattttctagaaattaaataaaagttaaatcaatttaatcaagtgaaataatgggagaatttgaaattttcctttaaaaatcattggccgggaatattttgtaatattctttgtgccctaatgtactctccggaattttccgtgaattttcggagctcgagaaatagttttaatagcacaaagatcattgcatcaattaaaataaaaagaaaaaaaataaaatcctccctgctctctttgggcccctttcggcccaattcccccccccctctctccctc

SEQ ID NO: 30159 - DNA, 659 bp, Oryza sativa
taccgaaacggagagtataatgcagggtaaaaccaaagagaggtaaaggagtttatttgcataaagctagcatttataaccagaaattgaaagcagtaaaacagttgtaataattatccatcagttaacccacttgctgctcagcactacaccacgttgagacaagcccaaaccaccacatgaactaatcagttccattaagctaagctaagggtgagactaatcacggtgaatatagttgaccgcccataaccacgggcacggctattcaaataattttactctgatcagaggtgtacaactgtaacaccccgattttcgttcgggactaaaaatcaattaataatgcattttctagaaattaaataaaagttaaagcaatttcatcaagtgatcagaggtgatacaaagtaaaactatggcaacaaaaaaaaggcccaattcactaaaaaaaattgtgtattctactagcacaaagtcaccgttctcacataaaaaggattatgcgcgtgtgcgttttataggactcgaacatgagagacctctcttcgtacacagtatcccttaccatctcacgatcgtcggaaatttattcagcttggtttgctatcttatgtggtgttttgaatctgctaaaagatgaagttgaagattaagtg

SEQ ID NO: 30160 - DNA, 745 bp, Oryza sativa
ggcgaattcgagctcggtacccacgagaccactttggactcaagtgtcgctccccgcatgggcaaccaggtggcgaaaaacctagccgccgctcacccccgactcaggcggcgggaagaacactccggcagcgctctcgacggtgcgggcatatagcggcgagttgccagggcagcggacaatgccgacgcgacgagctggccatggaggagtggcaatgacggttgcgcatcatgggaggccgcggtagcgcggatccggccagcgcggctgagctgagacgtcgaccaagcagatctagcagctgagcagccagatcgggcatggtggcggggtggtcctgtgagaggcggcgaagtgcgggaaaggcagcgccgggtgcagggagacagcggcgtcgggcgcaaggagacaacggtgtggagcgagggccgagacgatggttagatttggcgcctggcaactccgtggttggctctggctggcaccgagcatctaacatggtggggcaagggcatagtggccaatgtggcgcggtcggcatcggtggtaggtcgcgcacggaaggaggttggcgggaggctgacctagcgcgggttggcatggtaggagcggtaggaagtaggcatgatgatggcggtgggagcggcgtggtgcgagtaagaggagccgtggctggctggtgtggcacaagcggggtctgctgcggtcggcgctccggttggagtctcggtggaggcatggg

SEQ ID NO: 30161 - DNA, 993 bp, Oryza sativa
aatagttctaaggataatatgatatcgtctagacatgtgaaaagacgattgaagtctgtcaggaaattaagaaactccggagttataacgttggattacatccaaacagcgagaaacctggcagatcccttcacgaagggactatcacgaaatgtgataaacaatgcatcgaaggagatgggtttgagacccatgtgagttatactatggtggtaacccagtctatgtgatcggagatcccgtgaattagatcctgggaagaacaaaccattagtaaactagaggagagtatcaatatatataccctctccaagtgaagatacatgtactctcgtgagctgcaaggcaggttggctatgccttaatgagttctgttggctttaattagcgaagatgttgtcctgcagagcattcttgaaagaactcacctttgtgagcttgactgttggtcgtagtctatgaagattttgggtgaatcttctaggaagcttactaaagacctaggagtatgacttatacgctccacccgaggggtagtctacagacggtctagtaccagataagactttgagtgaaacttgcttgcacaagacttgcaattcaaggcgtagtccattgttcaagttgtgagtaagtgtagcttggagttctaggtggatgttcaaccttaattggtccccatcgaaccgctggtatataaacagtacattggaaaaggcaaatctcagtgagattttgagatttggtgggggattgttggaattaatgaatgggccttagcccactcgaagattaattctttggaaaatcacaaaagcccacctcatgggatggcatgcatgtggagtttagtaccaccttgcttattctaggagagggggacctccttaaaagggaggatgtcctcctagccacttgaagcatgtgtggtggagagaagaggggaaacacacgcgcgcgctcgctcgcctcgcctggcctggcagggcaggg

SEQ ID NO: 30162 - DNA, 652 bp, Oryza sativa
tatatctagattagataattttagtctgcttgatatttattttacgttctttttttccttcttgtgttctttgattaattaggtgataaggaggaacatctagtcaaggaatatcgtgatctgaaactcgagattgaacaaattaaatctgatatacagtctctgcgacatgagaaggaagggagaggctaccataaggttttttctttttctgctttcatgtcgctttataaaactcttttttttccctcataccaatagctttttcattgtaattgttacacaggaaacattaggtggcacctcaaatcagcaaaaacaagagaataacgagaaaacaaagtatgttgatcagaccttttttgggggcaatttttataagttcctgttaatttattatttgagttacggatatgatatggatttataattggaataatgaatttgtctgaattttcatgttcaaccaggcaaccagcgatagatggtattatgaagtcattacgagcaaaagcaacaaagttgcagcaggtcaagataaggtagtctctgattgatgcgcattagcaatttaaccaaaataaatcaagtatataatacagaatgaagttaaaacattctttttacctttttttttcttcgcagctttcct

SEQ ID NO: 30163 - DNA, 1025 bp, Oryza sativa
cgcccattaggattacccggtttaacgtgccacggcaacgaaagtcatatcggttttaatatagttagagcgattgatcgatatatacttcccgtttaggttgatggttacgaaatacgaaattcggctaatagttgagggggttacattggactttgtttcattccagcctaacaagaactgtagaatgaaaaccttggcccaacccaaacacaaatagtcttgcgcaagactgtgattattattagtttgttatctatctatctatctatctatctatctatctatctatctatctatctatctatctatctatctatctatctatctatctatctattattattattattattattattattattattattattattattattattattattattattattattattattattattattattattattattattattattatatactaaaagtccatgaaacttactacaaacgctctcaagccgccacatgatgctcctaaaaacactcgtaagtcgtaaaaacactcctaagtcgccacatggtactttaaaaatcatagaaaatctaagaaaaaaacaaaatatctagccattgattttcatttaatctggtgggaccattatttttaaccattagatctatcttctaaattaacaatctaatttatattatatctccaaagatctacatcgttccatatttgtacgtgagtacgtgcatttgtatcccgaaacccacacccgaccaaaaaaaattgtacgtgtacttctctttcctttttttttatttctcacttagtcgaaaaaccaatctaataatcagcacatcttaactataatttaagttgtaaaaataaaaatatatgttatttcaagttatgttcaaataaaaaatatatctcatgaaaacatccatgaaaaatataaataaattaaaattataaatatattacttaacaacatgtataattattatatactacaagtccattaatcttcctacaaacgctctcaagccat

SEQ ID NO: 30164 - DNA, 1425 bp, Oryza sativa
tgaatttaaattccaatattagtttatagacccaaagtttataggtccaaagtttacatacccgtttctaatttgaatttaaatttaaacttaaatattagtttatagacccaaagtttacatacccgtttcaaatttgaatttgaattcaaatatatatggtgtagtagcaagagaagatggagagataaaatagtaagggggaggggcgggtgatcgctaggaaggggagagagcgatcacccgcccattaggattacccggtttaacgtgccacggcaacgaaagtcatatcggttttaatatagttagagcgattgatcgatatatacttcccgtttaggttgatggttacgaaatacgaaattcggctaatagttgagggggttacattggactttgtttcattccagcctaacaagaactgtagaatgaaaaccttggcccaacccaaacacaaatagtcttgcgcaagactgtgattattattagtttgttatctatctatctatctatctatctatctatctatctatctatctatctatctatctatctatctatctatctatctatctatctattattattattattattattattattattattattattattattattattattattattattattattattattattattattattattattattattattattattattattatatactaaaagtccatgaaacttactacaaacgctctcaagccgccacatgatgctcctaaaaacactcctaagtcgtaaaaacactcctaagtcgccacatggtactttaaaaatcatagaaaatctaagaaaaaaacaaaatatctagccattgattttcatttaatctggtgggaccattatttttaaccattagatctatcttctaaattaacaatctaatttatattatatctccaaagatctacatcgttccatatttgtacgtgagtacgtgcatttgtatcccgaaacccacacccgaccaaaaaaaattgtacgtgtacttctctttcctttttttttatttctcacttagtcgaaaaaccaatctaataatcagcacatcttaactataatttaagttgtaaaaataaaaatatatgttatttcaagttatgttcaaataaaaaatatatctcatgaaaacatccatgaaaaatataaataaattaaaattataaatatattacttaacaacatgtataattattatatactaaaagtccattaatcttcctacaaacgctctcaagccatcatgtggcactttaaaaatcatagaaaatctaagaaaaaaacaaaacatctagccattgattttcatttaatctggtgggaccattatttttaaccattagatctatcttctaaattaacaatcaaatttatattactaggtgaaac

SEQ ID NO: 30165 - DNA, 1607 bp, Oryza sativa
tattaaaaaacggaggcaatataatacaatgagaaaagagtcaaatgctttattattgagcaaaaatgatggtattatttttatcatcttttagcggaatctatctaaccatagttaatcagcctgtgttagtagaagtctgtatcgtcatgcatcaacatatcatgagattattagttatagctaagtacagcagtgtaatcatacttagcatatcacgagactatcgggtaatggacaattatctttaattgtgctagagaaaaaaaaaagtgctcccttcgtcccataaaaaactaacctaggactggatgtgatacatcctagtaaaacaaatctaggcatgcatatgttcagatttgttgtactagaatgtgtcacaccagttctacattcgtttttttgacaaagggagtaaattacaatccatactatgtattcttaaaaattcttaaaagttttcatataatggtatcctttaaccattttcatttacacaatagctaactttacattttaatttggaccaccatattctatccatcttcaagtccggtgactcagtaatcacttcgcacattaactctctctctctttctctctctctccattttctttttccatacgacagttggataaccgatagatctatcaagaaagagcccgatatagcgccttcgctcttcgtcgggtcagctcctgccttccaaagtccctgcaagcccaatatctccgacctcaatggcaacgataacaatagtgcgcatcacgataggggaggagaaaaagacttgtcggttactagaggttaaggctgcgcatgtaaaggcaaaggagaggaacgatggtggttcatggagaaagagcagtgatggcggtgcgtagagtggcagttagcggttgctggtggtacgaggaatttgttatcgacacaatcgtttaattttttcctaactattgatgatacatgggtcaccagttatataaagaaataacactagctagttttaaaatactaccttgtcccaaataagtgcagccgtgaaaatccgtgttaaacttttgaccgtccgtctcaaatttttaaataagataaaatgttaaacgttggatgtgaactttacaaaactatactaaaataggatggaaggagaggtaagtaaaaatattgagataagggcagagtagtcgagtacctctcgttgtctcctccgctccttgcctccttgcgccgccgccaagacgagtcgcggctgaacaggggagggccgggcggcgatctccatcgcagcggaggggaggggatcctggtgcgtcctctttctgattcctctctctctctctctctcccaccccaccgggactggaatttgcttgcgcttctcttctagatcttctcctcctccttaatttgatagccttaaacctctcttaaataattcaaggaataacagtttgtttgttcacccaaaagtttgggggttcaactgaacccccatgtcccaagttggatccgcccctgatttttgggaagcctttgcaattggaacacagaagggggttctgtcccaaaaccaacttctggccagtttgatcaagcaatacca

SEQ ID NO: 30166 - DNA, 3410 bp, Oryza sativa
ttaattataattatgtaaattttttgaataagacgagagatcaaaacatgtgagaaaaagtcaacggcgtcatctattaaaaaacggaggtagtatatgataactacattagtacgtatttctgtaattctttcatattgttttttattttctacatatatgttaatttggactaatatatttctcataattaaatagataatacatcatttttccatatttctcctataaaataaaatagggcattttataatttgaaaattatattataagtgtatgtaattaatgtgtaagatatggacttatagtataagatttaactttttctaaaaatgaatgccgcatcatggtagataggtagttaactgaacaaccatgaaaaatagagacaatccattgtgtgtcactgattttgtccctgctctacaatatgtcattgggtttgtcaagttctaatatggcatcgcattttgcttaacttctataatataccatcgtcatctagttagcctccgttagcattgtacaattttattatacagattgtaaaacttaaagaatttgagatgggcaatttctctgcctagtttataatatgatattttggaattttcggccaaattttggaaatttttgtcctagggatatttcaatcattagtacaaaattatacagtactaacagaatctaaatggacggcgatggtatattatagaatttaagcaaaatacaatgacatgctgtagaacttaacaaactcagtggcatattatagaacaaggacaaagtcagcggcacacaatggattctctctaaaactaatatagttaaattgtttcttttttatccaaaacaaaacatcttttacctaaatatgttcagagaacttcgaaagaagtaagaaaaagaggaggttagtcactagcccaaacacatgagggtggttgctgctcacaactatggtatggtatatactcacattaatcgataatacactagtattattaaaattgttctttgtagtgaatggtgtgaaactaaaaactttaaccttttatattcttctgttgttccatcttcttctttttttcttattcttatttatttttgataataatattgctacagaaaacactattacttgcacatgaatactaagcagctagctcatgtgtgtatgctccgtaatatatattacctatgtttttacatgaggaataataactattatttttgttaatgatattgtatttataaaaggtatctgactagttttttttaagagaaagatatttttgctaaatataatctagaatgctataaaggttaataatattaaacgatatagtcatataattttttttggataaactagtgatcaacacttgttatgaatccaatgatcataatgcactatatatattgttcaagtgagttgtgacattcactatttactagttacatgcgtatgcattacaatgagatctacatataaaaataagatttagtttatttctagtcttgtttttatgatgtattggattttttttacatttctttagaaataatattgtataacaactaaataatttattgttttataaataaattattttatcgtacccccatctataaaatcctacgtccgccactgccaaaaatcccttcttcacattagcaactctaccagtcaaactcgatttctgcaatataaacagaattgaattgccatcgaatttcagttcaatagtgccaccaaattcgtagtaaaaaaagatcatgaagcagtgtgtcatcgacataattatgacatacataatatgttaacagatggatgacccaaacataaagtaaaataaaatagagaaatgatggaacatgcatgaataagaagaacacatatagcctgatgcatggacgaaaatagagtatcagacaacaccgaatccaatcaaatgttgcatcaaagctggttggacaagcaaaatgaagtgacgcagacaccgaaataattatatgtttgttacgagaaactgatgcaggaaacggatgattcgttcatggtagtaaacactgcgaaatcgtataaatgctgcacaaaattgatcaagacgagggtaatattaataaatgcctaatcaaactgatccaataaaacatgctagaaatgccacgaactcatccccttctctacatttatactccatttccttcaacgaatgagaacccaaacaatcttaccgccaaagaaatcggccgagcaacataaccccccaaaatcccgcaacaagccataccgcacaaacctcggccttcgccgcgcgggccctcccgccgacaacattgctgaggttccagagcggcacgcgcctctccgacctggtggtgccgcccgctccggcgctcccagccacggccgacaccggcgagcggcggcggcccgcggcacagctcggcattggggcgaccggcggagtcggggaaaaacctagacctcgtccgactccgacgactactttgaccgcttgacgacgatgagggttagccctttttggaacctatctggtttgctcgtgaagggaaggaaccggatcctcggggaaatatcgattttgctatatctcactcgaaagattttttcttatttctcactcgattttctgacttaaatttacagtgtattttcaagttaccgtgtagtttatgatacttgcattgtaacttttatatgtttttttgtaatttttaaaatttatattggacttggttttttttcttaaaatatggtaatttagtgtccattatggtatttcttaattgtttttttaccttttacagtggctattgggttttaatccaaagattaaaaatatgtatgataagatcgtaaaaatctttcgaaagatgcataggtactcccgggaaatatttgtggcgctgggtgccgcaccgcgagctggcagttaccttaccatggcgcctggtcgcccgcacccacagtagaggcgagagcggcggggcgttgggtcggccgggcagagtagaacagggagggagaggggaacgagccggtcggctcagctcaacggtcagtgttgtgtatcgatggtaattaaatcataatatttgaccgtcaatacttatataacgaaataaaatatggtatccaaattagtggtagggtttattactgatcatttctactagtgttggcgaaatatgtgtacgtaggtattttgagaagaaaacacatctgttatacaacaaaatgcacctctgcgcattcaggagggcccatatgtcaaccaaaaccacttagaaattggaccaaaacattgtgcaagatgttgggggcccattaggcaacctaccggccaaaggagaggccgagaggacggtttttgggttcg

SEQ ID NO: 30167 - DNA, 918 bp, Oryza sativa
aatgtataacatacattcatccacatatcccgtagcaaagcatggggtatcaactagtatgtactctctccgttcgtggatataagggattttgacttttgcttgcaccatttgaccattcgtcttattcaaaaaattttggaattattattatttttatttgtgacttactttattatccaaagtactttaagcacaactttttgttttttatatttacacaaattttttgaataagacgagtggtcaaaccgttacacgtgaatagtgaaaatcccttatattctcggacagagggagtataaataagtataactgttctgccaccaaaatggaagggagcaaataacatcccacctgttgcttaaaaatgctaagtttgttgctagcgtagcgaggagccaacacacaatggacaccagaatgcctgaaaaacttccgagcttcctcgtcatgtgtatgcatgagtccatcctgcattcaacctacatcatttccatcagactactctttcctaaagaaaacagcattcaaacaaatgcatttgcagtaagaattttgttcatcaagatttatctcataaacaattttatataagttgagctacaatacaaccgaaacataaaggagtactttggatatttagcttctcagcagtcctaccaaagctcccatgacaccagtaccaagagggaagatattacctaccatttatttttcccacccttttcagtttatattttcagcactcaccacctttttattattaatgtagtagcatgtagagatattagataagcacttttagctttataatcattgtccctttgtcaaaagcatgtattctactagcataataaccaaaaatggaaggtcacaacacttcaaaacgcagagtaaatttcatatatagccatt

SEQ ID NO: 30168 - DNA, 2643 bp, Oryza sativa
gaaataactaagaggtaattctcaccaagcaaaactaaattactcaaaagatatttctattataatcagagtaattaacagagcagaaagaaataagaagaggattattgataactccggaactcctccgacttcttctactctctctccctaatctaatatataataaagtacaatagagcctcttataatttagctcaagctttggtgtgtgtgaatgagggagaggagagggccgtatttataggtggagagatgccttgggaatgtggagatgctaagcatcctaagagcattttctctcttgtgttgacaagtgtcctctctatgacggtttccaccggtagaaacggtcacaaccgccaatggatgaggattgcaactgccaggtgaaaaatgggcctggatggactagctggtggtttggccgaaccctggccggctctgctagcccagcccttcctcctagagactgatatgtgggccccattgtatattcttctgaagattggctcaaatgattgcatcttattgggtttatgggctcaagactccattagcttggatatgaaagttatattctcatccttcatgtatattttctctcaactttagtaacttgtcacctgcatacgaatatataccaacactcatagaaaatggtagaaataaaccctaccactatgttggatgttttatatttatggtcttatgcaagtattgacggtgttaatttggtacttaatagccatcaacaaacccacacacttagctctttactcgtcccgagtaaatgttgaggattaatgtggaacaaaattttcaaaaatataataaaagtacccaaactattctaagccataactgtacctataaactttgcagtgtataacttaccatcttgggtaactgatgaatggaacggttgtgactcaagtccttcatgtttctcctgtcaatctcttgagttttcatatgttttcacaaagtatctatactcctcaaatgactttctctcaaatcacgcatgtggtttaatttgtggatcctcaccaaggcatattttgccgaattgtccctattctaaaaggttgtatatgtggagcttggtagggatcaatcggggcatacctgcatcacatattttgcaaagccaaaaggtcggacccaaggagatagcgagttatactctctgatcaagaatgtgcatgtgtgtgatatgtgtatgggtatgtatgtgtatgtgtatagtatatttttggatggaaaaaggaaaataaaaaacaacaactcctttggtataccgcttcctccaattttctctctttggaaatttgagagagtgcatggctatctcctttttttttcatcatgccccatactttgtatgagcagattttttttctattttctctctctcatttttttttatcaatgctccatacttatatgagcaagactttatttttccttcttgtgcatagtcatgcatctctctttcttttttctttgaaagaattttggaggaagagacataaatgacatggagtatttattttgtggataatgaatataataaatgatggatgagagatgctaacttccagtgtagaagtttagcataacgtgcgtatgaggagtgtggtgtgatcttgatcatgaaagtatgaaaagtatctcacacaggtcacaataatttgacaaagctcaatgtaatgtcaagcggcctatacacatataaggttttgcaatgagaatcatatatggccttggtaggtaataatatagtcactaaggagtattgctctaaaagaatttttaattttcacaaaataaaatcccaagtatcatgaaagttggacatgaatttctttcgttcactagcacagaacctttcatctgtgatagccactaacatgcctggaattagcgggccgtcacaaggaagtcatctcaatcgggccaaaaaagcattcgattaagatatggtcgcacagacatattagatgggcataaaactcaggctcgtcatggatgacacctatccgtgacgggccgtagtttaggcccgattgagataacattccatatctcaatcgggcctcaagttggctcccatcacagatgaccatcatccgttacgggcaccaacttagggcccgattgagataacaactaggcccgccacagatgactcatccgtaatcgattgagatgacttagtatttttttctatttttcatatggaatgtttatatttgtgagtcgacctgtagcaaaataattaactgcagtataataattcattttattagtcaaaataatttttcgagtagtaaaggatttcaaatggaaaatttgtcaacaacaaagttgtataacttatcaagatttacaacttttattttggtcatttttctgtgtaaccttttttatcagtttaaatttgaatttgaaaatatgacaactttaaaacaacattttcaaatactaaaaagtcatcaacaaaaaaaaagttgttataacttatcaagatctataacttttatttttgacatttcttaatcgacaaagtgttagtaacattgttcacaaaactcacatatctctcatctggtttcataaactataacgcaaatatgt

SEQ ID NO: 30169 - DNA, 3302 bp, Oryza sativa
attcctgcagcccatatacgtgcaaacacaaacttttcatatgtgtataaaatttttttatacatgatgtatttttcaattttttttgactttttaatacgaactgtcgacgaaatgggaatgggtgtacccatttcaccgtcaaaacaataaagcaccttttaacgagggaactaatagaaggacatggtcgtgggccccaactatagggtttgagaatgcggctcgaggttagccgcggatcgggccatacccgagaccccgatctaagaatggccaaatggctagccaagttaaattttaacaagtataaagaaaaaatgcccttcaatagcctctccatcatgttagctaagccatccagatggccaaatctcacccctcaatggccaaacttggagagtcaccctgcctggctattcgtggcccccaccactccctctcccacccccatctctctctcggtctctccctagcaagaaggcagcgccgcagaaccacacgacaacgacggtagggaggagagaggcgccggagccagccacgaccgccgccgtcctctgcgtcgtcatcgtcgccagccgcgcccgccgccggccgccgtcagcgatgtccccgtccgcgcttgccgccgccgccgccgtcagcgccgtccccggccgcgcctgccgccgccgccgccgtccgccccatccgtgccagccgcctctgtcagcgccgtccccagccacgcttgccgccgtagccgtccgcctccgtcagcgccgtccccagccacgcctgccgccacagccgtccgcgccagccaccgccgtcagcgccgtccccagccgcgcgcccgctgccgccgccgccttccgcgccgtctccagccgcgcccgccgccgccgtccgcaccgtcgtcggaagtgctaatgcgaagaggtagagggagaggaaaagggggagaaagatgggggagaagcggtatagaggctgacgcatagatcccgctgtcatagactcaaaatagagaggatggatggagagattgttggagtaaacaaccaatttgacttaacaaatgaaatggagagttggccaaatagacatttggagagttgaatttagagagcatgttggagatgctctaaccaagctccttgccgaagcccgcgcccttcggctggaagggaagagcgctcaacaaggagcgttcctagcgtaggagccgaggaagcgcccggacctaggtacgggctgaacctacccaggcgagtctctctttcccactctcccgctctcgtcagattacgtaacaaaggctaccacggtctcggcatgcccggggcccaggctgactttgccctcggtagggatcgtttctccttctctacgaaggaagtgcatgaaagcttattagggaagtaactcagagatatccgtccggttgtatcttcctcgagaagctcgactagaaatatcctaactaccgccttaaagacgcaaggggcacggtcagctgtaaggcactgcaccccccttatgatgaaaccaaagcttacagaagatttatcccactgacaatggaaagacttcgacaagacttctgcagcgaatcattagggtcggtggtgccccagacacgtgtcgcacatgcccgttgttgacgatcgttatcgatcagtttcgccagtcaatattactaaaataaaggagaactagttatgtttgcaatgcatatttgtgttagaataagttattttccactagcactaggattataaccccttgcagaaaataagtacaaaatggaggagaatcgacagcaaaatagacgatccatcaatcggacgctgtcgagatccagacttatggataaatgggacaagaacaaaaaattgccacgatccaataggcccaaaattcactgttctggataagggaggagataaggaggccgccagccgaaattggggtggtttggcccagcccatggttcagccaaaccatgggtttggccgaacccccacctgcaccattggatgcagggtttggcgtggacgtccaggattgcatcccaatgacagttggagggcatttctgaccattccaaccatcacaaccgtcattgggaggctataaagggagctctcatcctccactccatcacacactcaagcaagagcttctcatattctctcaagtttagtttagtgctctagagctagtggagtaggaatagaatagtttcttcaatcctcggagtcttcagaagagttcattcttttgtaagacttgtactatttatagaatattactttacttcattctgatcccttgagtaccgacttttcgatatattatttgagatataattgtctagctagcttacctgggggatgcattggtgtgggcataatgttcatttatatgattgctctaagtcatgatgatgattgtagagtagtatttagtagcataagcgaggtgcttaggctattgaatattattatttggggttatatgctacaggacagtagaggtgggccattgatggtgacagctcagtacgggtattcctctacgttagtatataatcctaagttactttcctggagagggtatttgtcacactctgaagttcttcccaagcctaaattcaatttggaatttgtctcaagaaattagttgtttaaagtcaagagagaaaccctaaagtagtgaatgcaaataataattggaaatagcatgtggaatttttcttgggttattcatgtcaaaatatgctaacaggatttttagtggaattttcagagctctagaaataattttaatcaattaaaaatgagcacaagcaattatttcatccctggaaattgttttcttttcttttttccctttttccttcctttttcctttgattgggccatcagcccgttctcttctcctccccgcgcgctagctgggccggctcgaggccgaggcccagtaggccggccgtgcgcccctcctccctcccgagtcaccgacaggtggggcccacctatcgggcccgtccccaacctccggccgccgccgccgcccacgctgcaaccgccgcctccccgcctctcccgcgcctcccgtgcacgtcgcccgcctttcgtgccctctcccgcatgtccgcgaccgccgccccactttccccgcacgcccgtaccgagaaacggccgggattcgaatttcgaatcccaccggcctctctctctccacctcccccacttcgccagccacttcccacctctcggccatgtccgacctccccggccctatataaacta

SEQ ID NO: 30170 - DNA, 7512 bp, Oryza sativa
agccacatgggtttgggaatggctcctccctctacacttgatatcccaggcccatatcaccgacaatagcccccggcgttagccgtgaccaaaaccttccttaggtggtcagggttgatgccactcttttagtctaatgacatgtgggcccggtctttctttcgtgttttgtgaagcgattcggtagttgtggccccacgcgaagcaaaaaccgcctccccggcaatgatgggctatcacttcgtaactgccacatcacctgggtaggtgcgcggggcagatatgtcagtggatttgccagcgaataatgatggcggcttccccggttaccgcgcgcaattaaggagggcgtggttccacttccgtctcagtcgcaacggcagcgtgcctagcacgcgcgctagaaacggatgcgtggagatagtgggcacgaaaaacgagggggcgaagtgagtggccgcaagaatcgaggtgccaggcgtggaggaggggaggataaagggcgtcgaggagggattttgttcacatcctttcaccactagaatccgctgcgctcctatgccctagctctcgccgctctcttgcctcctctcgccacacacactcgcttctcgccacaccaccttcgttgacgccatgacacggagctccgtgccgctggatggcagcttcctgcctccctctcgcattaccaacgagaggttcgcgggtctgccgcgcaagttcatgccgacgctgtcggctcccaaaactaatgattcggaaaccgatatgtttaactgtatcaagccctggatcagtagattgatacagcttcaacaatctggatcttcattgcgtacatttaaacaaggctccaaaggagatgttattacataaaataataggggaatttgcaagtttgtggctaactatcacaacagaagctatagaatgactcaactctaatgttttgctatagacttaaaccatctaactaatctagatttgagaactaggttgaaataagactaacttatatgattgaactcctggcttcagcaagaacttcaatttaactctggaaaaagggggttgaagcaaggatgagtacaacgtactcagcaagctattatattcaataatgaatgtatgaaaaggtaatatttgagtaggattacgattacttgcagaaggcagagaatatagaaatagaaagcctgatgcttgaaatgcagcagcatttagtaaaatcttgaattaagtttctaaccaaagtaccatctgagtcccgatactcaattccatgagcacggctattcgaatagattcatttttactttactgcagtaaatgtacgctttacccgcaatccatgacatgccaatattcattagcttagtcatggcaaagcttttcggttactaacatcagtggtacctgttccatgaactctcatcctaatgcgctctgaacgtaacgttatcagtagcgagaggagttctggcgttcccgaggtttttagagagagaactggttgagagacccccgtcatctcaactaggttttcacaatatacacacacttgagctcaacatatcatttacctgcgcctcagtaaatgttatatttgcccttcgtggcatatgcccttcgcggcataagtttgcctcctgagcgaggacttaaataagaaccactgtatagaggtaccacctttgctagataacttactttgcaaggtctgtccctattctaaaattgcggtcgtactcgttcgtttgacataagtacttggtaataactatattgactgagacagtactagccacccgaaaatcaaccaattcctacgtactgtcccaatctaagttcattatatttttatgcagactaactaggcagggctaagcaaagctagcatatgtctggtttgctatatgttcaggttatgtattcaaaatcatgaatgactaatgcatagaatagagatatagaatataggataattatgctcaaggggaggaataataacttgctttgctccaacgcaaataaatccaagataggcaacctgattatccgatgctagaaatacctcaggttgccatccagaatataatagactctactagagaagaggaagagccaatttcaataaaatccataaaatagcaaaagatcgataaacggctaagagagctagggtttagggtataagctatcttctttatagggtatagggattatgggctaatactttatgtggaggttctagagggttggaggctagaggggattaagtaacaattgtcacttgtattttatgtgtgggttttagtttcttggagagtaggggatatactaaataatctaattggttaagtggatatgtggctagtattggttgtagttgggctttggtagaagaatggctaggatttacttgttctcgagtcgatgctgaaataggatagcatatgggctcgtatttcatgtataggttatgggtagttggagggtaaatggttggtatggagtttggatagcagactggctggggtttcatttgattaagccgatatcgaggtaggatgaatatcggctgggatttgggtgtttgctagtcgttgctagagttgggcagtataacgactaaaattggtatcttctctagccagtgtcaacagacagcataacggttagagggataggaagtttgtgtgggtttagtggggcggaagtgttactccgacaaccgtgagtggcagcagaacggttaggatcacacagagcccaagagctaactgtgcggcgtgctgtggaggtcgagggaacagtgaagctccgaccactatacgcatcgaggcgtggggtgccaggagcagcacttcgaccttaggtttggttttgccgggctttacaaccaacggtccgacatcggggatagtaaaccgcgaacgtcccatggaaggcgtaaagttccaaccggcggctttttagtggctaaagggtattttgggttaaaaagaaatatttgaaaagacaaacataaattcaaacagtatttgaataaattcaaataaaatattaaaatagcaaatttggggtcaaaagatggggtttgaatttagatgaatttaggtctaagtttcactggaattggatctacggtttaggagatatggacttctaaagaataggatttgaattaaataaggaaaatataaaatgttactgtgcaggggcccacctgtcagtctttctttttctttttcttttctttcttcttcttcctcccgtcatcttcctcctctccttcccgtgtaacagcatagagagagagaaggggcatatagactaaagaaaccgacatgtttagactgtatcaagccctagatcagtagattgttacaggtttaacaatctggatcttcattgcatatattagaataaggctccaaaggagttgatattacaaaataataggggaatttacaaaattgtggcaaattgtggctaactaatacaacagaagctatagaatgactcaatcctaatgttttgctatagacttaaaccatctaactaatctagacttgagaactaggttgaaaggaaactaacttatatgattgaactctcggcttcggcaagaactccaaattaactctgaaagaagggggttaaagcaagggtgagtacaacgtactcagcaagctattatattcaagtatgaatgtatgaaataatagtatttgagtagagcactactacagatctgggcttcagtgacgggtcatttgtgacgggccaacacaattcgtcaaagatgagtcatctctgacgggccgaaaaaatatcctcttcaatatatggctaccagggaggacccgtcacagatgtgaggtcatctgtgacggcttgcacttgtaacccgtcacagatcgtctgtgacgggtcacaacaatggctcgtcacagatcatctgtgacgggtgtagtattatgaaccatcacaaaagagaccacttatctctgatgggtctttaactaacatacgtcacagataacgttatctctgacgggtggtagtcatgacccgttagtgatgagtgaaaattcaaattttcaaattttacaaaaaacctcggattgagacatgtcctatataaaagttgtagctctcgatgatatccacaactttataactaacaacatttctattagagatcatttacatccccgaacatgcattacaagtgatcagatctacttttaaaaacaaaattttgagtttttttcaaatgacatggatggatacatgccccgtatcaaagtcatagaactcaaccagatctacaatattataattgaaaatattttcatttcacaaagtttacatgttataaagtgagatatattttgaaaaatgaaattttgaattcttcaaacaacatcgaatgaagatattttctatgtaaaagttataaaacacgatgagatctataactatttagttgataatattttcatttgaagtcatttagggtgttaaatatatgttaaatgattcagacaagcatagacaaaataataacattgggtgagtagtcaatatttgttgagtaggtgagttggtaagggagctctatatggaggttgaggtcttgagttcgaatctcatgtgtagcatacaagttatattgcgtaaaaaattgtgaatttgtaggtagttgatgtgtgaccatgtataggatggctagtaaaattcaaaatatttttttgaggtttttttgttgcgtttaaaattcaaaaattgtatttcttgctttgtcatcactgacgggtcgtaagttacaacccgtcagagatgagtcatcagtgacggacaggtagttacgacacgtcactgataactcatatgtgatgggtgacaagttttatcccgtcagagatgacacacccgtcacaggtgattttgtcatcagtgaccactaatcactgaccaagaccaaacctgtcaaaggtgagggtttgggcccgtcagagatgacatggtccggcgtagtggctagatctatttgcagaaagctaagaaagtagaaggagaaattctataatgttttgaatgcaacaatatttaataaaatctggagttatatttctaaccaagatgccatagtgagtctcgatgcttaatatccgtaagcacggctattcgaatagtttcagaaatactcatactgcagtagatgtatgctttacccgccatccatgacatgctaatattcatcaaacctgtcaaaggtgagggtttgggcccgtcagagatgacatggtctcgcgtagtggctagatctatttgcagaaagctaagaaagtagaaggagaaattctataatgttttgaatgcaacaatatttaataaaatctggagttatatttctaaccaagatgccatagtgagtcccgatgcttaatatccgtgagcacggctattcgaatagtttcagaaatactcatactacagtagatgtatgctttacccgccatccatgacatgctaatattcatcagcttagtcatggcaaaacttttcggttactaacatcagtggcatctgttccatgaactctcatcctcatgcgctctgaacataacgttatcagcagcgagaggagttctggcgttcccgaggtttttagagagagaattggttgagagacccccgtcatcccaaccaggttttcacaatacacacacagcgcgcaataatcaatatatttacctgtgcctcggtaaatattataatcgccctgctcggcgtaaatttgcctcctgcgtgaggacttaaagaagaaccactgtacagaggtaccacctttgctagataacctactttgctaagtctgtccccattctagaattggcggtcgtactcgttcgttcttcagatgtacttggcaatcttatgtcggttggaacagtatgagccacccggaaatcatgcatttctaccgtactgttccaatctaagttcgttatattttatgcaatctaactaggcatggctaagcaaaatctagcatatatctggtttgctatatgttcaagttatgcatttaaaatcatgaatgggtaatgcatggaataatagagatatagaatataggataataatgctcaaaggggaggaataataacttgccttgctccaacgcaaataaatccgagataggcaacctgattatccgatcctcgaaataccacaggttgccatccaaaataaaatagattctactaagaaagacgaagaaccaatttcaataaaagccataaataacaagaaaacgataaatggttaggagggctagggtttggtggtgtgctagtcgatgctagagcataatgactaggtttggtatcttctctagccggtgtcaacagatagcataacggctagagggataggaggtttgtgtgggtttagtggggcggaagtgttactccgacaaccgtgagtggcggctaggatcacacacagagcccgagagctaactgtgcggcgtgctgtggaggtcgagggaatagtgaagctccgaccgctgtacgcatcaaggcatggggtgccaggagcagcacttcgaccttgggtttggtttatgccgggctttacaaccaacggtctgacgtcggggatagaaaaccgcgaacgtccccatggaaggcgtaaagttccaaccgacagcttttagtggctaaagcgtattttgaaaataaaaggaaatatttggaatacaaatataaatttaaattggaaattcaaatataagaataattaaatcaaatatttattcaaatggtatttgaataaattaaggaaatttaaataaaatcttaaaatagcaaatttgatatcaaaatgaaggatttgaatttagatgaatttaggtccaagttttatcggaatcggatctacggtttaggagatatgggtttctaaagattggaatttggattaaatagagtaaattgcgaaagtatactgttcatgggcccacctgtcagggattcttttctttttcttttctttcttcttcctcccgtcgtcttcttcctcccgcttcacagagggccgagagaagggagaggagagggagagaggggcggcggcgctccggcggccggggggtggcgacgtcggcggccatgcgcgttcccgagcaacgcgcatacgaggagggtggtggccggcagagggagttagggaggaggccggaacggcgacaacaagagctcggtttcggccggtatagggggcggcggtggtggcttaactcggaggggaaaacgaagggaaaggttagggaatggatttgcctcccccaggcgaatgtagtggcgcgagggcttggtcggaaatgctccgacgagggagatcgggcgatggccagcatttggcagagagagagaagagagaagctcggggctcggcttggtgttgggaaaaaagaaaggcttgccggctatt

SEQ ID NO: 30171 - DNA, 5172 bp, Oryza sativa
ctcgcgttccgaccgccgacggatatcgaaaatgttgcagcaacacatggtcaggtaaagacgagtatgggccagactgagttaacagtgagaacttggcccaggctgcagcgagagattccttctcgttccgtcaaaaagaaaggatgtctaatcaaagattaattacacgggttaacagaaagaaggcaaggcagaatttgcactttagctcctattcaccgtggaatttcctgacagacagagtgtaccattgctttgcttcatctctaagagaaaaaaggaaacaatttccatttaagagtttcatgtgtcatgcctacgatggataggcacgaacacactagctcaaaatcacgaagatggaggtataggttttcaccaatactaccagagaaggtttgctcttgaatcatggctataaagtcaggactaatttcgtagccatccgaaaggattggttttgaagaacaggatggctcacaaagatcagcccgaggagcaaaaaggttttgaattgtgggttgctccattgttggtatttcttaacctgacagatagaatccataagcgcacggaaaataccgatgtagtacttcaccccaggagtattctcaggtatcgatttccatagggaacgtgtgtgttaactcctagtcaggttcatccaaggacacgaagctaaagataggcaaaggatagagaggattcaccggtgagaaacaatgtctatggaaagcttaactttaatcctaacgcgatacttcgggtactggccagctcgctactcccagatatcgctctactacgtacccggacaggaaggactttagtgatcttgagggctgtcaccacctctacacccactgcacacctactgtgggatacagagcaaacactggaaatcaactacctagacaccatgtctaagcaattaatagctattctagtgtttagaactcactaaagcaatcactattttactgtattatagtgaacgatgatctagcacgctgattaggaaataactaagaggtaattctcaccaagcaaaactaaattactcaaaagatatttctattataatcagagtaattaacagagcagaaagaaataagaagaggattattgataactccggaactcctccgacttcttctactctctctccctaatctaatatataataaagtacaatagagcctcttataatttagctcaagctttggtgtgtgtgaatgagggagaggagagggccgtatttataggtggagagatgccttgggaatgtggagatgctaagcatcctaagagcattttctctcttgtgttgacaagtgtcctctctatgacggtttccaccggtagaaacggtcacaaccgccaatggatgaggattgcaactgccaggtgaaaaatgggcctggatggactagctggtggtttggccgaaccctggccggctctgctagcccagcccttcctcctagagactgatatgtgggccccattgtatattcttctgaagattggctcaaatgattgcatcttattgggtttatgggctcaagactccattagcttggatatgaaagttatattctcatccttcatgtatattttctctcaactttagtaacttgtcacctgcatacaaatatataccaacactcgtggaaattgttagaaataaaccctaccactatgttggatgttttacatttatggttttatgcaggtattgacggcattaatttggtacttaacagccgtcaacaaatccccacacttagctctttactcgtcccaagaaaaggttaaggattaatgtggaataaaatttccgaaaatatgtacaatataagtacacaaattattttaagccatacctgtacctatgaatttttgcactgtctaacttaccatcttgggcaattgatgaatggaacggatgtgactcaagtccttcttgttcctctcgtcaatctcttgggttttcatatattttcacaaagcagatatactcctcaaagggctttctctcaaatcactcatgtggtttgatttgtggatcctcaccaaggcatattatgccgaattgtccctattctaaaaggctgtatatgtggagctctgtagggatcaatcggggcatacctgcatcacatattttgcaaagccaaaagaccggacccaaggagatagcaagtcatactatctgatcaagaatgtgcatgtgtgtgatatgtgtatatgtgtggttattttgtgggttgttgacggtcgttagcgaccagtttcgaccatcaatattaccaaaatagaggagaactagttatgcttgtaatgcatatacatgttagaataataatattccactagtattaggttcactaaccttttgtaaagaataaccataaagtggaggagaatcgatgtcaaatcagacgataagtcaatcggacaatgtcgagaatcagacttatgtatgaatgggccaagaactcagaattaacacgatgaattgggccaaaattcacaagtctaagaagtgaagcaacggagaaggccaccagccaaaacctgggctggttgggccggcccctggttcggctcaaccagggggttcggccgaaccctccctggtgccgttggatgcagggttgcggctggacggtgtagattagcccccaatgacggttggaaggtatttccgaccattccaaccgtcacaactgtcattgggaggctatataaacccctcactctcttcacttcaacacacacctcaagcaagagctctctcatattctatcaagtttagtttagtagtatcaagatagtgaaataggaatagagtagaaatcaggagtccggaagtcttcggaagagttcgggtatggctctagtagctttcctttcctcttttgtaagctttgtacttttattagaatattcttctatatacatttatggtattgaaataatttccgagtatatgaatgcctactttacattatgttcatgttataatgaatatactgctagcttatctgggagatgctttggtgcgggtataatgtttgcatatgcaattactctatgtcatgacgatgatattagagtagtatctaataatttagacgtggtgtctagattacgggatatcattatttggggttatatgctgcagttgagaggtgggccgctgatggtgatagctcagtatgggtattcctgcgcacgtgtatataattccctgggaagggtattcctccgtatttagccccggttgtatggtcatgacgggctatcgtaaggaactcggcagttagggatggcttctcgaattaccaggagggcatcggatagagggtactagctagtatatcggttaactagaatgtatgtatactatgtatattagaagtatatgaatagattatctttctcttttctttccacttagcttagataatatattatgagaatgagtagctgatgcttgtgtgtcactctacccttggattatcttaacccctacttagaatatgattattacaagtaatatataaattattagtcaagttctctctacatgatcttcccacgggataaaataaatacgatacctgtagagatcttcccacgggataaaataaatacgatacccttggaatactctcgggtgaaatgctacaacggtagaccttctctaatcatccacgctttccttacgctcggtctcttttctttcgcccaagcaagtacctctgcaaacgaaaacacataaaactcattgtgtagcaacgtttgttcaaatatataataagtaaacctaatgtagaacatatgcacctttggtttattaatacataaggtagtcatggttatatccgagctagttgtgtcctcatcatcaaacttagcattctgcatatcgtaacctagaggcgattatgcagattttcatcaatttcggatggagattcacaaataggcttcactaattgtggggttttttttgtttaatgttggtggtcattagtttgtgctttgcttcttttttattgggtgtgctattatggacttgttgatatgcgctcgtcattgagcatatttatataataattagctgtagctctttgagcaaagaccaaaaatttattccattatcttagaaaaacagtccaacgccattagaaagggtattttagtgtttttctcattgtcaaatctatccaccaaccccattacaaatgatattttagtatattctatcttattataaagttgatgtccactaactcctaaagcttaacatgcaaatgctgcacatcatcactcactaataattattatatagaatattttaaatataacacaaatatgatatattatttacaacgttgttgtacttttagaattcaatatgcaagaaatatcaaatcattgtcttgacatcatttttaaactatttaaactatacatatatcatttctgtaataatgtataacctgcatttattcacgtatcccacagcaaagcgtggagtataccctaatttttatcactccatctgattcagattataagacgttttgactttggtcaaagtcaaattgcttcaaatttgagcaaatttgtagaaaaaataataaaattttcaacccaagacaaatttattatgaaaatatatttaattattgatttaataaaactaatttgatattgtaaatatttctacatttatctataaacatagtcaaacttgaaattcgactttgataaaagccaaaatgtcttatagtctgaaacggagggagtattgttattaggttgcgctcttttcggctattccagcttagctaaaaagttaaacggcatattttacgtgaaaaatatttatatagtaataaatttattaatcaaaattttatatattatgggccattttggattgatgccaaaatgtgccctactaatttgtttggtagtttgaagccaagtgaatgtaatggtttggtttgaagccaagtgaatggtaatgtccatgattaatttgacataattctagaactttcttgactataatataaaatttggtctccaattggtatcaatccaaatccattcacctaaaatgctaccctaccaaaatattggtagtgc

SEQ ID NO: 30172 - DNA, 883 bp, Oryza sativa
caaagtatctattacttgatcttcacttaaatcggtgggtccaatattataaacctgttgacagaaaacacgaggcctggtagatctgcttaactcctgcaggtccaaagctcgccttcgggtgtgttagcgtgctagttgatttgatcctgcaatcaacaagaaatagaaacaaagagaccgcggttaaatctataaatgatagccgatcggctaggtgccgatgacatatcatttatctttgagccgatgtcatatgtgaatcgatcggcggttgtaaatagacaataaagaactaaatctattcgatcggctgtagatattaacaatgtatagttcttatatcgatatatatttaaatcaagtgactgggatagatctgtcgccatgccgagacagtataaatcacttagatcgaaatatatattaataacaacattatatatgtttatagcatagccgatcagatagatctagcatgtatcggctaatactccgatactactctatatcaagatatcaaaacaagtataatatatcaaataaaagcctaatatacttaaatgcaataagatcttgacgtaaagggcggatttaacatgtcaatgaagcatatagaacaaatatggttaaatcagataagatcggctgaaactccgatactactctaatcggcaaccagaaggcaggctagagattgaaattctaagcacgacttaatagatcaaactcaactgatgcagcattaagtatgaaaagaagaacaatatctagacaatcaagccgctggatgtttcataaagtggtagatatcttatataatctaggtcaacatcgctatttaacctaatcggctgccttctgtcgacagatggtagccgag

SEQ ID NO: 30173 - DNA, 1012 bp, Oryza sativa
ctctatatcaagatatcaaaccaagtataatatatcaaataaaagcctaatatacttaaatgcaataagatcttgacgtaaagggcggatttaacatgtcaatgaagcatatagaacaaatatggttaaatcagataagatcggctgaaactccgatactactctaatcggcaaccagaaggcaggctagagattgaaattctaagcacgacttaatagatcaaactcaactgatgcagcattaagtatgaaaagaagaacaatatctagacaatcaagccgctggatgtttcataaagtggtagatatcttatataatctaggtcaacatcgctatttaacctaatcggctgccttctgtcgacagatgttagccgattgtaggttagatgacgatattgtcgaagatatatgataacttgacgaattacatagacaagattagagtgtcgtaaagatgaaagcactaatcccgagaacacaatccatcataacaagttttacctcttgttgaagatcgaaaccggtgcagctcaacccgaaagcaagaactcgtcgaaataaaactaaagcaaaaaggtggcgatgcgccgagattgtattgaacgtgtgtagattccaaattacatagggctcgggtctatttatactcgagaattacaagatatgtccataccggacacgactattatctctaacaaactctaagataccataagtctttgcggcagacttttgcccaagcatatctctaaggaaattacataaaatatcctaattaatagatacaattgccttctcaggactctatccatgtgcggcaatcatcttaaagcacctcaattcaacccgatgtcatacaccaagttgtattgtcggaatcggctgcatcggcttacctagtccgactcagacccagccaatcctaatcgtagccgatctggactccagccgattcctgctctgttctcgaattcgatctcaacacaagacttcacttcgatctaatctt

SEQ ID NO: 30174 - DNA, 1147 bp, Oryza sativa
caagtttgatataaagtttgtcttcattagagttcacatgaaaaagctatgaattatttttagatataaagtttttagaccgtcctatttgacccagatgatattcaaatccaagtttagagaccggggtgacataactgaacaagttgaaagacctaaacgagtgatctgcaagtttagggaccgggatgacacagtcgaacaagtttgaggaactgaacagtcgatttacgagtttagggaccggaatgatacaacggtataagtttagagaccggtgatggactttactcttaattcttcatcttttttttcttttgtaattttgtttgttttcttcttggatgataaatgagaaatgtccaggggtcttccggctagctccacaaggtggtgggctagatgacctgggttcaaagcctcacccctcctaattatttgatattaggtccttctctaatattctagttttttttttcttggatgataaatggtggcttgctcgtgtcggtgtcaggttcccttggttggctttggtttagagggagggactgtgaacagaaagaaacgtcgtctcgtcgggatagagcctaagggtgtgtttagttcacgcgaaaattagaagtttgattgaaattggaacgatgtgatggaaaagttaaaagtttagttatgtttagttctttccaaagttggaagtttgggttaaaattggtacgatgtgactgaaaagttgtgtgtgtatgacacgttgatgtgataaaaaaagttgaaaatttggatctaaacacagcctttatgtgtgtaggaattttgatgtgatagaaaagttagaagtttaaagaaaaagtttggatttaaacaatggccaaggagaaatgctactagctgtatacctgtatgtacgtagcagagcttccagattcggttgctcccgccgcacttgattagtgttagtatttcccttgtatacaagggagcaaagcacgcaagcaagagctaatccagcaccggccatcaacacgtacacggtacattcgccgtgtgcattgtcaaatggtatactcccctcttaaaaaaaaattagaactaaatatgatatatcataataaaacaaatctaaatagggatatgccacattttgggg

SEQ ID NO: 30175 - DNA, 4284 bp, Oryza sativa
gccgcccgcccgtcgcgtcaccgcctcgagccccgtgccgccgcgccgtcgcgtcgccactcgtcgccgtcaccctgagccccgtgggccgccgtcgcgtcgccattaagccggccacccccctctccttcttccccctcttccctataaatacctccaccccctccccatttcttcccaccccattcccctcttttctcctctcttcctctcaaccgcgccgccgccttcgtgccgcagtgccgccgcgcttggtgccgccgcgccgtgcgtcgccccgccttgcgccgtcgtcgccgccgccgtcgtcggtaagccgccccccccccttgttcggtcgccgttgccgcctgggtaggcagggagccgagagggaagggagaagccgggagggagagaaaaagaaagaaaagaagaagagagaaaaagaaagaaaagaagagagaaaaagaaatggaaaaataaatagaaaattagagagagattaaggaggtttagaacatttaaaataattagaatttaattatagattatttgtagtcgtagaattgcaaaattttatataattatagattatttttggtaatctctataactaatcaattcgcggtagatattcggatttaattactaagagttgtatttttcgttgaattttaaagaagatacttttaaatcgcaaaatgacttaggttgaatgagcttaaaattggaatagcgtggtttcgcaaactttgtagtcgatatagaaagatcgattcgcgttcgactttttgagtttattggatttttatttgaattctaattgaattcaaatcgtttcttcgcatgtaattttagggcacaagggagttgcggatccgagcgaggatcaagacccgcaggactacgagcaaggcaagtcatcactattctttgaacatgttgatcccaattgcgaaattgttctgtttacaaataaaattgcatgcaatgatgaacatcctacttgagatgcggcatgtgcagacatgagcgccacattgccatgaaattgatgacatgatttgtgaaaggagaaataaaactaaacaactattttcgactggggcggacggaggatttgggtgatatctggaaaaggctagtaccgtccccggtcaattaaggaccgagccatgaagttaagcatgaaacgacccccgtacaatcgtacatctcgaatgggtatagacctagcggattagatagccgagcagaggcagtatccctgcatagatggttcacccctaagtgaggcatgtgcgctaccgtggggcagccgttgaggtagggccacgtggcgtgctcctacatcggtgtcgctattggtaggactgccataagtgtgtgtgagagagaacttaacttgaaccataatttaatatgtgtgtgagatgtctctttcccaggagtgccagaactcctctcactgctagaaacatggacgcctagagtgcatgaggatttaagttcatggagtgggtactgccaatgcgaggttatcgaaaagctttgccgtgacgcgtctcatgtgttgggacgaggctcatgtgttgggcagtcgcggagtacgggtaaagtgtacatccactgcagtgtgagtaaaccaaatctattcgaatagccatgcttgcggttattgagcaccgggacgtgtattacacttggctagactcaaaattcttaacttgtgtgggagggaaggtggacgtcctcagaaaaccatgacgactcaatggcgggaagctatccttgggatcacaatggatggtggacagaaccgtcgttgtttaatgtgaacactggtactaaaatttgatcagtctatgctaggttttaggcttgtgaaaagaattacaaaacttgctttgcgcaaaagaaccatagccattccttgaatacccgctatcatgtacattgttgttgtgttggcttgctgagtacggttggtactcacccttgcaatatacaaacttaatcagaggttggagatgaagcttcggaggatccctacgcttactaccaggagggtgatgaagacgatggcgctcagtaggtcttagttacggtcgttgcctgtggcaatggtgtgccgctgccttagctccgctgccttatctacttctgcttttggaatgtattccggaccattcggtcctatgttctatgactatgcctgcgggcctatgatgtaataattcacactagaatctcgtgtatgtgcacttggtatttctgctatgaactcgtgtgtaccagactacttgatccagggaaatggtactatttacacaattgattcctgttatgaaaacgggggtccacaatctgtatggcccatcacaggtatctaatcacctgtgacgggttgagaatgcaacccgtcacagctctgacgggttgcattctcgaccgtaaacgggttgcattcacaagtgagtagatacctgtgacgggctatagccggatggctcactaatgacggcatcccgtagaacccgtcaaaggtaaccctcatcactgaccaacacttatgcccatcacaggtatgcagtcaaaggggtgaggatatggtgtagtgtgatcatttgcctagccacaagatatctaaaagtagtgaaaagataatacttcttaccactagaatgcaccacgccaatacgcaattataagccgtcagatctaagacagatttaatcccaactattaaatcaagaatgaatctaagagctcctttgaatgcaggaatggaaaaacaaaggaataaaaaaacacaagattctgataggaatgtaagtgcaaaacagacgattgctaaacacaggaatgaccattatttgattggaccgcaggaatcagacgagagataaagattcattcaaaggataatttctaagatgttaaagcacttactaaattgtctccaaattctctatacgtttgtccatttcagaagcattttaaaggatatgatagaatttaatcctttgtttaaagatagcgctattccgagcgcaagagcacggaatattgtttcgagcaccgcacatcatgtccagagtccacagaaactggtgttcggttgccacgttcgatctgtgtagattagttctatttgaattcggggtaaatcaattacagatccgtaaaattggtggtcggatgaaaataatcgttgtaattggtttatctctgtttccaatcgaggtagttacgatatggtgtgcaacaaactgagaccaaatcttgtagtaaacgaataaccgttgatataaataaaaattgatggtgcatgtacctgcagtaattggattaacgacaaccatgcttggtaaaatcttgtagtaatcgagttactgttgacataaatgtgcatgtgcttgtagtagttggattatgaataacattggttgatcaaatcatgtagtattcgtattactgtcgatgtaaatgaaaattgatggtgcattaacttgtagtaattgcattattgccagccttggttgatgatttcttatagtgagtgcatcaagcaagaaaaaaaggaaaaataaataaggagggagttactggggcctaattagtttgccccaaataacacgtgaatcaattttttacttatacattgaatcactccatcctaaatcacgggacaaaaaataaagattttacatgcacatcatagtaaaagcacaagaataaaaattttacacacaaacacatcaatacacgccatcgccagttcctcgtgacggctgaatggagtttttgtcctggtagtgagagcaagaagacaaagcggtagagatgcaggctggagccgaggcagcaccaagtctggcctctacgacctcggtaggagccggatccggcgacggagctaaagatggaggtcgccgttgccgttgtcaccgcctcactgtcataaactgggcaacgacagaggtgatgaaacaaatcacagtttcttgccgatgttaccaaatcgattgaccatcacaaacatgatctccgccatgcaagggagaatagagaagcacgccaagctgagtgctcaacccaatcgaagtcagactgcatagaatcaagaaggatatagaatttaattaatcatagattgtatacaattcttgcgagaaatcaagaatctcattaggaattgctgagagaactcaccgtccccatgacgtccaccttgttcgccatgggccagacgtctcttcagctcgatctgaagcagatgctgcggcagcgaggcctaaa

SEQ ID NO: 30176 - DNA, 3461 bp, Oryza sativa
gcatatatttagatagtgttgggaggtaatcttccgcgcatgtaaaacggagctactcatcggcgcatgattaattaagtattagctattttttaaaaaaaattaatatgatttttttaaagtatttttttaatatttgtttgtaaaaaacatacggtttagtattttgggaagcatcgtgcgaaacgagagatgtgagttgggaaagaagaggaaataacacagccttagaatctgcgagagaatagggcatgggccctgtgggcagaaagagtgcaccggcaacgcatttatcgtgtctgcaccaattaatcttgggagtagctacatttatagcgttattttttttaccaaaaataattagcatgtatttatattataagtttctaaattacatatgtaatttagtatatttataacgtaaatccccaactataagtaggatgtaagtataatattgtattaggatgtaaatattttttatataatttatatgtaaatataatatacaccatagttttgtttccttggtttctattaaaaaaatatttttaatcaacttgaatcactgattggacagtgtgaacgagtaatattcattgtgtcagagcgcgggcataggcattgttcaatagcttggttacactttactctctccgtttttaaatattagaaattttaattggatataatatatattagtataacgattctaagatgtatcacatccaactaaaatattttatatttaaagatagaagaagtaattatttattggctaacagtagtttcgtattctggcgctgtcctgaaagaatctgggacggaatcgagtggcccaaaaaccgactgctacctgtccaaaaatatgtcgacataattctagcaaatttgcttgtgaaatctccctttggtagaagttaccatcactcatgtaatatgtttctaatctccacttaataaagtttatgagttctaaaagaaaacaatttcatacaccctcagaaatcagaacacctcacacaagacaagacgactgtcttttgcctcaaatttagcattctgagctgccaaagttactaggctttcgtaataaataattttcttcaggcaatcaaaactttatgtctaaggctgtgtttaattagatttgaacttttttcttcaacttctaatttttctataacatcaaatgtttaaatacatatatgaagtattaaatgtgaacgacaaaaacaattgcacagtttgcatataaatcgcgagacgaatttttaagcctaattacgctataatttgacaatgtgttcctacagtaaatatttgctaatgacagattagttaggcttaatagattcgtcttgcagttcacctgtggaatctataatttgttttgttattaatctatatttaatacttcaaatgtgtgttcgtatacttcaaataattttggtacacgaactaaacacaacctaataggctttctcgtgaaagtacccagaattctctaaaggaccggagtcttttcattgagcagtgaccaagaccaatagcaactaattctgggtcaatgctcacacttagggtgtgtttagttcgtgaaaagaaaatttttatgtcacatcagatgtttgattggatgttggaagaggtttttgaacacgattaaaaaaactaatttcataactcgtctggaaaccgcgagacaaatttttgagcctaattaagctgtcattaacacattgtggattactgtagcacttatggctaatcatggactaattaggctcaaaagagtcgtctcgcgattttcatacaaactgtgtaattaatttttgtttttatctatatttaatgatccaatgcatatgtcgaaagatttaatacgatgtttttgagaaaaaatttaggaactaaaccagaccttaatgccatctttcatgtaccgaacatcacaaaaactatggatcaagtgcttacattcgatgccatattgtacttgttcttttcatatgctgaagaattttctaggaagactttgggtcatgtgctcacacctggcgctatatcttgcatttacggattgatgtgcaggttcaattttccattttactcccagcaagctaacgtaccgacattcatacgtgtttgtgtctggactaaggcaaagttattttttaagtaaatcgaaatgattttctgttgacacgtttatcaaactgctaaacggtttatttataaaaaaaatatgtatagaagcttttcttaaaaaaatcaaataagtctattttttaaaaaatttataatagttattaatattatctatctatctatcctatacattaggcatttcctacgagctctcacgttaatcagaaaaatctagccattaattattaattatttagattgtattatcacaaccgaagataataaaatataacctcatgggctacctataaaacccatctgaccacggtacatttaaaacccatctgactgttatgtgtgctttatcatgtaacaaacgaatcatatctatgtatcatctaacaaaaaaatcaccatagatgagaaaaaaaatcaccatagatgagaacgagcctaccttcattacgagagaacagatgcgaactcaagcgaacggcgaacggcggcgcatgagattattttcaccaccgacgagctacctgctgctgtgaacgactcaccgttcatcctgatttgaagcgaaaagaagatacctgcaaacagtagttgtgcgtacttatacatacagcatcgattgatttgcttggcattcctaacactgctttttgaatcctcctatggcatgcaaccatcctgcggcctaattgactgaaaaaaggcacacaatgacgggctactgttgttgtcgctcctgtagaaccgagctgttacttcattggttgtattgcttattccgccgtttccaatacttttctcattaagatttaaatatatggagaaattatcggatgactttgtattacacagagtttttaaaattttgaccttatttttcttcctgcacaacatgttcttatgcgaaagaagaccggggtgaattgcaataatcatggtacccaaccatctacatgcgtgcacaaatgaatgaatattttaatagcgtaatgcaatatcgatgcacctgaatgtactctcaacacatataaagaccaacaccaaaatccctagctctctaaaattcttttaaacgtgcatctatatctgcgtaatatatagtggtgtcaagattcaaatcatggtggctagtccatgctaatattatatttatttatttatttatttattatgttgcttttgctaatatatttttttctgagtcaacgagttagtataggatgggatacaggctagatctgctggaagaggtaactcgaagatcataactgaatacctttttagttaacctcgag

SEQ ID NO: 30177 - DNA, 722 bp, Oryza sativa
tttcgtaaagttattgcaaaatttaaaattatatcattttaatatatttgaataatatattgagaaaacatatatattattattatatgagagaaaatataatgatactagccgcgcaagctgcgcaggccaccatactagttttttttaaatagtggacccacatgtaagtccatgtctcatattcttcatcacgtctccctctctctctttcctcttccttctcttcactcttcctcccatcacacttccaacaaacagtagagacagagagcccgagaggggtggaggtggcgatgaaccggagccaggagggcaccggtgactattcccctcttcctttcgtcctctctcctaggattggggtgccatggtcgtcagaagcaggaagggcgtggaaggcggtggtggttccagcagctccctacgagttgattgacttattattttttaatcatttacatgtgggatatatatatatatatatatatatatatatatatatatatatatatatgttttaaatttctttgatgattgggctatcacatgaatgtcacattagtaaaaacgaccatcaacattgtcaaggagtttttttgcacggggttttagtggttgctaaataaaatccgacctatattggggaccttttcaaaattctaatctgcttctatctaaaatgataaggtggttaagttgggcttgaaagtcgaactcaa

SEQ ID NO: 30178 - DNA, 3037 bp, Oryza sativa
ctcagctgatagtacatatccgatcacaatcacatgcggcgagatcactctacgtaccattcgaatattgacctatcacgtgccgaccgactgataaactaatgaaccgaattgtatgcttagtacaccattagtcgatcaccccacaaaattagtctatcatccatctaataaatacctataaaaatgaaaaatccttggctcaaatttattatccatacacaacaataaactagcataccttcaattgaatgcctataaattaatttatgcatatattcatgcattcgtttttcaacttaaaatttttaataacacctctatatctgaaaaattctaagagctagaagcacattacatacaagaaccaatacaagcctaaaatcccacattgggaggcctaaatttggggaaaaaaaagaagtttttagggttactctctaatctataaatttgaccaattaaatcgaaaaaaaagaggaatggtgtagtatatactgctcttcaacttccatgagaaattccgagaaaaataggtccaaatcgactggatttgaggaggagaggtataggtgctacttccttacttgctagatcacctcacttcaccatgcttgttctgacaataggtataggtgcaactgtacaagctagtgcaataagcatggtccgcatgcctgaatgtttctgcattatatccatccaaggaagcaaatttgtataggttataatatatatgcacgagatatgcatacacagattatattatcatctatcagagagctagcacttagatatttttataatataatttaattagtctattctttacatcactcagctgatagtacttatctgatcacaatcacatgcagcgagatcactctacgtaccattcgatcattgacctatcacgtgccgaccgactctgataaactgacgaacctaattgtatggtttgtacaccattagtgtatcatcccacaaaattagtctatcatccatataataaatacctatgaaaatgaaaaatccatggctcaaatctattatcaatacacaccaataaactaacacataccttcaattgaatgcctataaattaatttatgcatatattcatgcattcatttttcaacttaaaattttgaataacacctatatatctgaaaaattctaagagcttgaagcaagttacatacaagaaccaatacaagcctaaaatcccacattgggaggcctaaaatttggggggaaaacaaagtttttagggttactctctgatctctaaatacaagagaggaagggcgccaatcaggttgatgccaaaaagggtctattccagcaattattttatggaggggtctacttaattatcctctacctcaactctggtcatcactgaccagctcatgagctatactgtattctggcttctcaagtccttgccagtaattttcgcatgtggtcctctttagaccttgccagtaatttaacatttttttgctggcgaggacttaagacgttcgccagtaaatataggagcggcttaaaaaaattggatcacaaccaacgagcgcaccttgcccctcccacaccctaactgctcgacctctcagcccctcacccgtctcagctctctacctcaccttttccacttccctttccaccacagcccctccactctcttcctaatctggccaaaggggcggaagctagcggtggctgcactccctttccctccctgtccttgatctagttggagggaaggagggcgtcagtggcatcgactagatgcagctaattaggtgtaaccccaactatgtgattagatgaacaaactaaacatatagtcaaagagcaaacaaatcaaccagccgagtggttttattaaaaaaaaattaaagcatatgtggtgtcaaatctgacttaacaatactcatagtcactcatacaaaatatcaaataggtgttgccactataggtaacggaagtgattaaaccggcacctatagtgctgttcccaccttcataaaatgaaaaaaaaaataaaactaacacctttaaacgaagataggtgtcagttttacagaaaaaccggcacctagattttaggtgtcggttcacctataattaattataagtgccggtttttaaaaaaactgaaaccgataaaatcgagccgaaccagccaggggagatatttttcctccagatggggcccacacccacactggcaggagataaggccgagcccttctcccgccttctcctctctctctctctgcagcagcggtgggagaggtagcgacgcttcttctctctctgtgtctctctctctctgcggcagcggcgggagaggtagcgacgccctcccgtcaactagatcggggggaggggaggtgcagcggcggcggacgacatggaggcggcggcccggaccccccctccccccgccagatcgagcgagagaagaggtgtagcggtggtggcgggttggacctcgcctccgccagatccggtggcgtggaggcagcaagtttacactaacttcactcagacaatcacacaatagcatcatatatgaatagaaaccatctagaagtcatatccataaagcactgtagaaatcccacgaaaataatccgaaactaactcctacctggagtctgctaatctgaccgttgggcaacccggttagaccagtccaacaccactggtctgaccggcagtccccgcctagtctgaccagccaccaagagccgactaccgaaaacactattcaccgtattttcacaaagcactcacttttgacaattgttcatcaccacgattaaatcatcacatgattctacacatatctagagagaggaggcaagagaaggcaataatatatgttggtaaggacatagctacagtgacagaaagtgatgctgaactccatcggtatcgttagatttgtgctgatgtatatgtttcttttttcacaacagcttagtgccgttttcttttgatatgtcctccacgtgtgttgttg

SEQ ID NO: 30179 - DNA, 4052 bp, Oryza sativa
agaattaagcgtttgtacgtactgggaacagtaggcatggaggatgagctgcatgcacgcaggtacaggtgcagtgcatgagaaagcaaccgttagccttgtgatggaacgacaaagtgggatatggaggatggacgaatattacgtgcaattccgacaaaccagttctatccaatgcatcatatataggctcttctcagttattttattatttattgccaaaaaaaaactaaggttagtgatggcagaattaggaatgaaccatgcttgtgtccaaactccaaagtcgcctcagaaatagtcacggaaaataacaaaacactaccatgtttcctcaaccgtgtattcaatatatctggctgggagcagaggacttgctggatggtaccaagacaccgtgatcaatataatagtatatgctctgcatatgtatgtacttattaccaaaaatttatcacaatttgaaaggcgtaatatattgagcctggagcactgaagtatactttgatccctgttcaatatcctacgccgacagttacactttcgatctgaataatggacttaccagctggtacagatcgattaatgaacgtgcttacccgtacgtgtttggaccagttagtactcattactacgtacttataaatctaccggactaccgcgacaacagccagcaagcttatataggcaatggctgatcaatcaagggtgagagatctatgcagtgtccaaagcctaggcatgacaaagtaagtaacaaaccatgcacatcccctcttcggaaaagttgagaggtgtaaacttgtgataggtagtacgtacaacgtacgaacgtactccatctcggtgcaaactgtacatggtttaccaggccggccggccggccggcccggggaccatgcgatgcatgatgccagcatgcagctgatgtgcacctcacctcataatcccttccttgaaacccaatcaacagagacaatacgcgagcacgacagggctctcgctcagctagcgcaagggcgcgcggcgcgttgacaaaacccctcatgcaccgcgagtcgatcgagaccgagacgcccgcgcgccccggccggccgcgaaccagcgatcgacgactgagccccgcgcgtacggcgcccgcgggggccgcgcggcagggtggggggttgccggcgggttggtgtggccggctggccgcatgggaggagcgcgtgggacgtgccgtaccgtgggtgttctgccgggtggtgaggccgcgggcgcgcgactggcgcgagtcccctatgatgcctgggcctgtggaccacgcggcggagagactcgatcgcggcaactgccgcgcccgtcgcccgatatggtgtacgcgcggggggggtcacatgggttttggatccgtgcgcctgcctccttcaatgcgcgacggcgacgtcggcacgaaccggaactggagggaagtggggcgcggtcttgttggaaatgtcaaccgcagaattgtcgtaaacgacggcggttgatccagattccgtcgagcgactagcgtgcaggcgtgaatctgcgccatatgatcgatcgagcgcccaagttaacaagcctggcagtcgtgtccgatgcaacaatctagctaggcccagacgccgagtgttatactggtgacggattcgtgaacaaggcgaggtcaggtgagaaaatgacaggtgtgtgttttggcaaagggagtgtacgtgttcgggcctagcccaatcattcatcctgattcctgaatgaaaaaggccgaaaggagctttttatagtgcgggcctgctcagatctcgtgataaaggcccagttacgacaattcgatcacaccccagaaaacaaccaattaacgaatttggttgtatatttgtcgacaaattttcctccaaaaatttatcaaatgtaattacagtttaatcgtagtgtaattatgtaactttcaaaaatctctcggtaacatgttatttcagtaaaatagaggtcgtgggaacaaatcctttcacatatgtgtgtgctgtgattatttttcttcctcactagaacaaatcttgtaaatagatctaacgatcaaaattacgtgaaacttacatacaagttacactgtagttacatgcaagttacagtgtaattacatacaagttatagtgtaattatactacgattatactataattacatctgtcaaatttttagtagaaaatttatcgacaaatatataggtggtcccaccaattaatgttctttcttcatcagaaaatgtcatctggaatgcaaacgaaggaaaaaaaaaaaagcaacgccagttcaacaacaatcttgatacattcttccataaagaaccaacaaattcgttgtgttcgctccgggatattgataacttaataactttaggcgtgcgctttttgttcttgtcaatctcatcctcttctctttttctgttgggaagaaacctctccttgctcctgcgttacaagttggacagggacccatcaagctaatgagcgatccgacacgtacatacaggacagtggattctgatcatcaagatatgtgtgctagactgctagtgtagtgcagtggagcctttcgctgtgcgtttttgcacacgtcgagtacgtgtgccttcgcccttcgccgatcgttacgcgacagccgatcgatcacgcgtccaaagcccgtcaatcgagtgggcatgcatgcatgcgctccatctggaaagttaatttaagctatttctgagagtgagatctcatcagatcagatatatactccgtactacattcgtgctagtctcctaatctagaagattagtagctacagggtactatatatctggctcatttttcctgttctagcttgtaacaaaaaattcactgctatgatctgaaacgttgtactccatcaaagtatcaaacgaatccacttggaaatttcggaccgaccggttttagattcccgccaactgagcctgtgaaaatagtaaccgataaaaacgaaataaaaatggtaaaagatatagaaacataaacatatttctcttataccgactgttttcgtattttaccatattccacttggaaatttcggaccgaccggttttagattcctgccaactgagcctgtgaaaatagtaaccgataaaaacgaaatgaaaatggtaaaagatatagaaacataaacatatttctcttataccgactgttttcgtattttaccatattcctattgaaattacctttttataatattgataattaccatatttttaaataccctaatatgtgtggtttgatacatagtttagaggctcgttaattcctcaatcaaatcctaagttgagtgcatggcataagaagggagaaagtttataatttaagctagtgtaagcttgaatttgttttcgcatattatattatatagttatattaagttaaatatattatttttacagcttaatatttccagaatttatatcggtttccgggcgataactctgtttttcctccgtatagtgacatttctgatttcctgatattttttacaccgctttcattttcgatttgaccctttttatcctattttctagaataatatggttaaaaaatgactgagctgtttttcgaccattttcttccctatgagtgaccatgtgtgtagaagatttatccattttctttttattttttgcgtacttttcctgtggctcatgcagaactgaagggctggaagcctggaacatgcatatacagtactctgttgtaaattttacagacgtccattaattattagggtaatttggaaccatgccattataattttgtaaagtttaaaatatatcatcggtatctcaatgacatgcaggacccatatgagtcaatgacatgtaggtcaggatggcatatgtcggtgacatgggatcaggagtatcatgactagaggtttgaggcagacacaatcgcacacgtggcctggtacccccgagggacgtcgggcccgagggtgatgcgttcgccctcctcttagtccccccgaggggg

SEQ ID NO: 30180 - DNA, 1775 bp, Oryza sativa
aactttacatccttatgcactctaggcgtcatacgtttctaacagtgagaggagttctggcgctcccgggaagggaaaaacacacacactcctacgttgcttcttgttgttgaacccagtccatcatgattgttctcttatgggtatcctcatgtagtattgccaagccagcctctgaccatccgaaacgggcatccgccatccacctggccatccgaaccgggcatccgccagcagactgcttgccacatcacacacctaaaagaagaccactacgcatggatactgcctccgctcagctatctactccactaggtctatacccatatgagaagtgcggttgtacgggggtcgtttcatgcttaacttcatggctcggtccttaattgaccagggacagcactagcattttccggataccacccaaatcctccagccaccctagtcgaaaacagttctttaactttattttcctttcacaaatcatgccaccaatatcatggcaatgtggcgctcatgtctccacatgccacatctcaattaccttcccaaaggtaattgcccaagcatatagcatttgataaatatgagtatgcatgattctagaatagcatttctaagcaattgtcataattgactagagacttatacgtaaacatggtaaacaataattaaggcatggcataatcacaagtaggatgttcatcattgcatgcaattttatttgtaaacaaaataatttcgcaattgggatcaacatgttcaaagaatagtaatgacttgccttgctcaaagtcttgcggatctcgaccttcgcttggatccgcaactccctcgggctctataattacgtgcgaaggaataatttgaattcaattagaatccaaatgaaatccaaataattcacacaaacatcgaacgcgaaacaccctttctaaattgacaacaaagttcgcggaatcgctcaattcgaattgttgggtcattttaacctaagtcattttgtgatttgaaattacgtcctaagaattcatctaattgtttagttcttaattacatttaaattactaccgcgaattgattacttaaagagattaccaaaaataatctataagaattcatctaattgtttagttattaattacatctaaattactaccgcgaattgatttcttatagaaattagaatagtctataataatctatgattatagtattattttgcaaatactacactttagttaatcctataattaattcctaatattttaaatatcctaaatctcctcctaatttcctatttattttccttttctttttctccctttctttttctttttccttcctttctttttcttttctttttccttttttctctcttctctcttttctctctcccggctcctttctcccttcctctcttcttttctctttctccctccctctctcttggctttttgccctcccggcggcgatggcggtggacgcaagggggggaaaggcggcggcttaccgacagcggcggtcggcggcgacgacggtgacggcggcgcaagccccgacgcggcacacggcgtggtgcggcggcaccgagggcggcccggcggcacgaaggcagcggcgcggcggcacaaagacggcggcgtggcggcacgagaacgacggcgcggtggtgagggtagaggggaggaggagggaatggagtggggagaatggggaaggtggggtttttataggggagagagggggaaaagggagagaaggagggggggtga

SEQ ID NO: 30181 - DNA, 916 bp, Oryza sativa
aatagccgcgccctcggttatgggcaagccgagcaatgtaccccaagttagtgttttaattcttaaaacctgcttaacaactaaaatgtggaatggttggcctgggttggcttaggacgagctgggacccagggtcgggttgccagttcggtctgaatcatcataggccttgggttaaggcaggttcgtgtgggttcacggccttgattaataacattgtatagttctaggatcgcgtttacaaaatagctttgagcaactaaacgtctttaaatgctgtttactgcaacgctaacccttattataaattcccttgtactcccttgcatttattctgcatttgtgggtgtgtcttgttgagtacggtggttgtactcagtcttgctcaatttttcccaagtccagaagaggagctccttggagatgaaggctttggtgtctagctcgtgcctgccgtcaagcgcctgtggtcgtcgccctagtcttccgttgtttcccgtttgtctttgtgtgctgggccttcgctgcccgtgtaataaatatatttacgcttccgcttgttaaactctgatttgtatcaactgttggtgtaccttgcctcctgggacaaggattaatgcacgcacgtaaggaacgcccgttgggttatttccggtcgtgacaagttggtatcagagccacctttgaccctaggacgagccgtagatcccaagccttagcaatattttcaaaaataaaaatctttgattatttgtgaaaattgtctagtctctctctgtcttgctgcttcatttatcgccaaaaatctgacctttgaaatgttgttttttttgttttgtttgtagatggccggcagcgtcacccgtcgtggtttggacatgactggtttcgtcttggagctgcggcgcatgtgcgt

SEQ ID NO: 30182 - DNA, 5713 bp, Oryza sativa
gccgtgcacgtcgtcgtcgcagccaccccacgcggtcgtcgccgccgctgccccgcgcggtagccgccaccgctgcccccgcgggcctcccccctccctcctccggccagatctgggagggagggggaaggggagccgccgccgccgcctcgcgccgtactcgtcgccgctgtccacgccggcctccccctccctcctccggccagatctcgaagggaggggggaggggagccgccgccgccgccgccggccttccccctccctcctccggccagatcagggaggggagggagggaagggagccacgccgccccgccaccttccacgccgccccgtgccgtagccgccgtgggagaggccggccttggagaggtgaggtgaggagagggccggccgtgggtgagggaaggggtgaggttttgagacttagaaaaaatctagggctcctatccaagtctatttatattcaagtctattttcacaggcggaccactgaagtggcgcctgtgaaaatcacaggcgccgcttaggaggtccgcctgtgaaaatagatttttggactggcacattcaccccgatttatatttttgtaggcggtcatttggctctaaggtatgtccgcctgtgaaaataagacccccacgtcgagaaaaatgctttttctagtagtgcatcgcccttattcatatagatgctaataaatctagacacatattagcatctatatgaatgtgggcaatgctagaaagtcttacattataaaacggatggagtattaaatcagctatagatgatttggagccaatatttggctatactgttaaacttgctcttattattagagagatttttttttgtttggggggtatataaaattatactccacttgtgtatcgtgtattcattcattcatgtagttgttttaatttacacatttatatatatgtgcttcccagcaacaaaagaggacactattaaatatgctaattcattgcttgacctggccggcggatgacatggaggtagttgacaacataatggcatatagtaaaagatttcaataaagaaattaataaaccatgcatggcatgcaatagtttgcatgatatataattctaatatatatataaactgtatagaatagtatgttggggaactctacttggcaagaatttagaaactaattttgtgacaaactgcatatagcataatataatttgctctaaaaagagcagcacttactttaatatgtttatagtagaaccatgacaatagtagtagtagcttttatccgtcacacattgaggtcttaaactagtagtagtagcttttatttatttggcacttgtcttaatttgatctgtttccatctgaaacttctcctgctcccagctgaaccagaattatataggacgactagcatatactctttgccggcccgttccggaacttggagagaaaaatgttttggaaacaaaatgagatcatgatgaataatctccggcagcaggcatcaacggcaccaaccgaggttgctgtagcacttccaaacaacatctccctcgattgcatcctgcccttccttttctgcccccttttgggggccaagtgaaaaaaaaggtcgcatcatggtgtggcatagaataatacttccttcgtcctaaaatgaagccatttttgatgttagcatgggtattaagaaagtaggtgagaatgattggagaaagtgtgtgattggttgaaaagagaaagtaggtgaagaagaatggttgtgattgattgagaggaggaggtaggtgaagaaatagcttcattttaggacaagacactgtgctaaaaatagctatattttaggacggagagagtagataagctagtcccgacccccctcctctcctctcttgccccgcctatataatccccaaacatcgctttctcttggagtaggagaagggtagtagtttaagctatagctctaaagacatcaccatgcaacattacttgcgttattactatacctatccaccacctacacattttgtcatctccctctctctttctctctgatctgtctcagatgtttatgcacatatacaagttaatagttctgtggatctagcaatcccggcttgtttgtttttgctgctttggtttgatgatagctagatatatcgagagggagatgaccagtaagcttggaagaggaagaaagagagctgctaggcttgttgcggtctttttgcttgggtaaaaagaggtattggcgtgcctcaatccgaaggcatggctgattacaggcacctcgaccgatctagcgcatgcagccatgtttcttggattgagccgcgtcaatatctctccttgcttccttacttcatgtactgtgtcatgctcaagcatatgtcccctctccgatcttcctacctcgtcgagttcgtcggatcagttcccaaattaaaggtgttatatatatatatatatatatatatatatatatagtaaatttgtttggtgctccatggtgcccgggcaccattgttgaaattgagtatatacccaattcaaatgagtatgaaactttttcaattacctaggtattaacattaactactttactaactagtttaaagcaagtttgaactgaatttgaacttgtttttgttagattttgattctaggtatatagcatccatacatataattagttaggtatgtaatcatgtattgtgaaataaagttaaatttgagttgttttgttgataagtataggtatgaatcaaattattataactaggtatatactcacaatttgaaaattttaaaaaatttgagtgattttgtgcattagataccatggtgcccgggcaccatggtgccccatatgagtgtcctatatatatatatatatatatatatatatatatatatatatatatatatatgcttcatcttttctggggttcacgagtcacacagactagctgctttagaagtagtactatgtattgtgcatgatgttcacagttaaatctgcaattttttccatgctggagtgtttttataggtttgcggaaggaattaagttgaatatatatagctatataattatatatatatttatcttgcgatcctgagtcttctgacattttccatccaagttgtaggtctgatgcatggcttatttcaagatgtagtttctggtttgcttactaataacatctcttcaggtattcattaattaggaactactatactttacctactggaaggaggatgttgtttaaatctataaatttgtgctggttgcatcctcaacaataagttacactgtatctctctgaaccaagtacttcctctagcagataatatatgaagttagattttttttttcaaggtccaatgcatggcttaaatcataattttatattagataaatattataagatctaataagtttatgagattacaacagtacttattggtgacggtcaaaatttgaaaaaaatcttattacaaatgttaaattaatatttgtgaccggtgggagcatgtatctatcttaattattgttttgggatgcttttattatatttttctgcataataaaatattttttgagctcttttcattctaatccccccctccccccccccaacctgtgtgtgctcctaaaaagattgttccctcttatgataagtaatactccattatttcaaaattaaactaacgtatgccatgtaaaggaaaatagagggattatatatacggttatgcttctaacttcacacaagtttataactatactagttaggcacttcgtagtagctcacacataattagacgggaagatcttggatgaattgtattgttatggctgtagatttgcatttaacatcgttctgcatattaaaaacccaactgttctgaatgttgggtaatttagagctcatctattataagctatgggcttaattatgacaagttggcatatattaactatgaactattaaaacataaaaaaaaatctgtaactgatagtctatactgaagtagaacaaaataattacaattttcaattttataaaattattaaaacaagaaaaatgatgtaattgggaccccaaaaccgcgtacaactacgtattattaacaatttttttattaaataatgccaactctataattgagtctccaaacacgaaacaattcaatttttattaatttcaaattttagactcctcgaagcccttgtagagcaaaagagctgcacgttaactcctcacactacttaaaaaaccatttttccaaacggtcggttcctatttttgcgtgtggttgagccgctcatctgccctaaaatgtctgcaaaaatcgctattttttcatgcaggtggcgcaaccgcatgcggtaatttgattttcgcgtgtgggtgcttatgtcgtcctcacgcaaaaacaaaaaaccaaaaaaaaacaaaaatctcaaaaatcaaaacatcttgccgtcgacgctcgttgtcgtcggtgctgccgcccgccgtcactgtcgccgagtatgtgtggggttaggctcctctcgtcgtcactgccagatccgtgcggagccaggtgagggacagcccccgccgagcccgtcgcctgctgtcgagccgatcgtcgtccactgccgcaagctatcgccatcaccgagttcgcgtggggccccgctccttccaccgccgctggatccgtgcgaggctaggtgggggacagccaccgtcgccaaatccgagtgggcgatgacaccaccgagcccgggcgtcgcccgctaccgagccaccagccgctacccactaccgagtcgtcgccgccgctttggaatgagagaggggaggaatgagaaatgagagagagagagagaggaggtgtgaatgagggagaggaggttggagaggaggggagataataagggacttggaaaaaattgtagtgttgagagggaaaagaaggcaagttagaattctagcggatccccttaagaggcctgcccaccaaaatatattttctcatgcggtcctttaaaagatccacatgtgaaaatatgctcatttttttatgtgagtaagttaagaggtccgcttgcgaaaattgatttttgcatacatgcattttaaggagccgtacatgacacggttaattatggtccacttgcaatttaaaggggtctcattcacaaaaatcatttgtatagtagtgtcactagctgtcgtcgttgataattcatgttttatttgtggtttctctcttttctatatatttaatatgctctatggagaactctttaattatgggaaaataagatcgatacttgaataaagatatatatagatagagagagtgagttttccattcttttaggttgacggaaggattgctatggtttttctagaactagcagaaagaccaaaatcgaaacgaatggacattagtatatacaatttggcttggtagtggtacgagttatctcttggtgtagcaagaaggaatttttttttatatttatatttatttttaaaaatatttaaaaaataaattaccattttaaagtttggcaaaaatatactcctcccgcccaccctaatagagggagagaagggcctaaatgtaaaattttctacaacacataagacgtagttttgtactaattgtaaaattctcatatgatgtcggatga

SEQ ID NO: 30183 - DNA, 3070 bp, Oryza sativa
gcaccccggcgctgccacccttggtgttgcagccacctcctgttccccaggctccccttcgtcgagcccaaaacaagctagaaaaccgttctcgccagtgaccagtggtgatgccatcgccttcctcctccggcaacctttcccgactcaccgaagcattgtcccgctgcatcgtcgtcgccgtcaattacgcctcgtcgatctcttccttgagcatgcctccatatcaagttattgtgtgtattcaattcctatgagcaattcagattacctttttttttatcttgttcttacttgtttatttgatttgcttgcagtcataaggttgatttgcaccagcaagatcaacaacccacggagtggtgtatcgatcgctaaggcacaacacaatagcgtctcgtacggttgtagtaagttctcccaaattagagttatcatcaactccccgaaagatcaggccaatcatagccgtgagtgtattgagtgcagctcagggtttatcaagacctcaggaacaccatcccctcctttgagcacgtcgttcgatgaagttgcgtcgccctcaccgactcgaagaatgttcttatctctgcttttaccatggaccatctcggggaacccagtccttggtgaactacctgttttacccatgggtctcgacaatcagttgctcggtcctttctctcctcgagcgctgatgtattacacataatttaatagtacaataatgattaaataatttggaagtctccatttaaattatagctaaattttggatggtcgtatcttggccatacgaggtccaaattgacccgtttaaattgcttaattttttataacttaaagggcccaaaaatgttatttttatgtaatgtgatcatttctttcttagagttttagtcttgttttgttattggtgtagttgctatcattttagaggttcccatctcgcaatttaggtccatcgtttgtggcagcagaaaactgttcgttgactaaggtcagtcacgctctccttgagcatattgaaacataatttgcgaaatgtattttgacttaaattattacattcgctttattaaatttgttgtgttataactattttgttgtcgagagatcgtagccgatgccccaacttgaaataagaactcgtcgaaaagtaaaagaaaagggtggcgatacgctgaaagttgtattgattggattgtctcccctattacaatggtctggggtttatatttttaccccgagtacaaaacttgtccattatggacacgactcaagctttcctaaagataaaatacaaacaagtccataccatggactcttaccatatctctaactcaaaccgatataaatatcctaattaatagatacaattgccttaaatgagctctatctctaaacgacaatgacggtcatctcaatcgaggcccaaaccgagcccaagtcaggctagtcggctacttgtcaaatcggctaaatcagactccaactctatttccaaccgatgcaatgcccaaccgatgcgtaatccatatttggaaagatccaatcttctttgattccccttcaattccaactcgaaatccgagtctatcttgccaaatttcgctgttaacacctgttggtatttcttaacaatattactagaaatatgaatgtctagcaatgacgctagaaatggtcctggtatatatatggtttacagaaaggatccacaagcgcacggatataccattgtagcatttcgcccgaaagtattataaaggtatcgtatttatttaatcccaaaggaagagtgtaagatagaactattctaataatatatatatatatatatatatatatatatatatatatatatatatatatatatatatatatatatatatatatatatatatatacatgccacttacataatcaaagtctaagtaggggttaagatatttatttgggtagagtgacacgaagcaaagcactcatatatctcatttaatcatttctaaactaagcataagaagaaatagaaaaacaatcatttcctataattctaatatacactcaattttagtctacatctgttagtatacaaccatatagccaatacccctaatagtgcactcctggtgcttcgagagaccaccccggattgccgagtttcttacgacaacctgtcatggccgtccatccgggggctaaatacggaggaataccctccccaggaaagttttttaggatcgtactgagctgtcaccatcagcggcccacctcgactgactcgtagcatataaacacagataatgatacctaataatctagacaccatgtgtacattataaatactacactatatccctcaagatgacatagagcaactgaataatcagacattaaacccacacaactgcacctctctggtaggctaactatacgactgtaccgatacagacataaagtaaagacaatacttagataaactaaagtatcgagagcatatgaagaagaatatttcattaattccaaaagtcttacaaaagaaaggaagaatgctattacaaccttaccgaaattcctccgaagactccgagaactccgagatgctattctattctactccacttagcactagaatactaaactaaagtgtagaagagatatttgagcttgcttgagtgtgttgagagagtgaatgagctcctccttttatagggttgttatgacggttgtagcctatgcgaaatgaccaatatgcctgcaaccatcattggggagcgatcaagagcgtccaggtgtaaggccagccagagccagcgtcaccagggttcgcagcaggcctccaaacttccctatgtggttgacaggtgggtccctatggcggttgtgacagttatgacggtttccgggacggttacacacgacaaagtgggcccatcttatccataggcttgcttaggagtgaggttttctcattttctctttattttatttgctcaattcctacactcaaataaagtccaagtacaagtggaaatagattattctaaaacaaaatatgcattgcaag

SEQ ID NO: 30184 - DNA, 2299 bp, Oryza sativa
agctataagggcaagtttgataggaaaataccagcgatcaggcgcccgatcagcgccaaaaaaatcgggcgcccgccgcttcccacgctgtccccaccacacgccccaccatatgcaccgttgcaacaaattatccacatattatggaaatgatctattaagggaattcgtttctatttttgttccagcaacaatgtcagcaagtgtactcatgacgtttcactaagtatatatcaaatgttgcagtgaaattgaaacatcatttcgctatttgctgaaacattgtttttatatatggtgaaacaacacccgtttttttggaaaccgtttgttttatacgttgtagcaaaatattccatgaggtgatttggttgtgtttcaacttttcaaacgattgaaacattttcgatctacttagtgaaacaattctgatctacttgctgtaacagcgctcatttttttcaaacaaaaatcggacgcctgatttgtaggcacctcaagttttatagtaggggtagttaccacatctaattttgggccatttaccatacccccactgggtttggtagtagtgtataggggtgaaaacgatcggaaacggtcggaatcggtagcatctcttcggaagcgatgctcgatcggccggtgattgaccatatttattatttaaacaactcaatatcgacattaatatgatgtataaagaaattagaaaaagcaaaaatttaaaaatagccaaaaacgttacggtcggaaatggtaccccttaaacagaaatggcgcccagtcgatcggaaatttccgtaaccgttttacccctagtagtgtagtactaggaatcaactctaaccacccattgctatgggtattttagacttttaattgattgacgtggaggggcagtttagtctattccgatgatcccgagaggcaagacagccttgcatgttgactcgttcgattggcccaagcgtcctctgaaaaaacaagggatgcaagactgccgccgccgggccgcgctttctgccgtcgtcccctcgctctaatcggcgattccacatgcagcggcgaatcgacgtcctgtgcagcggcgcctcagtctggcgaccccgctgcgctcccaccggccactggccgtcttacacgaacccttgtgtgtgaagtcgccgcccctcttgcttttgattcagaaacgcggccgcctctgcatttgatccggaggaacgccccgtcgtcgtcgccgctgctaccttccagcacgagcacccgttaggatcttctagagctagattttctatttctcttctcgtttagttacttaactagtttaaggatttcctaattgctattaattagagaaagacaggatatttcgtggaggggatgcctgcaggtgatctgactcctatgtggttgtatttagcagcgttagtttaggctctagttttgagtttttggtttcacttgtatgtgcaatatgatgctgagaatcatatatattcttgaatgtattctaaagaaatgattttgtttaccttgttctttcaagtattcgagctaggagtgcttcctgatgtatttcatatataatcaggaattgtgcagaattgtgctgttgtgcgtgcatcgttgttgctaccgatggcgtggcagttgccgctgcataatttgcatgcaacttataatcagacttagttttactgcatatacatttgtatatgaaatcagtttctcttgctccatatacattaacaacactggatggcatacatacatacatacatacatggtgctccatggtgcccgggcaccattgttgaaattgagtatatacccaattcaaatgagtatgaaactttttcaattacttaggtattaacattaactactttactaactagtttaaagcaagtttgaactgaatttgaacttgtttttgttagattttgattctaggtatatagcatccatacatataattagttaggtatgtaatcatggattgtgaaataaagttaaatttgagttgttttgttgataagtataggtatgaatcaaattattataactaggtatatacttacaatttgaaaattttgaaaaatttgagtgatttgtgcattagataccatggtgccccatatatatatatatatatatatatatatatggattgtgctttcccacatgctcttattggttaagttgtacttgaggctatctactagacaggcctgcatttgtccaactttttcgtcacatcaaatgtttgaaatatgcatagagcattgggctgcag

SEQ ID NO: 30185 - DNA, 17299 bp, Oryza sativa
atcaagatgtacatcatatcagccacaaaaacacactgaggtgcgtatatgacagtgtataatctgttttttagataatgtaatcctcttaatctgaatcacattttttatgtgattacatgcatgcattctctgcatctgaatcatgagaggtgtcctacctgctgcaagttcccctgtcctacctgctgccacatatgataattaaaccgtataggccaatctaacaaaatttaaaattatatgatgaagactaacgtggcgcatggaacatgcagcaaatccttgcagctatcctgatatagtgatatagctgattttttttttaaaaaaaagctactggaatactctactctatacgtacggtacgagttaggtacatgtatacactgacatcctgagttatccacattgtctctgcagaaagcttagctagaataagatcataggagtagtaggcactccaattggcagccattgcaaaaacatttggaaaaaaatacacaatatacgttgtttttaattagcttcaagagaaacatgagaaaaagagggcaaaatggccccctcttttattaaaaaaatgaatttttagaattttgaatcttgacattattttaattccacatttcaactctaaaacttactaagtttaatattgatgattcaaaggtttatgatgcaagatataatatccaaagtgtatgtttgtcacaaaaaggtcttttattatctctcacacttttttttgggtaaatctcattgagatctcactatccgggaccgatatttttccaaaaaacataagaaaaaactctggtcgtcagaagctggtttgttaaaaactgaaagaccaaattaatgaattcataaagttaggctcaaatttgacaattgtagaacttttatctggcacactgaccaaacttctctgaaattgatgtaaacatgtgtgtattctaaatttctgattaaacataagaaataaacagctggccagctgggtgacacaaactctctggatgcagtgttatataccttcacgccaccaccgggatgcaagaataccaccatttggcgtgaacaaacaagtcaatgcaaggacaatattaggaactaacttgggatttgttttggacatttgttgtgttaaggtttatttgcttcttgtttggggaacttttatttgttattcaattgctactttagtttggctgctggatctatgattgagttgttggaaaaaatcggttgattagacaacttttagtctttcattgagtaaattaagggatgcttagtggatcctgatgttgataggggcttaaatcatgaataatgaccatttaacccggggatagcctgatcctttccccttctcctcctgaatcaatttacttgtcattatagcaaatctcacattaaattgctaaatatgccaaattatattgctacatttattattactacctccgttcttatttatatgacgttacgtcatataagaaattatctaagggagtatcttaatgaaagtttcttgtgagaatactaatactaatatgtttgaattgatgaaaggtggaaaggacaagacatctctaaaaatacttcgaaatatgtgagaatggcaatattttgacaaaaaaatgaaatactataacgacaactgaattgaaacgaatggaataataagatttattcacttcttgtcttgcactaagtacagaacatctcacagctgctcctccattgtttcatatgggcacaaacactgtaagtttgttattgaggataaatattggttgatgaatttgggtaataagagttaataagatagaaaattaattgggttcagtagtagtaagactgtgagggcgtgtatggttcataactatattactcacttccattttaaattactcatcattttaattaactttatgctaagtcgaatattcctaactttaattatctatttttagaaatttatatagttaacatcataaaatctatgtttttgcaccatgagataatttcataatatataattcatgtatagttaaactatacaaatgtttagaaattaatttatagtcaaagttagaaatattcaacttaggacaaaactaacgacaaataattaaaaatgaatgaggatacttataactttggcaaacaagctttgccaaggtaaccactaacataagttggggtcatccttgactgagatatctaaaccccctactcattagtgagggtaagccataacccaaggatggcttcaaagccataaccccctccatatagctagtaagtgtaacacttggggaaaaaaagcaacattttttatgtagaaaattatagggtgtattttatttgaaaggggtctttaagagaccatgagttacgcataaaatatattcataaaatctgtagagccaatgttttatcaaagctatttgaaagatgaatccatcggtattttttttgtcaaaatttacaaagtttgacttctcaaaaaataatacgctgtataattcttctacagagagagggtatatatataacaatagcatttataagaaaaactattttttttcatggttgacctgtcacatgcaatttttattaaccatgaatatgctattgtgcttgatcacttattgctctccgctaaattcctccactaccttgcagtcgactgatcacttattgagctttacagtgtgacaacttgtatatatctactaattcgtatacattgagcctttcatgcatgtttcttataattgaactcatcaccatctgtttaatctgctatcccttggaactaaattttaataaataattttatattattgatgaggacatcactgtctcggatataaccatgcttatgttaaggtttacttaacaatataaaagtgcatataatctatataaggtttacttattatatgtttgaacaaacttactacaccatgagttttgtatcttctcatttacaaaaatacttgtgtgggtgaagcaaagaagatcagcctcacgaagtacttggatgatcaaagaagttgattggagatcaaaccaagattttccccaagtctactcctatatcaccatatcacttttggtctatagaagtcaaaagattaagttttacacgttttggatttagattcgggtctcctaaaagtatcaacttcaaatggacctagccattaatctgaaaagaatcttgagttccatgagtactagttggaaagtttatggagtttactttccaatggttttggtctcatatcaaaatttctcctcagctgtcgagaatccgcaaaacaagccacatacctcatccagttcgagtctgatttggacattcaaccctataattgtgtcgtggctaagcctaaggagtgaataccctagggctaatcctacgatgtccctaattatatttattcagtagcctgtcatcgtttagagtcgggttttccttagattatttatacaattgcagtttcactgttagtttggttcgtggaacccgaactttgagatcttaatcattcatctacatattgagttgcaatctgacttgtttctgctagtgttctttgattcgcatgctgaaattaaccttctcggcaaggccaactaggcagtgcacagttgatagagaagacatgatgctacgattgcaggatttggatcgtgttgatcggaagccggattgtgtgtatcaagttttcccaaatcgagagttatcaatacctatcaaaagatcgagacctagttactcatcagttaatctccctcattgatactaattatatgattatcacttatgcatgcaaacattactctaacatgcactaattaaccctaaagcatgctaattatcactcatcaaagctaatttgtcacttgatacccttatcaatccttcttcttgtaccttcactaggcatatttctcagtacaaaatctaaggggaatatttctcaagttctccaaacagtggccacgcaccatctatgtttcatcctaccacccaaacgtatggatgagacctgctctgtccccagctggtgccatgaaccaaatcataacttagataggctgggttggcatataaactatgcattttaactgtagtatatatatatatatatatatatatatatatatatatatatatatatatatatatatatatatatatatatatatatatatatatatatattagtccttttcaagtgagaaagaaataataagtggttttaacaataggactttcagcttaaccattttatccaaagcaagaacaaaattaagtgcaattaattgctaatatatgcccgcatggactccaaatggaagggctatatataggctaatgctgattgtgaagttaaagtgttatggttgatattagaacataatctttcattgcacggccatgtgtgtttttgggatcatagtgcgtatataacatatatagtcatgtatcacaggatttcctactctatcaatatatacgaggcactttttttaaaaaaaaaatatcgcgggatggttctaaacattgtagggcatctatagcatgttgttgtgagcattattattgccatttaagggggggatgaatgtaataattcaatctcttagtagttagatgcatggtcattgtgatatgttatcagtgggattgatctcatatgaagaatttagataggttgaggctaacatataaacccacatattccaacaatttcaccttaagggttaacaattttgccaaattatctatgcaattctaaacaattgggcattcaacagttttccaagttgccgaatatatataccttttgaaatgtcgttgcataatatttcgaaagcgttttcaaatatttttgcatgatatctcctcaaggcactacaagtcataaagcaaaaatttccaaaacccaaaaagaggctggtacaaagtggaaaaaaaagtagtaactcgtgcgaaagcgaaacctattccgatgcagatgcgtgtacctgcatttacacattacttaaggtagctaagtacacaaacatagtcaggtttagactgaaaaattattgtgacttgacaggccacattaagtatataccaacttgtactaattattaatcgttgaaagcaacttggcttaaaaattacaagattagatacaaagaggactaatgatcaatatgctcaggttatcatcgtgcaccaaaggctaaaacttgtgtgttacagctcaattgttagttaaggtactaaccgtttttgtgagcaactgcacagttagttcaagtccacttctatagtatcatcattctcatatcaacaataattaattaactaagagtttgtcctaattaatattgccttattagctgaaaattacttaaattactgatatttattactgcataatcattttattgcagtgctagattaattgttcacggttataaactaggccatccccgatccccaattttatatgatttgtatgataaccatttgttgtaatttggctcatatttttctgagttacccacaagatttgataagaaccagtagagaagaaatgactccaaattaaaaaatatatgtagtcaaagatagggaagaacattgcttttaattaagaacgttataattagtcaacaatcatgcatgttgcccagataatatgtgggctcacattcagtaaaaaaaaatgtgggctcacacaaatcttcatactttcatgttacaagagtttgattcccacttacctcgtgtgaaaaaatagtttgacagtgcagggcacctactaggctgtgaaggcttttcgtctcggtataccatatctctcatggttcttactcccaccatattttaatatatgacactgttgactttttaaccaatatttaaccatttatcttattaaaaaattatataattatcatttattttactgtgactttgatttatcgtcaaaagttctttaagcatgacataaatatttttatatttgcacaaaaaatttaaataagacgaatgatcaaatgttagtcaaaagtcaataacatcatacattaaaattaaaatacagatgtagtaactaatatagatatgttagaaattgttttagtatatagtttttgaaatgtctgaaaggactcccttcttctctaacctattttatcactaactttatttagatgattccccgaactgttagagaaaacaactatgaatcattacagatgtctcatattgtgttgtagtgattctgtctagctttagtgatcaaagatggccctccattagcatttcaatggccctttgaaaaaaaaatcaagccttgaaaaatggatctcctcaacataaatatatttttgttttgttttaggaaataacatcaacatattttcctatagtcactccaagtttgcaacaaaagacttggtataaaaaaattccaaagacggcaattttcaaataacatctaaaataataggaatttcgtatagtctagatgcacttttttacaagcactataaatatcaccataaatgcttttactttatgtatagatgtttaagagatggttttgacgccttttagagatatacagggcctgtttagatcatttggaatggtaaatagcaaatagcaaatggcaaaagttttggtggcaaaagttttggcattgcaaaagtactagttggtgtttagatgcatgttaaaattttgccattctagcactaaagtgagagagagagaaagggagtggtcccaaagcactttttggcacaatttgctactatagactagcaaatgccaagtgccaaattaccaacttttgctactagtgtttagatccaaaatggcaaaaagtgctacaaaatggtaaaacttttgccattttggaggatctaaataggacctaaatcctagcctttgcttcgatgaaattagccacttattacacaattcactcaaaacagagcacatacaatccaggaactaaggatgtaattaaagactaaaggagacatattatttattcaactctggttgtaaatcttcacccaaagtaactatagtagctagtatgttatgtcatggcaaaactacaataattaatcaatgacttgttggatatgttttgaactttggaacactgtagttagcaatccggatcccatgcagctagctgctactgatttcttgacatgcatatgcagaattagcagcacggaaagaataggacggaaggttcaagattcgctaatatattgttaattgtaccaaaaatactatatatatagcaaacactgtagaagaaatctgatagcgttgaggatgtgaagtttggacgaaccagggaagataatcaattagcacataattaattaaatagtatctacttacacactggaaaataatttattcgaaatttttcaagaaacatctatataaatgaaagttttttaaaaataaaaaaacaataataatctaggtagctacgatacgaaatagtgacgatgaatctgtataattatttagaccgttggataaaattaaatttctagatctatctatcggatctcagttcgatctttaagggtcccttggatttttggataattcaattcctttataattttgtttcctatagactctttgatgaggatatgaatttttacatacaattgtattcatatgattaattccataaaaaaaataagtaagatgttagatctcttgaaaacgggaaatttaactatttgccactcttgtgacatgacaattaacgatttgccacaccctgtcaatgacatgtgggccctcatgtgtctatgacatgtgggcctagtggcaaatcattaagcaacatccgtaagagtggcaaatagttaaaagcccccttgaaaaccttcctttaggcccttttgattcaaaagaaattcatataaattttagaggattttatttctataggaatttttcctatataaccctttgaatcaaaggaatgaggaatcctataaaattcttatggaatgtctctttccatgtaagtttttgaggaaatttaacacgaggtaaaaactaatggaaaaaatcctttaagtttttatctcttctcaaattccatgttttacctgtgatctgcaataatctaaacatttgcattcttgccagaatcttatgggttttcctattccttcgttttcccattactataattatttaagaacatcatatctattcctgttttctatgttttaaatgttttaaaatcctgtaggattgaagatacatgctacttcaattcctcatatgttttaaataggtccttagagccacttaggctggcgagtaaaaatgtgccctatgcaattttaacattttggtagcagtgtagacggttaggtaccaacatcgatcacgatcacagcacaacagagagaaaaaatatatatatatatatattgtgtgagctgtgcaaatctccatgagctcatcatccatatccaccaagagcatcaataatttttatctcccaaaagcagtacagatggatgtagaccggtatagtcagccagcaaaggtcctcttgtgcacaagccatgaggctagattctgtttacccaattgtttttctgccctagcaaggtgagacagagagaaggaaaatattttaaaagagaatcttgtccataaaagaaacttttgtgcaaaatccctgtgaaattttaggcaccatctaggctcgtgtgtatggctcagagttgttccgtaggttcaattagttatctacagtactaaacaacatccaaagagatcattaattagatagccttatcgatcaccggctgatattctcagggagcccaacaattagctgatttaggttagacgctaagcatgcttagaagagcttcttactttggattatatgtagagctggatcggtttccattatccaaaaagagctagatctacgattttttttttttttaccgtccggtagtcacccatgcggctatggccggcgcataatcatttaaaaaaacactccactaagcgctatagcgtataaactgttttagaatcgcgacccctcgtagaatgagaagtttacttaaaacagtttagcttttcttttacattctaagaagttgtacactactataaaattgatctttgctgggtcggccaaaaactataatagtccggttttaataagaaccaggaaaaaaaagcctgttaaaagctatgtgatctttagtcccgattggtgttatctttagttccggttcatcccctgtcagtggcctgtcacggggccaccaaccgggactaaagatcactactttagtgagtaaagattatttagatcttttatacaatatataatccttaagacttatcctcccaaactactcgtcttcatattctcccttatcctcctcatattcctattcctcctctctcttattcttatcctctccttctcctcatccctagagcagatcgaggagcggatgtgcggagggcctgtgggcggccggccaggggcggcggccggccgcgcggaggcggcatgcgtggcggtgaccggtgcggcaggcagcggcatgcgcctctgccggaggggaggcggccggcgcgaaggatgtatttgattttttttttgagaattttttattggatatgagatgtctttgatttgtgtgtgatgtgaatatgtgatgtatttgtgatgattattttagaacttgtgatgtaacttttttagaatttgtgatgtatttggaaatgattgatttgagtatttggagatatccttttgttatgtgatgattgatttagggatgatttgtggatggaatgaaatcattattcaatgttaaaaaaaaatataaaagcaacctgatgcctggctccatctttagtccaacctgacaccaaccaggactaaagatccatttttactcctggttgttttaaccgggcatctttagtcccggattgggtatcccggtttgtaacccgggagtgaagggcctttccccactagtggtaattgtagaattcaaaaaatgaactaaaaactaaaaatctcagttttacaggttctcataaactaactaccaacaagtcgcctctcaaaattttaagatactccaaacagatctaagttatgtttggagagtttaaagtcatgtttggagagtttaagatttaaaggaatagttgattaatagccggtttccctaacttcttgctcttattttatttcctaaaattctatagctatatatttttaaaatttagataagaatttagactgttgactaaaattctaagaaaagctgcgaccactataagcttttccaaacaacaccctaattgcttttggaatctgcagcttgcaatggtagctgagtggagagagagtgagagggctgtcttccaataggaagcacacacaacacaaggccatatgtggagtatatgtatctgcttcctttcatcaccatccttttgtagccttgccttcctgcacggggaaaagcagaggcactgccggctcctctgcaaagatttgctccttccattggtggaattttaggccaaaagttgcaagattgtatatacacagagtgcagcaagaaaactcgcaaataaagcgacgacgacgaggacgagcattggtacttggtgtcacttccctccggttggtaggcgcgcccggccacttgctaaattatgcgaaatgggccttcaccttgtttgaaaatgcaaagcagggataagagcaagtttgatagtacggctaattactggttccaaatcatttatagtcaacttaatggccaattcatataatagttacctataaacatatagtacacaatcaatatccggtctcatctgtcatacacacatgcattttgaagtctgtgctgcagttagctaaaaatctgcagcctgctgctcttatctcttcttttttatctttttaaaatatgtttatagttagtttatagtttgctatggtacctaatgaggaaaaaaaggtttagggagatcactgtagttcactagagtttaatactgccaactagagctttacagacagatctatgtataattggacacgaattggatcagctaattgctgcgtggtgtcattgatttgacttaaataatccctttttccttccactctgctgttagttgattggaggagtactgtactggtgttgattagtcaattggtctaagaaatttgtgcccttaaataggtccatgagaaaattcacccaaaataaaaggctccattgggaagaggccaaatggagagagaggagagctggagagagaaagaaaaaaaaagagacttcggactcgtttagttctcaaaaacttttctaaaaaacatcatatcaaatctttgatatatacatgaatcattaaatataaataaaaagaaaaactaattgcacagtttgtatgtaaatcacgagacgaatcttttaagtctaattagtccatgataaaccataagtgctacagtaacccacatgtactaatgacggattaattcgtctcgcggttttcaggctagttatggaattagtttttttattcgtatccgaaaactccttccgacatccgatcaaacatccgatgtgacatccaaaaatttttatttcaccaactaaacaaggccagtcattcatcactcatcagtgcttatagttttatgattttatcaccaattgtttgtttaaagcctgaaaaattttacaggtggcaaatgtacttcctgttctaaaatagtggtgcagtagagattagctcaaactcaatcttaggtggacaattcagaggtgtgattgtttcagaaaagttaacacacaagtggttggacccagcaagtgccctccatcccatcggttccacaatacttgtccaggaacaaaaagacaccagatttaagaaaaaacttaacatcaaattgctaagcatgttccccaccaaaacaaataaaaaagaaaatggccatacaagttgcacgcaagtctctggtagataacatgctgatatatagtccgtgatcaaataagagcaatcccaataggtagtgtgaaacatggcgtactggtatattaactacttcaaaagtacatccgatccgttctcctataagagcaggtataatagcaggctataaaccagctataaccatattttaaagagataaagaaagagagagaagagtagcagtacggactccaaaacgtaatgtgtgtatgacaggtgggaccagatattaatagtatagtaagcaactattgtatgaattagctattacattggctatagatggtttggagttagcagtaggctatactattaaacttgctctaaggctgccgttcgttccacccagctcccaaccctctccctcgttttccgcgcacgttttcaaactgctaaacagtgcatttttttacaaaaaatttatatacgaaagttgcttaaaaaatcatattgatctatttttgaataaaatagcaaatatttaattaatcacgtgctaatggaccactctgttttccgtgcttaggatatttgctccaaacctcccacaacgaacacagctcgaaccaacccccctcccccatctttttttaaaaaaacgctccaaaaaatcaacccatattgaaaaccgatatataaaaaaccaaatcatatttctctccggatccgttgcaacgcccctgacatataactagctagtatagggtagagagagtatgcgtgaaacgattgttcagatttaatctaacacctgcaattaatgtataaattttgtaggtgtggtttctgtaggagttcctccagggtgcatcatactagtgataggggtgctagtatatatagatgaaatttaaccattcattcatatgaatatttttttaaacaacaaatgtgaaaatttaaagaattaccccaccataccattgagggtcacatttgagatgagttgcattcatttgatgataccaattagaagtcccatcgatatagagggaggggtacaataaatagtgacatactccctccgtttcgaaatgtttgacgccgttgactttttatcacatgtttgaccgttcgtcttattcaaaaaatttaagtaattattaatttttttcctaccatttgattcattgttaaatatatttctatgtaggcatataattttatatatctcacaaaattttttgaataaaacgaacggtcaaacatatgttaaaaaatcaacggtgtcaaacatttcgaaacggagggagtagagtgcatgatggaaaaaaccagtggcatgcataatatctttgtctatgcgtgtctgatttctctaaattttccctcctacttataatttttttttcttatgcatcagactaatccattttatgaaaaccaacctatgtggatttttgatggtgccatagcaatatcccctctggtataaaatataagtctattattgtaactttatcgacacttctcattttaatacaacttaatccaagacctttttctggacattttacattgctatataattctactactatcataaataaattaattactcatcttatctgatctgagtataaatgaatgacaaggaagataaatttgttgttttatttaattactcctcacatacaagtatctacttcctcaatctcaaaatataagagattttagttggatgggacacatcctaatactacgaatctaggcagtattaggttgtgccccatccaatcaaaattttttactatattttaggatggatggtgtagtagaatttgtacaggaggatttactgatttcacttcattcaagagctctttaagccagggttggccacttgggagttgggactgaaaaattgcattggtttcttttttcaatcgataaaaagtactgtactttatgtgcaactacaaaagtagttaaaactatgaaacagagggaatattgctagtggaataaaacatcgtctttgccaaaatttctatcgcagtactgacaacgtgacatggtaacctgtggtggctttaattttgttcgagattaatggtagattccgccgtacatgatattatatatgacacctcaagcttaattggccaagagtgttaaattttccccaattaggtaccatgtctagtagcttcccaaggtaaatggcgtttacgatgatttggacattgtggtctaaatacttcagtcgatgatcaattcaaaagtactagccatactagagttttagattaccctttattaaaatagtatatccaaattggagaatcgaaatgaagcccttttttctcagtctatatggacccttttgtataataggaattaattccaatataataggtattctttgtttgttaaaacaaactttgactgtaaaattttctaacaatatttcgcttatagtaacagattcgtggtaataagaaaatattttcgaactttattctaaccatatcatttttagacaaaacctaaaaattattggatgaacagttaagtcaaaactcaaaattggatagttaacatgtgccttatatttctgaagagataatcgaagaaatgtcattaataagcgtccaaatattcaagaaatgctattgataagtgtgagttctaaaaaaaataccatcatacaaacgattttgtcccaaaaatgccatcaccgtcagggttccgtccattccacgctattaaatacattgttcatcctataacactttaatggcgcgggatggacggaaccctaacgaagatgtcatttttggacaaagtcgtttgaactatggcacttcttggaactcacacttgtcgatgatgtttcttagatttgggcgcttgtcaattgattgtattatctcgtttttgaaaggagtgcgtaattcacaagtaggtcaatattttaaatacgagtcttcggaaatacaggtcaatatataattttgatgcacttgtctgacttttttttttgttgcggggatcacttgtctgacttaatgtttgcttttacatatgacctcgttgattaggaaattttaacatcctcgtgtaaaataacagagtatctattcctatgtcaaatttcaaccagttccttgattcctatgaaaaacgagaccttgtatttggaaattggaataggaggaagtaaaaaattggtgtaagaatccttgtgcctcatttttaagttgtatcctctgtcttgcatattcctgtcaagaaaagaaatgtacgttttttttaaccttgtttgcaaattgtaatcatgcatcatcgtccacaagtatttcaaaaatagtggtcctgagcttatttttatggatatatgtacgggaactgatccaaatagatgggaggataatttaatttaattaaccgtatgtccgtctgaaaggacgacaatgcctaatctatccaatgaaacaaaaaaaaaatcttaaataacattttgttgccttttcaaatcttcactccagtaaaagtctggtgcagtacactagagaggaccacattatcacactttctccctaacatcataatttgatatctggatccaacaatcatgaatgcacatgaagaaaagaaaactttgtagtgttgaacctattagatttatttttatgctaccaattaaattattttcccacgtctaccaagattaaaccagtaccttcagccttcaggcattgttcctttaatccttcagggcattaattgggatttagatgagattaattctatatctattgtgatgtggaatcaatccatacaatttttttatgagggttaaacagatttcctcttcgttccaatttaatttgttttcatgttgtggacataatggttaacaatttcgtggactttgtcacaaaaaattcgaagctcttccaaaccgcacggttaatgttgattttcaaacaaaattcataacattatcaaactttggtcttgtttggtagaactttagatctatttttgttagctaagtatttctagctctagaaatccacggtctgaaacgtaataacattgataacatttatataatcattttatttcttatttaagatgaataatagaatattaaatcattttgattcaaattacacagtacaaatctagtgtgtatctagtctggagccatgctaaagggtgtattcttttctccctttttataacttctactccctctttttacgtgtatgtttaacagcacgtgtatgttttccgaaccgttaaacgttgggttttttcagaaaagtttctatagtcaagatatttcaaaaaaaaaaaatcaatccatttaaagttgtaactaatttacttattaattgtgcattaatgagctacatcattttacatgcgcggacccaactcctcccgaactcattaagattctgataagcacaacttctggtttctaatttattttatgaaatctaaaaatatagcttctcagaatctagataaaaaaccggattgtttagggagcttctggtttagaagctaaaaaaaaatgccctttatctcactttcggcttgcacttttacctcccaaaaaaaaaaagatactacatccaccgctatcaaaatccaaaattactggaggactagtctgcaaaaccccaaagccgaccagattaacaaatgtttccccttcaaaggtaagggagggttaattaagaaacgaacagtgataggtcaaatcagagattagccctccaaatcactccctcacactcattaatcccttcttcttcctcctccaactccaactcactctcctcgatcgaaatccatccttttcgcccatatatactcccccaccacctctcccgagctcggacacgcagagcccgatcgattgccacacgcgcgcgcgcacgcagctgcatccactgttgcacgaccctgctcgccactgtgtgctgccgctgttcctcgtctccttcttcttctcctccaatcgtatgtgctattgcctcctctttgagcttcttttggttactttggttgcttggttggagctggctttgcttgctagtgctagcttgcgttggaggaggatgagagtgtttgttgctgttgttgttgatgtatttcagttagcttcgtggcttcgattttcttgat

SEQ ID NO: 30186 - DNA, 7729 bp, Oryza sativa
cgcccggccagagggcggcaaggggccgcctgcaaaatggccgacccagactggcttttttgcattcgggccccttgctgccccaacagagggcggcaagggctttactgcaaaaaaccctccctccgtcaccgcccatccctcccccgtttgccacgtcagcttgccaccctagaggtgggcggcagggtctatttttgcaatttttttagccgatagattatttctgtaaatattttttaaaaaaaatctaaaaatgaaaaaaattccttgagtgaaagcaatgcaaaacacattaagcccgttaccagcccattggttaatatccttgcaaagtgaccacgggaaggcctcggtagtggcagctgtcctggtttagatttattggttgtgagtatgttaagttgtggttttagttttgttgattaactatgtatggtttgtctcattcctctttaaaatgaggtatataaaatacaatgttaacggcttggtctgtatgggtaaaaaaggtattaccaattaccatatagctacactaaacaagctaaaaaggatagattacagtactgcaatttatttttgaaaacaaatacaaaagtgcaattttggaaaagaaaattgaggtaacatttttttaaaaagtataaggtatcatactttgcatttaaacaaccatccccttgagatatactctgttctttcataggtatattaaaggatggaggtagccttttgaatttattggtttcatatacagggagaaagagtatgtttctagacgagagggggtgattgtgatatttttttttatatgctctcatgagctcaaattaacttgacagattttctattcagtctcccctcatcaatccccaaacatgaaacaaatataggtgagaactgacactgcgtgccactgatggtaatgaataattaacatactgcagagtggtaatatatataagtattttcatacggttacctgcaatgcaacacagattcccctagatcaccaattgctgtggcgacctgacagacatatacatgtttagttcagcacgacaacaattggtaattaagttatattatcattgttccattagccttgaccacattttaatcatgcctaatttaagagggatcatggacatccatcaagcaaacgaacggatctttcttgaatgcttgatacctacgacaggcatggtcctaaacctacataaaaatattgtttcaattctctagtgattactcacataggaccagctaagcaataatctcctactaattttttcatgcatggtcccttgcctgtctaattgtctatctatctactatcaattaatccccctcaaatgctgacaagcatatctgcatatgcacagggatacacatcgaatcattgagtgaaaacagggagttcaactctcttgaggacttcaaatgggacaatcaatcgacttctacctatgcaaacaacttggttagcttacatgatgatcgatcatcttggtcaaagctaaaggtgcctaaagaaaattaagaatttagttgatcatacaactagctaggagagaattacttcgattaggtctaattttagtccctacgagagcccagttaatatatatggcatcatttcaatctaaataaaattctccggaacacgttaaggcgtgtgtgttttctaaagataatgaaattgaatctgagctctgtatcaagatgtacatcatatcagccacaaaaacacactgaggtgcgtatatgacagtgtataatctgttttttagataatgtaatcctcttaatctgaatcacattttttatgtgattacatgcatgcattctctgcatctgaatcatgagaggtgtcctacctgctgcaagttcccctgtcctacctgctgccacatatgataattaaaccgtataggccaatctaacaaaatttaaaattatatgatgaagactaacgtggcgcatggaacatgcagcaaatccttgcagctatcctgatatagtgatatagctgattttttttttaaaaaaaagctactggaatactctactctatacgtacggtacgagttaggtacatgtatacactgacatcctgagttatccacattgtctctgcagaaagcttagctagaataagatcataggagtagtaggcactccaattggcagccattgcaaaaacatttggaaaaaaatacacaatatacgttgtttttaattagcttcaagagaaacatgagaaaaagagggcaaaatggccccctcttttattaaaaaaatgaatttttagaattttgaatcttgacattattttaattccacatttcaactctaaaacttactaagtttaatattgatgattcaaaggtttatgatgcaagatataatatccaaagtgtatgtttgtcacaaaaaggtcttttattatctctcacacttttttttgggtaaatctcattgagatctcactatccgggaccgatatttttccaaaaaacataagaaaaaactctggtcgtcagaagctggtttgttaaaaactgaaagaccaaattaatgaattcataaagttaggctcaaatttgacaattgtagaacttttatctggcacactgaccaaacttctctgaaattgatgtaaacatgtgtgtattctaaatttctgattaaacataagaaataaacagctggccagctgggtgacacaaactctctggatgcagtgttatataccttcacgccaccaccgggatgcaagaataccaccatttggcgtgaacaaacaagtcaatgcaaggacaatattaggaactaacttgggatttgttttggacatttgttgtgttaaggtttatttgcttcttgtttggggaacttttatttgttattcaattgctactttagtttggctgctggatctatgattgagttgttggaaaaaatcggttgattagacaacttttagtctttcattgagtaaattaagggatgcttagtggatcctgatgttgataggggcttaaatcatgaataatgaccatttaacccggggatagcctgatcctttccccttctcctcctgaatcaatttacttgtcattatagcaaatctcacattaaattgctaaatatgccaaattatattgctacatttattaattactacctccgttcttatttatatgacgttacgtcatataagaaattatctaagggagtatcttaatgaaagtttcttgtgagaatactaatactaatatgtttgaattgatgaaaggtggaaaggacaagacatctctaaaaatacttcgaaatatgtgagaatggcaatattttgacaaaaaaatgaaatactataacgacaactgaattgaaacgaatggaataataagatttattcacttcttgtcttgcactaagtacagaacatctcacagctgctcctccattgtttcatatgggcacaaacactgtaagtttgttattgaggataaatattggttgatgaatttgggtaataagagttaataagatagaaaattaattgggttcagtagtagtaagactgtgagggcgtgtatggttcataactatattactcacttccattttaaattactcatcattttaattaactttatgctaagtcgaatattcctaactttaattatctatttttagaaatttatatagttaacatcataaaatctatgtttttgcaccatgagataatttcataatatataattcatgtatagttaaactatacaaatgtttagaaattaatttatagtcaaagttagaaatattcaacttaggacaaaactaacgacaaataattaaaaatgaatgaggatacttataactttggcaaacaagctttgccaaggtaaccactaacataagttggggtcatccttgactgagatatctaaaccccctactcattagtgagggtaagccataacccaaggatggcttcaaagccataaccccctccatatagctagtaagtgtaacacttggggaaaaaaagcaacattttttatgtagaaaattatagggtgtattttatttgaaaggggtctttaagagaccatgagttacgcataaaatatattcataaaatctgtagagccaatgttttatcaaagctatttgaaagatgaatccatcggtattttttttgtcaaaatttacaaagtttgacttctcaaaaaataatacgctgtataattcttctacagagagagggtatatatataacaatagcatttataagaaaaactattttttttcatggttgacctgtcacatgcaatttttattaaccatgaatatgctattgtgcttgatcacttattgctctccgctaaattcctccactaccttgcagtcgactgatcacttattgagctttacagtgtgacaacttgtatatatctactaattcgtatacattgagcctttcatgcatgtttcttataattgaactcatcaccatctgtttaatctgctatcccttggaactaaattttaataaataattttatattattgatgaggacatcactgtctcggatataaccatgcttatgttaaggtttacttaacaatataaaagtgcatataatctatataaggtttacttattatatgtttgaacaaacttactacaccatgagttttgtatcttctcatttacaaaaatacttgtgtgggtgaagcaaagaagatcagcctcacgaagtacttggatgatcaaagaagttgattggagatcaaaccaagattttccccaagtctactcctatatcaccatatcacttttggtctatagaagtcaaaagattaagttttacacgttttggatttagattcgggtctcctaaaagtatcaacttcaaatggacctagccattaatctgaaaagaatcttgagttccatgagtactagttggaaagtttatggagtttactttccaatggttttggtctcatatcaaaatttctcctcagctgtcgagaatccgcaaaacaagccacatacctcatccagttcgagtctgatttggacattcaaccctataattgtgtcgtggctaagcctaaggagtgaataccctagggctaatcctacgatgtccctaattatatttattcagtagcctgtcatcgtttagagtcgggttttccttagattatttatacaattgcagtttcactgttagtttggttcgtggaacccgaactttgagatcttaatcattcatctacatattgagttgcaatctgacttgtttctgctagtgttctttgattcgcatgctgaaattaaccttctcggcaaggccaactaggcagtgcacagttgatagagaagacatgatgctacgattgcaggatttggatcgtgttgatcggaagccggattgtgtgtatcaagttttcccaaatcgagagttatcaatacctatcaaaagatcgagacctagttactcatcagttaatctccctcattgatactaattatatgattatcacttatgcatgcaaacattactctaacatgcactaattaaccctaaagcatgctaattatcactcatcaaagctaatttgtcacttgatacccttatcaatccttcttcttgtaccttcactaggcatatttctcagtacaaaatctaaggggaatatttctcaagttctccaaacagtggccacgcaccatctatgtttcatcctaccacccaaacgtatggatgagacctgctctgtccccagctggtgccatgaaccaaatcataacttagataggctgggttggcatataaactatgcattttaactgtagtatatatatatatatatatatatatatatatatatatatatatatatatatatatatatatatatatatattagtccttttcaagtgagaaagaaataataagtggttttaacaataggactttcagcttaaccattttatccaaagcaagaacaaaattaagtgcaattaattgctaatatatgcccgcatggactccaaatggaagggctatatataggctaatgctgattgtgaagttaaagtgttatggttgatattagaacataatctttcattgcacggccatgtgtgtttttgggatcatagtgcgtatataacatatatagtcatgtatcacaggatttcctactctatcaatatatacgaggcactttttttaaaaaaaaaatatcgcgggatggttctaaacattgtagggcatctatagcatgttgttgtgagcattattattgccatttaagggggggatgaatgtaataattcaatctcttagtagttagatgcatggtcattgtgatatgttatcagtgggattgatctcatatgaagaatttagataggttgaggctaacatataaacccacatattccaacaatttcaccttaagggttaacaattttgccaaattatctatgcaattctaaacaattgggcattcaacagttttccaagttgccgaatatatataccttttgaaatgtcgttgcataatatttcgaaagcgttttcaaatatttttgcatgatatctcctcaaggcactacaagtcataaagcaaaaatttccaaaacccaaaaagaggctggtacaaagtggaaaaaaaagtagtaactcgtgcgaaagcgaaacctattccgatgcagatgcgtgtacctgcatttacacattacttaaggtagctaagtacacaaacatagtcaggtttagactgaaaaattattgtgacttgacaggccacattaagtatataccaacttgtactaattattaatcgttgaaagcaacttggcttaaaaattacaagattagatacaaagaggactaatgatcaatatgctcaggttatcatcgtgcaccaaaggctaaaacttgtgtgttacagctcaattgttagttaaggtactaaccgtttttgtgagcaactgcacagttagttcaagtccacttctatagtatcatcattctcatatcaacaataattaattaactaagagtttgtcctaattaatattgccttattagctgaaaattacctaaattactgatatttattactgcataatcattttattgcagtgctagattaattgttcacggttataaactaggccatccccgatccccaattttatatgatttgtatgataaccatttgttgtaatttggctcatatttttctgagttacccacaagatttgataagaaccagtagagaagaaatgactccaaattaaaaaatatatgtagtcaaagatagggaagaacattgcttttaattaagaacgttataattagtcaacaatcatgcatgttgcccagataatatgtgggctcacattcagtaaaaaaaaatgtgggctcacacaaatcttcatactttcatgttacaagagtttgattcccacttacctcgtgtgaaaaaatagtttgacagtgcagggcacctactaggctgtgaaggcttttcgtctcggtataccatatctctcatggttcttactcccaccatattttaatatatgacactgttgactttttaaccaatatttaaccatttatcttattaaaaaattatataattatcatttattttactgtgactttgatttatcgtcaaaagt

SEQ ID NO: 30187 - DNA, 1885 bp, Oryza sativa
tatttcaaatataaaattacagtcctatataactaaaattacatatgtaaatttagttgatatgacatgtaagtgcactgtaattttgataaaaatattgtgtaagtaaatttgtattagttattttattttgtagtccgttggatgcaaatccaagagaagaaaaaaatctgggtgattttttctcaaaaatcacccgagtgatgaataggcggtcccaaaggaaaaaaggcgatattcttttcatctttcactgtagaggactgcttacgtgggcttgggccacgggccgacccgttggactggaggcagcaagcctggctaacccactttccagcgtttgaaacggtttgaattctgcttttctcttgtggcacaaatagacaaagtggaataactcactcacccaccacccttagattgtatcgtttcccaatcggacgatcagcaacgcttaaaaccaaagctagagacactggggagcctatataatattccctcatcctatctaaaatactacctatctcgccattgcttacctctagccacaccactcgtctgcccggccgagccatggatcttccgcagcagcagcagcatcccgagatcaatctcggtatgcatgtctctcctccgggtagagctagatgcacctgctttgctcgcgctgtggttacatgtgccacgtttctcgtgttcttgatcgcttctctgatctttctctcgtgtttttttttctctctttttttttcatttctcttcgcgcgcggaaactgtttcttgttactcttttgatccggtcgcgtttttctctttcactttttatttcttttcacctcatggcagtggcgtgttcatcgcctcatcatgcatcttctatatctttcttgttggtttcctcggaaactgttccttgtaactctgttgatccggtcgcgtttttctctttcactttttgtttctcttcacctcatcccagtggcgtgttcatcgcctcgtcgtcttctatatctttcttgttggtttcctctgtattttcgctcgtgggactaatctaggtttcattctttaacaagtttctcctgttactaactaattcttattttcttttcatgatttagacgagaaccggggtgcaagggtgatgctgatggttcgttttattggatcaatcgatctatcatcttttgtcttgttgattttcgttttgcccttatttcttcgttccctgataatggttgtttcttgtttcttttttccattttaggaaaagaccctcctgaatccgatcttcctcgtggcgcttatgatgtactcgcttctcatcgggaacagccttagcggccggacggctaccccacatggatatggggctccacccccatctccagctgggctcgccacgttcatgggggtcagcttcatgtgcctctcattcgtgacggtgggcatggttcaccttgtgcttgttcttcatcttacgatggtgaggggagtcggcggttttccaaggctgacgattctctttcgttggttcatgcctgcttgcctcctggcgtccacctttgtatactttgtccagtccatgcacacaacgcggtaccaaccttttgttctcgttcctagctatttacttcctgtttatctcatactcatcaatttttgttgtatgtttcgaaaatcagttatggcatatggaggagcgagtggataaccttctgcatcgcgggggtcatctttgtcgtgatcaatctctcaatgatgctggtaataagttcggttacgtgtcttctgagattggtttttttctcgatcgtctgaatctcacatgttatatactatatgtttcttttctcagaggccattgaggcaggttggcttgact

SEQ ID NO: 30188 - DNA, 2060 bp, Oryza sativa
caaacatttgacactgaaacccataacaacccttaaaatggatggggggagtagccaggaaagtaaggaaacaatcctcatgggttcaataattcctatagttcaacaaatattttaactcatcactcattcagtcattatttcattcctcatggagatcatctcaagaataactcgcttaggtccaatgttggagatcggcccctccaatcctctatcattccccagtccaaatcccctctccaaatcatgcctttatccaccaaactctattctcatctgtcccctcaatgccgcctcttcctcgccccgtcggcctcctccccacccactagccagcctgcccaaagaagagtgagagacaggagggagataggaggggaaagagagagtgatgacgtggtcaccctgacatgtggaacccatgtggtttccatgctgacttaactgccacattgaacaaaaccatctaaggacctcccatttttgttagttgaaggatgacatatatccgtggtttcggtatgattttgtaatccgatgacaaggtaagggacctcatatatactttttctctcggtgcatcctgcgcggctgcacccacgtgctacctctgctttccggcctagcccgtaaacctaaagggccgcctctactcccattggatatagggcgggccaagagcgagagtgtacgagtacgagaagtagagttttccacttctccttttcccttgtactccctccgtcccaaaataagtgcagttttacactatcacattcaacgtttgaccattcatcttatttaattttttttatgattactatttttattgctattagatgataaaacgtgaatagtactttatgtgtgactaaatattttcaaaattttcataaattttttaaataagacggacgatcaaacgttgggcacgaatatctacggctgcacttatttttgggaaggaggtagtacgagaggaaagcaaaagcacagaactgggcaacatatactactacgggacaaacttgcaattgaccagttctcattcacgaggacagacaagagatagagcgcgcgcgcgcaaagaacatatagatgcagattatttttcccttagtttttagttagctaaatttttaaagtgttaaacagtatgtttcgtgtgtatatatatatatatatatatatatatagttttaaaatagtaaataaatcaatttcaaaatatgtaataattaaaacttaattaattatacgttaatgaatacgaactggccatatcatagtagagtgatagcaacatattccaacatccaggtgtgaaaaaaaaatccaatgtcggcacctaatactaccagtaagcgagtttaagttaactactggagtacttagtactaatcctacataggactataggagtgcctgtaattattactaggacgagtattgaggagaatatcaagtggtttctgtgtgttttgttttcaaaggggaataaagttattcttcttttaaagttgatcttgtactttctaaaagctgaatccaaaagatagttgatgagatcgagtagcagcgagccaaccctgactagtaactccggagaggaaggccaagaatccaatcatgtgtctcgtctcgtctcactctcgcctccaatcatgtttggttataaaactggccccaaaatcacattggaaaccaaacgcggaagaaaataccataggagatccaaacacgatgacgacaccgaggcacgatatttaataacggagttcagccgaggcctacatctccggggcactgattacgggcgctcctccccgatccagcatatacagcgtatcagagttacaacgactcacggccggtcgccgccggcagccgctacctctcgctatgctaagtcgccatgcggttacaacaggcacgcccctttattttatgagagatcctaggacagagtccgactcttactctagtcctatacctagtacaactccaagtcctaaactgtaaccgactacgtacacataatcgcacaaactctaaca

SEQ ID NO: 30189 - DNA, 5025 bp, Oryza sativa
tcctcccccctccctcccagatctggccggaggagggaggagggaggccggcgccgccgactacggcgcggggcggcggcggctcccctcccccctccctcccagattataacatctcagcctagggcttaatagaattactaaaatactcatatcaacaagttgcaacttcttttccggaagccgattttcaaagaactccagggttaagcgtgcttggcctggaccaatttgggatgggtgaccgaccgggaaattattctcgggtgcgcacgagtgagcacaaagtgtgcagaaaagacatgtgttggtctgtgagggtagtctatgacctataaaagctatcagatggaagcgggcccggcttgggagaggcaggacgctacatggatctggccggaggagggggggaggctggcggagtccacgacggcgcggggccgcgggggcggcggcggtggcgacgacgacgacggcgatgcccggcgtggcttccctcccctcccctcttgcccggcgcggcgacgccggaggaggacggcggcggcgaccgccgcccgtgattttttttttgtttttttgaatgtattttcgcaagcgggttgttgccccgactgcgaaaatggatgattttcgctgtcgttgacctaccctccgcctgcaaaaatcactttttgccgcctggaaagatagtttttctagcagtgatattagtgatattaggttgatatggtaaaacaataccggcgtactcaccgtaggcagtttcgtagtattgtttcgccacgttatagttgatgtagctaaaaggtttatattagagatagtttatttttaaagttaaaatattaagaggtttaaaaaatttgcattcttgcttgccttaatttggactgacaaatgagctagagagatgatatatactatttaatttggctggctaattcgtttgtatttactttaacttcttaaaaaaagaattcgtttgggtttaattcttttatttaatctttagataagggtattttttttacccaatctctacatccaaccggatgtatgtggcctttttaaattgggaactagccactcaaacaatacaatgatctgaagctcgctcttatatagatttgaacacaggaccttagagtgctgctttaatatgtgtataaatacatatatgactactgttctttccaacaattaacagtcaaccccttaattatgtttgacgagtgtgattagcacgaatagctagctagatattggcagctaacaacagaacgttgatgtacatgtcactagacagttaatctccggtggcgttagtttctacacatgcagggttcccatgcacacacatctctcgattaattctccctccgtattttaatgtatgacgctattgactttttaacaaacgttcgactttccgtcttattcaaaaaatttattcaaaaaatttatgtaattatcatttattttattgtgatttgatttatcatgaaatgttctttaagcatgacataagcatttttgtatttgcataaaaattttaaataagacaaatggtcaaacgttggttaaaaaatcaatagcgtcatacattaaaatacggagggagtattatatagtagcatattgtttgcatagtacagtagggagcacgtttctaatttgttaagcacgatcaactcgatcgattagccttttcttttttgacagccgcaatttgtacagctcgatgtgcacgtttacgttacgtacgtgtagcacgtgctgaatttgttggtgccatagctttttctattcaccaacttctgcatccatatgcttgccttttagtcaatttggtgaaaaatattttaggattcgtgcaagcatcaacaaggaaacactgttaatccgtacgctccaacgacttaaaattaagttttaaaatgcaaatctatactttctatataattagtacccactaacaattattataaactaactaaacctcaacatgcaagcatgccacaccatcacacaccagcaattactccctccatattttaattaatgtatgacgctattgactttttgaccaatgtttaaccattcgttttattcaatctttttgtgaaaatatgaaaatatttatataattcttaaataacatttaatgatgaatcaagtcacaataaaataaatgataatttcataaattttttaaataggacgaatggtcaaacatcggatgaaaagtcaacggcgtaatacattaaaatatggaggtagtactattctagcctatttaaaatcccatgcaagcatgccacatcttccctcactagaaattactattctagcatattttaaatcccatgcaagcatgacacattatctacaatattatattatagagatcgataaatatgtgtcaaatcatattcctcacattattttctctacatttcaactttcatcatttcgacaatatttaatatatactcatccatgatttccgtagcaaagcgcggggtatcacctagtattaactataacttgtaccccagccactaatagctcataggatccctttttctcaattttttgagttgtttttgctcctcggagaaaatgtcacatggtggctattttgaaaaaaaatatcctcgtgtttgcatgtaatatccaatgtcctcgaaccgattgacgccccgttgtgttgtatctggaaaaaccccttgtcttttagagaaatacaacgtgaagaagaaaaaattctgcttccacggataacgatgtaaacataaaaaccacaatggatttttcgaaaaacaaccgcatctacccccacccaaaccctatccctcgctgtctctcacctacacccaccacgccccacccgcgctccacgctgatgccggcgtggggttgcctccaccgccgtccatctttccaccattgtcgttgtccattctcctcccgttgctgccttcattgtccgtcttaccccccgataccggccacaacccccctcccgctactgtgtgccctttctccaccattgctgctctccccttaaccctagcagccgctcgacggaggccttagcagagggtggagggagagaagggagggaaggagggctcgatgcatggtggaagggctcagtggtagtcaatcctctcccctctactatgtctcctcctccgatgcaccaacacattgccttgtccaccgccgtccattcctcgtaagttagtaggttgacgaagagaggcgtagatttttatttagattgattatgaattcgtggaaaaaacgatggatctcaacgaaaaaaaaatgatgaggatgatacatgctttatcacacagattattatgcatgttattatgaactcatggttcaatattaattaattaatttcacgtaagactactagagttgataacatatataatatgcatgtcgttatatatggtttaatatttcacgtaagactataataatgcgatgggttagagtcgtgacaaaacaaacgtacgtcatcgttttactaaagatgaggtttgatatcgacctccaccaatcatagagcaggttaacttctccgagatatatatatattattattgcataatgatttttctccattggaaaactatctagcaatataggagcttgctagggcaaggaaagaataaagatccatgcgctagctaggagttgtaagacactccaagattcgtgcacacgtttgtttttcattttcacccacagaatttcaataatcttaagatgttgatagatgtacctgtagggaaaattaatacttcctccgtttcatattattagactttctagcattgctcacattcatatatatatatatatatgtgtgtgtgtgtgtgtggggggggggggggggcggcgcctagattcattaacatctatattaatatgggcaaaggtagaaagtcttaacctgaaagatgtagcatttcccatgcacggagaactgaaggatagcccatttggttatgttatttttggtggatcctgccccacctgggtttaattagtcctaagcttttcaagcgtgctcatatttacatctagttattctttcagtgttaggatatatagttagacgcacgtggtgacgttattaatattaagatacgttggttcagtttttatgaatgtgcttatatataggagcatgatttcaaatcatggacaattcgattgtatgaacacattataaaataatttaattctcacaatcaaaactacagttgtgatctttggcaccttgttggggggctatacgaatgtaggggcatgcatgctaataagtattagtgtggtactccctccgtttcgaaatgtttgacaccgttgactttttagcacatgtttgaccgttcgtcttattaaaaaacttttgtgaaatatgtaaaattatatggctacataaaaatataattaacaatgaattaaatgatagaaaaataattaataattacttaaattttttgaataagacgaacggtcaaacatgtgcttaaaaagtcaacggcgtcaaacatttcgaaacggagggagtaattagttgctgattaattgtactgcatgcacactgcacacaggtcagctatatatatgcttcatgcatgcatgatgcaacttatatgcaagcaaacattttccgttcgcgaggataattaatgcaaccaataatacaaatagtttcacgtcttagcatgctgaaaggactaattaatacagtaattaacaagtacgaatttcttatcattaagtggacaacttgtatctcatagaaattagaggttaattatgtgtgtagccaactttttcaagcaatattatgatgcgtttaaatcgtataggtgattatcgtaagagattcccacgcgttattgaaaatcatttctccaaatccagaccatgcatgatcgatcatagcaaaacaaaaaacaaataattaaactgattaatatatatttg

SEQ ID NO: 30190 - DNA, 752 bp, Oryza sativa
  unsure (1)..(752): unsure at all n locations
aaatataatagttgtctcttcacatttactgcagcacacatatcaataattatttaattacttctctctcactccttcccagcttttctctttcctccaagccaatcagggaagattattcatgctaatttcttgttccgtcgatggtgctgtcgataggaaggctccaagccagcgctaggtgcattggcgcccgtgcatgatcgtcgacagattaatcgacgatgtttctctctcttggtactctctctccgccacgtaggtataaaatccaacgtaagcttactattaaccggtaatttcaagttattgtacttgcccttacactcacttcgtgttgggtagtttggtttgattgcaatcggagtgagtgcaacaattcacagcttgctgggtgtaatgtgtgtacggtgtgcaatcaggggggctgtgtggagtagaaccaaagtccaagttgtgttgagagagaactgaatggaacagacaaattaagagatgggggtgcaggatcttctcgccaaactgaacattggatggtccgattttatcacggaatttgtgcaaagctattgccaattacagtgcattattttgtgaagggactgatgaacaaaatgattgtatgttgtctacacgttgaaacatttaaagagtaaaaaaggagagttcggcatgaccgtggacatgattaatatccacaccgtgcnccctnctcnnngtgngtngcagntgactaacgttttcccaccacg

SEQ ID NO: 30191 - DNA, 1324 bp, Oryza sativa
ggggcgatggtaggggcacacggctggaatgtggtccagactactattcctatatcctcgtgggctagccgcctggccgggagttaaaaagtctatgtttattcgtgctgatggatctgtactatatgagagcggtccagaatgtaagaattatttatgtgatttttaaatggtaaggagctagatataatagagtttttgactttgagtcagcaatatgcgacgaagcagactgagctatcaatttttaaattcagtttgatactcaaggtcgaagtccattctttcataagagatgggattgaacccctaatatagggagtataattgtggctattgaaacaaagccatatttcccctggacaatgcaaacataagacttgctatgtaattcatctgtcctaaaatataaatatttttaaatctcgacacagtgttcgagatactactttgataaacaatatctataaaaataaaatgttttaaataaaaagagttgcatattataataatttgattaatgataaatctagtaacatcaatttgacattattgatcttttttatttttttttgctattaatagtcaaagttaaaaaatggttgatttggtactatgctgaaaatgcttatattttagaacggagagagtactaacaagatagatagagtagttgtatatatatatcacaatatcaatctttccctccaagcatctactccatagttaactactccctccgtcccataatataagggattttgagtttttgcttgcaacgtttgaccactcgtcttatttaaaattttttgaaattattaattattttatttgtgacttactttatttctacagtactttaagcacaacttttcgtattttatatttgcaaaaaaatttgaataagacgagtggtcaaacgttgcaagcaaaaactgaaaatcccttatattgtgggacggagggagtacttaccaaactacgttataatcgtttatatatacacattacggtgctacctagttcaccttttaataatcaacaatttttttaaaaaaaataatcaaaaatttcaggccctgtttgaccatgttcgaagggaaatatgtaaacatgcaagtacaaatagctttaagaaaatactaatatgggttagcacttggagcttggaagtcgtatgttcttgaggagagctaaccgacttgtgattttctttttgttgacagtattatttaagtagcactctacttccatgcaaagatatccaacagaatattcctataattaattgtcatgcgtcttgcaatttgacagggctgcagga

SEQ ID NO: 30192 - DNA, 9977 bp, Oryza sativa
gccagcgccgcccacctcatcgccgaccccatctccatcctcctcgacgacctcctccttgagtgcctcgccggtgtcccctatgccaccctcccgcggctccccaccacttcaaccacgctcgttgcctccgtcgcgcccacggcgagctccgcccctcattcctcaccctcttcgtcaggccttgtagaagatcctagtggcggcgcctagggagagatcatcggaggcgatgaggtaggaggcctgaggccacggcgaaggatgccgcctcaggaacggtggcgcggaggatgaggacggggagccaacggatgttggcgtggtggtggtgatgaggacgaggagccagcggccaccgactatgccatttttctatgcagctacgccccgtcgccgccgccgccgccgccgctacgctccaccaccggtgactggatgggaatcgatcccctttctcctttctcctgtaaagtcaacaaaatagccatgggcacatatgtcagagcatgatggaaaacatttgaaaatcaattaaaatggttgaaatggcattctagcaaattggcttcatttgacagtggcattataacgaagccatattcgaaagtggcattccagcgaaaccccatcccgaacatggctaaatgtcaattttctcgagaatagagagacgagaagagttgtagtgggctgggctgtgtcttctcgtgggctcttgaagccgtgatttggagtggagttggggttcgcggttgtattccaggctgggccggatgcttctctcggaattctttttatttttcttttttatatgtttttggttttcgccactgagactggggtggctaatgggcgcgcgcgcatgccggcgcgcgccagctggccccctcccgagcgattctttttccttttattttttcgtgtttttttttcattttcccttttactttttttctgattatttttttaatcttcaacatatgtgttttcaaatgtttcgactggaaaattttcaaatctcaagttaaaattttcaaatctcgagttggaagttttgaaatctcgagttgaaagttttcaaatctgagttggaagttttcaaattctgagttggaagttttcaaattttgaattgaaaatttttaattttgagttgaaagttttcaattctgggttgaaagtttttcaaatttgagatgaaaagatgaaagtttttaaaattgacttcaaaaatttcaaatttcgagttaaaagttttcaaatatgggttaaaagtttttaaaatttgactccatgtatagatttcttttcaatcttttcaatctgttaaacaaaagctatcaaaaaaaatcttacgttaattgtcgttattatctctaactaacaggattagttagtaggtgtctccgagaaaaaatcccgccgcgtgctcgttggcagcgcatacgcgcgagctagcttttcccctgagactgagagcatatggtcattgtatgattcatatgagagagcaggtgcaataaggtccaatcagcagacggtacagctatccacgtcaatactataatctaaactgaaagagtgaaatgatgagagaaaaagtaagggcgctaatcctatcgcctagcgacacacacaaaaggcattgtagccaacattagagcaggtccaatagcatgttataagccagctacaaacatattttaaagagttaaataaagagagagaagagcagcgggctacagatttatagccagctatagcacggactccaagacacagtgtgcgtatgacaggtgggatcaagtattaatagtatagtatatagctattatataaatgggctattagattagctataaatgaattggagctgctagttggctatactattaaacttgctcttaccatcggtgttggctgcaacagccattgttatactcccaatgcactgagtagaaaggatagaatgattggtagagatagaaattagactagaaaattataaagtgatttattggaacccgtgtgtacctactcaatagcaatagctattgtacattcaagctggagtatcttttactgagataaacatttttattgccggctactaagggagtgttcgttaggtggagataggagagattgtctctcgttttccgcgcgcacgcttttcaaactactaaacggtgcgttttttgcaaaaaatttcaataggaaagttgctttaaaaaatcatattaatccatttttgaaatttaaaatagttaatactcaattaatcatgagctaatggcttacctcgttttgcgtatcttcccaatctcctcaatccccttctcttcaaacactccctaattgtactgagaatagaatcatgtggaagcttgtacaatgtataggactagtaaagttctatggatgagcccactatgttggtgcatcagccttacggcctcatcttttcatttatacttatagttatcagctaaaatttatttttttaatcttaaatttagagttgattttgggattttctcatcgaattttatttttcagctcttgcttttaggtcactaagaacacgcatataaaagttttattcacaaattatttttcgtttacaaatatgccgaaacgatggggcctttagataggtgggctcggacatactttctctcccctagagctaggcactctgactagcatctagggcatgtttagttcccaaaaagtttttccaaaaacatcatatatatatatatatatatatatatatatatatatatatatatatatatatatatatatatatatcgaatctttagagacatgtatagagtattaaatgtagatgggaaaaaaactaattgcacagttatgatgaaaatcgcgagatgaatcttttgagcctaattaatccatgattagccataaagtgctacagtaacccgcgtgtgctaatgacggattaattaggctcaaaagttccatctcgcggtttactggcgagttataaaattagtttttttttattcgtgttcaaaaaccccttccgacatctgatcaaacgataaaacaggcccctagttctatggtggaaagggattagaacaagtgctacaatatgtatagagtcaatcctacctccttttctctcctatagaacccttttaagtctaacattgcagatgctatatgaggggtataaatcgaatttcaagtgcaaattgagaataattgcatatcaccatgagtaagtggaagcaagaactttttcgaattttgtttgagaaaaggagcttgtatttaacttatcatttggtaaaaggtaaaatctctacatgtcaatcatttacccagggaagaagagaagaggtacacggaagactgaaatttcaatcagcggttaagattaaacattactacaattttccgtacatttcacaatgcagttcttagttacttatggggttttccttcccaccaaaataaaattatagatttcccctaaaaataataaaactatagatatatatttaagacaaaatagatttgttgctagctcttactattactagttggtaccccgcgctttcttacaagatatgtgaataaatgcatattatatattatataaattgtagatgtatatatttaaataatgtgaaaatgatatgaaaataatgatttgacattgcttgcatcttgagttctaaaaataatgatttggttcatttaaataacaaaattataaatgatatatcatatttgtatgatatttaaaatactctagataataattgctagtgggtgatgatgtggtacacctgcatgttatttaaaattctctagataaatttaaaatactatagataataattgctagtgaatgataatgtgacacacttgcatgttgagttttagaagttagtgaaattaactttataataataagataggatgttgtgtaatgtttcgaaaacgctctgcaccagtagggccagccagagaaaagtacgtatatttagctagtcatatacttagatggttccaaattgattcagttcattcatagcccattataaagaagcttccatgtttataagagacggtcgttgcagtcctcaattctaaaagaaccggttagttgaaccatggtttagaattcatattaaaaaaaactatttactccatcaaaaaatatatgaacctaagagtggtattcatagaattagaacgtatcctatccagcaccatattattgtattatgagtcaatacagttctgcactacattcatcacagatataatatttactatagcttaaatatagtgggcaggtgataaattaaaatagtatttcacacatataggaacagcatgatgctctcctggtccaaaacaatcgagaagatgattaggatatgccattttgatgccatctgcagatcaatgttccatgctgcagttacattgaaaaccatatcctccggttatcttccagccccatcattttcttttaattctaaaccatccaccaggcaagttgctgctcctcatcacagtggcaataatgtacttaatttttttctattcttcgcgaaaaatacgtgcctgcaggctacagtgcaaaaagatattactgcatctagaaatttatcactagatattatccatctttaaatttgaactctataaacttgtcttttttttgaaaaaatatatgtaaaatacctaaaagtatgtcgtattaacatagtgtgctcatcctaaatactccaataatcacaaaacttctgtataccgtgatctaattatccaaaacttattgatcttcaaagtgaaaaacagtactcctagtactagccaacgttgatgggtatttagaaggcaaaattggttatatagcattaaaagttcacgtttttagttttatagcaccgaaagttaccggttcactttaatagcacccaaaattcaccatgttctcatttttagcacttccgtcaatttttccgtccgtcttgatcgatattgatctagccacacacacgatatgacatttcttgatctagccacacacacgatatgacatttctacctctcatttacatgcattatacttgtacttgtgaggggtagaaacgtcatatcgtgtgtggctggatcaataacgatcagacggacggaaaacgatcaagaattgatggaagtgttaaaaatagaaacatggtgaactttaggtgctattaaagagaaccggtaactttcggtgctataaaaccaaaaacgtgaactttcgatgctatataaccaattttacctttttaaaacctggagtattattttccatcagaaatgctcctgctcgaagtattgctacaactgtacaggtgagcacggccactcccatctccgtgattgcgtcaggcgatgagaagaatatgcgaggagaggtgctcgcgtggattcgggtcattttcgtatttttcaggcggagtccgcaccggccagtaggctgaggcagctgttgcttcttggacagttcagagtttcagagtttcagaaattcagatgatgggggaggacggcctcctgtttcttcacgtcgcgtcgaattgtactaaaaagggtcgtcctttttcgagagtgatcctttgtggagcggatctcgactgatggttttggtttgccggggggtttatcgctctccaacgggatgcgattgggatgggcggcaaacgggccggctggatatttttgcaacaacggcaggttttctctctggctaaaatcgttcgtatacagactctgtaatactccctccgcccataaaaaacataaaaaacaaatttagaatccgatgtgatatattttagtactacgaatttagacatatgtatacctagatttataatactaggatttatcacatccagtatatgttatttttttttatgtaatggagagaatatgacccaacgaagacatgatcatgtagtgaaatacttctaattaagttaacacatttctcgtatcctatctatgtatgctggtgtttttttaattagaagtgttctctttcaataaaagatatagattaaaagaaagtgatattgaagttttacaattgtttacatgttcgtttttgggagacaaaatcaaaagtccaaatatcaccataaactttagatagaagtccgtatagtaccttgaattttaaaaccagacatccaaccccctagatttagcaaaatcgttcatattatctcctaaggtggctttgtatagttgtttatatctaatttgtatataacttggatgagtttgatcatatgacatacacattagacatatgtattaaaattttcacttcaatctttctttttaatcgcttgttagctctcacttacaaacaagtaccaacgtaataatagtatggtatcattgtataagtataaattgatgacttacaattgatgatatgcaaatatgttacattagttatccaaagttgtttatttaagcttccaaaatatgaaaaaccaccatccaaaatcaccttaggggatgattataaagtttagaggttagatgtatggttttaaagttcaggttgatgtactttcatccaaagtttagggggatatttggacttttaccaattataaatatatgtatattaagaaaaaaaaatttgtaaataaatgttagctctagctacaattttatcttgaccaccaattaatcttaaatggttcacatgaaagattttcccgtacactagaccctttttgttttcaggtggatcataagtgcaaccgcacaggaaaatggggacaggtgctgggccgttgcccacatagaaaaatcaattttcgtgtgcggatcacttaacaggcccacacacgaaaataagcctattttcacgtgcgggcctgttaagtgacccgtacacgaaaatagcctaccccacgcgctgcccatcctcccatctccctcttatcctcctccccatcctcccatcatgcgagcgctgccatttatcctcctccccatcctgcccatcctcccatctccctcctccccttcctcccatctccctctccctgtccctctcctcctcggcgatggcggcgctctcggttagggcggcggaggcggcggcattggcgggcgcggcggcgacatctgcgagtacggcggcagcggcattggctacggtggtggcggtggagcggatccgtctccggccgccgcgtggaggccggatccgtcgctggccgccgcggagaggccggatccgtggcttgccaccgctgggaggccggatctgtcgccggccgccgcggggaggccggatccatggtctgccaccgcggggaggccggatccatcgccggcgaccacagggacgacatcggcgggcctcgggcaaggcggcgatgatgacggtggtggcggcgacaacgacgacgacaggcctcgggcaaggcagcgacgacggcggtggtggcggcgacaatggcggcggcgatggtgttgacggcggctagattagggtttgcgggtggattttgatttttttttcggtttcagttttttattttctcgtgcgggtggcttaagcgtccgcacgtgcgggtgcatcacccgcacgaaaaaatcgggattttcacagactccacgttccagacgggtggaagctacgcacgcgaaaattgattccacccgcacggaaaaatctttcatgtagtagtggttagaatacatagttttatgtttacgacacaatgcactttgattatagagcatcggtctcttttaagtatttgtagatctgttttggaagaaagaaaatatgagaggtcaagtttaataaatgattagttccacctatctttaaacatgaacggagtgctatattgtatgataaaactcatgcgatgtatgacgttttgcatagagaacgatcaaatccttcataatactacaatgcaatgcaataagttatcatctacaatactgacataagtgaaagggtggtaatttgtgctaccaaaaaaggattggtctatgccataatactagtaaatagtatgtgtccatatcaattaaatattttactcccgacataaccatataattatgcaaatatactttaaaatgagtgtgccgtaataaaagcacaaataacatatcatacaaccacttgtcaaataacaattcaaaagcaataaaactatgaccgtatgtggttgtctttccacatggaccaaaagtttgaccaatggtcatgtgtacttttccctataccaggagataaaaaataatatctcatgatcatgtcggatggaccgcacctccgaccaatgactaacatgcacttttttggccgaccactaacacttcactgtcttcaactaatccaatatttattggtcgcttcagatcttttctaactttaatctcttccttaaatattcggacagccacccaacctttctttaaataataagacagtcacttggtgccacgtgggccactacacacaagaactcatgagaaacactcaacttttcctccaacgaatccaaaagtatacttcttggacacatcactgttccagcatgcaagagtggctcatactgtagagcgcacagactcagagagaactcagcttagcttaggattagttactttaaaatggaatcattacactaaaaagacatcgaataatcacttgctcgagtgcaaagttcgtgtacacgaccacgataatctctctctctatccagaagataatttcaagtctcataggcttttttttttcatttccaggtggcagtgagagagagagagagagagagaggacatgggcttttaagggcgacagtgacgtgcagaggatctgtgacatatccggatggatattcccctcgcgagcaaaggattatgccccgaatcttccatggctgcaggtcattttggctcatggcgtgtacggagtacattgtacttggctgagggatttcttgcggatcttctgcgccgttcaggttgtgtttcccatgttggttgttttttttttaaaataagttcttgatatatgcggtgggttgggttagttgtctactcccagatagctacgagtatttactcatggccagtagtatactcatgtagcgtcgtcgcgtccgcgcttcacaagttttatactatgtcatatgaatggctattaaaaaagaagagtcgtatattattgagttgcttgacagaaactttaagatgggctacataagtgatatgacaaaatgaaagtgatatagaatatgtatcggttctttcaaaatagactgtgtttttgttatgtggtgaaaatgttttattgatgtttatatattgaggaaaaagtgaataacatatttgggtaaggattattattctaattagttaaaggcaagtcggtgaaaaaaaaaggcactttgacgctagcacagtgtagtaattcaactaataattctaactctttagtggatctggtatttatacactatggctgtttcagctccctgtctataccttgtcaaattgcaagacgcatgacaattaattataggaatattctgttggatatctttgcatggacagtagagtgctacttaaataatactgtcaacaaaaagaaaatcacaagtcggttagctctcctcaagaacatacgacttccaagctccaagtgctaacccatattagtattttcttaaagctatttgtacttgcatgtttacatatttcccttcgaacatggtcaaacagggcctgaaatttttgattattttttttaaaaaaattgttgattattaaaaggtgaactaggtagcaccgtaatgtgtatatataaacgattataacgtagtttggtaagtactccctccgtcccacaatataagggattttcagtttttgct

SEQ ID NO: 30193 - DNA, 2328 bp, Oryza sativa
acactagcagttgagttgtacctggtgttctaaataactacctacgttctttcctaatattcattattcctattttataagagtcgcacgtttcttacagatccccagaagatccggatgcaattttctgcccaatttgcagcaaactcctgtcgaattcagaatctcctatcttttcctgcagctctagaactttctatgattgcgacaaatttgtcggattagacaatgagccctacatacaagaagttcaattctgtaaaggaaaaagatagggatggcatattcatttcttcaagtcttgcaatgctgacttgagagtatttacaggactgcatttaatgcaaaaaggaggtaacttgcaagcatgttgacttcctaaccagcaagacacctttaaatttcaagcaatcggttgattaaatggagaaataggaagaaccatacatggctgcttgcctctgcctctataagcttctgaagcaaaccatccgtttcctgcacatagtgttaggcaatgctctaatttgtggaacaccttgaagcatagtgtacttaacaatctgattatctaattttatggtttcccaccataagtagtcatgattaaaagtttcgaacataatttgtagagttctgtaattgtgtgaaaaaaataagctataaccatgacgatgctctaagtttacctctgtaccccagccatcaacaacaaacacatcgagacaaaagccatctgatggtgagaacacatgagcttcacggatgttcaacccaatatcagacagtatcgcggatagctgtaaaacaatatcttacagttcaagcggcgacacaagaaggtgtggcattcgcatggaggtccctaaacagaaatcacaaagcacatggccttgccttactgaggagccttggccttgccatggaaaaaaaaataatttcatgaacaccgacgaattcgagtcccttctgcaaaattaagagaatggttatggacaaatcatgtaaaaaatgattaaagatgatcgctcaggcaaactaagagaatggttcacgaaaagaaagcatataatacatgagtgctaaactagtctggatatcagaaagaagtccatataaaaagaataggcaaagaagacgttactaatcatttcaaagaattatatgagaactgttgtgcaccgatgtagagagcaaaggctcatatccacaaaactcaacaattcaaacaaggctgattagagcaactagcctgattgcatataactgcagtaacaccaactatttttttttgcggggagcagtaacaccaactataaaggttgctcttaagtatcatgacggaagctttgtaccaaagaggaacacagtgttgttttatggacagaacaacctttcagtcaagttagcacccttctggaaacataatctatgtttatacaaatgaaatggaaatttcgcattcttgcagtttttagatcgaaccagatggttgaaacctgaaactgacgttccggattaattgattgttattatggtatagatatgtcattcgcacagcacaacagcttagtaacaaaaataccttgcagaactggcttcgaagtcatccacaccttttcctctctctagactcaggtcttccatcatcctttcatatggctcggattctgtgaattcatcatctctgtccaatattcacaggcacaatcgatgttaacacgaaagatatactgataagttggcttgatatttacagaagaagaagcatttttgtttggacaaagagataccattccgaacacgaaaagaaaggtacatacactccactgaaatcaactgtgtcctcaactagtaaagtatgtatgtatgtatatatatatatatatataaaagcattggaaagttggtgacctatacctcaaattgatagggagaaagcccccaccattaccgttttcagttggagttgatccagagtctacccctatgtagcgggcatggaagattgggcgcttttcagggtcggcgcagtcggcgagaatcctccggtgcagcagcacttgctctgccttgctgacatccagatcgatcaaatagctgcacaggcaagaagattgcactttgaaaggcgagaaaagcaaaacaactgagagacaggcgagaagcatcgtatgtgtactacctttcgggcaagcgaaggaagtggcggtcgagctcaacgcggaaggaggaagggttggagatggcctcctcgttgcgaatcgccaccaggcgctcgtagatgacgttcctaatgtcaggggacccgtgcacgctaccgccgcc

SEQ ID NO: 30194 - DNA, 1927 bp, Oryza sativa
aggcgtacgtgtacgtgtgaggatggtgagcagaggcagcagcaacttgaggaagacgaagaagtttgtgaaggcggcgtgtccggtgtccggtgtcgccgtctcataggtgatctacacggccatgcacgtgcgtccgactgtccaagctaagctttgtagtacgtacgtgccatgtctaactggtgttcgatcgttgtaggcggctcgggatcacgacggaggtggtggcgcgagcgaagacgtggtgcgcggcgtacgcgacgtacgatggcgtccaacacggcgcgttcgctgttccaggggcgggccggatcaagtcctggtgcaccccgtgcatcggcactgggcgcgtgtctctcgcgcgctgcgcgttacagctaccgccgcagcggcctacgcggcgctatttcccgcggcacgctgtccccgccgacctcacggcgctcctcgcacacgagctcacccgtggcatgcatgaacctcgccgttgaatgtagccccggcgccgtcgttcgccatgctcagcgtgtacgacgcgacgtacgccacgcgctcccttagcttccgcttcggcgcgcggcgcgcgcgctgccgctcctccgggcgtccctcgccgcagcgcgcgtgcccgaccgccacgcaccgtacgtggcaccctctccgtccccgacgtcttccgcgctagctcccgtgcagacgtgcagtggcagataaaaaaaaaacagagatgtctaaacaaactagataaaactacaatcctctctctcatccatctatagtaaaaaaaaatttagcaggggcttcatggactcttgtggtcttcacgctagtagtggagtcagggctcgacaccccaccgctccaatattggatatgcacttgctcctaggcacctcgagtagtgtcgtcgctgcaacctggggcgaggcactgccctcaagtagagatggcaacgggtgcatatccatcgggttcccctgccccatacccacacccacgatgtcaaaatattcccacttaaatacccacacccgtcgcgggtacaaaatcgtccccatacccacatccatacaggtaacgggtacccatacccatataattgatttgtagcatttatagttttgtattctaattagccatattagagttgtaaaccattaatattttccctagcaacaatgctattaatattagtgttcaaaggcgagtaaaaaaaattatacaaccacattacataatcaagaaatcaaataataatttcatataactagtctataacaatacttaagatgtgaaaggagttttatgctatgatttagtagtcgttgagacttatattgctaatagttttaggcttaatcaacgaatttttttacccatgggttggtgggtacgggtgggtaaagaacatacccatacccacgtactcaataggtaagagttttcgcccgttagtagacccatgggtataagagttaaaatacgattagcttctagtagaataaaaacctgtcgggtcttgggttatgggtccccattgccatctctaccctcaagtctgcccgcttctctccatgtcacggcgccaccatgtggaccgaccagccgaggctgttggggaggtcgcctgcacgctgcccaaccttacctaccgaattgcacccacctcttactaggacactcctctcatttcatctagctctctaccgttgcaatgtacgaatattttttctagtttatactaagttataaaaatgagggatagattgttaccgagggacgcaatctaaaactcgagccttatagaagggaccaaaagtaaacctttttcgtgttcaaaagtccaggcgcccaagcggcctgcctcgtagagggttttgggccgagaagctaatgttcgggctgagcagaatatttgataagg

SEQ ID NO: 30195 - DNA, 3133 bp, Oryza sativa
ctactttcttaataattgtgtttaatcctaaaatttcttatgttctgggacggagatagtagcatgtatgaacagtatgaagtactacaatgtaaatattttgcctgaaacatgctttgttttttttcatgccaaataattcagtgtgatatttggtaattcatacagtattccttccttttatacccactctagtttcaaatacttgtcactagttactacttactactagcttttttccctaaaaaagttactagctttttagctttgatcactcgccctttttgcaaaaatgaaacatatgtatacttaaaatatgttgcattagcgatgtgtgttccataaatacaaccagacaactttcactaataataacttaatctttaaaagttattaatggttaaaggtgaaacattatggttaacattgacaagtaaataaagatggaaggaatacatattttctaaagataggtacggtcctacaggctttgtccagcaaaaaaaaaaggacagttctgcagaacaaaaatattttggtggagtttttaaacattgcatccaacagaagccttatggtatattttttttctatgataagagaatttattctggttttttacttaaaagaagctgcaaccaattattatagaatttgcagaatgaatagctgcggattacaaaattatgaaacacaaagtagaaaactactaagaataccacccttaaaacaaagatctacatctatggttagtcagaggggagtagattctaatccctcgaggggatatcccttcgtatatctttttcttccaaattcgatgcaaatagttgtgaaaaattctgaaaaaaattgacaacgtagagtataatgatacctactagtccaccaaaattcatgttcaaattcgatctacacatcgagaaacaaaaaagacaaatttagatataaacagtacgttactattcatacgctgaatttgtcttttttatatctcgacgtgggagttgagtttggacttaagattttgtgaagttgtatatatgtgttgtatgaatgttgtcaaatttttccagaatttttcataaccgtttagatggtttttgagcaaacgagcgaacatcccctcgagggattagaatagtttcccttagtcagagtatgtttaacgttgtttgctccaatggttataagttgtacagtctctgaaaccagcagccgatctttgtcgatcgaatttcgatcccatcactgccgatgaactgacattgaaccaaaacggaagaagccttatggtatgggtggagaatgaaaataggaaagagacaggaaacatctttattcctaaactagtactccctccgtcccataatataagggattttagaggtatgtgatgtttcctcggactacgaatctagatcacatccctctaaaatcccttatattatgggatggagagagtaacaattaataggaaatgacacaacaggatagcagaaactgaaaacttcctttcattttctggggaaaaaaggggaaatttgacgtttggagctcatctgtagtggagatttaactgttccaaaagtttagaatagtggcagctatgttgatacagcactatgttatcttttctcagcagacgtgctggtaaaaaaaatttagtgcgaagggaccattgctagttggcccttacttttatattactgtaactgatccagaattaaatttctacctattttctttgaaagagcacgaaagcacatatcaataattttggtaatattattcatttatcataatctattttgctatacgctccgaccactgcacaatgacagtatttatttcgcagagaggccaacaggagctataaaatgatgttccgattgctgttaattacctggaaactgtactgtactgggcgagtgatgaaggtaggatggaagcgccaagctgctgtgaacaactgagggaaaattcaggtgtaatttcctctctagtctctagaattacaaggcaaggtatatatttttaacgtttttgtttatgaatagaagatgagctatgcttagattatggattgtatagtacccgcccattgaggctgggctgggtcctccagaatatatacccctgcatgtgtcactgacatcatttggtcgacatgatagaaatatttgggagcaaaccctagtaagtgcactcatagtagggtataactaatactctatttgtataaactataaagaaatgcaagtaccacccgctaactgaattagtaattgctataaggagttctcacgtttatttagccacgtgatcatcaaactgagccatccattggacagaagtgtctgtgagatatcaatggttagtatatgattgtcagtaaaggggttctatcaacgtaactatatacaggatgtgatgatctctagccacctgtaaatatgttttgcaaaatactgtactcctaattaaagggagttagctgttgtagcattcaagtcactggtggagaaaccatctttggtcggtcggccgaaatccacaatagtctcggttccactaaaaaccgggactaaagatcatctttagtcccggttgatggctacagcgggcatatttgatctttagtcccggttggtgttatcaaccgggactaaaaataatctttagtcccggttctaaacctatcaggccttgtcaggccccccgggatctttagtcctggttggtgttaccaaccgggactaaaaataggctctttagtcccggttggtgttaataaccgggactaaagatcccgaggatagcgcacgcaccagcccacgcttctctctctgaaccttgtgcatgcgcagcctctctctccacccttatctctttttattttccttccttatcttcatcctctccatccttctccttccatcctccccttctcttctctcaccccctctcctcctccccttgcagaggcagccggcggcggcgggatggaggccgggcgcaggctagcggcggcgggatggaggtcgggcatgggctggcggcgggcggccggtggcggcgggatgaaggccgggcgcgggctagggctggcggcgggatggcggccgagcgc

SEQ ID NO: 30196 - DNA, 6482 bp, Oryza sativa
taaaaaaccattcacaaactttgagtaggagatgaattaagtacttacgacttttgaatcatttttttctcgagtaaataataaactattgctagttaaatatcatacaggccattcatatacatatcgtgttgtatggccacaaatgaaaaatacgagagcaagatactcaaaattcttgtgataaattgtctcatgaaggcgcatgatatagtaggaaaggggggaggggagtgtatgcatagaaagaaaaagaaagggaaaaatgaaaaaagggatggaaagcgtacgtacccatgtacgtaggtgcgtacctatgccaggggatgagaggtgggaccttgcagtatttagtttgctctaagatcaatttaatataacggtttataatattgggcgtaccgatttaaccgaaaatcaagtaatggatactttgcttttctttccatagaatttctaatatttcctctaatttattagagcaccacgtgacagcttgagagcactttaagaaattttaaaggacttaacacatgtaattagaatattaaccgcttaatatatatgtatggggcatatggtaatatttgttctagcttcgtgcatgtttatatacatgtcgagagaaattaattatgtggctagcaagccattagatgtctaattagtagcaattaattttgacaccaatttacagatgttgatagtagtttgtacatattcatcttacgactttgattatccgttgatccctaatttaatgatcaccatgactcgcatgaaaaaaatatatactacttagggtttaggacagctgaaattgatgaattatcttatttatgtgatagctatttgagggtatacatgaatgaattgacttctaaaaagttaaaatgttgtttaaaaatgacaccgtttagaaacttggaaagcgtgcaaacgaaaatccaactatagaatcaaggaaaaaaagagggtcttaaacttccttatagcactcttgtctttgtaagagttctattgatattcgttaatattgtgctcatattataacataatgatttcttttacgtataccaacaaatagtacaaaatccaaatatgacataacacaatacattataattattatgtaattaactttcgattccaacttaaatagagctacaaatagtacaaaatccaaacacgacataacacaatacattataattattctgtaattaactctcgatttcaacttaaatagagctaagtgttagaaaaaacgcaacccatattgcttaattctgctcttgctgcatcacacctctaattttcttttcatgttattaataaattaatcttctccatgtatgaatttatatgtggcaaaacgttagtgctgcggcagtcataatcaccttagatgcctcagacacgatgctttgtcacgcgtgcaaaaggtaaaggtacagacgtgcattgtgtagcgggccaaaaagagaacttcggacgctttatttattagcaaataatatatcagatgatttaaatgatgagtccaccggttctttataagtgtacattagttattatagattttaaatttttaatttaatgggtacacaatataatgatgtagactttagtgcattatttgagaataatagtccaatgtaataaaaaatagttccgatgatttaaataatgggtccatcggtttaagtgcacatataaatcagttaatatagattaaaattgtttatttgataggtacacaatataattgtgtaaactttattttaaaatagtgtattatgtgaaaataatagtacaaaataatgagtacacatgtttatgtagaaaatatataacattattaatttaatggtaacatataatggtgtaaattttattttcaaaaattgtagagctaatttagttacctgtgagcattctttgttggtgaaattatgattatttaaatatatatatatatatatatatatatatatatatatatatatatatatatatatatatatatatatatattatataaatggggaaaataagaaaaaaggaaaaaaaggaggggaaggaagcatacataccatggtacatacgtatacccacacatgtgcgggagaaggaggagaggtgggaccctatagtacttggtttgttttaagatcaatttcatctaacggtgtgtaatataggacccaccaatttaagtgtaaaatcaaggggtagatgtttttattttttcttagaatttttatgattttctctaatatatcagagcgccacgtgatggtttgagagtgtttatagaaagtttaatggacttttagtatataatagatagatagattatataatgtatattattcatttatttagatattttatgaatatttcgatgacgtgcgtatagtacaatacgaactcaaaataacttatatttgtacaactatgggttgaaattattaacgtggtttttatctcatgtgagtgaaaaaaaggaaaaagacaagaaaagtggggacgtgaggccctacatgcaagtacatactccgaaccatatgggctggaatatgaattttgttttttctcatgtgttagtgaaaaagaaaaaagaaaagggggagtggggcccacgtacaaaatatgtaacgtacatgcacgtacacgtacagggcatgtgtggatttttaaagataataataaatctaattgatatttttttatgctatatctaacgtttaaaaatagtgggtccaccagattaaatgaaaaccaacggctagatgctttgcttaattcttctaatttattagagtgccacgtggcggcgtaggagcgtttgtaggggggcacgtggcggtttaggagcgtttgtaggaagtttaatggacttttagtatataatagaagatttggaattacataagtgaaatcgtcttctcaaataaaccaccctcttgctcaagactactcaagagctgctaacgacgatgcaatactatggggatatcgactgaaagaactcgatagaagtagaacagcctctgaacattggaaatgtatctttctaaatgctgtaaactccctcagctccctgtaattaatatgttgtattccctctgcccactctacttctaaacttgtactcccccgcgggtgatctttaaaaaaatatgtccgtgctaaatattacggagcaattttatttgtcaaacaaatatatatttcaaaccagagatgatgtggtatgaatgatatataaaagaaaggctataagcaaagctcaaatagattttttatgtgcagaattctgaattataattcatgtcacgcatggatattggatttgcctacaaatcggcgctatttcaccaagtagatcgaaaatgtttcatcttttaaaaagctgaaacacaaccaaatcacttcataaaacattttgctacaacgtatgaaacaactgtttcaaaaaatcagacgttgtttcaccctatataaaaacaatatttcagcaaatagcgaaagaatgtttcaactcttaaaaaaagtgaaacactgtcagatcgctggatgaaacaatttggttcaacgtatgcaacaaacgatttaaaaccattgcaacacttaaaccccatgtacatcaacaaaccatgtgtacatcaaaaatgaaattattaaacagtatcaaaaatgcactgcaacatttgatccatacatggtaaaacataacgagtacaaacatggtatgctgcagtattgtgtatggttgccaaattcactccctcccaacactcagtcgcttccgcttcttcagctgagctacaatggctgataactctcccgaactttgtacgaaagacccatccacgtacattagcttttgcccagcccattggtgatggagtccatcttgcattagtcacatgagcttctctgtgatccaccttcagagcgctatgtgacagcatcaagagacagggattcccaataactctactggatatataatcgagcttcccgagacggaagccttgcccgtgccatgcatgcacacaaacattccgaagataccaggatctccataagagtatgttagcaacacagttgggctgcatatgggctaggttagccatgtttcagtccaagcccaggcaagcacaactagcaacatatataagcagcaacagcaagcacttgggtgatttgggaacagaagaaaggcaacggcgacggctggcctcggtggctaggcgagcggcggcggcggcgacctggaggccggttggctccttgtcaatttccttccctacctctaccccttcctccagtcccccaccttagcttctagaaccttctaaagcctgtatctccttcctcttcttcttgagtttcagctcaagcaactagttgtgtatttgtgagttgtactagagattgttgttgctttgttaagagaagaggtctctaacagagtaggaggaattttgccctgtacctctggtttgattgactccaggatgatgcatgaggagccaatccggcccagacctaaccaattgtctatcatctggtagctcccaaacatcacgtacgcaatggtatgacgtttgggagctaccagatcgtagtgcagcagctcgggtacaggagacgacagcatgaaacatgtcttcgtaacctagctagcttgtcaacaaatacggcaataagttgcatctgcttccaatctgcgcatcttccaatataattacccatcgtggcaagaccttctctagctaattaactgccaagcaaagattttaatgttttgtgacactcgggttgcccataaactcgcccatatattatatatattacgttcttcatttgtcgatgaactagcttagatgatcgatcccagttcggttgcattcatgcatatgattgatcgattgattggtcagggccagacaataagcgttgcggacgcctatcttttaaaaatgccaagctaggaaatcttctcttctgccatgtggcaatttaatcttcagaatttcattagcatctcatatggagaaaaaacatgattgactagattcacatcccaaggattggtctcttgattgatcagttgttaaacccaccacctaatggctctcttgattgatcagttgttaaacccaccacctaagggccggtttagttcgcaaaaatgaaaattttagagtgtcacatcggatgtttgattggatgtcagaaggagttttcggacacgaataaaaaaactaatttcataactcgcttggcaaccgcgagacgaatcttttgagcctaattaatccgtcattgccacatgtgggttactgtagcacttatggctaataatggactaattagactcaaaagattcgtctcgcaatttccatcataactgtgcaattagtttttttttcatctatatttaattctccatgcatgtgtctaaagattcgatgtgatatttttgaaaaaaaatagtaactaaacaagacctaagtcacgcgcaactcccactttgtcgtgacaacctacgtacgatcggtgtggattgtcgggggtatccactgatccttccatatttggacctctctaccatctccaattctcaaattaaacctttctttagtaactcaagcccatatcatacttggtcccacatatcatacatacattatctcttgtagtttatgttgtagctggttacaaatctgtaggccgcttctcttatctctcttcatttatctttgatatgtgttttatagctggcttataatctgttattgtatctgctcttaaccatttgtattttatggtgccatcatttctaaagatttcgaagcttatcgtgtacatgaagcagggaacaatgatcgatgtagatcaagaattagatgactctgagtctgagtgtataattaatgagtgaaaaattaagtgaaaccagtgcatgtaggggtgcggctaatgggcggctaggctgggcgcgcggcggctaatactactaggactactgcgtactatttttactatactaccactataaaaatatatacgaagttttatacgtatatatttttttatgtataaaaaaatatacacatatacaaactttatatatgatgtatacaaattttttatacgtgtatataaactttatatatatatatatatatatatatatatatacatcgaatataaagttggtatacgtacgtatataaagttatatatatttataaagttatttgaatctctttataacgcattgaacccgttaattttcactgatacccggttttgcctagcacaaattgtaaagcagatgaacggtggatgattttggagcctgggcaccatggtgtcccaattattattattggtggtaatatatatatatatatatatatatatattaaaaaccagaaagaaaaaaaaagacacgtgagctc

SEQ ID NO: 30197 - DNA, 4377 bp, Oryza sativa
gaatagccgtgcccgcggttatgggcggtcgaccagattcgccgtgattagtcccaccttaataaatcgactcaatgcactgtagttcaggtgggttggttgggcctgttcaacgtggtgtagcgttgatcagtggagatttaatgttactttaattactcaacagttttactgttttgctcaataaaatgttttacaacctcctttaagcaaatagccacaaaccgtccttgtgttccccttgcatgtctgcatcgttggtgtggcttactgagtacggtggttgtactcagccttgctattattcgccctttttagaagtgtagtgcttctgagttgaagacgaagttagaggaccaaggctcagaccccagttgagttttgcctgtggagtggagctgaagccccgctaggatcgtcttttccgctgccgctgcttttgtttcggtgtgaggactaagtgcctctcctgtaagtatttttatgctttatttacgtttggaactgtttattacatgtcgttttgtgtaccctggctggtcctggacagggatttaatatacaaaatagtctggaaatttgggctaaatttatgggcgtgacattttgtatcaagtatgagaagaatccaatgactattagggcaaaatctaaatcgagaggcatctcgttttagtgctaatgagagacctctcagatatttgtcgaataagtgttaatttgagagaatcttatagttatagtactagtctattagaaaatatattcctaccacatatgctttaaatgaaactagcatggtggcccacgcagattgcgcggctaacatcattatattttctctcatataatagcatatatgttttctcaatatattattcaaatatattaaaatgacaacataattttaaattttgcaataactttacaaaactactaatgtgcaatattcatattgtattttatatacgtgttagttattaattatttttaatatcaaattttagttatttttaaattatatatattcctatatggactctagactcgtcttttaatatttctttttttttaattccgaattttctgtaaattgtatttctatatatactatatgctcttcttccaatattatttatttttatttctgaatttttattatttctaattgtatttctatgtagactctaaactcatctttaaatattatttaatttttaatttcgaatttctgttacttctaaattatattattatattgactttaaactcttcttcccatatttttcttaatttcgaattttagttatttttaaattgtatttttatacgtactctaaactttaattttaattttattatgtttattccaaattttagttagttttaaattcctatatggactctatactctacttctaatattccttatttttttaattccgaatttctattattttctaattgtatttctatatatggactatatactctacttataatattacttatttttcattccaaattttagttatttcctatttgtatttctatatggactctatactctatttataatattccttatttttaattccgaattttagttatttcctaattgtatttctatatggagtctagtctcctcttctaatattcattattttttaattccgaatttcaactatttctaaattgtatttctatatggactctactcttctcttctaatattacttattttttaattccgaatttcagctatttctaaattgtatttttatatgaactccgttttttctttttctccgattaatgtgagaatttctaggctatgagagcgaacgtggaggctcctttttctattcctttaataataatataatagattttctcttagtcattattttcttagtcatgccaaaatttggcttcaaaccaaatagacactaaacactattgaaattgtcaaatattggtaaggccaatttaggcctcaaaccaaaccagctcgtaacaattaaatctttataacaagatctcacatgattttattttgatgaaaatttataaattacttttataatatatctaaattaattttagattcaataaattactttttagacatataaaagtaaattcaataaaacctaaaagtaatttacatatattatgaaagtaacttaaaacaaaaggaaagtaattttgtcaggacagtaaaaataaatccattgtagggataaaaatataggttttatctagaaataaaatttaatcaccacaaattatggaaatcaactcagagccttatgaatgtataagaagtaatttaataaaatctaatagtaatttatatatatatgataaaaataacttacatatataataaaagtcatttataaacataaatatttttcatcgtaatataatcatgtaatatattgttataaagatttaattacaacgaacacaatagtgcaatcaaattgtggatcggataagcaatttaagagattgttttttgaaatttagatgggtaatggggatgcacgtggcaaggtgctattatttttagtaagaaggctaactgatgatacacagtgtactactttttgtaagaaggatggtcgctggttagtactaacgagtgcatgtgctccctgtagtcgtgtccggttattatacttttccaggtgacatggttcaatgtatagtaagatttataaagcaataacaatactaagtagattataaatacatatgatatatgggttgagatcaaatacataagaagaatacaaaggctactattttttttagatgatatggcttaatgtatgatacggttttttccacaaatatatatatatatatatatatatatatatatatatatatatatatatatatatatatatatatatatattagttggaggagtaaaatattttttttataatgaaggcaaacctgcattaaattgcaccagtaagctagatctcaattctgctgggctgaaattaagaagagttagcatgcagcttctgggccagctatacatgaatgctcggcccatgtcgatctgtgagtgcatgcttgctttcgtactgtctttgttccattgatttttgggtcaaccaagacagcatgcataataagatgtcagatcaaatatttatcggctgatcaatgattgatgttggtaaaaagacaaaggggaacagttggttggccggtcatactcagagcaaaatcaccactatctgccggtactcccgccttccctttttactacttatatactagtattaaacattgctagctctctaaaatgcatctttcaccatcatatttttctcctaagtatttataaaaactattcaaaacacaacgattcaaagtatcattttttcaatttctcacgagatttgcataatgatttacaacacaatgattttagtatttgcgtgtatacttatgtctaaaatccttaaaagtttgaatgcacacatatgtatgttcaagatacagtgttcatatctgcagaaatgtgagggttacaagcgaatccttaacaggttgatattagagcatcttgattatatcataaccaagccaatcatgagcaagtccttggtaataagacttcaactcaatacaccctctgtttcatattacaagatatttttattttttatatcattttttaagtttgattaaatttatagaaaaatataacaatatcttttacaccaaacaaacatactattaaaatatattcagtgttagattaatagaactaatttgatccggtaagagtgactacatttttctatataagcttgatcaatcttatataagtttgacatataaaaaagtctaaaaaaagtcaaaatattttataatataaaccggggaaggatatcattacaaacaaaaccagcaaattaagcaccagctggaaattattcttttatgaagaaagagacaacctttggtttgtctgtgttggttccttgatgacatgaggcacccgactcttgttttatgatcgtccaactcatattctgtgatgcataggtattttaacaacattggacctggcaaattagtattagtgaagttcatgtaaggacatgccactgtccgatatacggtactccatatacctagctctgaaaggacacatgtcctgtgtagagaacttaggaatctaataggtgagatctgagacttccaatatcattagctctcctgcacacttaattgagtttggggtggttttttgaacgactagtttggggtggtttgagatgcttaattcgtgcacaaactatctggatcctactatagtagagaccatgtgtcccacgg

SEQ ID NO: 30198 - DNA, 1548 bp, Oryza sativa
  unsure (1)..(1548): unsure at all n locations
catgaaactttgctggtgtctagtttttggtgttgtgtttggcccaagtagggtgccttgctgcctaatttattatgacctctcttttgttgtgctcctcaacaggtagagtagccaatctctgctccatattttctcttgatgcattgccatttcacctaactaggcatatgcaaaattcacacaccctgattgtgtggactgcacatactttgggagctctggaaattcagtccgttgcattttatatctatgaataataaacaatctcaacacaagaatccacaaattttgacaatttgactctttgcaaaaactaattttacaaaaaaactgtgaccaaaacttatttaaaaatgactcttttgttcagcgcaaaatcgtatggtgctgaattaaacacctcagcgctaaatagcatggcgttgaatgcatgttggcacgccgactcagcctctcatccatggtggcacggccctcagcatcaattgatgtggcgctaaggtgtctaaattcagcgccatacgatttggtgctgaacaaaaggtcatttctgaaataagttttggccgcggtttatttgtaaaattagttttttacaaaggatcaaattgtcaaaatttgtgagaaatcagagggggtggggctaatacgcgaactttcgcgggccgcgatcacagatcagatcacaaattcactttatcgtttagtatcattaccttatgtctctaactctatgcttacgtgcttaattatctgcagaatttgcaagcaactgcatgcacgcatcttgcggctagagatcagaactggagtagcatgcaaccatgcataccgccattaattagcatgtactcacaaactctaaacacaaatttaaactttatacgtacaaacttttgatatggaaactttatatatatacttttcacatggaaactctatatataaaaactttcgatatacaaaatttatacacagatgaatttcaaaatgaaattaaaataaattcaaaaaataaaaactattaaatttcaatttgagccaaaactaggctaaatataaagtagtagactgggtacacattaagaattcccataaatcttcatagtcttatgcgtgcattgtgcagcaaacaacaacaaaaatcacatacttgattagtcctaaaaatcggtgattaaaaaaataaaaactaattacgtttagctatacaaggaaagccactgcatgcattcgaggctccagctgtacgtacgcgttagccttctcagtctttgcatatcaacctgtccgagctgatcgcgaattagagttaacgcgaacgttcgcgtattaggtatttagcgtcggtggcgtctctcctaaccttcgttgagaaatcaataatccacgcgccatttcattggtagcagatctctccttcctcctctgacctctctctccatcgcgcagatccagcaccgccatggccgccgcctcccctcccctcctncccaccaccggcctccccgccaacgccaccgccaccgnctcccccgcccccac

SEQ ID NO: 30199 - DNA, 667 bp, Oryza sativa
ggatctttgcacttgagcttgcatacgagtatatgacacttatgatgttaatgaatactcaacaaacatatacatatctttcatatgcaaccggttggtcaccaagtggaggatgccaactgatttgttgggactaatgttttcctttgagccgtgcaaaggaatagatctaattgcgatgaggctaatgaatgacaccatgggttaatggtcagcaagccaaggacatcgtcatgttggcaagaatgaagtcaagcttgtgatgagaataaagtcttgacaaaggatgacaaagaccttggcataaacatggttcaaccgaatggtcacaagtgttgatgttggctcaagcattaaccccaagttggatcgcacaaggcaaaggtataatggagctaagaatgttttcttagtctttttcccggtcttggtgtttggtgtagaccggatttactagataggtgccgtactatcaagaggggtctatgaagcgagcatgcggatgattttgtgccatattagttcatatgcatataggtgcattttgtgggcttgtctagccaagtgtggtgagttttatcaagtcccaaacaaagagagaagtgggcacatcctataggtttgggaagccacatgtggttatgtctggtggagtatcctttggagt

SEQ ID NO: 30200 - DNA, 2180 bp, Oryza sativa
  unsure (1)..(2180): unsure at all n locations
cccccatccccctgtacgtcctctcccctttttctcttcctactacaccataaattttaaaataataaaaaaacaaatttagaaaattttatatataaaaatactatatataaaaaatatttgaattcaaatttaaatttgaatcgtatataaactttttacttataaactttgggtctataaactttaggtgtatagaaatactatatataaaaaaatgaattcaaattcaaattcaaacttgaatcgggtatataaacttttaacttataaactttgggtctataaactttaggtgtataaactttagatgtatagaaatactatatataaaaaatatttgaattcaaatttaaatttgaatccaaatttaaatttgaatcggatatataaacttttgacttataaactttgggtatgtaatatttaagtgtataaactttagatgtgtaaattttaggtgtataaactttaagtgcataaattttctaaaatagaaaagtaatgtggtgtaaaaaaaggaaagtggagagagggggggattgatcgtccggagcgatttatcgcttgttaggattctcgctatattactactcgtattaaagatttgggaatggtttatggttccaactcccaagtcgttcgtgcatcattcgattccgacatcctcgatattttcaataaatgggattcttctgatgttcttttctttaagaagagtactgctgcataaaatttaattatacagaagagtatgggaagaaatccagtttcataacaaaaaaattatgttaagagccctatgaccataagttccgccacctacccatgcataatttataaataatcaaatcaaggcaatgaaaattttaaaaacaacatcaattctgatactatcaacaaactgatggaagggataagttttaaaagaatacattctagagcaaaattagttgagtttttttttctctcaaccaacatttccttcagtcgataagattgattttttttcaaactcttcagctgaagacagctattttcatgcatgtgtccagaaaaaaaaaagaagttccttgtgtgatttaattgggaagaaaattggtctaacaagagaaaagaaaaaaaagtcgctttaccggtgccattacggccctttttgggtacctcatgatagtggcaatattcaatttggttcagagaacttaatttcaagttaatgaactggatgcctctgtttgtcatcttgcatctgcaggattagaaagatagtctattcggcacagtctaattctaggtcttgatattttcaacactcacgaaaacaacttatatatacagttgatttttttttccaaataatgaaaatgatacattcaattgatatggaccgtatttcatcaccatgaaaagaaactgaattttgaccacaccatctagacttgaagaactttggcgcgcatatggttgcagcattgtttgaagcagagaagatgacatttttttggaagaaacatcaatttccagtcaattgtagatgcgaaaattgtctcgagaagagaaaaaaaaccaaaccttaatggaatcgctagtataaacatcgtcctccaaaaaaaaaaaatttttatactacttctaaaaaagtagtggtggtgngagtcntgccannaccaccaccaccattgacatgtggaccatagtatcgatataacttgtgagtgctcagtcagctttatcatgtgctggtatggagtcattagctgctcttgctacaatacagtttttttaattttcttgccatcatgatttaaaaaacttacaaactttttaggtttttattgcagtttaaaatgagatagacaacacaatttattgacaagtacatattttataataatatgaaaatgggatatcgttaacacatatatacaatcatcgatttgtacaaaaaatctagcaatggcatttttctttttgctttttcagacaaaaagtattgtttgcatcaagtagaagctaatattttttttcaacaaggacgtatgcgatattctttttctattttgaataatccgttgcaacacacaagtttttggctagtaaaaggaatagacagaaatagggaagcatcatcggcgtgacagtacgtagaatatgagtaagctctcgtctcaatcgtgaga

SEQ ID NO: 30201 - DNA, 2404 bp, Oryza sativa
gtttaaaaaagtcaacgacgctaaacatttagggaataagggagtatatgaatgtgggtagtgctagatcttataacctgaaacggtggaagtagtacagctctatcggtctatttgcccggaagcatcatgattcgatcgttgattgacatgatgttaataaaacggaagatcgaggttggttcgatcgatgcctcgatgggatgagcaggcaggtcccagcggccacgtgctcgcacgcacgtcatggtactaactgtacgctaatttggtatccaaatcatcaacagcgtcatggaccagtgatgcaggcagcttcatggctgcagcctgcaggcagatcatcaccactgatctatccaaccgagtgggcctaaggctgtgtttagatctaaagtttggatccaaacttcagtctttttccatcacatcaacctgttatacacacacaacttttcagtcatatcatctccaattacaatcaaaatccaaactttgcgctgaactaaacacagcctaaataaatctcttgatccatccgcatgaagatttttctagataataaaacaagaaaaagactatgcgcactaactttttcttactgaattcttaactgatgtcgtaataaaatccgcctttttctttcaagaacttacatgaccgatgtttgaaactaattaagataaaagattaagtaagtgtacgaaaaaataagaaagatattagcgtatgattaattaagttttaattattacaaatttaaaaaatatatttatttaatattttagagcgacttctatatacaaagtttctacacaatatgtattatttagcagtttcaagaacgtgttaatgaaaatcgaggtagaaatctacatctatttctattggttaacaaatagaaatataaatccaggaatcgaggatgcaaagactaataactccaacactttcaaattttttctattatttatcttaagtctatttgtaaatctaaatcccatatcggcatatatccgtatatatgttaatgaacccatcaccaatatatataagcatgatctcatgggcgcggtgccgatgcatgcatattccacaattcgatcatggttccatgcagcatatatatcattgatgccatttcattattgagtggatccatcgtcgatccatccatgatacatacgatgatgagaagttattagcagttaattctcatcatctcgtgatgccggtgcatggccagccaacgcataatgcaaatccccatccatcgatccatccatcaattgtgtccagccagctgggtcgtctctcaatcaccggacaactgctcatgggatcatcttatggctggaaaacaataagatcccccaacaaaaaccaaacaaaaaagaggaagaaaaactaatggctccggtgagtcggcaatgcacatcgatctcgtccagtctcacgagacaatgttcgatcaggtgtgagaatgacgagccagcgacagacagatcaaactagggatacatagttcccggagtagtagcctgccattctatcccgaatttgatcggtgagcatggatgcaagtttgatcgagacagtgtgaagttaagaatctaagttaattacagaaggaaagaaatgaccagtcggcaaatgatttttgcaacttgaataagtaaaatttgaccttatattcttgcgaaggtgatatatttcatattaatctatcttattattttatcaaaaaaatttaataactatttaaatttcatgtatgaaacgagagatgctttctcgagcaacaaaataattaatctctcccacatatatgtatcaatggggcatcgactaccgacatgaaccggtgctttaattttttttaattcctgcttgcagtgcacttttgcatgcgccgggatgcactgtttggattggttatttcagattaggcgtagagacacgagggaactagctggtttgatggcaacagcacagagaagaggggaggagatggatggcatatgcatgaaaactgctaccaaaatatattatggccaataatccacaagatcgaagctagctagcttccatgtgggatcaggacatgcatccaaagttcaggtaaaaaaatacggaattgccatatttcgttcaacggcagaaattcttggaaaaaatctatcaaattgatcacagacctaacgaaaagtgaagtttacgccatcaggtgtaaaaatcacgatggcgtaaacaaaaaaaccttcccctgcccttatcttaaccttcctttacccactagaaaacttcgaaaggtggccacggtccattgcagccatggaagcggtgatccacgggcggaccttgggaagggcttctacacggacacggtggcagcatgcgggct

SEQ ID NO: 30202 - DNA, 1948 bp, Oryza sativa
ccaacctcgccgtcgacaacctcggcggcgtctgctccctgcttttttttttgtgtgtgtgatttcaggtggaggaagatggaccaggggcaatcttgccatttcgaaaaaattcttgcctcttttgatccggatattataaaatattgtctccggtgtcctatagccaattacataatttttgtagtgttcattagccgtgtctcgtttttacagtgtctcacggctaattacatgttttttaagtgtcctgtagcaaattttgccctttcagaatccctttttgtgaaaaattgaaaccagctcattatggtagtgcccgagttgtgaagatactgatgaaaacattcaaactgaatttggttgttgcatttaggatgtcatcggtattttcttttcaatctctctcgctgatttggtttcatttcatttaggtagatattgtgctaaatttattccaaatcaaaattatcccttccccatcaggattgtcatgctatctgctctctccaaggtgagtattggaaaccttctcttgtgacaatttcattcagttatgtatttcattcagctgatgaattatcctttgatcatggccattataatgaaatataaactgaattgcactatctgcatgatataacttctacaattggattatgtttttctgaatttggcttatattgtatatgaatttcatatacttggacaaccgtgtttctggttttcttttttttttttgggggggggcatgcttctgaaatttaccatcagggaaaaaaattctgacatatactccctccgtttcacaatgtaagactttctagcattgcccacatacatatagatgttaatgaatctaaacacgcacatatgtttagattcattaacatctaaatgaatataggaaatgctagaaagtcttacattgtgaaacggaggaagtagtatactaagattttccacaaaaatacttacgtatttgcagccttttagcacatgagtttggatgcttgttattgcctgacataatgatagcttgcaatattaaatcagaatacaaacagtgagtataaaaacaagaagacttttgtataaatggaaccgtttgtgttattagagtgaggtttacatttggtcaatattatattcccgtttataggggtgggcagaaaaagaccgaaccgaaaagaccgagaccgagaaattcggtcatcaattcggtcctaggtagtgaaagaccgaattttgttcggtcaattcggttagtctcctcggttaaccgaaaagaccgaattataaaaaaacgtctaaatgcaacctacaatccactatgtttaataggattgaactctaattttcacatccctacttcttctaggcatgcaacctaacaagagtctttactcataagtgcttacgaaatttttttgtgatttttgtgttgaaaatttccattatttctttgcatatatgaaaatattgttgaatttcggttaggaccgagaccgaatttgtcggtcctaacatttttgcgctgaaattcggtcttcacttttcaaagaccgaaaagactgaaagaccgagaccgagaccaaaattttcggttagaccaaatgcccacccctacccgtttatgctcatgaaattcatcttattgctgttcagtgcagcccaatccaactatcgacgcaggccaatatcaacaaggtccttacatgcaagtaatatgcgctcacatccctgcaagtttattctgttcatttatactcaaattatgtaataatcgagtccatatgcctatgagaaatataatttccttactgaaattgatgactgggtgtacaaaacatgactcacattttgggatttgaacatatatttcctatatatattaagaaattgtgtattcttacttagggatttgatctgttggtttgtttaacat

SEQ ID NO: 30203 - DNA, 6977 bp, Oryza sativa
  unsure (1)..(6977): unsure at all n locations
ctacaagtgccatgttaataatataacgtattccctccgtttcatcatattttaaattttaaagtcgtttgaccaaattatttaggtttgatcaaaattaaaaaaaaactagcaatatccataataccaaattagtttcattatatttaacattaaataaattttggttcaatgtttgtttaatattaaaaatattactatatttctctaaaaacttgatcaaacttaaagaatttttactaaaaaaaagttaaataacttgtaatatgaaatggggggagtactatattacgaaccgagcatagtttaactggttaagttaaatttcttatgatgaaacctatccacctaggttaatggtgcgaactgaacgtaccttaactggttggatttcttgtggtgaaacctatactcatatttttttagtggtatttgacataccgtaatgaggcgtctatgatgagttcgtcgatattaaggtaccaagacctagtatttggagatgctcataggaatatggtatatgtttatagagattagtgtacacatgtgtatatgattgtctgtgagatatgctatgttttaaaaaataatatactatctgttgagtcaatctatccgtggttaattggatctatgccattataattttgtcgaattgtaaatattactactatttacgaaattggctaactgttattagtattttgtaagaatttaaaccatgccattatattcgtctcggacgacatagttggaccagttttttacaaaccgtattttcaaatatactaaaatacctccagccggatgatgagcgggacccatctgttagacctacctttaacctcaagcattttatcatgtgtgtggtataggcaagtgatggcggggtcggtggcaggcaagttatggcggcccgatcgacattggagcttgccggccggtggctactacaaccggcgggagactaaatctagctattgcaaccggcctcttcgatcgagctcctgaccctccgccagcctaggccgagtttagttctaaagtttgaacccctggaaacatcacaacatcaaacttttttacacacacaaactttcaattttttcatcacacatcattttaattttaattgaacttttaattttaaggtgaaactaaacacacccctactcaaagcacgtgtggaattaagtttgttgtggccgacggctgggcaggagctcaacaaaatcgtgacccgccactagcctcctcaagctcctagcgggcggcccaatcattgtaaactgatcttgattcaggccaagtttagttctagaatttttcttcaaacttccaacttttccatcacatcaaagctttcctacacataaacttccaacttttctgtcacatcgttccgatttcaaccaaacttttaattttagcgtgaactaaacacaccgtgagctcttgcttcgtcaagctcctgtcccgctgctggccacaacgaacttccacgtgcgctggtcgccgcttcatgagctcccgtacaccggtgcacgtacgccttggcctcatcctgctcccaacaagcagttggccttgccgaactagaggaagggttgaggttaaagatgtgtcgacccagtcccactaatattatcctatatgagttagggataatattggtttacaaaaaatacgatatgcaaaaaaaattgatctaattgtgtccaaggcataaataataccacggtttaattttaagaaaaaagtaaatagcacttagccgattttataaataacagtgatgtttttataattggatagagttacaatggatggttcacgttaacccatgcatctatctatgtgagcagaccgatcacatgctctactcgtagacaagctgcagctgctgacttgctaccagtacaatttaccgtactactatgtagttactctctctataaaaaaaccaatctagattaagatactatctcttctactctccgtcacaaagtataataaatttgaatagataaagacatatccaaatttattcgtaccagaaaccattatattctgtcatgattttttatgggacgaagggagtagtatttagcactagtagctatgaattcgtagcttcgccgccgttctagctaggaattgaattgaagttggagtcagtatgttcactttgatgctatttttaaccatactattttttttagcaaagttaccataaaaaatatctacgtttagtttgttattaaatttgatcaatacataagaaatcctatcaaaattttggtaatattaccatcttgttaaaattttagtattatcaaaacttgataagatttattttagctccaatctaaaacatgcccgagatattgtgtcgggttggggttgggcaccaaatggaatccggccaccacatctcgcggttgcacgcatgcatggtgcgctgccaccgaatggcagatatgggatattttgggatgaaacgagacgagacgatcgagggttagggatatctcgtggtaacgtacgtgcatgtggtgaacagaaaaattcaggctgatgaaaccaggagataaatatgtgcactagcatgtagtactaccagcaggggtcacgggttccaaaagaaactgggatatgattggtgagtttggactcgtttgtctgaggaacacaagtctgcctttgttacttccatcgtctctagatataactatcttagtatttaacgtatctcatcgtagaagtataaatctagatcatggtactaaaatatatcttattcaatcttatgttgatatattgtgagacgaaaagagtagatatttcgatgatattgttttgatgcacacgaaattcaagcattttttaactgatcaggtgtaggagaagaagaatgcaagtaattcgaaatctgatcgatgaaataattgaatgagagtcatttcgcttaattttattctttgcttaaaattatagaatacttatatttataaacgaagaaagtaagtgataagaaaatatggagcgtatgtattacacaatctgatttttttatggaattgcacaagtatatggagtaggaaggataaatgctttcacttcgattcatcacgtcgaaagagagtgcaatgaaacagtactgcatcagttagaacgaggcattgtgtggtctgacatgagcatgttcccatctgcgttcaagatcttgttcactagtctcaaatatcataataactatattatttgtaactatgaataaggcacccttctttctcgcaaaaaaaaactcccattacatttccttataaaaaaaaagcttagttcggcccatggaaaaacctttttagttagtttcaaaagtaccttttgcagattatatgtgttttattgactctaacgatattcattaagttataaataccccatgtgctagtggaaattgttccacaaaatttgaaagctgtctactaaattctaaaatcaaaacttatttaatcctcccggacagctgaaattacatttgaatttttaacatttataatttactagaaaaaaatacccgtgcgttgtaatagataaatgctattttaattttattattgttatatagtttagctacggtaaaatccaccgtaggaatttgcatgaatattttttcaaaaaatcatgagctgcaattaagagtccgtatttcatcttaagttagcatgcgagtttttttaaaagatttcttatacaactccttttatacttccaaaaagaaacaagcttaaaatccaacttatggatctgtatttcaaaaaacgagcaaacttaacaaccgaatcaaatatgtatgacgtaccaaaacaacagaaaaacattttcaatttttataatactagagactaataaaaatctaaaaatgaatttctgttgcatattgaatctaaataaatgagaaaattcataaataaagttatttcaagcataaaaatatttactttcatataaggtagaattattttctgtaggccaattattcttatatagcttgaaaaataatttaggttgtacacaccgtgtagagtaagtgatactcataatattttaacaattttctgatgtctctataatttttgaaaattgaaaagttttttcagtctcgagtcacaatgtctccgctacccaaaaccactttgaatctggtcaaggatggaaagtgaatggtatggaataatgtttaaacattgttctgtggaataaagcttaacgatgaattctagatttttaatggaagttcataaatggataatttagcaaaagagggaaagaagggaagaaagtccaagccgagttactccctccgtctctaaacatctgacgccgttaacctttttaagcatatttgaccattcgccttattcaaaaattttaagtaattattaatttttttatcatttgattcattattaaatatatttttatgtatatatatagttttacatatttcacagaagtttttaataagacgaacggtcaaacatgtttaaaaaaattaacggcatcaaatatctagagaatattacattacgtcgcctgcaggaatcgattagcgaagacacggtccgagccggtctgcttcagagaagttgagatcgatcgtgttcccagctgctgtacacacctgctagtgctactggaagctctgttcttgtcgtctctatctagctagtcaaaaagtttgccaaaaaacttaacagatcgatcgatctatgcatctgcaaattgagtgcacatcgctgtagctagccgtgagatcgatcgatcgatcgatcatgaacatgccaagtctcaacgtacgacgactctcgaacgtacgcgtgctgaccgcgttgccacctagcagaaaggtgagcaccatgggcagaggtcgctctcacactactgatggagcagcagcctcgatcggcggcgtcgatggcggcggcgaaggccatccaactgcttgatcacacaagaaagggggtgagatcgccgtcgtcgtcctctcatccggccagctttagctgccttcgatcggtttggttggggagaggcggnnnnnnnnnnnnnnnnnnnnnctttatttcccggcgatggctactgcagattgcgcgcgccttttacggatgtgttacatatattattctgtttgaaaggcgatcaaaatgggggcgcgtgttagggtttggtgtgagtgctttgccttttctttttcttcgattacatggcatacacatacacacgtaatagcacacactcacacatccacaaatatacatggtttgaaatttcggcacccaccggcaaggtcaaaatctctccgaaattttcgagttttgccaaacatttgtaaatttggtcaaaacatgtaaaaattcaaaaaatttggccaaaaaattccgatttcggtgattttggttcttttggtccccatggacaaaaacacaagttccgaaattgcaaaccctgcaaatatattctccaacattatgcagggacataaaccaacaacacatcttttatctcattaaaaatatctgattgaaaatttacctatatatatatttaatattcgtgagcactggaatttgaaagccatatactcacacgactctactgccgtattaccgtatcactggtgtttccatagtgctttaccttttctgttcgccagatggatggatggattgtccagcacgtattggcatttggctagggtgaatagtcgttcgcgtgagcacactatctttctctttggtaacttttggacataagacatttgactattcgtattttaacattcttattattaaagttcccttatgtgcgacttatattttgtatacaattacatcctatatttttaacaaagacaaatagtcaaacaattaatattcagaagtcaagcattaatattttcaaaataaagagagcgatttattgcgtgttaatatcaaggtcttaaatcttcggctatagatgtttgagaagagttctagctatttgcttatatgtactccctccgttcctaaatatttgtcgccgttgactttttaaacatgtttgaccgttcgtcttatttaaaaacttttgtgaaatatgtaaaactatatgtatgcataaaagtatatttaacaataaatcaaatgatggggaaaaattaataattacttaaattttttgaataaggcaaacggttaaatatgtttaaaaaagtcaacggcgtcaaatatttaaggacagagggagtacaatttagccgttatagcttcatttagcccgctatagctgtttgagaagatcaactctaaatgtcttagcccgctatttaaaacattggttaatatacacttaacgaacatataaccagtggtaaatatgctggcatcataattaattatgtgtgtaaacgtgagtatcagaaatttaaattctcacgattgagacgagagcttactcatattctacgtactgtcacgccgatgatgcttccctatttctgtctattccttttactagccaaaaacttgtgtgttgcaacggattattcaaaatagaaaaagaatatcgcatacgtccttgttgaaaaaaaatattagcttctacttgatgcaaacaatactttttgtctgaaaaagcaaaaagaaaaatgccattgctagattttttgtacaaatcgatgattgtatatatgtgttaacgatatcccattttcatattattataaaatatgtacttgtcaataaattgtgttgtctatctcattttaaactgcaataaaaacctaaaaagtttgtaagttttttaaatcatgatggcaagaaaattaaaaaaactgtattgtagcaagagcagctaatgactccataccagcacatgataaagctgactgagcactcacaagttatatcgatactatgggccacatg

SEQ ID NO: 30204 - DNA, 1245 bp, Oryza sativa
agttggcacaatgcatcttaaaaggtgtcacacagtaagcctttatatagctgccccgctgtctttttaatatagtcaaggtcctgtttgggtttatcaaccaattgattgaacacaatatcattgctttttgccacgtaagtgtgcatttttattgaccaatattatggcttaggttgattatatattatggtcatttttcaggcggttggtaaatcctttatgagtttacttactcggatgttataccatatatgccatatatttccaggtgtggtgaaaccatgtgtcttttagggacttaagcacatctgttaaagcagtgtgcgcatggcgtatgcccaatactttcgaaatttctttattcacagcattcaagcttctttatagttgttttgctatgtgaactttcaaagatgttgtcaactttaggttgtacgcatcatattttgccaagcagtcggtatatcacttggatcatattattcagggattcacaccgcatatgctatatattggtatcaagtcacttggttgactataattatcaaaaaccactcggttaattggataatttattccttgactatatgtttagtttgttcagctaatcacatagtcgggggctacacctattaggtgcatctagtcgatgcatctgactttattttttcagccctccacagtcttcagacttggaaaaagtactcgggagatcatggcgaagatgattgaagcactcggctttggagtaatctagttcgagagaagattatctttccgactgtgaaggtctcaggggctactgtggagattatgggtaccccatacccacacggcatggttatccgactagtaataggggataacatatatgtatggaatatgtaacagatcatgacttgggtattacgtttcccctgtatattatggaacgggcctaaaatcctggtttgataagattgtaaagtagatttaggaaatcggtaccttattggttaaggtttctattttgtaatcctgctcccaccctatataagggggcaggaaggcctttagggggcatgagacaacctgatcggcagatcaatacacacccggcggattctatttcccaaacaggagtagggtattacctcttattgagagggccttgaccttgctaaattctttggcttcacattcattcacttctaggtctcgtgcgctaccccgttttattattggcgaaatcatgtttcgaca

SEQ ID NO: 30205 - DNA, 1462 bp, Oryza sativa
agggttcacggccttgtttaataatattgtgtagctctaggatcgtctttataaaataactttgggcaactaagtgacttttaaatgctgtttactgcaaaacctaacccctatattattatctccttgtacccccttgcattaatcatgcatctgccggtgtggcttgctgagtactgtggttgtactcattcttgctcaatccttcccctcttcagtaagagaagctttggagaagatgtcttaggtggagtcctggcttataccccagttgagcgcctgtgaagatggagccgtaggcccgctagtccgctgctgtttatttttgtttgtcaggccttaagtgcctttgtaataatgtaaatattatcgatataataaagatgtgtcttttatatcatgtttgtgtggtgtaccccggcttttcctgggacggggattaatacactagcgttcgggaaaaggcaattttcccggtcgcgacaagctggtatcagagccatctcgactgtaggataagccaaatggataaaacctaaggacatattttataaataaaactatttgtgaaagttccttttttctccttcccctaatgctatttgcaaaatgtttactccgttcttccttcttcggattttcaactagtactagatggtcaggtcagtgaagaagaggacatcgtcagttgtttgccgaagctccagaagactgcaggatctgctagtgaagtggaggaagcagtgaagccagctgtgaagcaggagtgaagatcttggagaacccgtcgcagaacctaagccaccctctagggtagagtcgttagtcgtgtgtttccttgtttgtgtgtgtagcgcgtggtttgcatcagtggggtgtgatgtaaccatgctaggttgtttgcttaatcaacttgcagaataagcctaacatacatcataacagcaaaagacttagatctgttaaggtcctatccttagtttctaatctgtctctcccctttgttttccctctctccctctccaaacctttgcaacagatggctgacaatgagaaaggcaataaggtcagaagtcaggacattggtacctcaagctcccgagtgaatgaagcaccagacaccagttgtgtggcagtggtccaacacctgattaaccagaacaaattgcttatagagatactacagcagcatcggatgccaattttgaacccgagtcagatgcaacctcaagtgcagttggaggcagtccaagcactcacaccacaagtcagcgcaccgccaacatcccagaaggcccctcatgccatgccacatgttgacccaaaagaagcaagtatcatctgttttatgtgtgatgagcaagggcactacgcaaggaactgtcctcagcagaaaagaaaagcaccaatgcgaaccgaagatgaagtccgtaagatgatcattaccagcacagaatggcct

SEQ ID NO: 30206 - DNA, 1672 bp, Oryza sativa
ctatgcttgcaatgcatatttgttctagaataatataattgcacttgtacttggagtatattttgttggcagagattaatacataaatggagaagaaacgaggaaaactcactcctaagcaagcttaaggataagatgtgcccacaagtcaggtgtaaccgtcctggaaaccgccataaggacccacctgtcagtgaccctgccaaatctggaggcctactgggccggccctggttcggccgaaccagaaccctggtcacgccgactccggctagcctgacattaacaaatatttagctatcacattgagtgtctagtagatgttacataggccaccgtccatgtttagcaatatgagtaaactgcagatggtaagattagataagattatccaccatacttttcatttcactaatatataacaaaactgtacatatgtttacgataagccttatatttggatactattaatcattggattacttttgcttatttatttcagttgtgttgtctatataaccatcgtaaaacaaagaagaaacacaagccaaagcttcatacaaagcaatcacacaaatgggcaagcagatgccgaactgtagccgtggacttctgcttctgttgttggcccttctaggctgttttagcattcttggccacgtgtatggtaatctactatctaatattgaatctcaatggtgaatccaaggtttattttgatttcacaattattcaattcttctgtggtaatcacgatgtattaaagaaacatatctttcatagtaaaatttgtgtttccaattttcttctggacatccatcttcacatatccatgtattgcatacggtttttctttatctttcatgctttcctagtaaaatattttttatttttcaggtaataatctggattacaccaggagtgccaccatgaatgaaggacgcaacaatgtcaatataaatggtttggtacccgtaccatgcaacattttctgcccatcgaaggtctgttgtagaaatgtatgctaccctagcttgcaagcctgtgaggcaaattgcaagccaattgtttgatcagcttatcaagcctgtaattgtaaagaattgataataatattgtccgttgttcaccaatcaagagaatgatcaatctcctcatagatgaacatggtttgtccttttgtttaggggaaaagtataactgtcttattgatacataactggagatggccacaggagaatcacgagaataagcgcaagaaatagtatcgtatagtccatatggcatgtatgcatgtttgatcgtagtactcgtttacagaataaagtaggcactgtttttgcaagtgcggtccgctagattaaatttagttttgaggataaatcgaaaataccttttcatggcacccaaacgaagccaggaatcaatgggcaaccttttcaacttgggtctgcgtggcaggccaaattggaaccttttgtattgtatcatcattttttactgtgcgcatgtccttcgtttttttttaccatagtatgcacatccttcgttcttaagcacaataatattatcacaagcaatccttcccccctgaattatcacaggagtttatttatagttgtacccctttaaagaaatcatgatattgtaaccttaagaacgaaacagcctg

SEQ ID NO: 30207 - DNA, 4775 bp, Oryza sativa
taatgaggaaatacatgcggattagtaactcagtgtaatgtataacttggtagctactgccaatcagctccaagtgcacacgcatacaccaaccattacaactcaagcatgcaaattatgggttcaaaatgcataggcaattcagtctagagaatgacaagggcgcgttactttgccgaaacccgaccacgcctctgtgatcggagctcctccaggacggagtcgacgaggccatggacctggcgtccccggcatccgccgtacagggagaagtgccagccggcgcgagcggagtccgggcggacggcgcggccgaggggacggaggcggaagaaggcgagcgtcgccgccgccgccgtggagcagccacccgccgcccgcaccgccatgggcgacggcctcatcgaacccgccgccacgaagctgccgccggggaggagagggtttttggcgataagagcctcccgcgagtggaaggcgaggattcaacggtgcatcgagaggttagcaagagggacaaaaatcccacgaccgcaatatgagccgccggtttcgtgtgctggtcccattatggaataagttcaccagagggtacctcaacttaacagcaaaattattttgagatcccttaaccacaacaccagaaatatgtacccctaaattcactcaaactgtttaaaggaggtcccatggaagtatatatgggtggtttcactgacgtggcatcctaggctgtgttcgttacttctggatgggagcaaatccctcccacatagaaaacggggcggtacattaacacgtgattaattaagtattagcaaattatttttttcaaaaatggatcaatgtgattttttaagcaactttcgtatagaaactttttgcaaaaaacacaccgtttagtagtttgaaaagcgtgcgtacaaaatatgagggagagaggttgggaacctaggttgccgaacacactcctagtcatccaaaaatattaaaaaaaatacgggggcccacatgtcagccatcctctcctctgactttgatgcctcgtcttttaaacctcctatatattctgctttgggacctcttttgaactatttgagtgactctaggtgtacacatttctggttttgtggttaatggacctcaaaaaatctcgttgtcaagttgagagacctgcaatgaacttattccgttagcttctggaagattcgtgattgggcctcaacgggaaagactggctgattgggccatatgtgggccgtcactggtaacatttgaatttgctgcgggaattctagcttgtgtatcgagggtgtgactcgtttgttatacgatctactgcccagattttcctagaaattgaagtgctctacaaaatggctgtaaagttcaaacgaaaattcactaatcttgatgtaatgtgattgaaaaggtccgaattgagttttataccacagtacagagacaaatgcaaaccattggatcctcagggctccatcggtcctgaacctgaactgtggtcaatgctgtaaatttgttcattaattaagtttatgttttccaatgtcaggattaactttcatgtttcagctctcgagctccttgggttccttctaatggcacatgtccccaatagcctcatcggttattcggttaatataatcaagagctgattatatggcacacagctttattagtgattgaaaaataatttaaaaattttatatatatgtgtttttaacgacttaaaaataaatgttaaaagagatattatattaaaaataccataaaatcaattttaaattttaagttttaactgtagctgaatttatttatttggtaaacgatgaggcttcttttgggtggcagccagagcaccgaatcaatctgggatccatggccgttattagcaattaatttgcatccacgggatctggacaacacgtagaccttctagaagataaacatgtgctacgacagctacgtactgtcattgcaaggacgaagacgctttgtgtgtcccctaccgccctgtcagagaattgctatacagaacttgcaatgcgcgaaggctgtaatgcacaatctaaagtagtgaaagaactctaaagataatttcaaacgaagctgcttgattcataaatttgactataaagataattaccaagtgactcaatgaagtgtgcaattaacagtactgttgacgctctttcagcatagcagtataatagtattatctccgtcccaaaataattgtaactctaaattatttagcgtatattaaggtttgagaaagaaaaaagtattgtactctaaatgatgtataggatatagcgaaagaataattatgtagaatactaggaagaaaattaaatgagaagtgattgataggacaattagtactttattgtgacatttattttaggataaatttaaataatagtagaaatacagttaccatgaataagagtgtacaattgagactaattcagttaatcatttttttataaagaaagctttattaatcttagacaattatatcaaagtgatacaattactctaaaatcaattatgacttctgcatagctagaatgcacgctgcctacaataaaaaaataaataaattgcttcaaaattaaaaaggatgacatgacagcaaatattatatcgcagcaaactgcacccaaaagtactttaagctcacgtcgagataatttaggtgcctagtttattctcagtaaaaagttgtcttttttcttttcaaatttggtcctatttggctggggaatagtgtattaccacctccgtaaaaaaaatacaattctaacaatacacctagtattaagggaaaattaatgatgtcataattaaagaacagtgcgaatgcaactgatgtccttgtattatgtcatcaaggcaacatgtcatggtcaaacccaactcttctcccaaactgatcaagaaaattttcgttatctgctcgagctacgtgccccggacaactccgagaccgaagctgcaggaaagccaagtcaaaggcgacatctccaagccccatctaacctcgctcgtggtcaatatgctactttctgctatccccaggaaaaaaaaattgcaaagcaaagcacccttaaagcttggggcatacgagtacactgcaccgggacgctgtttggtgcgcctaattaaacaattcttacatggctgcttagcccacaagacagtcggcggtcagctgacggtcagtgattagcgattaattatatagaacgggtttgtgctttgttagtgcgatgtttcatggatgcatagaaaatagaaatgattgtttaaatcaaggcagtttcttcactcacagtctcacacctgcatgcaaggacctgcagcaaccatggtaccaaactaccaggaaggtgcttaggcttcttccaccacaagataacgaaacacatgcaacgaaattattgagactaacctgatcaggtttcactgtttgtttcaggacactggcaccaacgctttattagcaacatactttatcattactggatcgccaattagcgtttagcgatgacagcatgatctgaagcaggtagatcagaaacattaatttatgttttggataacgtgataattaaacagatccgaaagtacaaacaacgagtgcacttgtacgctgtcacagcatcagaacttcacaggaagtcaagaagaacagagcgctatatgaccagatttttctgacttctgacggcgaccgtagttgcatgcatgatcgaccagtccttgctggattatggacattgagcatgtcatttcgtacgtgctgtagtatacagtatactcgtgtggtctacagagtatatcagttcgattgagatcgatggatatatcagagagatcaagacttaaaaccgcagctagcaaagtctggtttcccggccagctagctgatcaaactaaatgacgacatcaactaaaattaagtgacgtttttctgatggctgatgcatggcgttatatataaaatatactcagtgggcacatgacagactaataattatataaattaaagaggaattttcaaaggcgtgcagtttttctcgtgttaaaattgctgacagtgaagtgttgacggtttgtatcggaccacgtattttacaacaaacttctacggtaacagctagagctagctgtccatgtagatatccaactagccaataagcgccgtgtgtcaattatctgaattataccctatttgtcgtggcatacatggagtgatctgaccaaaaaaaatgccgaaagctagggtgtgtttagttcacaccaaaattagaagtttgattgaaattagaacgatgtgatgaaaaagttgaaagtttgtgtgtgtagaaaagttttgatgtgatggaaaattagaagttcgaagaaaaagtttgaaactaaactcagccctagtagtattaattagctagctttgtctactactccttctgtctcaaaacaaaaaaatgtagagttatatgatacatattttaaaattacatacacatttatagttctagcatatgtcatattcagttaaaggtttttatattttaaagagtaaattacactttggttcatgttttattacctaagttgcacattaggctaggcattagcaaaacttttcactttagacaagattttatcaccaaattttgcaagttggaccagtggcccacgcgttaaccactgatgtcttcttcctcaatcctcaatcccctacgtgc

SEQ ID NO: 30208 - DNA, 3011 bp, Oryza sativa
ctaatgtgtgacgggggagattgttgggaatagtcccacattgaaagtttaaggggagtggcaccaacttaaaaggggaggggtccctcacctcatgagctagcttttggtataaattccatagaagtattaattactcgacatgccattgtcaggaatttttccagaattctaacagcagattattcgttgattctgaatcggacagacaaaatgtaaagaagttgtattccctgacaatggtaaagcaacacttctattcaagcaaccgaagagggtcatccgaatattattatgattgaagaaaaaagcaaatgttacaagaaagttttacatacaaaacaacactttttctctcgcaagtttgaactgaattgctgcagcaactctgcgtgtcgcgactcagcgtatgcattgcttgattccaaatgatccattcaatgccatgttcatgtcagcatagtgtacagatgctgttaggtcggccatagtactctacgcagtacacataatcatatacataggcttgtcttcttcctcctccgtaatatatacaatacgccgatgaattttgtttcttttgttttcaatgacagcgccatgcatgcagtcggtgtcttcagtgcctcggtatattattttactgacttatctgaattctgcagatatgctatcagcacggattttactacaatttgggtccaggggacgccagattcgccagccaaacgtcgccatcgaaatccaggagcatggtgcattgtactgctcgatgtccaattaagtcgttttcctcctcatctcccttgtcagcatgtattgtgatcttaattttctcctttgctctatctgttgcaagctttccgaatattgactgatctaggcggtgcgtttctgccgcttggatattgcaatatccaattttgcattagttcgtataaagattcagaaattagatattcatcttgcggtacgttttacaataatcgttagatttcattttcctatcttactacctccgtcccataacataaaagtttttttttttttgcccttatagttatataggcaaaatctcttatattatgggacagattacttaataatcgaaaatcataagacataggtaaacacatgttattgccgatcgattccacccatcgaatcccagatccatgagcgtctcccttcagaaaagctgcgtgttttccattcttcactgcaatagccgtttccttgcatcaaatacaaacatcatatgttctttatatcaatcatgagtttttttttattatttgttataggtaggatcaatggtaacataattagaaagaaatagaatctttgcagaataaaaatcagcccaagtaaacaagaccaaaagaaaacagtgcattctatcttaaacatcatttgtctatccgcagagcgtcttacaaaattactctgcccttctagcgtttgtgttcttataacctccaacactacatagtccttcaattaatccatctagaattgtcttacttcctccgtcctaaaatataaccattttttaggtaggtgcagatattaataaagtaggtagagatgattggagaaatattgcgattggtggagaagagaaagtaggtgtagataatggttgtgattggttgagataaaaggataggtagaaaaataacttcattttggaacaaattactgtgctaaaaatagctacattttgagacggaggtagtacacatctattttaactacgttaatcctcaaatttgactataagggattaggatttcctcaaatatttatttctactatttgtccattcttcttaaacatgaactgcatccaaatttaactatttctatttaaaaaatcaacttcatctgcaccaagcaacacctgcacataaacactagcaaaaccatataccaatcataagtttttttcccaacttgactacaattagaacaataacagtacatgcatcttacatacacaactaagttatcataatgcccaccaaacaacatttaacaaaatcattggcaattatgtaaagaaaaataaaagctctcccacttagcgaaaggaataaaaaacctctaagttaaaacaaacactcccatgcttagcgaaagaaaagaatttatccgccccctcacaaaaatcaaccccttttcaaaaacttgtgcaaacattaaatgtttcgtattgattatccttcagaaaattccttaagtgcacatgagttctgactcaatccattgtatgccattttttttctcatccctgtcatgcccagtgttttttttaatttttatcctctctatacaccttcacttagttgatcgtgcgttgacagttgcttatatgatactatctgaaaaacataaatctcaattccaaatgttttcgtctataataaaatttgaatgggatagaattatttgattccaaatttgaaaacaaaacgttaattttcaaccaagttttagaaaatcattaaatccatacaagagtttcactgagaaactaaaaaccaaaactattttttttagtttaaattttggtgaacaatttgtaaaaattcaaaaaaaattgatctgaatttgtttaaaatttaaaattttatttttaaaatttttggtcaagtaattctgtctctgttttttcacaaatgaatccttgttcatattgagagaattgtgtttttctcaacaatacgaacaggggcaatataagctattttgaaaaaaaaaatattgtggccaactcatggtcaactaacgaaatagttatggaagaggtcaaattgaaagctcaagtgaatgggggatgaggcgaaattcaggacatacaacggattgagccaaaactgatatgcacgtaaggaattttctctttcttggaccatttaatttgtataaatttccacccattaatagtgaaatcatcagggatgctaaagatcactagtgccatcttcttttttctctaaataaaaattc

SEQ ID NO: 30209 - DNA, 2289 bp, Oryza sativa
atatatatatatatataatatgtgcatatgagttttatacattttatacacataaattttgtacctataacttcatgcttgtaaatgacaacgaattgcatatggcccatgtatatgaatgggctacagttcctttcgggccatgtgcatgggtttttttttcccaaaaacatataagcccatttaaaagaatgcacatgagagaaatatcattaccctcgacctgctaaatgggaatgggataggctaagactgaaatagaaatgaccgtcgataaaaaggatttcgtgtgatggtgtgagatgctatgcaccgtggtgatttgtaacatatataccacagagatttggaatggcatggctttatgcacaacaccataagcataagtgatatctaagtagttaaaagaaaatccttatatgagaatgttgggcatgttcactttaccatcactttcaacccaagtaaattttgatagagtaaaaaactaaacactaccttagtaccttaccaatatcatcttagcaaaatttgatggttcccaaactttctaatcataaaaaccctaccaaaattcggtaacctcaaaatttaccaaattgaaattggcaataaagtgaaatgcccgtaaatttaacgactgaaaataaataaacatatcagtcaggagacttgacaaccggtgagcattagtgtaagaagtttattttaaaccccgtaaccatgggtgaaacataacgtggcctctggccacccgggctattgcctaaggccttcgattggaggcccattaggattaagatttttcagtgtatgtaactaccatgcaaggctcagtataaatttgccgtcaaacaataccattttattaagttattaattgcgcagtgttatgaatttgctactcaaatctgccaaacatcttctccaccgctcaaacgtacgtgaatcagaacacatacatatatgtaggcatccttgcgtgatatagctaaatggatcatgcagactgatgactcttctgggaggacaaggcttctatggcagtacccagcggccacgccgactccacgtagcaatccccatacttgacctgtttcacaagcgtcatctccctagttggcttcaaacctgcgaaaccataattccaatttctatgtcaggtgttgttgctgctacttgctagtaacttcagtgtggacgaatttaattcggttgttctttagtacgccaattttgtaaagagtatattaatttttcaaagtgaactaatattgaaatggaaacaagttacttaaagatttgccgcaagttctaataaataattatttatatgatgttttacatgttcaataatgaggcattaggaggcactatacaataatatatatagtttatattgtttgtttatcgagtcctaatatgtcactcctactacacagatgatttattggatgagaaaattataaacagttgattctacttacgattgtaaaacatctctttaattgtttttaactcagattaatatatggtgtgggtgcatagtgcatacattcgtttgtgtaataaaattagattagctctaaatacaactatttttatggttcccgaaaagataccacactgtccgcaaattaaaatattaatttaatctgagttaaaaagatttaaagagatgctttacaatcgtaagtagaatcaactgtttataatttttctatccaataaatcatttctatttatactaccatcctataatctctcaataaaaactgtaaaattatataatatccaactgcttagatagaaataagtttttttacaatataagtattgttccactgattccaacgcacagaacatacattttcacctaatcacggtccttaaggagaatttaaacacttaagatgattgaaaggaaatcttttttccctaacattaatatttgcaaaaaacacttatattctactaccttcgtcccaaaatagccttatttagttcgaggggtaaaaagtgttggcttgccacatcgaatatacagacacacatttaaagtattaaacgtagtctaataacaaaacaaattacgaattccgcctgtaaactgcgagacgaatttatttagcctaattaatccgtcattagcaaatatttactgtagcaccacattgtcaaatcatggcgcaattagtcttaaaagattcgtctcgcaatttacacgcagtctgcgtaattaattttttttctatatttaatactgcatgcatgtgtccaaacattcgt

SEQ ID NO: 30210 - DNA, 2691 bp, Oryza sativa
agattttgtgatgtatttgagtatttgagatgatcgattgtggatttggaggcaatttgaggatgattgatttgggattttggggacgggatggggtgaaatcaatatatattaaaaacaatgaagaaaaaaaaataataaagagcaaccggatctagtctttttagtcccggttgtatctttagtcccagttggtaacaccaaccggatttttactcccggttttttcacccgggactaaagatagcgatctttagtcccggattcgtagtcccggttgaaaaaccccttctccaccagtgtatggacatacgatttgaaactaagtactttaaaagttatggatggttatagtattaaggctgcgttctttgttaggagttcccaactccccaccatcgtttttcgcgcgtacgcttttcaaactactaaacggtgctttttttttgcaaaaagtttctatacgaaagttgctaaaaaaatcatattgatccatttttttttagaaaaaagctacttcctccatttaacatatatatatatatatatatatatataataagtcgtttcagccttgtgcgaaatgataaacaaataaataaaaatgttttttttgcaacttcctctaaattgttttactagggaaaaaccgtttgtataaacaaaggtagtatttagtagttaaaaaccaactagtaaggaaattttaaaaattatgcggatatctgaaacaacttatatttaattagcaaagaatgaaaataacagattgtattttgcaactggctggagaaactgtgtggagagctagtttccaccgccaaaacaataaaaaatatcattgtatgttgggtttacgattacgacaggctcttctgtttcgggcaccggcgaaattcggaatttcgtgaaatccggtaaaaaaccggtaaattccgaacaaatttcataaaccaaaatttgaatacaaatccctgagtttgtcgacaagttcttgaaaaccggtcggttttagcgaaattctgatcgaaatcatcgaaatttcgatcggtaatttgtctctttttttaattatttattcttttctttcttgatgtaagtttcaataaatacacacaatacatcatttttttcaaaaatttatatcccaattggttatatgaatatcatagtatttataagatttttttgatttttttctttttttatcaattcaaattgaatttggatgaaactcctcgaaatctcaaacggtttatactttcgagcctcatcgaaacgtcgaaatttcacgaaatcggactagattttgtcagaatcgtaaaccctgattgtatgtatctatactttgtatagttgatacccactagtatgtcatctcatcatccactagcaattaacatcttaaatttcacacaagcaagacacatcttctccccacattattttcataacatttcaacattcatcatttgtacaattttcacatatacccatccactaattccacgataaaacatggggtgtcacgtttgttgcaggcgtggtccaagctatcgtctccagaccgaaacacgtgaatgttgacgttatcgatactcctcatctactcactgagccatgatgtttcaacttaaaattgccaactactcaactttatcgaattgaaatttctaccaaaatttgttgcatcggatccacctctgtaaaaactgtgaaaagtttgaaactaaattaattatgagttcctcatgacaataggcgaggaagttatacgcgacatgcatgcaattttaataatcaactcatgttacgctatacagaacattgattttttttccttgctcttgaacttcgtgatgaactccattctatctctccaatgaaaaatgtgagctctgcctaaatgtctagttattgagcatgcaaattaagtttatatatctttttctttttaccgatttttacatgaacagtttactctcgccacgtaatactccctccgtccctaaatattatactgttgaccttttttaaacatatttgatcatttatcttattcaagaactttgtgaaatatataaaactatatatatatatatatatatatataaaagtatatttaaccatgaatcaaatgatagaaaaataattagtaattacttaaatttttttaataggacgaacggttattaaaaaaaatcttcccagttcccatccaatccaatccacctcccatttcccatccagtataatcaaatcaaatccaattcacagaaacatcacaaattcgcataacaaaacaaatccatagcaacacgacattccttgtcgctgtcaccaatggccgtcgttggtgaaactagcagtcaccgccgccatgccgagaaggatggttgccgtagccgagccacattcaccctcccctttgtcgcctctactggcctcctcccctcggaggatctgggaaagggaggggagagaaagggaagaggggagagtggagccgccacgtcatcccctcctcattctaccacgtgccgctgccaccgccaccctccttttacgacgcctgtcgccacaaacgttgatctcctccactctaaccaaatctaggagaccgatgggaggggactggagcctctgctatcgcccctccttctccctaccgttgaacgatgcaagacacca

SEQ ID NO: 30211 - DNA, 2523 bp, Oryza sativa
ccactacttttgcgattttccataaaaataatattaattctcaaaaaaattcgaagacgaaggggaatggataagtcaatcgttatcctcctatttcgtctccacggaatactgtaaagtagtttttctgttacaactactaatccaatattgaaatctagcagctacagtgtatacactaagtatcccgcaataacgtgttggggtgtcatctagttagcattaggatccactgctcctttggtctagattgcctgtgcgtcagatccagtagataactgcaccgagatccacattacaacgcgattcagtcatgcatgctgctgagaacggtgcacacgtacggcaggaccagaaacagcgttctggtcatccacatgcatgcaatgcatggtttatcactctgttttttaaagtgcaaaatagcatgggagtgtcctactggctacagtgcgcatatattgttggtgtggaaatgcagaaatttgagttgcacgttagtggcttcattccctcgtgcattagttttttcacatggtcttcaatattatatgttgattattaaactttttctttatatattaacaactaattaagaaactaatatcatacgaaaatatttttgcaaatacaattacagtgattatatgcatgacattaaaaatatacttcctatattccaaaatataagtctaaatatttatttaggatgttcaattttgaattttgaccaactactaatccaataatatttactatctatattaaaaaatacatgcaactaaatggaggaaggttgtaatttgttgagaataaaatgtaggtgaagaagtttaaatatttttgataaatatattgtttattttttatggttcgagcgtgaaatagtgtaaaacaaatttgtgccaaagcttttttttgacagtcaacatatacactaatcttgcctagcggtgcggatctagtccgccctgccaccggcacaacatttcttaacctatgcttcttgtcgccccctgtccagctatgaacatggagagggaggattaggggagccggctcggctcggctccgctcgctttagctcgttaggataacgagctggctcagcttggctcgttatcctaacgagctagaagcccagctcggctcagctcgtttgaaagctcgagctagctcgttaggctcgcaagctagagctagtatgcaacagagaagtagagaacgcagcagcaagatgaaatggctccaaaattatctgagaaattatcaaaagatataagaaaaagtctacaatctcccatcaagaaactctaacacaacaacaccgaaatctttcaccgcgaaaagcaaaatcagaaaagcctcctactgtgacagagaagtagagagcagaaagcatcctttcgtttcttcatgcttcatcatccatggtcatgactgacaaggatgcatggccgatggcaacacaggatggagacagggagcagcgctggtgcggcatggagcggcgccggtgcggtagggcgtggcgagggatggacgcaggggagtagcagcgcggaggcgtggaggcgcggaggcgtggaggcgcggagcagccgacggctactcgatctggtgcaggaagcggcgccggtgcggcagggcgtggcgagggatggacgcagggagtagcagcgcggaggcgcgaaggctcagagcggccgacggcgactcgatctggattggagtttggagatagatgagaggaaggggaagcgatacttttctgttcggtagacgcatgcacgggggactaatgtacttggcctgtcatggggatttatatctatgtgtaagctcgttaaggctcgcgagctgctcgcgagccagctcgaactagctcgttatgcctaatgagctgaaactacagctcggctcgtttcaaaaccgtaacgcgccgagtcgattcgagccgagctcgtcacgagccgagcgagctaacgagccacgagcttttcgtccagccctagggaggatctagcccacactcagccatacaacccactgttgccaccagctgttacaaaactctcggtcttgccactagcacgcctacctgctgttgcgctgagtgccattgccataactggttgcgaaagcaggaaaggaggatctctaccccgcacgtacagctcgtccgccgatgcctcgtattgcacctccaccacatgacaccgtcaagcagctcaccattcttcccttgcgagccagcgcgcgacagcaaccaacccgccaccgcactagcccatggcaccaccacagaactcgtcggcactcctagagtgtgccactaaagccaggccgtcgacgagccgaccaagcactgccgccactgcgctccacaaatggagaggagaagagggactttcaacctggatttttcacattttggtccttttaaaaaacttatttcgtaaatagatccctaaaaaaaacttatcacagaaatggtcctttttggagcgccagagtggctgg

SEQ ID NO: 30212 - DNA, 3056 bp, Oryza sativa
attcctgcagcccaccaaaatctaaactttgcgctgaactaaacacaacctatttctgtatttcccctaaaatatcatactgaagatgatcaagcaagcaaccccaatcaccatttgcttctgagttctgaccaccgctcgccgagtcactggtccacctactctccgtatcaaacaccggaccaccgccgcggcgtggtgttcggttaccggtttgcaccggcctccccacgcgagaagccacacgagtccacgagtcgcacccccggcaacacgagaaacggctggatgaaccagcgaaaatccagcccggccacacacgggagagctctagtagcgcgctgagcagccagcgccgccgccagagcgcacatgccgatgctttcccggggccatgcctcgatgccgcgacggatgtgacgctgccatccctcgttgcgtagacgtgcgcgagctgcgagccggtgggttcgttcgcggtggaaaggccacaacccgacgagacggctgccgtgtcgatgacgcgcgcgcgcgtacaaaacgccccagcggtttgcagacgcccgtgccgatctcaccccatccatcggctgggccgcgcggcgcagcccgcgggcgggcggagacaggagggacagctagtcgcgggcgcgcatgtgacggcctacctgaaagcgaccgtgcctggctccgagcgctttcgtgggaggaggcaaagggggcgcagcgcgacacgcatcgaccggctcgggacagctcagtcacacgtctcggcgtacgaactggttgggcgctagagcccgcatggaaaggatgatgagatgatctggaccgtgaggccacgatccgacgggtggatactggcggggagggaaaacagaacggtccagcggtccgtgcacggtggacgggggtccacgatgtgattgagtccctaccgtgtctgttaaacccaagttggctgtactggatactacgcgtcctgcttatccgaaataatttcgacgattgggactcgtcccttcaacagcggtggcaccggcacgtcacgccagcatcatcatcgcgtcacgacctcccccctctctcattttggttttcttttttccggatctttaaattatgtggcgttgggcccaaccgatctagtacatgttacctgcaaaaaataattcgtggtacaggtacccatgattcaactctgcatttgtttacctgcgtcgtacgtccattttgtgctatccaatgttgatcacattattcgcttcacaaggtaggagtaggagtactgtaagtaacttgagtgcgagttaaaatggtcaacctgtacactcactcgccgagttcagctactactccagtaattctcaagtaaaaccattgcccttcatcccgaagcaaccagcacgccttttccgaacccgatcgaccatccgatcagcatccaacggttgagccgcgcctgagccgtcaccatggagtaccagagcagtttcctccacgcaaatctgggatcgccgagcagagctgcgcaaacgcaaacacaacataaaacccttccacaaaatgttgacctgaaaagcagcgcctccttcacatgcacgttgtccgtagcgcgtacatctcacgtacttggctgcatgtattccggccgcaagcgaacaagaacagccgcagaggagcaaagctctgcatttcaacagcgtagtatagtagtactgtagtagtagtatttgcttgtggtcaggagccttccttgaagcaacctccaaggtggcagcattgcaacggacgaattaagatccaactaatctgcccatggctcgtactttaggttactaatcaagcatcattttataaactaattagcctttcctaaataactgtggctggcatgtgggcccggggtggccaaccctggccagcaaccgcacgcgaaatacagcgcaagatctagctttgtccatgtgaagaaagctatgtacgatggtacatttgatatcaattggttcaaggcattgtttagtatggtttgtgttattaattattgcttatttgtttatgcagtggtttgcacccaaagaaatggctgctacgagagctagctagcggccaatccatcgctctctccccatgttacttccccctccaaacatggcgattggatatgcatcgcacactgcccctgatataagaaagagcagtagataatagctatctagataccccctgagaaggcaaagactgcggggctttgacaagttagttagttaatcatgagcagaagaaacttgcaatccaccgttagtagaaagaattcgtttcacatacaccggtttagctatacgtacgtacctacctaccttgtgaataatgcaggcaatgtcactagagatagctagtgttgatcgatcgatcattcacgccccatatcttagtggttgctgcgatcttggtatcgtacaggtacagccacttgacgtacgaatattgcgtctagcacgttattgcctgcgttcatttggctcgattgaattggaacaacgtcccgtgtttgcgcgatcgatcgcgtttttcttgcggcctgcattattaatttccagggggaattcgaacgattccacgctgctcctgcgatttcaatcatggaggttggttcaccctccgtccgcgtacgttgatacgctacttgcgcccgatcatggcgcgtcctcgatctgtttataaaaacgaataaattcgccatcagatgatcgtcgggtgaacggaagtgtagttgaacgcttgatgtgcattgccgtcctaattctggtgggggcagggggggggggggagttcgatctgattatgtctgttaactgacggttaggacttaggactatgatctagtcagttagtttgagatgtttttgatgtatacagtttaaattaaaaattcgtatcaacgacgttcgctcgactgttctatcactacaactatgtgtcatggggagacttgtttcatcatctaaacacgcaaggattcggctcgagagccctgaaaaggacagtaatat

SEQ ID NO: 30213 - DNA, 2429 bp, Oryza sativa
cctgaaaaggacactaatattatctgcgatatatgctgaaggtttctgacaaaacctcttctcaatattataacggattcatccgattccattcctctgtttacctctgctctgtatacatactccggatagttcaactttatgtacgctaacatatgctaaccgatcacgtggataattaatactactacgtgtctgcatatgcgtaatacctgacggtcgaattaatggcagtgctacagtgttccaccggcaatgtggcgaaaacagtaaggagaacatgccaggggcgctgctgtagctaacaatgtctgtgtcaattgtgccatcctaaccaaatgttcgtagactccacgagtcatcgagtcgtgaggagtgacaacacgttacttgcaaagggcctcccttccgatcgatccaatgatcccggcccccgtctccgcgagagggacggccatgtgaggcgcccatttctctattcaacttcgccatcttgattagtccctgtctcatgattgtttttttgagtgttaattaaaaaaacttcgccctttttattgtcatgtacattaagaagaacttaaccacagaagtggacgtacttttattttttgttagcgtgggggcaggttggggtaggagtcgatggatggcccacctgtcagggagagtgggggtggtacacggttggagttggagacagttgtggctgcgctcaccaaaaggcaaggcaaatgcatcagctcaaggtccccggagtagtatataagtaggttggtgcgtcacattactcggcagcggacacattcactttgccttcgctttagcctttgtgctgtaacttgcaagaaacgtcggagtactcgcttgcgcgcgcccgcggcggcggcggcggcgacgagcgatcgcagcgggtgacgcggagatggcgtccaggtgcttcttccccagggaggccgaggccggcggccggcaccaccaccaccagtccaaggcggctgcggaggcgctcgagcagctgcaccacggcgggcgcgtcctgtcgcgggaggacgtcggcggcgcagtgcgcgtcaagatcgtggtcagcaagcgcgagctcaagcacatggtcgcggcgctcggctcgggcaccggcggcggcggggcggtggcggcggcggcggcggtgacggccgcgggggagcggcaccgtcagcgcgcggcgggcggcgccggcggcccaggcgccgagcagaggctgcagtcgctgcggcggcgcagcatgcggagggcggcggaggcggcgcggcggatgcaggcgaacggggagtgggagcccggcctgcagagcattcccgaagaggtttactgaatattataccagtagatggcgtcgttagtgatggttaatcacttgactaattaaggttgggttttgatcactgcctgctaagtctaagtggtagatgtacttgtacagcgctcttgatttgttcccggttactgttgagggttaaaccgttaatcctcccccaatgagtttgtgcatttttttttcactgtaaaattttggatggaagagaggggaggtggtgtttggactgcaatgcaactgctcctgatggtgtttgagtgactgtgagagtgattcagcgagtggctgaatttcttctcctttttgtttgtggcactgtaaaagtttttactgccactgcagctgatgtaaaatggttaattttgaagaattgacagtttactgtccgtgcttagtgcttactactccagctagtagcattaactaatctgttcctgctttttttgttcttttgcctttgtggtgagcatggaaaattatggaaagtattagttaggaggtgagcatacgagaaccacagtgctgagattccatttgcacatggccagatggtcgtcacattaaacaaacagatcttctcttgtttgttctgttatccactagctggctttgccattctgtgttgtgtggtagctgattagctgttccctttaccgctgtacgtacgggtcgttttctccagaattatttttcgtcaagctataaagtttttttgggctataaaaagatgagcttagctgtttgccgtgacgtcgtgtttgttgtaatctcatgtaaatttgcatccggcctaaacttttaacgtaagatcatgattcttgcagtctcatttagacaaaacttgcaatgcttttcatatttactggttcaattttttttataatggaacaaaatccggtctttactcaacaagctacgaccaattattttcaccagtttttcaagtatactgatcttagtttctcgaacacatgaactaagttataaggttaaattggcatgcaattttgtatatttccacgctttatttactctctcttctaatgtatgccggaaatgagaaagattgcgg

SEQ ID NO: 30214 - DNA, 2972 bp, Oryza sativa
gcatgcaattttgtatatttccacgctttatttactctctcttctaatgtatgccggaaatgagaaagattgcgagatatttgctgatgataacgtgggcattcagaaaatgtataacaggaacagaacagagacgacaaagtatgactaaaatgatttacatatgtatagttggagggattagcacatcttagtccttatctccttgaaaggcagtgggtgccactctgaaatacaccaaagccattcttgattatagctattaatgcataatatttggccagtcctgtgaatcatatttgctcatcatgttcgaaatttggacgctgtcccgtcatgaccccacgatgcataaaagattgatagtgaaatctgaatctatttttcaacaacggtccatgtttaaaccaccaaccctcttgttttgacagaactttcaggcttggtcactccacgaaccaccggtctgtctgctcggcaagggaagaacaataattcagcatttaatctgcttttgccttttgtacttttctattgacatagaagccatgcataattcatcgctcatcctcttgctgcaacaactaaccattgcttccgcttcacgctcccgataatgcctggactgaactaataagctgacagacgacggcaattgcagcacagcgatctcgctctggtaaagaaaatcaaaacaacaaaacaaaacgtagaattcagaaacttcatctgatggttagatctccctcgtgcttgcgatatcccaggaggggtgaagttgaaaacgcatagatttatgcaaccaggcgtgtgtgggagatcgaaagatctgtactgcttttctcgagagaggtagctgatggcccgggactgctgcgaacaagaacatttgggacttgtaaaatgggcagcgtaagggttactcgcgttgacatttgacgaacctgccactgctgcatcttccaaagctccccctacaggttaattaacctgacgacccttgcaagtagcttcaacgaccctatgctgtagacttgcagtttacatgcagtaggtcaataggattagtagagaattagagaatcatcactacacctaagtcctaatctatatactgtagtcatttgagacagaatactgcaactgaagtatgttcataaccaatggtaaaagagaaaatactgcaactgaagtacgttaagagaattagaaaactggaaaattttatgtacgtaaagagaaaattttatcctcgcagcctgaacctccgaggcgccgacaacgttctccacaatggagtaaaactacctgaggtaaaaccactgcagatcttcgtgctacacctttgacctagggctttctgaaactttatgcaaaagcgactagtaacacacagggctggggtaatgtcttgtaaaagattacgcataattttaataacggtagaatttggtgtcataaaaatttgtgcacaatttacgaacagccgttttgtttccacaaattcagctcgctgcaactattgaatagtcttatattggttgtgaaagggcaagtgacctagtatataagtgggggagtctctcacctcattggttaatttttgaggtgggaaagaccatttacgattctacaattgctatctgagtctggttagttcaatatctctaacctgagtggcaaagtgtgcgaaggcatgatggaccgtggatgcttgtggagcctgtatacctgagggaccgtagagaaacagtgaatggacggtgaaaggccgagggacaccaacgtatacctgagagaccataaggaaacggtgaaggggtggtgaacggctgagggacaccaatatatgaaggggggagattattgaatagtccacattggttatagaaggacaagaaacttaatatataagtgggggagcccatccctcattggctagcttttgaggtgggaaagatcatttacgatcctacagcagcagcgtgaccttgcctcacgagctgggctgcaaacccgaaaaggggaagcttagtgtgatctctcccttgtgttatgaaaactctgggctatacagacaatatccatcacaatacagagtttgggcttggctaggctgccattcaagtcatccaaggctaggttgaacggttgatgctagcctggcgtgacaagaccagtcgtttggaatcataaaagaagttactatagaactttcgaaagaaaatttctctaaaatctttcaaatataattacagtgtaactagaatgtatgtaatgtaacttgtctaaatctttcaaaatcttatggcaactcaagtggctagcatggtttgcggaaacgaggtcctgagtttgatcctgtgcaagtgcacaagtaaattttcacacgaatttttccctccacacgctagcacgaatcttaatgcaaatccgacgaccgaaaaatcaagagtctttctccctattttctatcgacaaaaatctagcaaatccataaaaagaaaatcatcacttccggtggcaacctatcccggaggggcaagaaaaagatagcttgctcgggagagtcaactccgctctccttcgagagcaaacgtctctcatgcaatcatccaaatcgttcactaaggcaagcccaacaaagtagcaagttgagtttgccttaccgaacaacggaacatactgaaaatccatactggcagccaactttctgtccttctcatgcttgcccgacgacaggtatcaaccattttacctgcagccttagataatggagtaagaggggtgagattgggatagggatatgagtggggggttgagatgagatatgaagaatggatggttaagattaaaaattaccattttagaaggtgggaaaagattttaccatcccattatccaaagttcggaaattgcttcccatgtgtcgtccgagcaaaagagaaaaatcgaacccgcttcatgcaagc

SEQ ID NO: 30215 - DNA, 2684 bp, Oryza sativa
ttcaaaattatgtgaaacttacaagtcacagtgtagttacatgcaagttacagtgtaattggatataagttacagtgtaattacgttacgattgtactataattacatctgtcaaatttttggggaaaaatttgtcgataaatgtataggcagtcccattatctattacttcctccgtattttaatgtatgacgccgttgactttttgacaaacgtttgacctttcgtcttattaaaaaaattatgtaattataatttattttattgtgacttgatttatcatcaaaggttctttaaggatgacataagtatttttatatttgcataaaatttttgaataagtcgagtggtcaatcattggttaaaaagtcaacggcgtcatacattaaaatatggagggagtatatatatactacttaaaaagtataagatgcttccttcgtccatataataaaaaaatccgcttctgattaaaaaaacaccgttcataagaaaacagcgtgaaaaaaaaggccttctagaaaacggcatcggtaaaaaaaccccgcaaaaaaagtaacccccacacgcggcaaaacgccgttaggaagaaagacggaaaaaagaaaagaaattttgattccgatttaaaaaaaaccgtccccaagaaaacggcgaaaaaaacatctagaaacggcgtcagtaaaatatccggcaaaaaaggaaaaaaaaaaaaggccagaacactatcagcaagaaaaacggcggaataaaagaagagagaaaagcaaaaaaaaaatagacaaagagaatcttaactaattaaaaatttggtagctttcgatcatcacatcgatttttagtccgtactaccattttccgtccgttcgcaacatcgcgcgcaccttttctccaaatcccacataatcaaaatccaagtccaaccaaaaacataatctcaatccaaatccaaatccaaatctaaatcggaatcatcacaaaatcatccaaaatattaagagatgttgagaggagatggaggggcgagcgggaggccaccgttcctcctccgccgtcccgtcattgcatcggggatcagccgagccgccactgtgtcgctagggagccggggagtagccgcggttgcgttgggaagtcgctggctcgcctctgcgccaggaagatgctgggagggagagggaggagccaatcctgagccaccatgccgccggggagccaccgacttgctggatctggcgaggagtgggatggcagcagcaccccgacgaggaggaattaaaggagccaatggttagggggggagggagggggagcggcaccgcgggagaaaggagggcatggagaggcaccaccggtgggggaggggcgtggagaggcgccaccggtggggaaggggcagctcgcggtgggaggagtagcgtcgttggtggggagagaggaggggcgccgctggtaggggacagagacggcctgcggtgaggggagggaggggaaaatgaattagggttagggattttttaaccgcgacgattttgatggattcaaaatcgatctgagccgtccatcaaaacgaacggctcagatcgatcccgtgttgggccagcctccatctttaggccgcatcactgctacgcagcacgctggccggctggtccaacaaagcacttaggttggactttcggttgggggccacacggcaatgagaggaggagtagggggagccaaattacacttcctgttgggccgaatgctttcctacaggttgagacggaggggaggagaagggataaaagcgggctgaaaatggcctagagaccaaggttgatttttttatttaaataaatgctgaaataatgcttgtactatcaaaattagctattaaactctagaaatttcaataaaattccaaatattgtaattaatcatggagacttcaataaaattaaatccaactatataattttatttcgcacactaaactaatttaattatatatctacctacttaaaaaataccaaatattttcggaaatttatatttcaattaattacataatacatatctttctcaaatttttctcaattttctagtctttacaattcctgttgcaacgcacggacacttttactagtaaatatatatatatatacatgcgtgtgtgcttgtatagttctgcaaaagaataaactcgatcaccagcgtgcggtgtgcgcttatatacacacacatatatatatatatatatatatatatatatatatatatatatatatatatatataactacaatagggcacctaaaggtgccacggattaaatggcacctgatacaacctcacaaccactctgccccacataccgccaccgaccacgcagcccgcatcacaccagattaatagtacatagttaaaagttaactcagtgttgtacaacatccatcacatattttacagtgtcgctattctcaattaagcaaaattttaactctattttttttcttcaggcatcattcaaaccacacactagcgggcgtcgtagcacagatcattatatggggttatttttaaactcaacaatctgtttttgatttatttatttttaattttccgacatttattctaaatgtttaattaaatgttgtccatttttttattatttggattctaacacttttattatcatgc

SEQ ID NO: 30216 - DNA, 1658 bp, Oryza sativa
  unsure (1)..(1658): unsure at all n locations
aatagaagtcggggtactcaaaatcgttcatatgcttgacaagagagtcgagatgatccaaagtaaaccaaatacaagattattcgattcagattgaaaacattggttaaaagatagttcaaagcaaaacatcggtaataaaagatgatttaaagtgaaatttgctcattattatgataatagctcgtttgatttacgaggttggcgactaattaaggcttatttagttcccaaaataaaaaatttcacgcagtcatattgaatgtttggacacatgcatggattattaaatgtaggaaaaaaaacaattacacagattgcgtataaattacgagacgaatcttttaagtctaattgcgctatgatttgacaatgtggtgctacaataaatatttactaatgatagattaattaggcttaataaattcgtctcgtagtttcctagcggaatctgtaatttgttttattattagactacatttaatatttcaaatgtatgttcgtatatccaatatggcaacaaaacccaaaaattttccccaacttgtttaggcctaagtaatgcatggatagcaaagaccctatctcgcatgtggtatgtatgattaatttgtcccggccaaaattttgttttaacgcttacaaggttaatatcataagttgtagtacagttttagcaaatcttttggacaaaagcatcggccaataggaaaattgacatgcttgacagcagggaaataaactcatactttaactgtttagttgcaaatgcactatgtattgcggcaacaattaacaatggttgcagagaggccgtcctgcaaagcaggtaatttagcactaaaggttccatgcctccaaaaataaatattttctttccagaaggttatggtgtcgacacagtgtaagagcaagtgctgattcatatttcctgcacatgctgttttcacagttgattctttggatgtcatgtcaaaagatcaagttgccacttttctgattatttttcctacaaaatgatgtaattcactcactatgacgtgttatgacccatgactgcactgcaaaggtatgaattattgttctcaaaagactacttcctccgtttgataaaaataaacctaggggatatacagtttagattcgtagtattagaatacgtcaaatcttatattagattttttaatgggacaaatagagtaaagacatgctccaagaatagtactagtattagaatacgtcaaaattatcttttaaatcaataagaacatgtaacaaaagttttatgttgctttaatttgttgtaaaccttttattacatgttctgtcagtcaataagtcgtaaaaaatgaacaaattaaagcaacgtaaaacttttattacatgttcttagtgatttaaaagataattctaaaaataaactattaaaaattaaaattaagttttggctacggctgataacctataagtcaattaaatgatggttatcaccaatgctatttttttttttgccataaaggaccaactaaggataatttcatttcatttcaacatatcattattataaaattatctggtatactttttaaaaatgtatcaagatgtaccatatatataagtggatgtatcaaaattcagtacttggatagnatctcttt

SEQ ID NO: 30217 - DNA, 4116 bp, Oryza sativa
tagccttctctttaggatctgttttttttttctccttcctgttagtgtgttttgctgctgctcagtcagtttgttctgaaaggttgtgatgttgtgagggttgatccctttcacccttctgcttttgttttctgtgcctatatgtcaagctggcgaccccagcgctatataaggatcagtttgcaaatacttcatgctttctataaaatgcagggcctcgcgtggcctttcctctaaaaaaaattacaaaacaactgagaagttatgttggtgtacattccttaggaatataatactgtgagttttgtttcattggagcagttatgttctgtgcaatcttgcatgctatgtatttcctcatgggatataagatatttgtgagttgtgctctgtattggtctgactttttttcccatttcgggaaaaaaatttgaaacctatttggtaactctatatgtcacatgaaactttgtgcagattgtatccaattggtaatgccataattcaataatcttgtgaaggtgtatcttgttagtgtgagttaaatgttttgtgtgactactagagctgccttgttcctaatgaaacatggttgatttgtacctgatttggttgattgcaacatctttgtttccaaaatccggggcatacatcctcgtcagattgtgtaaaaaaacagaagggccaatcccttccgtccatctcatcagcttttgtgaaaagccctttgacgctgtccaagcagaagggcgatccaggcggcaagttcaattgttttgaacaaaatcattttggaatgtgatagccagattctcaaacaagctattatgagcaatgactcccaactttgaggtgtcatttttttaggataccgaaagcttctttttgttaatgtttaatgatgtacgggtaacacattcccttgtgtaacaatgtgactcacttcatatgcctatgtgggctgtgtacgaaacaatatgctgtgtcttttatggattgaccggtccccgtcttatgtaagagaaaatccaaaatatatcattgacaaatgttcaattaaaaaaattgttatcgacaagtacaagttcttgaaatgttattatacaagcgactttatcctaaaaataacacacctaacagctctccgttaagtgctataggataaacaatgcatttaacgacgcgggatggacgaaactctaacggcgatgatattttttggacaaaatcgcttatatgatagtactttatagaactcacactcgtcgatagcatttctttgatttgtgtgtttgtcgatagcattttttagattctctttatgtaatgtgtgttggtgaccaatgacctaggctgtgttcttttctgcatattgggtgagccagttcctcaattaccatagcacgtttatcaaagtgttaattgttaaaccatgcaatctttaaaaacttttcatacgatttttttaaaaaataactaaaaatatcatttttcaaatttacaattgtcaccctattttgcctcccatatgttgccaatgatcaaatcatacccccaatcacaaagctaggtataacgactccatctttaaaaccggtgcaaatcaactcctacagtggttttggaaacggtttttgctgacttgacaatttaactatgaatgactcgcttcagtcagcgtgtgggaccatcttatcatcttccaatagcagtaaaggcagggagggcacatcggcctaggataaggaccatgtcctctatccaatggtcctgattgtattggtggagtgacatggtgaaatccccaagggggttgatagggtgggtagggagggtagtagtatggtgaaataaaaggtcgatgcatggaatttagatgattgtaaggtggggtgccttgccaatttggtgggaatggattgtgtggtggaattggaggtggtggtggtggcatggcaggaggtgtgtcaaagaatactgatgtattccattcaacattatgactctgtgttggagtggcatgaaccgttggagtgaaaattttactacccaaactagctgaagcggatgcatcccaaaatcagtcacaggcatcaaacaagaaatgttcctaaaatcaaaagcagacgcctttggaggaaacaaagcattgcctttagctgcctttgccttctgtgtcatcgagaaaccgacccctggtattcttgaagtctctcctacttcgattccctgacaactcttggacagccccaacatctcctgtatcactttcaagttttgcattacctcatccttatgtgcctgagcttgcatcccttgattctggatcagctcgtgaaagaacttgatgtcttcttcagatttcctctgaaactcctccaaattgattcaccacagctacccactccggctcctcctcaactacttgatccaccacctttgctcccctcaccatggtgaataagaacaaatccggagattttacaaagagaacgaatctccccaaccctctttgttcctactccaatttcgcctctaactaagttccttgacctggttacggaatttcacaggagatacttattctctcaaccctcatcagtcaagaacactcgatccacaggcttggtcaagaaccagactggctctgataccaaattgtcaggacccgagcctgaattcacacccaagtctgaacgtttcttcagatttggctagtagctacctatctgggttcggattggaagggaaaatagggaatttaacagtaaattgcaaggaatcgaaagtggtagccgcaagacaagtgaaagatagagttagggtttatattcttgatacccaaatacgtggatttgatcggcttatatggagtgcgccactgctaggatacaaaatagctgagctcgcttcagtctcaagccattcccttttcggccacgattacagaaacaataattactactagcggctcttcagcgttggattcacatcagtgaaccggtatggagcaatctcagccgtccatctatcgcatcccctgttcccccatccaatacttcagagattagcaggttcagaattacagagttctaagttcaaaaaaaaaaagaattacagagttctctgaagtaggagagatggggttcaatatgaacccactgtatgaatagtactacaacgggaggatagaattttagggaattttattgcaaacttgatgtaagaaatggaggatgttagtggagtgccatgtgaaactcttgcaaaataaccttaagcgggtatgtaatttccttcaaattttgtgtttgaaacgatgccaaaatctactgattatttgtgctagctaactcaaccccttatgtcagaatagttacttcagctgctacattgcttatatgaatatcatataaatataaatggagaacgaattgtttttttttcctttttgttgttctgggtggtcatcttgtttatgttgctatcgaatgtcatacatgcctttgtgtcaaagtgccagtttagaaaacagagctagtttgttctttccatggtatatatcctttgtattgtattgttaaatgcagaacataatgtatatcaatttaatgaaaacctaggcgataaacctgccgattgtgaataggattcaacaaacaatttaaggtgaatgaaacacagctgcatggtcaaactatttttcacctgtttcagtgatatccactatagctcccaaaaaatcttgatacaaaatttgtacttgaatattaaaatcagttaaagcagacaaaaataacaggcgaaaaatattggaatcgtcatacttgagaagttctggagatgggcaccaacatttcaagaaattggtggtaccagctattacattggtttcctgaattctgcttctgaatttgtaagataaggtcataagggaatttcacgatcaactgaacgttggaaccaaaacatcacttagttcgcattaagattgaacatggaagtgcacatatgcgaagcactagatcattggcatttgaactttgaaacagtatataaccatacaaagtagtgctgaacaattaaaattgtccgaaaagcatcatcactccaata

SEQ ID NO: 30218 - DNA, 1985 bp, Oryza sativa
atttgagttattcttcagtaacatcacataccaccagtaaatgtgtaataatgcaatcaagagaagtgctattgacaatgaggatgttactttaagttttactattagattgttactgtgtacagtgatgatgcaatcaagagaaatatccaaacttacaaaaataatgactaaatgtcaaacatgccaaaagataagtatggaagtaaaaagaaccaaaccaatgcatgcgtttgtcagtgagaggatcattgaatgcacggaaaagactgagtggtgaagggcctcgaagacgaagatgtggaatatcatagagtgcatcagtctgcacagaatggtcactactaagccttggaaaatcatcaacagtaaatgggcggtgcatccctatacaaaaaaatcataggaaaatcaatcaactgaaacaatttccatggctctgtagtttgatctaccaccatctatcatatgtatgcaagctaaaattagacgcttgacagaaaacatagcgatggaagttgattaagtcaaaaagtctgtaattatgtatactgaatatagaataaaaggttgcattttttttcctttttgcattttatattattgccaaagttcattacaagtaggattaggtaggaactaattcaagcaagatattcttagtgatgttccttccaatgtcacccaatcaaagagcaagaactgaatcctaaatcctaatccaagttgtcaatcacaagctaaaagtattaaggaaactgatgagcaccttttttttttcaattgtatttcagtctgaatcaaagaggggaatgggaacttataaaaagcaaggaggcactagattaactgaatggtggactgccactgcactgcattgaacattatattgcggcatgtagcattgaatcgctaacattctcaaagtgtgtaactgtaactctgtagagaaaaggaacacactctgcactgcactgcaacttgattgccgccttgatagttcgatacaagtacatattagtaactgcaagttgttattgccaggttttttctcagccatgtacctaatgaagtaaatgatcctcttctgtttctgcaacttgtacagtatggaatgaggcaatatgtggaacaacatttcagttattcagcagtagcagacttgcattatgctatcccccctcccctctctttagcatggtttatcaatttatcataagacaatcaaattcctgaaattactttaaaccagaaatatatgttgcctatcatcaagaagagcaagaactctgtggctagcgcactaactaaataggaaggggaacatttaaaaccgagaattgaacaaggtaatttcagataagcgatttagaactcatcatgtaccttcttggtcctcttcgtcttcctcttcctcttcctcctcctcgtcgctgacagcccagctgtcgtcggagtcctccccatcgtcgctcggcgtcggaggagtcgagggggaaggcggcctcttcttcccgcggccggggtcaggggtcgccgccgacgactcgtctccgcctccgtcgacctccatttctcctcaactccgccgcggccactgccgccgccgctctcacccacaaaccctagcgagaggagaaatcgaggaagcaaagcaaagggcggcaataaaccacgcgcgggccgcagtggggaccacatcgctgccgtgtggggcccgcggcatggcgttttgtgtcactgacgggtgggtccactgatttttggagggggaaaggggatccacgtgtcgactttgcagggcactaacgctaatcctactgtacataagcttttgtatagcttcctactccaggtgggagagaatttagatgaattttcgtgcaaattgaacaaactgcagagttatttgtgcgagtgagcaaaatgtccgggaacttccgatgcaatgcgtcacaaaaattacatacatgcgcctccttgag

SEQ ID NO: 30219 - DNA, 2012 bp, Oryza sativa
aaacttctcacgagcctaacgaggtgtgcaactttttccttttatatatgataagtgctactccccctgggctgataatatttgtcgttttaaagaagtgtgaggtcaaactttagaatctttgattataaatcatttttaaaatatttatctttcaaatatggtgactacatatatagattagtcttaaaaagtactttaataaaatcatatatctgttaatacttttatacatattataataaaaaataatggtcaaaattgttttttggaaaccgtgcccttgtccaaaacgataagtattatcaacccggaggaagtatctcaataattctatttatatgaaaaattagtgtattgtggcatcatatattaatattaacttctcataatctttttcttcaatattgttaattaaaattattgtttttttacaaaattttatcatcaaaatatacactatcctatactcgatcgagcttctcgagccgagcctgtttaaaacctcgaaggatgactaggctcgattcaagctcggctcgagcttgtgtcgagcttaagcctaggcaggcaagattggctcgttgacagccctactccgatcctaagggtacctactccgatcctaacgtaccctagctacagccattaattgaattaaatgtttctcaacggctgcacagtcatcaaggtctccatgctgatctcgatcccatgtcgatgccagtatatatatagttctttttttattttcggggagtatatatatatatagtatgcgagtattgattatttgcgtgtatatgcacggctttgaattgaccttccaacctctcgtatgacaatccatttggatcattgtagcacttgacagtactgtgtatgctgaccataagcatgcatggaacttgttatgtactctaccttagaatttattagtaagatcaggctgatttgctcccgatgtagggaccaaaaatattatagtcacacttccaatttgatatatagtagattttttggtcttccaaaattcatcatctaactggtgtttactcgtttattagtgcaaaaataaatggcatcatagtatatcagttcgtttatatgtgcaggagtaaaatgtttgttgcatatctgctctcttatctatgtaggagtaaatgacatcgtcgcatatctaatcatcttgatcgatgaggtttaatctcagaataaatgatgttttttttgttttggtcttaatgctattttcaaatatgatgactaaattgggatggagagagtaacaaatttttattaaacttgctctgttcctataagtataatgttttgaacgtcgatacagtctatgacacatatgtttcatcattattttttaaaactatatatatgtatttattaaaaagatactatatgaacgagattttcttgataaatctagcgatatgattcttacattctaaatcatgctaattttggcacctattaattaatgattttaaattttaattattgcacatgttttaagaatcaattattttaagaatggatattattaataaaaaagaacgggtcaagttctactaatttaatttaacaattatatctaatcttatataaccttatactaccattttgcaaggtttggactatgagcattgtctttagggtttgttgaaaccatgccaccctatatttgtaaaatttgagatatatcacccgtatctcaatgacatgtaggatccacatgagtcaatgacatgtgggtcagtgaccaggttcttgttccaatttcaacaacatatatgtgcttaatagtatcttcgttttttaatatatgacacgttgatttttaacacatatttgattattctggtcttatttaaaaaaatcacgcaattattatttattttattgtgagttgttttatcacttacaaatattttaagtatgatttatatcttatacatttaaatttttttttaaataagataaatgattaaacgtgt

SEQ ID NO: 30220 - DNA, 1728 bp, Oryza sativa
cttacatgtgctgcaaaacctctgaattcaacggtgatgactatgagataagttatagtgagttcatcgtcagatcatggaaatcatgttttaatctgtaaggctgatttttcttttgtcatatatttgctctagtgactctactgtatatatggtgattgaataggctagggtaggctaggcagtgattttccatgcatggtcaatgtagtggttggcaaaaacaattgaattgatggtcaatgtagtggttggcaaaaacaattgaattgatggaattgattttgggataagtaattatataatcaggtgttaattaaacttgttcgataatccatgacatatcatgtaggggctacatgttcaattcaatggcttgtttggatgtgtttggacttaggagtgagttgggatcctgattcatcgcagtccaatcatttggtacattgtccagcacggtaaggacatcttgaaaaactgttgctgctgaaataaagtgttctcttgacttctggtcacctgtagcttttctacagtttgatcaatcactcaatcctttgtactataacacattaacacttaattttacttttgtgatctcgcagtcgctgtaatcttttcctggcataaacatccctattgctactgaaaagagaatttactgtggattaaagttacagcatatagttccataaaatctgtcagctccaccgtttgctcttcactttattagccgcaaccaaaatctaaattctaaaactttcattttgtagttaattttaatgcttttgttatagtttatttttcagtgtcatattttaaaacgctaagaacacatatataataaaaaaaattactcatcagttaattctttttttctcgctaatgagcattatggtttacgattgtggattattttccttgctgtaaatcgaacaattgtcgtcccctcccctataatctgctttgagagcttggtgctctagcctgtcgtttttcctttgtccgctgattgttataattggtactctttaggcctgttcactttgataccattttcaaccatatcattttttttggcaaagttatcaaaaaaatatccatgtttagtttgttgtcaaatttgacaaatacataagaaatcccgcaaaaatttgacatttaccaaaatttggtaaagtttattttggctacaatctaaacaggccctttattccttctaatatatcatgcggaacttctgctgttaattgttttaaaaaaataaattgaataggtggtaacaaatcagtaggtgatgcttttaattacttttacacgaggatactccctccgtactcgtaaaggaaatcgttttggacagcgacacggtcctcaaaacataactttgacttcttgtttctataaaaatatttattgaaaagtgatatatgtatacttttatgaaagtatttttcaagacaaatctattcatataatttttacatttttaaactcaataacttgagaattattcatgatttatattcttgaagtttgacttaaaaattgtcctaaactatacgaagggagtatgatgtgatgtggtggctgctagccgcctcgatctccaacatcatcagcaaattgggccaaagggacatcgcagccgtcagctacatcgaaagctgctatatatacggacaagaacggctgctagcttaagtatccaatccatccatcaatgtg

SEQ ID NO: 30221 - DNA, 1536 bp, Oryza sativa
tcatattattgcaaacattggtatacaagaggtacatgcagagtgtttgggaattaagaaaggggcaactgatcaactcgattgagctacggaaaattcacgcaatcacctatggtatgtgtacatgaagaaaatgcaaaatgcccttgtcgtttctacgaaagctagattgcttggggctcttttgaaacacagaaagtttgtaggattttcacataaataattgagctcagtttctaaataatttgttctaattcctctgtttcaaaggatgcatgccttcacacgaatttactacggggatgtcgtgagtttcctacatttgcacatggagcttaatcgtagatcaatatgaaatgcgggaactatagtcctatcagccgtttaaatcagagaggccactgctaagaaaacaaaaatttcacgaacttctcacataattaagcttaatagaacttccctccaaacacgcctacatcaatatatttcatgcaagccattttttataatccctcagtttcaaaataaatcaacttttgttcatagattgtcaattgatttattttgggatagacatgagtaactgaactcctagtggaaattaaacagaaataacagaatgtacaaccaactacttactctatcccaaataaaccaatctcatacagaatgtgatatattctgtacttactccatcccaaaataatgcagttttgcattattcatgtccaacgtttgaccgttcgtcttatttaaattttttttgtgattagtatttttattgttattagatgataaaacataaatagtactttatgggtgactattttattagttttttcataaatttttcaaataagacgaacggtcaaacgttggacacagatcctcacaactacaattattttgggatggaggtagtataataaatttgaaaagaaagttattttgaaacggaaggagtacaggctaacctagctagttgaccaccactaacttattagtatcacatttactacacggttatgcaaagtcatcgatatatatggtgtgaagtgaagagagctaaggcaatgtatagtacacacagtacaggcacactcgatggttctttgcatatctcccggttggtgaccacacgtacacaactacaccatcctagcttttggccccatctctctacctgtaaacatgagtacacacatgcattcggctcatttatgatttggacctaaagcaagatgatcacagaacgctaagaccctgtttagatgggactaaaacttttaagtccctatcacatcggatgtttagacactaataataaatattaaacgtagaatattaataaaacccatccataatcttggactaattcgcgagacgaatctattgagtctaattaatccatgattagtctatatgatgctacagtaaacattatctaattaagattaattagacttaaaaaatttaacttgtaaattagctttcatttatgtaattagttttgtaagtagtttatatttaatactc

SEQ ID NO: 30222 - DNA, 822 bp, Oryza sativa
attcctgcaccccttcagatgggccggtcaccaaatcaatatcaactgatgtgggtgatttttgaggcaagacagcttgagtctgactgctgcgtagttgctgacaactttcatgacctgcacaagcaaaagaaaggctcattgcactttttcaaaagtagagtaggtagagatacaatcgcagctaaacaatggcattgagttaacttcaattgagcagccatggcatatattattctttatatgcacaacagcatgtgcaagcaaatgactataaactcagactgttttgacactcaatagttggatattattttttgttaaactcaaattgtcgaatgcacggattatttaatactaatagtgcgaatggtgttcaatatgtgtttcctgaacacttggtagaagtgtattttttttattttttttcaattgtacaaaccaacatggtagggtacttctacagagaaactcaacagtatcaaatcaccaacaatattcacacatgcatgcgtgcgcgcgagcacagaaatgtgtgtgtggtgacggctaagtgctcaccatcagtagattccaatgctttgcagtgctttcggttcggaaccttcagtgctgcaccctgattcttacccctgcctttcctctgttttttctgagggctttcatctgaaattcaggtcaaatattcaaatgtgatatttctggcatgatatcacctgttgcgtgccagtcacaatgtatagtaaatacataacagaataatgaccagactggtgaagcacttaagaagttaatagaaatgataaaaagggctgcaggaat

SEQ ID NO: 30223 - DNA, 2741 bp, Oryza sativa
gccgcccgcccccgtgcgccgtgcccgcagccgcctccgatcggccgtcgccatgacgccgccgatccgtaagagagatagacgaggatgccacatgtacgctatgtagaccaaaaccactgcggattgggtcgaggggggtaattcgttcggtttgcatagttgggggtgataagaatgtccggttttttggttcggggggtaattcggacgaccgcgatagttcgaggagggtaattcgtactttttcctgtaaggaaaaacaaatgtacattagataatgaaattttagtccatcacccttttgcattcacacagatacattcatacacactgacttgattcaagaataggaaacaaaattatcatccgtgggtgatctaaactaacaggattatcatcaatcaaccaagaatacccatccacattacacgtctccccaagaacaccacaagaaaaattcttatgaaatgtgacagagttaggagttgggacaatagaaacttgggtggatttgcaatcttggccttggtctatttcatgggtttgactaggcatatcagtgttggttccatccacacacaggcgctaataagaccaaatcacattagtgctagtttgtgtttggaattaacactgatgtttatcattagtgtcggtctttttactaatgggttgtcacacttaacccagttggaaatttgactttgccttgttttactttgatcactccaattttataaataaaacttaatgagtattaaaatatatttcatatcattaaagtttgtttgttacacgataaatatatataattaaagttagtttgttacacgataaatataaacatataaatcatgttcattgttgtaaaaaaaggggtttaaacggtattaatgccaatggttaaactagagcaaagggctagtcaacattactgaatgagtaaatttcacaaaattgttggtattttgcacaatctatcataaaactataatgtttagccttgctcattagatgtagtcacctgacctatggtacccatctgcagtctcaggaagtgatatgtaattaggtattagatttttgcatttcgtagcttccgtaatcaagtgtagctatatgcacctacatgcttttgtgttacctcttctttgagtaaatatgtagtttcctgatattgtaggtaggtcccacatgtcaggtgacggtgaatctaatgtgcaaggcaaaaacctgtagttcgttataatggagaaactaaatatgttgttttgtaagacaagttattaaacctatagttttacgatagattgtgtaaagatttatgaaatttctcaatgtataaagtttttaaagacacttatatatacataattatttttttaaaaaaatcataccgtttagtggcttagaaagtgtgttcgccataatctagcatctagtaactgaaaacaacattgtctacatggtgtgttgcttcatagcatgtacataagaagccatgtactattgtaaactatattgcaatagattgcatcaaagttaaggcccgttctctttagataatagagatgcaaaatatgtgtcaccttttaaaaatacgatttctccatgatgtttgtacatcagaatttattacacaactttttctaagttatttaataactttatagtctataatatttattaatctatgtatttgtttatcggctaatagctgaacggaacatgcccatatagctgcttacttcaagtgtacagttgtacttgcctccaaactatctcatttcttatttcttatgtcacatattatcttacgatatgcaaattagacctacttatcagtgaggcaataaagaacttcacaaaatattcatatggctataaaggaatattattcgtccttcagatccattcgagataccttgactccaacaaacactatttctttatggaaacaccaacaaataaacattggacttggttgtacaccttggcatcactatcaaccggccagcttgtctatctaactttcctcggtacatatacaaatgttttttcttaatattttttaagtgtgtgaaagtgatataagtagttgatttttgtgttttttttctctaaagatggaattaggagggaaatatgaaaaaaggacgacgatggtcgtactaactggattgggatcagatgtagtcccaaatataactgcatgttagcgactgcactcaagtccatctaatttttcaatcgaaggtccaaattgaatgtaacagtagcctagctataatagttatatgatgaatgccctgaatgaacaatgttatataaaatttgggccttcggattacatcctatacatgagaccttatttggaaagcttaacatgctaagaatctgatagttggtagttagtttatgataatctaaaagaagaaagtggattcttcttacttcttttttttttctatattctataactacggattctcagaatttggatgacaaatataaattgtttaggggaaccgaagattttgtggtaggctacaactactagaagctctccaagcagaccatagtataattgcgtaggttaaaatcacactaaaaacaacattggaacccagtccgaagagagagaaagcaataaaatcccaaatgcatgatcccagaaattcagctcatacaagtcatggagcacgcatgtccaaattacacacgtggcgtgaaaattt

SEQ ID NO: 30224 - DNA, 5018 bp, Oryza sativa
cgggggtggtgtgggtgcttgggtgggtgacgtcagcaggcacggcgcccggcgcaggaggacggcgacttcggtgagtaccacctatactactggctacgagcactagtagcagcagctctcgccctcgcggcgtcccatcgagccatcaaattattgcaatcgcttccctgttcctccccatctcgtccttgtgatccgtgcggtacgtggtgtcgcagcttttgtttaccggacgcggctgggctgaaggcctgaagtaggagtaggagtgtttttttttcccctgagaaaacccagtggggagttgacgggcggagggacggacggggggtggagccgtggaggtgatgtgaaatgtgatcgctgatgcgatgcttcggagacctggtggtggctggtgaatggtggtgatacgtgtaccatgcaggtgtaccgcgcggttggccgggaacgtgtttcggactttcaggtttgagccgttctcttttggaccacaggggttacgaacttcgggtgtttcagtggagagctaaagcctaaaaggcctgtctatctaatttttgagctaagtttgatcaccggtgttacctaaaagaggtactctattcgaccacttgtgtctagcggttagctcattatcatggttagtgcgctatctcatcttttctattctactggcccaacaatcatgcactcatctattactcctacctcatctagatgtagagatagagaaccaaacagaaaaaaaaatggttgacataacttcatagcttcaatgtaagagagtacccaccctccgttccaggcatagctgctcatgttgtttaaactaccatggtggcgcgtgcagattacgtggctaacataattatattttctctcgtataatagcatatatattctctcaattaattattaaaatatattagaaataacgatataattttaaattttatactaacattaccaacctaccgatgtgtaataatcatattacattgtatatacgtaatagttattaattatttttaatatctaattttagttatttctaaattatatttctatatgtactctaaactcgtcttccaatatccttattttttaaaatccggatatttgttatatgtaaattgtatttctatatagactctaggctattctttcaatattatttatttttaattttgattttttattatttataactgtatttatatgtggactctaaactcatctatcaatattctttatttttttatttcgaatttcagttacttctaaattgtattcctatatggactcgtcgtcccttttttaaattttgaattttagttatttgtaaattatatttctatacggactctaaactctacttttaatttattatttttatttcgaattttagttaattctaaattcctactcctatatggactttatactcttctaatattccttttttaattccgagtatttcttaattgtatttttgtatggactctatactcttctttcgatatgtttttttaattccgaatattagttacttctaaaatgtatttctatatggactctaacctaattttaattttctatttttaattctgaatttccattaattctaaattgtatatcggcatgggctctagtcacatcttccaatatttattactatgttttaattccgaatttcgactaattctaaattgtatttctatatggactctgtttttctttttcttcgattaatatgagaatttctagggcgtgagagtgaatatggaggcgcatttttctattactttattaagttaataggttttatccctaaatgtggaaactagtagcaaggatgctaactactccctccgtcctagaataaataaagttcattttcatccatcccgtaaaaaccaatgtagaacaaaaaaaaaagactataataccttcactttatgaaatccctatgcaattattttttatctactcccaatgtacctatacatactttcacaaactctgatgcaatgattgctaaaaaagaatttatttgagataaataggatgtgctaaaaatgaacccattataagatgaagagaatattttaactgtgaattttgaaaagcgaacaacttctttccaagtctaactgtgttagcaaaataattaatcccttcattctaaaatacaaggaattctagggttcagatttcgtattaatatgagcatgtatacaccagttttcatgatttccatcactcaataattctatagccaattagatgcttgataagtaaattcaaaattcaaaaaaatgacaactagagtgacttaaaaaagaaatctgttgaacttaccttagtacttactaaacaacctaaaaatcattatactccctcctttaacaaaagttacacatgttatttttgtcaccaagaccaaggataaattaacttatcttgcatgtaacaaagaacaagaaatgtatgcacgcatacaaccaatgagtatgaagatggcttctcgggttctgatcaaacatttaatttatctctccacttaagtctgcaatgcatagagattacaaacagaacaacttatttggaaactcaaatataaaatagatctaactcttgtggaaggagtgagtactatatgacatcactacgagagaagtttattaatgaacattgcatacgcctttagttcttttatatttatttttgcctctaccaatgagttaactgttttgtaaaactagataaacctcgtgcgttgctatgggagttctgtataataatagtgtaaataacatttaatatagctagacaatatcactttatatactttataaaattttcatttgtgatcggccatgaaaaaagttataaataattatgatgatgacgtggttataacagtttaaatcatatatataggatgatcaatcaaaagcaaaactacgatgatacatcttaataacataagagaaatgaaaagataatatagattaattatccaaagacaaatttaagtaatatatgattccgtaggtgaaggaaaagagggaaataatttagaccatagattaatcatctaatagctaaaaacaattaaggtggtatggcttaattagataatagagagataactttaactgtatttattgataatgaattttaggattcgtatatatgaaaatactatggaattctttcgttccaaatggacgactttaacttttatcggtgatacgtgactaaacgtgatgaaaaaacacaacacgtacaccggaaaacaaaacgtagtagattaacttgtgtcatcctgcttgcttagcatcgatcctttgcttcccttttctctttagattgagttgctttcctttgtttcttcttttactccaacataaaacagacgttagatatcgttcgatcctttacagagccggccgctttgtttggcacatgtggcaagcttctttattccggaaatggtcgtgaaataggtttttgggtgccattctttaatcatcaacacgtacttcgtatctttgtccgcctcttttctggctcacatgtgcaagcgagaacacaaacaaatatggcttatacagttcaagcttttccgagacgaaataccactacacagtacacgtcttggacggcatacaatgcgtgtgctagacaccgatccaacaacatccagagctactgcaccacaaagtccacgacgaatcctctttcggcaccgatctcccatatgctgtgctccaaagttgcccagaacaagttctctcctgaagcagtggctttgggaagtactatacgcgccatgcagatctttttgttaccatgcgaaatctgcgagacatttgcaagatccacaacgccgctggggcccccggggttctacgcccttgtgtcgtgtgttctaactaatgcagcatactaagctgcttgcctgcagttttgctgttaaatttgacccgctcttttcttattcacttacctatgttatttcatatttttgttagcacatttttaaactgctaaatgatttatttcgtatgtaaaatttttatatcggagttattttaaaatatcagctagatatttttttaagtttataataattaaaactcaaataattatgtgctaataatttttatgctttccgtgtcctaactttatttggatcttcagtaaaacaaacatcatctttgatcgcatttttatgaacactctactactagcagatatgacaaatgtctctgagtataacccatgtgacacacacggtcacggtgatatgtgaatcgaataataacaaggtgattagtactccgtagtcagcaacgcagtggttgctagtacgcgataagaggaagctcacgaggagagataaggatcacgaattttactaatacacaaacgcacggacatgaggaaaatgcatcgaaatgattgggagaatcttgtcctggtccgatgagtggattaaagaaccagctttccgtcctgtcgtggaatctcatggtgattgagttctcatcctacgctcggcgagaccacagcctaaaaagaggcctattggacgctgtacattttgacagcaaagctcgggaaaccggcgaaagtgtgaagctggaaacgctagaaatgaaagccctaaatactagtagtactgcaccatggagttgagtactttggctaaagatgagtgtttgtcatgatcccatcgatggctttggaagaatccaaaggcaaagccgtccgacgcggggcaagaatcagcaacgaacgagtagcgtccagggggatgaaaacggccacatgctacgggtggtttcgcccattacgaggctcgttcgttcgtgctcgcgccatggcgcggtgtcgcgttgtcggatgatcagcgagccggggctgccgttgtgatcggctggatttctctgcgattgcaactgaccgagccatccgtccattgtcttttgtctccattccat

SEQ ID NO: 30225 - DNA, 1434 bp, Oryza sativa
tactctctccggcctaaaatatagatagcaatgtactagatgtgacacatcttagtacaacgaatctggacagggtagaatgtatcacatctagtatatagttgttatattatgtatatagttgttatattttgagacggagggagtagttcgcaccactcgatggaagacatttcaaccggccagttccgctgttccgtgtcagtgaagataagctagtatagccagctagctagctctctccaaccctataattaccacccgaacgatctcgccaacaagcggccggcagctcgatcgatatatcacagccaacaagcggcagctcgatcgatcgatatatcacaatggttaggctcgccgtggacgccggccttggccgaggcttcgccggcggcggcggcggcggctccgtgcccgacatgagcaggagtgttgtcggcattgcgctggtcttcgtggcgaccgtagcgatcgtggcgttcgtcgtgtttaactgcgccgatggcatggatagctccggtggacggaagcggctcaccaatccaggaggcggtactgttggcgttggcgccgtctgtggaggtagtgcttgcggtggccccgcctgtggaggtggtggaggtggcggtggcggtggcggtggttgcggcggcggcggtggaggtggctgttaataaaggaacagagcatatggaggagagagatagcggtgtaggtgatggaatttcatgtcctttgatctacacaccagtttgattttgctttgcagtgtttttcatttacatcagtcgtgaaataacaaaccctttggtaattctgcttatgtatcattatgggcctattcactttgataccactttcaaccttactaaattttggtattgtcaaaattttgtgataattaccaaaatttgacagaaaactaaatgtagatattttttttggtaactttaccaaaatttgataatgttaaaaatgacatcaaagtgaatagacctcctatatatatataaacatcgtcttacgtgtttatatgtattatattaccaacaaacacccataaattcttttgaaacggtggcttccaaagaaggcgtattatttttaggtcagaatgggagtttagtgtaggtccggcctataattattgggccgaaacgggactcctatctacgtggtgctcatacaagttgggccagaatggattcccttccacttgtaggcttgcagcccatctttttgggctgggatggaattccgatcttcgtgcagcctagtagttaggccggcgtgcaggccattcttcttgggccagggcgtaacgaggagaactatcagaaaaggatgggccaggccgaccatctcatccttttcagcccatgttaaaaataatggtacagaacttcgtttcggccttgtttacggagataa

SEQ ID NO: 30226 - DNA, 4514 bp, Oryza sativa
gtgcgtgttttgcagcgagattttgcgttgggggtagctttgtcctggcatgcatgaaagcaaccactcgggtcgacgagacttgctactgttgggaggcttgcattgcatgcatgtgcgatgggacgcggcttttgtgtgtctctctgcgtgggctccatcgtcaccgcccccggccccagcagtggcagagaagggcgtacgtacgctgctgctgggtctgggtgtgtgtgcagggatggtttgccacgatcgtgcaaccccgcagccagcccagcgcagctacgtgcatgcatgcgtcgttgcatctcatgcgtcgtcgtctgcttcttccttggttcgatcgatagctccgatcctataattaattgcagcattttaattttgatgtatatatcagcgtccaatctacatatgtatggattgttaatttcctgtctacaacttaacgactagcaactatatatatatatatatatatatatatatatatatatatataacaaattgagacagtctcagcatgtgtgtacgtccacgtacatgcatttgattaagacgtcgacctcacataaaagtccatctcacagatatatatatgccgaggatctagctagttagtaactacgagcactacattattcatgatatttaagagccaatggcatgtcatatgtgtgtgtagctactatcttggtacacgacagctaaagatcttgacatttggtagctaaggtggtactacgcattcatgtccaattgtaagctgattcactcatcatctttgatccggcccatggatcccaatcaccaacgttttataacacttttttaagtactagaaaccgagaattatcaagaaaaaaaaacccctactggcctactccgcatatctaagatcatttgggagtcgactatttatgtttagtacattttgagttaattaattaagctcgttgaattgactcgactaaactttctattaattgtttatgcctgtatcccaaataaaagaagacaatctctatatgtttcatattatttatcatcctagcatttattttttttaatcaaaatatttttcattcttgcattccaagtttccaacataattttagaggtgaacttcccctctctacccttcacgaatgcagtcacaactcttattagcttatttgctttggaaaaactaatgggatgtacttataatgagagtaacaatgtaaactaccatatatcaattggtttgtgtgaggtttgctagaatgataagtactccgtccgtcactaaaagagcgtagttttagcgagtccactactgaaaaactgatctctgctcagtcgccctaaaaccacaatagtcccggttataaaaagaaccgggactaaagatgatttttagtcccagtttaaaaccccatagccattctacgatctttagttccgattggtaataccaaccggaactaaagatcatcccatgtcagtcccttattagaggggcagggatctttagttccggttggtgtcacaaaccgggactaaagatcacactttagtcccggttggtattattaaccgggactaaagatctcctatatctcacgcgtagtatataatccctattccctattctctcccccacaaccggcctcaatctcctcaacaaccgacctctcctctcctcagatccatcgccctctcctcctcccctcctccccttcctcctcccatcccgaccctctcctccccctcctcccttcccgcacgtgtcaggcggggccctgcccggcggggccgcacgcaggccgcgcacgggccgagtagcgagcggcagcaggcggcgctaccggcatccattctttttttctttttttataatttgtgattcactgagatgtataattttgtgatttgttgtatggatctgatatgtataatatgtgatgtatttggtttgtgtgtaatctttttaagatttgtgatgtatttgatttgtgtgtacaagtaacttaagatttgtgatgtgaatgttttgggatgttactttgatttggggtttgatttgggaatatgcatcccactcgatttgggagaaaatacagggattaactctggctaaaaaataacgaaaaaaaagaaagaaaaggagacctaatgggactgccgctacccgctctttagtccctgttggtaacaccaaccgggaataaagataggtatctttagtcccggttatttcacccgggactaaagatagcgatctttagtcccggattcgtagtcccggttggataaccgggactaaaggggggttacgaaccgggagtacaaagggtttctccactagtggtcaaaaaaagattaagcaagagatataaaagactactatgtcgtttattaatgctgagagaaaggccctgtttagatttcaacttttttctttaaacttctaatttttccgtcacatcgaacttttctacacaaacaaacttttaactttttcgtcatattgtttcaatttcttcaaactactaattttgatgtggaattaaacacagccaaagtaagaagggaaaaaacaaagaggaggagggagtaacgacaagaaaaaaaaataaagtactgaagtattaagaggtttactggacccactttaaagatatggacagagagtaaatgagtaggagtataattcagtagttttcatatatgggattatgggttgcctccaagtcgaacccaaataagatggactaattggataattacccatctgtagtaggaggctggtgattaattcacaacttatgtcttgttgacttgtggatcctccagctctagattgaagcttattgccatggcgcaatgaatgaaagggggtttgagcaccgagcccccagtaggtccggcactgttgttcatttctgatgaacatatgaatggattaattatgcgtacgctttctaaacttttgaacatatgatttttaagaaaattatatatatatatatatatatatttaaattcatttttttaattttataatagataattcattcattgttcatttaaataattatcacacattattcaccagccattcaacataaaagaacagggaagaagaagcaactatatggattgtgtccccctgatgataatagatactatgtactctctagcccgatatttaattataaagggggtgatctataggtgcaaatgaagatggtgacctggtatgatcaatgtggacaagtgggacataatcataaaaaggagtccagatactgaccaatgcaaatgctgcgtcagagattgtgatagatggagggccagatcgagtcatgaccgggctgtgcatgctactagctattactcaaggagtactgatccagtagtactacatgggaaggaattaggaataacaggcagcataaggcctcaatgacatgaaaatcttgtatgatgtattaatttgggtgtaagatcactgatcacaatgacctgttaaagttaaacacctatttctctgaaagtttctcgaaaacgtgtggggttgctgcatataaatccaccactgtctcgtcctgctctgctcactttcaggacgtgtccttggtgatcaaaatttcaacaatatatctacatattgcccatatcaccatctgcatgattgaaaccttggtaaattttaattttacttgtgttcagttgatcagttcacatgtgtctgtaccagtgaaatggagtaaaagagtgacagtacccggccgatcgatatgatatgatcgagccgctcgcggtcccctacatatcgatctatctatctatctatcgcacaaaagctgccgaaaattgaaacaattattgggatgataggaccagcaatgtaagctgcatcagaggcgagattgatcggttgatcagagggcgatatgtttgcgccgattgattcgagattttgtggacttcaagggggttttcctgtgctgtgctgccttttcgctcattcgaatcagagcagctgcaacgcatgcatgcgcttctgaaacctgcaaacgcctgaccctcaatgctcaatgcaactttgagtatattatcgtgcacgtggacggcacagcgatcccaatcaggttttggtggatagagtttgtctcattcgatccaatttatggctctgtaaatgctgtttttgcagagaaaaattcagttcattgttttccctgaatcacttaattaattaatctcgtagaggtatattggaaaaaaaacaaagaaaaaaaaggtaggagatcgatcaagaaggatgggcggcgaaaggtcagatttattcggatttaattcgttttgaaaattgtgcaagaccggcttgaaaaacaactctcagctacaaggaaaatcttcacgtcctttaacacttattgaaatcaatatgttttgacaagttatgtaagtgagaaatcgattaatcaatgcgatgttgtacatcatgtggaagaaattgccct

SEQ ID NO: 30227 - DNA, 5772 bp, Oryza sativa
attcctgcagcccccctcgcgtccgcgcgcgcgcgctcgcgcatggccgaccgcccggtcgccgccgcgtcggccctgccgcgcctgcgccgcccggccccgctgccctgcctgagccgctccacgcgaaacatgtgagttacagttactgctgcctctatcgttgtggttggttgaattgtgctcttaccaggtctgtgttagagcaagttcaatagtatagtcaactactagttccaatttatttatagttaatctaatagctcatttatacaatagttacatactacactattaatatctggtcccacctatcatacacacactgcgctttggagtttgtgctacaactggctacaaatctgtagcccgctgctcttaattacatgaatattgcgtctgtagtaaattaaaggtcataaataatgtccgtgtggattaaattcgtgatcgcgcgcacgtacggtcgtgtgcgtgcagatcgatcgatctgggtgtgatacagtgtacacctacagcgcgtaagttaacgtcctacgtccatggccgtgtggctgccggccggccggccatcgatagcagcatgcatgcacagcacgtcgcaagacaacgtgtgcgcgcgcgctataagctacaggaccacaaggatcgacgaattaatgctagcttcggctgtacggaaccccctgtttcgatcgatctacctagccgcccgcaatggttatatatagattctctagaagatatccatgtcagcatatttttctatttgaaaaagattaaatgaagagaaagagagtaaagctatctactaacttggagatagtctatagagaaaaacgaggcaatagatgagagagctatagatacccatgtagacatactattgaggtggtttactattaatctagtatattgctgagatgtacatgttttatagagagcaccttactttaccattgcgggtgctcttagtgcaatcccaaccctccacctagaatgatatttatggcattaaatacattgtcacgtaggacttttaacttatgtggcactatattaattaagaaagagagtgaagaaaggaagaaactggatctcatgcaagacacagcttcaacacaagaacctatgcactagacactatcaagttttgcattgggagagaataatgtcttcataatagatgaagaataaatatgattggtagagaagagaggtgacgtatttattaatgtcccactttaagaaaccatgggttgtagagtgtagtttctattgtgatgtcttattgacatggcaccatagacactgcttatggacactatgggttgggactgcccttaggccctgtttagtccgccaaaaactttcgcaaaaacatcacatcgaatctttggacatatgtatggagtattaaatatagataaaaagagaaactaattgcacagtttacatgtaaatcgcgagatgaatcttttgagtataattagttcataattagccataagtgttacattaacccacatgtgctaatgacggcttaattaggctcaacagattcgtctcgcggtttccaggcgagttataaaattagtttttttattcgtgtccgaaaacccttccgatattcggtcaaacgtccgatgtgacacccaaatatttttatttcaccaactaaacaggccctcatgccccgtttagatcccaaatttttttcccaaaaacgtcacatcgaatctttggacacatacatggagcattaaatatagataaaaacaaaaactaattacacagtttgtatggaaatcgcaagacgaatcttttgagcctaattagttcatgattagccataagtgctacagtaacccacatgtactaatgacggattatctagactcaaaagatttgtctcgcggttccaggcaaattatgaaattaggttttttattcgtgtccaaaaacctcttccgatatccggtcaaacgtccgatgtgccatctaaaaatttcttttcacgaactaaacaagccttacaacgatgcacatgaacatatatagctagatctatgtgtatactctacgtacgtagtacaattcaattctctgatctatatttattacgacctgtttgtgcatgtatctttgtgctatttgttacgacggcaattgacaggtcatgtatgtgtacgtgcccgcgtgcatctatgaacgatctctctctgctatagctcgtactatatgctctacatagttggcagtttggcaccaaaaactaaacaacgtcgtccgacggtacgtagcacaataaaataacgcacgtaacgcgagtacttgtacgacatatagatgtgtgatgcatggtgtgcatgtccgataacaatgaggactgaacgcatatatatagcttggacatgctctcgatcgatcgtctcgagaaagtgggtacatcccttctttctatataaagttaagactaaaagctcaaacctcatgctttcacgtcatcatcaaattatgaaccgttggatgaatgcaatagatcgtttctcagacgttggatggaatgtagcatagagcccaacccattagtcaccgggtgagtctcttcgcctcctcagtgtcaaatgtagctcacataaacacattggcccatctccacacacatctacatgtatctagcccgtcaatccgtataaaagagctttgtggctgaacgccccttcagttgacatgtgctacctaatttatctataaattttgaatatgactgctaaaaagaatttctccaagaaagctattagtttcttcttgagattgtaccttctatttaacaaattgatgtaaaccaaatcccgtggcaaacgcgcggggcatcctctagtactgtcaagagtttcagagcctcaacatcgatcaataaatggaattgaaagggacaattaaaacaggcaagaaacggaagaatgaattgcatgccttaattttcttgtccatcgcatatgcatggtaatctcatgcatctattgcgactatgcgcaaaaatgtactgcatatgctctttcttttatacaattaaccaacacgaaagtgtccattttacgtacgcagctcggcaggcattgcatacatccgatccaaacgtacatgcactgatgcacgccggccgcatgctttcctaggctgatcgatgtgctctactatgcagcacgcacatggatggtgagctaccaaagctagctaaagttatttctagctctgtccctaagtcaccctgttcccgcactacacatgataccagcagtactcaacactgtttacttgggtcatggttaaaaaaactaatccatgcatcgaaccggtccatgcgcgcattgcgtacgtgcgtgggctagctgttgcagctattgcgctgctggacatttttaggcagcgaattcaagtgctagtactactagaagtacgcgtacactagttacccactatccggcaagtactagcccgatcaaatttaagtcgaacaagacgaatgttctggcctgcatgcagcagtgcagtagtaggcagtagccaactggcaaaatgtgcgtacgctggcttcttcaattcggttcatccgcccgtccgccgcccaatcgccgatgcgtgtacgtgcgacgaggcggacgcgcgcgcgcacgcacgcacgcccgcccgaccggcgccgtcgcgcgtggctgggcgcgcggtgcattgcgtttgcgtcggtgtgtcgcgcgcgtgcatgcggtgctcgggatcggttgcgtcttgcgtggttgcctcgcaatgtcatcgagagcttcgatgcaagcgtggtttcttttctgaattccatgcacgcgatggtcgcactgctgcgcttgttgccacggctgttcgcctcagttgtaaaaagggagaaaaaaagggactatccgaaaaaccactacaagttttttaaggaagaactttcaactctaactacagtataattgtaatataattccactatagctaattataactataatactatctccgttttatattataagactttttacctttgtctacatttatatagatattaatgaatttagatataatatttatgtctagatatattaacatccctgtgaatgtgtgcaatgctagaaagtcttataatatgaaacaaatgaagtataagttatatataagtattaaaataatactacctccgttttttaatagatgatgctgttgactttttctcacatgtttgaccattcgtcttattcaaaaattttatataaatgtataagatataaatgacacttaaagtactatgagtgataaaacaactcataacaaaataaattacaattacgtaaagtttttaaataagacgaatggttaaacatgtgagaaaaggtcaatgtcatcatttattaaaaaacggagggagtatatataaggaacgcgttagggagggagctcaggaggatatgcgaatagataacaaaagtcaatagcttcaagcagttgttgggatggagtcatggagattaattttctcggaccacttccagttgctcatagctaggttcgttcgttgactttgtgaaatttttaccttcttcctgtgcactctgagaggcagggtttaactttccaatttcaaagtaaaaactgctcctcggttttgccaaaatccgatcgaaaatcggtaaaaaccgatgactttcaattaacaccatacgaaaactgactaataccaatccttttcacaaaagtcgaccggttttcgcgaaattccagcggtattgcgaatcctgctagtgagaggcaatggagccgccattgcagacgaagatggagcaggcaagcaagatacgagggaaaacaaaaagattattctctccatacttttcgagcaccaaattccaccctacttactcccaattctgcacacatcaaccatgttactctccatgctttggcataatatgctcccggccggtcatctttccatgttgcatcgacgtcatactcactcgaacgatgtcgacactggctcttggagaaaggaacgacatatcacatatgtctatgatattctatcccttcatcaaaccaacaggtatacaagattatcactagctagcactgcaccatggctagagcccaatttcgctctcagctagcttggattgtctgatggcgacggaagatatttttttgccatgctcaagagatctagtcggccgatgatcaaaacgatgaaagccaccaaggcacaaaactcgatcatcatggctgtcaaaatatgcctgacgcactcgctggcatatgcatctcatccaggattagatagttgtttcagatatgattgcacaatatcctttaaatccagtcgatatgttatagcgattctgaatgacctctaccgtacttgttgtgcatgcactgaaagaactgaaactaaaatatgcaagcatgaaaaaatcgcaatcatgaaaggatcaagcatcaagtcacacaaatctgaaactgaaactaatttcgaagcgagagagattgagggagagaaaagagaagctggagaagccataataccacttgcaggtgggtctcaaaagggtttttatttttatttttgtatatagggccacatagatgccatgtcagcattaattgaccccattaactcgccacgtgagataaaaccgttattcaaactgctcaggaactggttttgatggttagaggatgctctgtagggatgcaaat

SEQ ID NO: 30228 - DNA, 1937 bp, Oryza sativa
catgtgctaaaaagtcaacggcgtcaaacatttcgaaacggagggagtatttgagaactgacattttgaaaagaagggtaatagtaaattctccataaaccaaaatgaaaagttgacttttttaagaagagcaggtatgaatcaatgcatgcatgcaccccatgtggtacacggtttgtttaccaaatcacgcacccatgcatgttcagtcaaatgtcgtcgttacgtccctctctgcctgcactgcactccggccgggtaaagaggaaaccccaaacacatttcacacgagaaaaaaagatgccctgtgtcaccgacgggagaaaagtcttccacctcccttaccttttttccatcctgccccctccaagacgcgaatatatcatcatacatgtgatataataattacaaggaagcaggagggcttcttcgaaattacgaccggctactgctggtagacacgcgtacaggtggtcccgcagaggaggatgcggtgggccccacgtgaaaacgtactccagcgaagcgtaggtgggcgcggtcatcacgcggggaggagaaaaatatgcacgtgcgcgtaatggcggaagcttcctggttagggtgggtcatcgcctctcccactttcatgtgggtcccaccttgtcagttgtcacctgctgtctctctcttcttgtgtggctgaaattttacaagggtccggtggtattctgcaaaatctgttgagtggtggttaactggtgatttgttggacttgaggttatgcctgtgtttcatcaactgagtccccaattatggctgtgtttagttcaacacaaagtttagattttggttgaaattggagatgatgtgactgaaaaattgtatgtgtatgacatgttgatgtgatgaaaaaggactgaagtttggatccaaactttagatctaaacacagcctaatagccacttagccactagtagtttcgtttttgattttttaacaaacctttttttaacattgatcaaatttataaaaataatataataatattttcaacatagaaaaaaactattaaaatatattcgatgttagatttattaaaactaatttgatgttataaatattactatttttatataagtttgattaaacttttaaaaaaataaaatgacctataatataaaatggaggcagtactaagtattggtcatgacagctatcagtctctcttcagctatcatgaatgataaaatcgtatacgtgtggtattcatataatggagtactggtatttaattaatccattcccattatcttagaaaaagttaacattgttctttaagattgcgagaaaaagtctgaagattatgtattcgtagatatgacaaaaaactttgcttaatcatggtgaactctaggtttttcctaataaagtagtaagttcacactagtagtactaaaactaattaattggttacccattcacaacacttgaaagaaagctctcaattgatttgacttttccactcacatatgtgattgtgtgacatttttaaaacaaaaaaaaaaccaatcagttagtatgattgtatacctaaactaattaaaaatcacattgtgttcatttgccctccacaagcaacaaaaagctagctagctaatagctgctcctaaatcctgattattctatctggcgcctaaaggtagacaagccatgcggatctcgatcgatatactccttgcgctttaaaatgcagctgtcagcacataacgttcgattattcgatttatttaaatatttagcataaatatatgcaagtataagttaagaatataatttcttttatgataaaataagttataataaaataaataatatttatatagtattttaataagataaatgatgaaccgttatgtgaatgggcattatatttttaagagcaagtttaacagta

SEQ ID NO: 30229 - DNA, 5491 bp, Oryza sativa
tgccttcttgagcggatttctgtgcaatgtattttatatttttttggtttttggaatggagtatactacttagagtaggtacaatagcatgctataaaccagatataaacatattttaagcagataaaagaaaagagagaaaagcagcgggctacagatctgtagtcagctgcagcacggacaaacataatgtgtgtatgacaggtgggaccatgtattaatagtgtagtaagcaaatattgtatgaattgactattacattggctatagataatttggagctagtagtggactatactattaaacttgctcttagtaccactgtaatgtgcatggttgattggctggagcagttgaagcagccaaaattaatcttcgtaatggtcgaaatggcacccaaaacaacggcccgtttccttctttggaagatgagatggacttcttgtgttctttggggtaaatataactgacagtttgaaatggtcattattgtgccctttctttgtacctacaactcatgtgagaatattgcattgttttctattcgttgaaactggtggggacagtttgatatgccattttttgaagtttgagtatggacctattgattgttttgtggatttttttttgtctaggtacgaaatgaagccattttagacttttcaaagtcaacaaaagactacttaattattttgtataattcaaaaggaaatgcatgactgtaaaatttattgttataagtttttcatatgtaaaaaatttatgtctcaaacaataaatatgatcgatgttatctggtaataataaataattactacctccgtcccataaaaattgcatttctagctaatttaggacaaaatagtaggattggaaaatgacaacaataatctaatttaatgaacccactgcatgcacacattccatatatataaatgattaaaaggaagtttgagagaattaacccatataattagcatacttaataaaattgcaagcattagcagcccaaattatgtgggatgaaaggaaacttatacatatgaatcaattggttgggtcccacatggctagaaatacaatttttgtgggacaaagccttagagctagaaatgcaatttttatgggacggagggagtatatggacaaacaatttctaacatcagtacccaacactttcccctgttttatcaaggaacacttcaattacaaatgtcagcgtctgattggatgacctcaaaggtcaagcctcccaaacagtggctacacaaagccctctcctcgtccgaacagccgcctttggttttggtcaaattaaggaaacgcatgggctcaaaaactcctaattgtgatgcaataatgactaattaaatccatgacactgcttggaaattcagccagcactagctcaaatttttagttactactattaatttgacaatgtgcaattactccattattgtactacgattgtaactgacattaaacaaaaaaggcatttcacatgttatgcctaacattttggagtcaataatgtcaagatagatgcatgtggatactcttcttttatcttgagaggagactcattgtggtcaccctatcatgctgcttttgaacgttcgccagcgtttgctgctaatgcatgacaattgttcaatccatttcccttttgatatgatcagatcatgggtgacaggcacaggatggtacaagaaaaagttattctcatcaaagagctaaaaaggatggggacaatgcatctcaatgaagagttcaagtaaatgcatgctattttcttctcttttattttttcccttttttttttgagaagggtgttgttttcatgcgcatgctggtaatgcttgtccttctcactgatagatgataggcatatatatagtggtcctatccaatgacacacctgttggatctagctagattgtgcttgaatggggattccattaatccaaatcgatcagttgtgaagtttacattgatcttactgtacacggttcagattaattttgttgacaggggatctcagttagttcaggatgcaggtcgtttgcagtgttgcatgtgcagtactgatcattgacacgtggacctcatagcccctcggatccacgtatcaatgagcagtactgcatgtactgcaggggatctcaattagttcggttggcattgctaaggcacggagcactgttacggggcttgcagctgcaagctgcgcagcgtcatcaaggttagtcgagcaacaacataattgatttctcaaatgtaaatatattagtatggtgtacaagtttttgttcatgtggaatttttttgttgcaaaacatgaactctgaaatcagaagtgcaaaatagtgcttaccagtaactagatttttccttgaacaacatatatagtcatatttgtaatgcgggaatcacgggtccaaaattaagcagtgaaaaaattggactttatgtaaagaacaaaatgttctctgataccaaaccaaataatttttttgcaaaaactagcaaacaacattctattcaaccaccgtgtgcgcttgggcttactattgtgggagcaaaaatgattgatctatgtcgcttctactcattagtctactagctccacgacgcaagtcagagcaagacatcatccatgtctctccaattgcaatactaaacacaattattacccaaattacccaccccaaaagagaactgaatatgcaagtgtcaccgttacgagaatcatgcacaattatgtattcaacacatctacttaaattattggtctacatttaaaaaaaaaacttcaaactgcatcatcattcagcccatgatccaaatcaacgttacaaaaaaaaaacatatttaaactggaattatgcgtgaggtcaactgatttttatagccactcgttccatttcttccttgctttcccttttaataattgtgcataattgatgtcttctttattattatttttttatttacagatggagcctcacctagttcctcctcctcatgcaactgcagctgtgtagtatcacgaaaagggagacatggcgatgaggaagagccaaccctgagaaaactcaggaggcaaagtggaattgctcctctgtatcctttcaaagattcagagtttcagttagctcttctctctttttagtttttcttttcccttcaaagtcttcaaaaagacccaagaggtgaaaggtccgttcttgtttcccttctgtcctttggatggtagctaatgaacatggatggacaggtcaatctcaccgtcccttgttagaaatggacgccattaattagtttgaagccttgaagattcaggtcatcaggtctctggcaaattggcaacctcgaacaagcttcatgacatcttcctaagttgagtgattggacagaaagtttgtgcactactactaaaattcttgcttccttttgttggattgccaatttgccatttcccccagaatcacattctgcagtttctgacggttcatcatggttgcaatgaacctatccgtgtaattcttctcttcttttttttttgtgatgttacatgagcgactttaatggtggaatttatttgtttgataccgtagcctttatgctgtgttaagataggcattagtataaggttatcagcttaatgaaagcttgttttatacgtgcaaattagatgtgtgtggttagtgactgtaaaattagccgtgcgccatatcggtcaattttgttgggaagaaagctacaagtcgaatcaagtctacaaaacctgcgatccttttcgtctcatctttttatgtttatttttatttttttgcctttctgctgatcttgtttgtgtggacttgctctttctgaaaatcatactactgctatttaatggatatggccacgtgcccaaaattcagttcggtaacacagttgcagcaagatgtaaaaggagtttaagccgtactatagtagtatttaactataggcctcgtgctaagatgcatggacattttaaaatgactcttatggtgacagaaattatctgatgcaccaggagatgtggttcaatgaaaaaaaacgtaaaaaaaagttttcgtaaaaattctaagtgccttatgtagagattgggtatgttctcagtgtagttgtaccaccttgatataatcgaccaagttaaatatataaaagcttctattataaaaggaatatatctaaacacctgagcaatgtaatttgttcttttcatactcgtgcatgtggaagaatttgctagcttggtgtggtcacaatttggcggtctttggcacatgcagcttagtccatggcattatgtcatcctaagatccattcgtctaaaacaagaagatgtggtgtgctgaaagtttcaccttttctaattccattccaaaagtaactagttttccttgtcaaaaataaattcaaaagcgggtcattagtgagacgaaacaggctatggaaaaataggaaaatctttgtgcatgtcatcctttctgaaagacttgataaaaaagattaaaaaaagatgacttgatgcattgaaaagcagattggaccggagaaaaaaattagaagaaaaaatgggatgagaaaaaaaattcatgatcctactttgaaactattttttaaaaaacaatagaggttttattgattcagccgattatatcaaggtgatacaaccgtaatgagaatacttccaaaatctgtataactaggatgcacacagctacaaccgcacgctagttttcatcaaaacaaaaatatattacgagaaatctgtagactagatcgccacatatactcctaggtaaaacgctcctactggcatgttattgcaacagttttgtaatcccaacctctaaagaatatcctaggaagagagctagagtgaagtattaggaaaataacctacaaaagaggggggatatttttctttaaaaaccacatcatttttaaccataatgattaaaacataacaaccgctactaacaaaacatattgctctgaaaatctgactgaaagctgaaagatcataaagataagctagtcgtctgtgataggcttatcaggagaactgcactttgatgctgtaatttttggctgtatccatggcctagctaggagtagtttctttcactcatgaacaatatagaccggaattttcaaatgggcactatattgcccttcacatttctccaataaatctatgtctacatgcgcacctaacattaaatcacgtcactttttgtaagatggagaaatgggatgtgatatgccatcattcatgaaggggagccgtcagacatagagaaaccggaccctctgatcaaatatatctagtaattaattagttggttgttgttgttcatgtagcggcggctaattaatcttctcggcaacatttgggcaattaatcatccaatttgaatattctgaacgaattaaggatcgggagtttcag

SEQ ID NO: 30230 - DNA, 5913 bp, Oryza sativa
catttcgaaacggagggagtatattatagtatacaaactgatatttgtttggttacttgttgcattccatcatatcatagtcatcaagatatgcttccgcttctgcgcacgcgacgacgtctattccacggcggtcaacaacgtcgtcaattcatcaggtcttctgcaccttttgctctctgtatctctttttgatatgttggtaggtcaagggtagcaagtctgatctactgttgttagtgttgttttcagttcaagaatggtaggctcgagacccaccattggatgctgctgcttccacctttctgaacctgtgcaacagtaaaaatgattcaaagccggggacattattgccaatcgtttcaaagcaaggaaaagagaaaaacagcagaagcagcgtcagtcgcacgacaaattgtctacttatcaatcatcgcaattgtttatccacgtaccaatgcaggcatttccttgaaaaaattcaaccgtggccgaggaattcctgacatcgttgagcatgatttccacaccaaatacatcatctacagttcagattaagaggcaaagatccatccacggtagtataatccttcaaatttgaccaagactactccctgtaccatcagggcttctgaaaatatcgatcctttttctttgtcacggcaaagttcctgaagaaaaacatttgggaaactagccaagcactagcacctagatgaggtcgacgcccatctttagcttccatttttaagatagatgtaagccaagccggcgaatgcatcatgaatgagcaatagttttgcattggttgcgccggcgacaatgtaagcgccatgtactcagcagatagctctacttgcgacacatcatgccattagcacattaatgtatatcctttgccacgatttttcaaatggagcacaagagatgagattacaatgccatttggagctggtagatgacaacggttgtttcacaaagtattcatgcttagctaagactcctgttcgtgtttggttgccatttgtttagtgctgagatcatgtggacttgtttgattaattacgatgagttggctcctgcattcagtgtagcagctttcagatatttcaggccttcctcaaggtgacaaggagatgcactctgaatcattatgctcgtacttacataatactcctacataatgctgtgacgttctgtacgagagttacctgttttctggactctctgcagaatacacaagagattgtttcttcagagcaagattgtttttgtacaactgaactcgcgttctaataggctgcagcttgcagaattcaggactacgattaaggcaatcaatcgtacactgaagatgatatgacaagatacactcctctgaatggaagaatttaaggaacacggatggattgtcaaaacgaagcaggctgcagtaatgccacaggtggcttattcaaactgcacgatcagaaagcaataaattttgatgctgccgtactgcatctatagcagccaatgattaattaggttcagagtcgatatgaattaacaaatcaaactcttgagctgtttatttcacattcacaaagtgaatgcctgcattaaccaatcttgatatcttctttttctgctcaaagacaaaaatatcggctagcacgatctcatcaaattgccgtactcgcacttgattcatgtcggctgatgacagatcgcattgtttctgaacagagatgatggtgtgcaatgcttttttattcacacctttggtttgtacctaatacttgacctggagttggaagttggaactttaacctttgggaattactttcctaatcccgagtcttatccagcaatatcatactatgcttaaattatccttgtgtcaaacatctccgacacgtaattagtaaaaaaagagacaggttcagacaacaacatatctagttaaattatctgtaataatgtatctagtcttcttagcccaagatcccactatattttttctctcccttttagctttaccataatataagattcccctttgctgctgctgcttgtacaacgaactcacgaggtgcccatgtggagctcaaattattatgtggctggcctgaagcatgagatgagatgatgaacatagctgttgtagttgtgtcagcctggcaggtcaaccctatcctagtattattgcatatgcatttgcaaattgcaatgatcttgcacagagacatttttgtttaggtactaatcattcttgtggcacttgctctgcaaatatgtgttttttttacacatagaggtgcatatatgtgaaattaatattgatctgtcgataaaagtgcatccgaagtcataccaaatatttagaatgtcaattatacttcaaagtacataaacaattgacaagtggagcctcttgcacatttagagctcatttcatctcatctacagtagtataaatatagaatagctcatagtatagtacataaaactgtttgtagagcagaaaaaactggattgtaactgtcgagtaccgaccgtaggaaatggacctttaggggaaggaagtactaataattgagattgttttaggacagatgggttaaattagctgtttgattggtccatagggcaactggacaagagagctatgttgaagtcaaaccagatataatgctcctgttttgaaaagcatatcatgattcctaatttataaatccccagttcggtgattaatctactatttacatcatgatgcactaaactagcttcttccccctttttttttgaaaaccagattgtcactctccaaaaaaaaagtttatactgcatacctttctatcaaaacccggaccattataagaatgatggatataataggaggagctctcatatcgaaatttattaagagaagctatgctcgaacctagaccagcaagccccaccttgtggtgctaattagaaaatccccataccttcgtccagccggatcattatgcagatataattatcttactttaaaaaaaactatctaaaaaacatgttgttaatgtaactatactttccattgtacctttttttaacgtctcctaccttctttaataaaaaagaaagaatggagataatctataataattgtagaggtaataagacatttttaacgtgaagtactacacgtgagactgtgatgtatacatcttttgaaatgatacttttacagcacaatataatcatgttgtacatatttcaaaatatgtaaacttaatataatcatctattaaacttatggttgtatgtcttatgacaaaagccggagatgtaatccatttctattatctaaaaatgttgtatatatttcagaacttattcttttaagatacaatatatttcatgactggacatgaatattttttttagataatggaatccattcatcaatcatgcagaacgaacactagtacgtacactactgtaaacacacagttttctgaagtctgaaccttcattgcattactagctcaaacacacgcatggtgttctacagcagcagcatccaaatgagtagtagcatctctactttcaaaagaaatgagtagcatcagagatcagactatcattgtggagtgacttttgttcgaatatatatcgtgggctaagctgttgcttattcctctgaaactgtatgcacttttttcccagctcgagactaaggactacgtagctgtaactgttgcttgtgcagactgccaaacccttgaacaaattctgtcatcctcacgcaagtcgccattgaagaagaaaaattaataattagtacgtacatgtcactgtcttacatggccgtaatccattggttagcccggataatcatcagagggtctactctgaaatatctaaccacagtttaattcaagtttttgcacgatttgatcccctaattggccatgtttggtacagatggaccatgaggggaaggatgatgctaacgaattggaattcagacaagagctaggaggtgtgtgtgtacggttgcaggatgtggacgattcgctgagatttctgttaatcagttaatggcgtgtctggactggacaaccacctaattagggggcatgttactctaacatggcacaccaaccaatccggcatcacagcagaaaaaaagggcaagaggaaaaatggtcctccaatcctacacatatatcctgaattgctcatgcaaaacaagctgcctgcagattgctgctgctgccatttcttccatccatacttgggtcacaatagctttactgttcttatgaaagtatcgaaaggtactgctccctccgtcccatcttaagtgcagctatggctttacgtgtctaactttgatcgtccatcttatttaattttttttaaaaaaataaaaatataagtcacgagtaaagtactattcatactttatcatcccataacaataaaaatactaattataaaaatttttcaaataagacagataattaaagttgggcgtggaaacttatggttgcacttaaaataggacggagggtgtatatttttaatataaaattcaatatctctccgtactatagcaagagatttttctgtaggctgtgtttagattcaaacttcagtccttttccatcagatcaatctatcatacacaaataacttttcagtcacatcatctacaatttcaaccaaaatccaaactttgagttgagctaaacacagccgtagctaaaaatatgcagctttctcatcagttacctggaagaacctgtagtaggatggatggatggatgagaatgggaatagttctagtcgagtgatttcataggcctcattgataggcattggaaagagcgaggagggcattaaatcattgcaagatttgagggacaaaagacgagatgctcgatccaggcaacttgcatgtggaccaaaccatcagagctccaagtgggtgtgtacgttgtgacatctgcatatggacatggcctatgaagaaaatggagccattgcatttgccttgcatttgccctagttgacccgggactacagtctcatcggctgcacacattacacgcaagaggagatcaggagcatcaaatagggccggtttagttcacgaaaagaaaatttttgttgtcacatcggatgtttgaccggatgtcagaaggggttttcggacacgaatgaaaaaactaatttcataactcgtttagaaaccgcgagacgaatcttttaaacctaattaatccgttattagcaaatgttggttaccgtaacatttatagctaattatgggctaattatgctcaaaagattcgtctcatgatttttcccctaactgtgtaattagttttttaatttatctatatttaatactccatgcatgtgtacaaagattcgatgtaatgtttttgggaaaaagtttatgggaactaaatggggagtagtactactagtctgcattggtgatggtattctaaacctgattgattagtacgtgtcttggggcctcccaatcccgtgaagttgcttgtgccaatgtattcaacactgagtattagtttttcttttctttctgaacttattgttaattaggtcacgagttgatttatttgctctcacaacttctgggagagttactctcagccgctaatcggaaaacgagtcaaccccgttgaaattcaggttgagatctgctcgattctgtgatcacgatagaactaaacaaaacctggttaagaaatggagtactcctaccatatcttaaggtgttttttgtagtgtctttttgtagcctcggctcgatgattaatggtggaacgaaatcaggttcggtcagccgaggtgttctctgaaactcccgatccttaattcgttcaaaatattcaaattggatga

SEQ ID NO: 30231 - DNA, 1167 bp, Oryza sativa
acacatctccatcctagcgccgccctctatgcccgccgtgctcctcatctccatcgttgcctcctccgtgacgacatatgctgccgccaccactgtcacggaagaatccggcgagggaagacccgaaccgcggaggccgccgccgacatctccccgcccgcgaccaccatcagcgagagtggctccccgccgaggccgccgccgacatctccccttccgcggccaccgttagcgagagcggctccccgtcgaggccgccgccgatatctccccgcccacggccgacaaggaggaggagagtggctcccggcccttggcgccgccgttcttgtcgccagcttgctccggtcatcggcgtcgtccgctccggctcagccgcttgtccttcttcgctgacaaaaagagagagagagcggataaccggatagattatggatatgaagctgacatgtgggtcccactgttttaattatttttcagggatcaaattaccacgtaagcgccacgtcaataccacgtatgacgaagacctagtcaaagaagccacgtcgacgccacctcatttaaacggtttcgtaagttgggggaccagttgtacccggttttgcgaccaagggacgaaaatcggactgggcgacaaatagagggacccaatgtgaacttatcccttgtcataacgagccagctcactagctaaacgaggtcaagtcaaaaggcagtccaacaaaaatatttagaggctcagcccaactaggcaccaggtataaatgcaaacaaattaaccttagatccctatccccccgttatctcgatcccagtgttgcactctcgctcccccccatctcgcatcgagcctccgacgctcccaacgccgtctcgacctcccccatcacgcctcgtgccgccgccagcagggtcatcgccggccgttggctgccctccgcactggatttttcacattttggtccttttaaaaaacttatttcgcaaatagacccctaaaaaaacttatcccagaaatggtcctttttgggccgccagagtggctggtgccgtcgtccaacgggacggcgccagcctctctggcgccgtcctcttgccaccgtggtacacgcgaaccgacgtggcaggaggagggcgccaaaatggttggcaccgccctaggga

SEQ ID NO: 30232 - DNA, 1807 bp, Oryza sativa
tatagggcgaattcgagctcggtaccgttgtccaactggacggcgccagcctctctggcgccgtccccttgccgacgtggcggggcgatgctgaggtggctagggggagcgccgccgtccccttgccgacgtggcggggcgatgctgaggtggctagggggagcacgccagagtggctggcgcccccccccccccccgggaaattttttatttttgttttatttgtttgatatttttttcacgcttagagacacacaagaaccaaccatagaaaaaatgaactcaaatggacgtaatatgtgacctgtagaatttttcctctcctctcctctctctctccgaactagtgcagaggagagagatgtgcaacttttttatttttattttattttttgatatttttttcacacttaggaactcacaagaactaaccatataaaaaataaactcaaacggacgaaatatgtggcctgtgaaattttccaaagctctaccgaaaaacttctctcctcgaaaacacaatcttgcaagcggaatttggaggttctaatatcgccgaacccggcaaagcagggagaattggatgtaactttttctgtagatgtccgtggatatattatttgcctgattccgagtctgtatgagaaagttacgcctattttaataaatgacatattttgtccatttcggtagagctttggaaaattttacaagtcacatattttgtccgttttaagtttattttttctatggttggttcctgtattctcctaagtgtgaaaaaaatatcaaaaaataaaataaaaataaaaaaactgcatctctctgtactatttaacttatggctatcatttcatgtggttatattttgaattagagattaagtaatttcatatagtggtagagtgtattatatttaacatgctgatcaaaggttttactaaagaagttatggtctaattctgatgaaggtgtaaaataggctaagtggtatgctattttcggatatctagctaagtggtatattccgttcaagtttaatttttttttgtggctggttgtatcgtatcctaagtgcgaaaaaacatccaaaaaaataaaacaaaaataaaaaggttgcaatatagagaaacaggaatggaggcgaggggtggtgggggaggggggcggcgccagccatgctggcgctctcctccctagggcggtgcaaccattttggcgccctcctcctgccacgtcggttcgcgtgtaccacggtggcaagaggacggcgcaagagaggctggccccgtcccgttggacgacggcaccagccactctggcggcccaaaaaggaccatttctgggataagtttttttaggggtctatttgcgaaataagttttttaaaaggaccaaaatgtgaaaaatccagtgcggagggcagccaacggccggcgatgaccctgctggcggcggcacgaggcgtgatgggggaggtcgagacggcgttgggagcgtcggaggctcgatgcgagatgggggggagcgagagtgcaacactgggatcgagataacggggggatagggatctaaggttaatttgtttgcatttatacctggtgcctagttgggctgagcctctaaatatttttgttggactgccttttgacttgacctcgtttagctagtgagctggctcgttatgacaagggataagttcacattgggtccctctatttgtcgcccagtccgattttcgtcccttggtcgcaaaaccgggtacaactggtcccccaacttacgaaaccgtttaaatgaggtggcg

SEQ ID NO: 30233 - DNA, 5267 bp, Oryza sativa
aaaatattgttgcatgtttatagattttgaaattttaattttaaaattacattttgggacaaaaaatgacttaaaataaaaaaattcaactacaaagttgtagatcgcgtcgaggactacaagtttgatataaagtttgtctttattagagttcacatgaaaaagttatgaattatttttaaatataaagtctttaaaccgtcctattggatctagatgatattcaaatccaaatttagagaccggggtgacacaactgaacaagttggaggacctaaacgagtgatctgcaagtttagggaccgggatgacacagttgaacaagtttgaggacctgaacggtcgatttgtgagtttagggaccgggatgacactgcggtacaagtttagggaccggcgatggactttactcttgttaaaagcaactctaatgataaaataaatcataataaatgaaatgatgaatatataactttttaaataaaataaatggtcaaacatgatttaaaaattaactgcattaaaccgtcacgttgcttctcccgttaatccaccgcccactagcgaccaagcttattagttatcgggatactaggtagtatcgttttgcttaaaatagtatcgtatcgcagtatcaggatactatgagattttattttttttaagtttaattaatatttatattaattatgtatagctattctatataaaaatatagtaataatatatgttatgtaaatagagacatttataagaaaatacattatgtttgatatatttaactgatttttatataaactagtgcatatttatttaatttattttcaaaccatcttattttaaataacattttatatgatcgtagaatcgggatattacctaagatttcgtaaaatcatatggtaatcaatagtaggatcgggatattataaaaattaggatactaagtgggattgatattgtttcatcttggtaggaagatactacgatatatatggatcgcaatacttacaatcttgctagcgaccagtgttttagatcggagttgataggcatgaacagtgcgtcgtcgtcaaaggcgagcgccgtgacgaataatgcggcgacagtggcgacagagaagagacagtctgctccgatcatcacaagtcgagcatcgtttccccggccaaggcggcggcgacggtggaggtagaggagtgcaccggtcaagagggccagtgtacatggaggaggaggttatcagggagatcctgacacgggagaggaagccgctgccatggtcactcacggcagcggaggatgccaggcctggctgattggcgatcagcagcgcgcggcgcgcggtcagttctagcctcttttagtctccctcctctacagttcatacatatgtaaatagagaaaaactaaaggacggtattccgttctcccgacagtatagattacgatttctttctacagccagcgcccactccgtggtgttgtgtgggccctcctcgagtcacgcgcttgtcgcccatcttccaagcgtatcacatttctgctcctaacctgcctagcagagtgcatgtgcatgttcattcggccacgtatggccttgttcatttgaccagaccaaatatactttaagatagctttgtagtactaatgtgaaatcacagtaacaaactgaaaaattcagtatttctatacaattttaaaaaaggataccggatgtatgtgatacacatgatactttcacagtaccatcctaatacaccatatgtatcatcatatctcaagagtataggtaccagataataccctcgagacatcacccggtaccatcgaggtatcacctaggcactcggtgttgttaaggtatcatcgtatatccggtattcttaaggtatcactcggtactcttgaggtacttttaaggtatcatcgtatatctggtactctcgaggtatcatccggtaccatcgaggtatcatctaggccctcgatactgttacggtatcattatatatctgatacttttaaggtatcactctaaggtaccggatatatgatgataccttaacggtaccaggcccgatgatacttcgagggtacctgatatatgatgataacttgattgtatcgggtccgggtgatacctcattggtaccggtgataccttgagagtaccagataatatctattgaatgataccttgagagtgtcgaatgatagctagctcaagggtatcggataatatctcaacattactagatgtgtaccgtaaaaatatcacagagattttattgtcatcttatatattagcacaaccatctagcacataatcgtctaactaaagtacgtagctttagacggaaagaaatagttagcactttattagttaaacatgtgcactgcaaaattttaaaacaatagaaacaagtctacaatcgatgccaacagagacaggagcacgtgatatgtccaagggttggctgcgtgctgcactgagagcctgacagcgaggtgcttgtgagcatcgtgccaggatcagacacgcggggcttcgagtcatggggaatcgtacttgtgctcgtgggtgtatagagaggtataccgtcaaaacggtataccgtcctctagttgctctctttttgtgtatatgtataaaaaatatatacacaaataaaaaatttgtatacgatgtatacaaatacaaagtttgtatacatcatatataaagtttgtatatatatgtatacaaaatataccaactttatatacgtatatatacaaagtttatatatgtacatattagaaaacacatatacaaagtttgtatatgtgtatacaaactttgcatatgtatatattaaaaaacccaaaaaactgaaaaaatatatacggatagaaaaaaaccgtgcgaaaaaaaaccgcagaaaaaacagaacaaaccaaaaaaacgaacgtgcgagaaaaaaggaaaccgaaaaaaaaagaaaaccgcaccgccgcctgcgccccttctccgcgcgcgacacgtgtccagtcacgtgggagaggaggcgcgcgaccgatcgcctattagcgttctcagaggatgctgcccagttcaagagggagtaggactgatccatgcagtaccagaccagggtgccactagggagggtattgtgtaacccatatctatacccaattttaaccattcacatctaaaaaaatatctatacccaaattaagtggatattattcaatgggtaggggtaacctaatgggtaagagaagagacatgtgagtcccatatgtagaaatggaccaaaatttgtagaaaattgctcttttatataataaatcatctctgtaaatttcaagcaaaattgataagattttataatgtgaatgtgagtttaaaaattttatgtcagatttttacccattataaacgggtatgaacaaagttcttcaaatatgtaataacctccccatatccaaacttggaatgataacttttctacccataccaatttaaatgatagcttttttatctacgtagtatatcttacccaaataatatggacatgaatataaggatttttaatgaatactaggtgacagacctacgaagaacgaagcgcatagttgtgtccgcctcccaaatgactacggctgtgtttagtttctgaaattggagagaagtatatggaaagttggtagtttgaaaaaaaagttaggagtttacgtgtagaaaaattttggatgtgatgtgatgaaaaattgggagttggggaaagtttggtgtgaactaaacacaccccacaataaccccaagaggttgtcttgcatcacaactgtcttcagcgtggagtacgaggtccatggagtaccgcgctaacaagacacggggcattgagactgtgagaggtataggggattgtttagggcatgttcactttaatgctaaaaaaaaccttaccaaattttagaaatactaaatttttagtaacttgccaaaattttggcaggatttcttatatagttaccaaaatttggcagcaaactaaggacatgttcactttgatgccaaaaaaaccttaccaaattttgtcattgctaaaattttggcaaagttgccaaaattttagtaacttgccaaaattttggcaggatttcttatataattaccaaaatttggtagtaaactaaatgtagccactttttggtaactttaccaaaatttggtaaggttgaaaatggcattaaagtgaacaggccttaaatgtaaccatttttctttggcaactttaccaaaatttggtaaggttgaaaatgatatcaaagtgaacaagcccttaatcttttttttttgtttcgccgggtcagtgagaatgtgagagattgtgtcagttattttggccccgcttagttccccaaaatttttttccaaaaacttcacatcgaatctttaaacacatgcatggaacattaaatatagataaatgaaaaaactaattgcacagttagggaggaaatcgcgagacgaatcttttgagcataattagtccatgattagccataagtgctacagtaacccacatttactaatgacggattaattaggctcataagattcgtctcgcggtttccatgcaagttataaattatttttttcattcgtgtccgaaaaacattttcgatatccggtcaaacatctgatgtgatatctaaaaattttcttttcgcgaactaaatgggtctttgttcgctgggtcagttatttcatttgaattggctggacgaaaaactctagctcgttagctcgctcagctcgtctctagcttgactagactgggcttggcttgtaatgaattcctaacgagctgaggcaatgctttagttcatttgtcataaggaataagttcactttgggtccctctatttctcgcccagtccgattttcgtcccttggtcgcaaaactgggtaagataggtcccccaacttgcgaaaccatgcaagtgaggtcgctcggcggtattgtgcccggtttttgctgacgtggcgcctacgtggctcctttgattaggtctttgtctcacgtgtcattgaagtggcgcttacgtggcaattagatccgaaaaaaaaacatcaaaattcaaaataaaaaaattatacaaaatttgtgggacccacatgccagtaaaaaaaataaaaaagggacccacatgtcagcgggtcccactttttcaacctcatctacctctgtggctctgtatgcttcaacgac

SEQ ID NO: 30234 - DNA, 1157 bp, Oryza sativa
atgtcatgtttttcttggcaggtcaaacaccactgttcctgtcttcaattcatgggagagctgctgctacaagatatcttctcgatcatggttccaatcctgcgattgataaaatagtgttacctcttcatggtgctgcagtgaaaggtctctctgtctctttctcacacaccgcaaacacagagtccaacatatatttttgaacaatatatttgatacatatgcaagtgaattctttcttcacttagattcacctttattttcttctaatatttctgtcaatatttgaactattgtttgtacttaaaacttaatggataaacacagggccagtagccagatgaaaccagataaaattttcccttgtgtgcaaggttgtttcgggagaggcactccttgtgatacatatttactggtcactatattatagtcatgactctggatttttgttatttcgtgaaaaacttcgcaacaagttctcacaactattcaactaaatggcaaattgcacgtagagactaagtccttgcatcagtattttgtcactagtaagtttgttttgtagtttgttactctctccgtcccaaaataagttaatttagtacgggatatgacatatcctagtactatgaatctggacaggcacacatcccgtactaggttaacttattttgggatggagggagtacttaaaattgttgacgaatatagaattctgacaatgacacagtcttgaatgatgcttctctcttgggtgtttgcatggctctgattctcatttgattgatgatttggatgaaaaagaaacaactacatgtttctggacaacaactttagttcctatacttcgttattgttgtcctgattataagcatatttgctgttaatatgttgaattttgttcaagctaagctttttagataataaaattatgaaaacttaaaatccaatttttactgttatccaacagactccttttgaaaacataactgttccgaatcactattaataattgtttctaggctgttcctgattgagctgaaccttgttccaagtccattttcaacatatatctaccaatgaagacctctatacctatgataaacattgttttctagtttgttcttgttagtaatgtataaattattcttttgcag

SEQ ID NO: 30235 - DNA, 2074 bp, Oryza sativa
tgactctggatttctgtcattttgtggaaacaattgctacaagttctcacaactaatggcaaattgcacatagagactaactccttgcatcagtcttttgtcattagtaagtttttttttcatagtttgttactaaaaattgttgacaaatatagaattctgacaaaggcatgaagtcttgaacaatgcttctctcttgggtgattgcttggctctgattcacattttattgatgatttggatgaaaaagaaacaactaaaagtttctggacaacaacttttgttcctacacttcattattattgtcctttattataagcatatttgctgttaatatgttgaattttgctcaagccaagctttagatattaaatttatgaaaacttaaatccaaattttattgttttccaacagactgctgttgaaggaaactctgttcctgtccaggaatcactgttaacactgtttctagggtgttcctgattgagctgaaccttttgttcttattaattatttagaaattcttcttttgcaggacactgcgaaatagtagagttgtttctttcaagaggagttgatgtggatttagattctatcactgggaccccattgctgacagctgcgatgaatggccaatatagcacgatgaagattttattggagcatcacgctgatgtaagacatcaattttttttgttgctccctcatctgtgcaaaagaaatgcctgacttgttaagcttttaaggatagtatcactgatttcagaccatgacacattagaattaataattgaaataattttcctccagcacctatgccccatcttttttttaattgtcaaacacacatctttattactcaattggctcagtggaatcatgagccaccaggcaatttacttactccgggaggggatcagtccaaacaacagactgacccgggtcccatcttaccgcaatttgagctagttcataagcagaagtattacaagaccgaggagcataggtgaaatctactttggcaaattcgctgaataagctgttggtctggagcaatgcacacaactaatgttggattataattggttctctcaatgcgcaacatcctcactttctcaggagtgctataaatgcaatttatttcctgtataagcacaccatgtactgatattaattttctttttttcccttttatttaaacaatttcaagatcttgattattccactttcgcagcctaacagggttgtcaatcataatggtaccccattgattatgtccatagtttctggatcattggaatgcgtgaagctattaatcaaagtcagttacctttttcttgatgttgatattcatgtttgtaaattgtagtaggctagtagcaccttgtttattttccttttcgtttcttggtggatgacaactgagatcaaacaacaatttcatttacacaggttggtgctgatgtgaattttagagatcccaatggtgttacttgtgtgatggtcgcagcaaatcatggctctcctgtcatcatgaagtgcttactagatgctggtgctaattcaaatattccagatgaagtgagtaatattctttcctctatagcctgtgactggatgttgttgcattaggctgtagtgatcttgagagattaggataatctgctcacttattctttttatcaagtgcgcaccaatggataagtctgcatcagaagaagacaaagacatatggctttagtgaagcatacttcatagtatgtgacacatgatggaaccattgcttccatgctgctttataggaatgcaattgttgagtgctcacattccactccaaagggtggatataagttttgattttcactactgtctgagcctgtttggcgatgcttaatacagggaatgatgagaaaatactaaggtttacggtttaccaatgtctgagtggagaaatatttaggtcccctataactgatcgaacaaactaatgtcctattctggatagccctttggctgggtaccctttgaaccttcatcctatcctgttgtgacaaatatcagtatgatataaaaa

SEQ ID NO: 30236 - DNA, 3472 bp, Oryza sativa
ctgaaatttgagctgtaaagttcaaaaatgcagttagcagacgaattgaacccgtcaccaagagaatgaatttattccagtcaagatgttctgtttcttttttccaacttcctatggcaaataagaacagcttcagttgttaataaaaattactattcttttcataaaaaaatggggtttggttgccaatccattagtcaaataaattagaagagctcacgagttcgtggatccgagtgcttatgacattaaaatcatgccttctcaggtccattttgttaaattgtttagagacctccaaaaatgtagtattgcaaatcaacttgcagtagacaaatggtgacatacatatcttcaaaaaattgagttatataggggaaatacctctaggtggggtggggtggtggagaggagacaccaggttcaacagttcaaatcatattgtccacaataggcctaattaaaaaatcacttcatttgtcaaataaaagggaaatgatggaaaatttatgattattacggagtagattgagtagatatgattagagtgatattacaaccatatacgaataaaattgcgtttttcagaataaaacctttctgagataacttgcagtagtggagacagtggacatgctgaaaaatgttcctttcatgtcctgccgaaaaagcctaaaaaccgtgccaaccttgggtttgttagagggggccacaaacgaaaaagcaagaggttgcatatataggagcaacctaacacaatctacaaatgccaaaatcttcaaactaaacctaattacgatccaaattaggttttggccggtcattatagctagccgaggttaggaagatgcatacctaaaacaagtgtctgatagggaagaaccaacctaacatacaatataccactagttgcaggtttcatgcaaaattattacaaatcaagtagagaccccaatccctcccaaaaacttaggagacaagccatttctgctgttaaattcagaaagataccttcagatattcagatgtagaagaaaagaaaaaaaatgtagaccaagttatgtaggatacttgcaaagatggttaatgtggggttcatgttacaatggctttgagagtgagagctcatggtagtgagcaatttggaggcgccggcatagtgtcactgtgctttataaatcaattgccatggtgatcaggcaggacatctaatcagattagacgtgacgtccatatggtaggaaagggagaggaggaagtttaattattgggcgacaagaggatgtctttgagcttaattagtataattaaggtatacttcataagagatgcatcgtcaatacgatcactggatgtgttattgtccctagtgcagcagctgtaatcctcttgaagccgcaaccctagattataatgcatcttgttgatcagttagcaacaggttgtgattactaaactaattgtaatttgaaaggtttcaaaggctccaaaaaggcatcttttaatgggggagaggaatttgaaggatctattttgttctggcattaagcaacgagtagtagtttagtggttgcacgagttagctggatcaactgtgcaagtgtgcatagattaatcagatcgatctggcacttttgcagttttgctccatgcatgctgattcattcacatgtcacatgtagatacaaatgaatagtactctatagcagatacaaaatgaatagttagtctattgcagatgcagctggtgcttcaagaaagaatctaaagataggagaagaacagaattaactactagtaatgctattgctttgcttatggcttacctaattctcattactggttcagaaactgtgggaaaggccaacagaaatgcctctgcatctgctccaccatgcttatacttatcttcctgcagtggcatgtacttctgttagtattaactattaccgattactaaccactgcattcagaatggtctcaagcttatactaattagtattcagtataacaggtcagttctaacagttactgcagcttataatatacggagtacatggacaagatgatggacgaggatgcctttttgtacttggaccatgccaaatgacttgtcaagataatgccagcaaatcagagtacaacaatgatatgctacaaaaatgcaagaaatatgggttaacacaactgagaagacacaatcgctgttgctgtcaggatcataactcactgacgaagggtagtacaaagttgccgttccagtacaaatatgatcaacgactcaaaaagagatggatgcaaactataatataatgttcaggcacttgatatatattaaaacctaatcatgataaggactagcttacagacacaagcaactaaacctacaatttagaagtataaatcacctggaggtaagatcataacttctgactaatacttacgatgtgctgacaccacctcagctccttaaagtcattcatgtaaactagtcgtccaagttccaattttcaacttctgtaaaaattagttccaggtaagagcacaagtcatgttaaacagttaaaacatagctccaaattccaaaaatatgaaagcagcagtcacgctgaatgtaccactacaatttgtagtatgattagaaacattcaaggacatgtacgtctcttgtctaacagaaaattcgaacaagtcgcatacgtacgacgcagatatataaaccaaacctactccaaaaattttggacaaataaattctgacagcaacagatacaccatcaccagctactctgatgcatgtatatgtactcatagcagtataggcttatatcatggctagaccgaaaagataacaatctttaacttcttaacatcgcattaggacaaatgactgaagcttaattagcatgcgatgcatgtactagtgcccattaaatcggttgaggagaaacgccatcagcaacacctacttcatggaagaaagaagctaaactcacttttctctgcatcaccggggttaactgtgttctgcatgtcacctgatgtggatgcatgcacatctgacggtgaggcgacgccgcagagcagcgaacaccggcaccgccaatgctgtcacgtcccctgtaaaataatgaagcggatggatgcatcaggggaagacgtgacgaccatgattagacgagtaagagcccctttgttaatagcagttgctgcagttgagttgatcttaattgcgtgtttcagctgcaacacaagagatgcacactgtcagccacaaaatggtgctggatcaaaatgagctggattaaggagaggaattacgacaagaaactcaagaaaaagtttttgtctgataaagaacggagatgcatgatcatgcttaggtttatttcattatccaagaaaaagttcaggcttaggttgtctagatttatggagaagcacgaacaagaagatgcttggcagaaggaata

SEQ ID NO: 30237 - DNA, 2193 bp, Oryza sativa
gggccttttttttgtctgccgccgtgtgatggataaatgatttaagttatttatatatattattatacggctggtcagtgttggagaaatttattacttctttccaaaacaaattaaccaaatataaaatgtttaaattcataatattatgatgtatcgcatctcatatttaattggtttattgtaagatagagggaatactattaggtacgcttgatcatgtggtgtgtgccttgcattcatatgaatactactctcttcgtcccttaatataagagattttgacattttagttacactgtttgactacgtcttatttaaaaaatttgtgcaaatataaaaagcgaaaagttgtgcttaaagtactttggataataaaataagtcacaaataaattaaataataattccaaaatttttttgaataggacaaatggtcaaacagtgtaagcaaaatatcaaaatcccttatattaagggacggagagaatagtattcatatcaaatggaccaaatacaggcagctgatagatatagggatatgctacacaaagacaagctcaatgtttgtgtggtgtgatgtaatcttaggagtgagcccataaatagtgggataatgttaaagcaattcgcacaatgctattgctatggctaggatttaagtaaccataagatagggccacatgagatagaaaaaaaaatacttcagctcttgtttatgaggtgaatgagagagataaaaatattttaattttgtttgtgatagaccttaagtataatgtgcaccataaactaatgctacttaccacaatatatgtgacttattttataagtgtaattattattttaagattatatttttcataaattattattgttgtgctaacgccatatcgatcaaaaaaagtgagcagaggggaatatgcatgatatatagcatatcacgggtatgattttgactgctagctgctgctgtatggtactacctccgtcccatataaattataattctagatggttgcatatattaaggattgagaaaaaaaactataatcgatgctccttattaaatgttctatatatagataaaagtggaggggtagttgagggtaaaatagagataaatttgaatgagaagtgattaatgagaccattaatactatattgtgataattattttgggacaaatttaaatcctagaaatataactattataggacagatagtaactagcactctttttaaaactaattaatatgggtgttaaatgctgcgtgcatcttggaatgcgttatatataggagtatactactagtagcttgtgtgcctataaatataatcgtatgtcatatttaaccatattaattgtgatatatattatcacgattgcatgcatggtcaatataattcttttatttattaattaatgtaagagtttctggcatttagagtaaacgcgatgttacctttattttactatgtttataatatatatagtccagtatatatatgtgatacattggttgacaaacttagtattacttaaaaaaagatgacatcaatagcagtttatttcacgtacggtagatcaatgcggcgtacgttgctagacaaaactagtgcgtaaaaagtttcgagcacacgcagtcataataatgcagtaatgcagatgaccaaggtgaatggggtagtgcatgcatatatacacttggtcaactctgtcgtatacagtagtagacatgtaaagtactaaactttattcgggctcgtcatcgatatatcgtcatactaacatatgaactacgaatctgaatagcctgtacagattcataggtctagtgtatcacatccttacctaggtgtaagggtgcaagcgggcaggcttgcaaacccgcttatataccttttacctaggtgcacttattttgaggtgaaccatccattttataataatataattattgtatttttttattataaacccaaaaggttacaattgcattggccgaaatgtcctaatccattataatttaatatgattatttaatagttgataaggatgaattaatttcaaaaagcgaatattcaaggtttggatgagcttcacacttcaaaatttgggcagaccagtccaaacataattttttttttactgacaaggggactacatcctcccatctataagaaaagacgc

SEQ ID NO: 30238 - DNA, 2133 bp, Oryza sativa
gagccccctccccctcccccttccccctccccttcccccctcactttctcctcatggcggcgacgatgaggtgtccccgtcccacggtcttccccgtcttcggcggctccccgccgccggatccgccacctaatcccacccttgctttacccccaccgccaacaccggcccactgccctcctccatccccgcggcttcggcgccgccgccgcctcctcgccgcccgccggagtccaccgcccacggccggtcctccgccgctcgccggagtccacagcccaccgccggtcctctgccgcccacggccatccctctaagccccgaggaaaccccctcttccccctcccccatcccccctcctaccctcactccaaaccctaaccctctggagtcggggtgtcgctggcgccggagaagaaggggagcctgtcggagttggagagaagccgatgcacgaatcttggcatggatccaatggtctaaaatctgtaagatttcatccccaaatttcatttgaatgccatatagcaatcccgataacgaaaatctttgcgtaaatgtgttggagtaggtgacaccgtgacaacagctgagcggtggtgctgcttgggggtggcgactatagttagccaaacaagcggcacggcccaggcatggcatggcccgaccaacacaccgagccatgccgtgccggcccatgggctgcaccaccggcccaagcacggcccaccagcagtcgggctatgccaggtcggcccgaaggcacgggtggcccatcgtgccttttttaaaataattctatttttttctcccttctctttgggctgtgacatatatatatatatagctaaaataagtctattttccctcccttctctttgggctgacatatatatagcaaaaataagtctattttacatccctattctttggaccgtggcatataatatgtctatttttgctccctatgctttgtgtgttgggcttggcctgtcgacccatcgtgccgtgctggcccaacgtgccggtgggggggggccaggcatggcctagtggccaggcagggccggcatgggcccgacccccgtcgggccgggccatgcttgggtcgggccaaaatatcgtgccatggaccgggccgtcgggcttcgagccttatggctatctatagtggcgacggtcgcatggcgcggcgcggtaccccggtgtagacgacggtggcaaggaagcagcggggaggatgagatgaggagagtggaaacatgggacggaggacgggatgccgcaccggcgtggcctgagtcgttgaagtggcgatggactcgagcaggcagagggtggcggccagatctgggacatggatagggttcctagtgtatgtgacctaaggttttcacgaaacataggctatgtttagttccacgccaaaatggaagtttgactaaaattggaagtttgaagaaaaaagttgaagtttatgtgtgtaggaaagttttgatgtgatggaaaagttgaaagtttgaagaaaaagttgggaactaaactcggccaatgttacggaaaagttaaaagtttgtgtgtgtaggaaagttcgatgtgacggaaaagttttttcttcaaactttcaactttttcgtcacatcgttccaatttcttcaggcttccaatattagcgtggatctaagggtgtgtttagttcacgccaaatttggaagtttcgttgaaattggaacgatgtgatggaaaagttggaagtttacgtgtgtaggaaagttttgatgtgatggaaaagttggaggtttgaagaaaaattttggaactaaagtcggcctaaacacagccatggtctattagttttgatcctgttttaaaacttattagtttaccttagcttttatttagttccacgccaaaattgaaagtttgaagaaattagaacgatgtgatggaaaagttagaagtttatgtgtgtaggaaagttcgatgtaacggaaaagttagaagtttgaagaaaaaagttaaaatagtttggaagtaaactcggcccttgtttagattcaaactttggccgagtttagttctaaactttttcttcaaacttccaacttttccatcacatcaaaactttcctac

SEQ ID NO: 30239 - DNA, 838 bp, Oryza sativa
ctgcgccccaatgggctcatctaggcatgttcgtcttaataggtacatttatttcactaaaaaaatcttcagagttgatttgatggaaaaatatatatttcccccagctttggcgtattcagaatcaagtaaacaactaaaattttgtaccactaagaccaacgattccaaatcttccgttagtaatcatatgcaatcattttttattgttgataccaacaaaaaaatatttgcctacatggctgattctgctagcctgggcatccaaactggtttctgcttcttagccaacttgatccaaaaaagcatttgcctcaagaaacaaattatatccaaaacatttctaccatcaagtttcatctaaaacagaggaataattagactttgtaccaaagcaccggctagtacattactactatcatctgctagttctagatttggattcaacacaagaaaaaaataacctctaaggtggctatctgacctgaccaattcacacggaagacgacaactaattatctatcctaacaaaaaggaaaatccagcaaaacagaaaataaccccaagatttgcagaatgcaagcaaaaaaacctctctattctcacccaaaaaaaaagaaacatccgcaagcaaaagaaacggccacatctggttgctgctctccatgacacaaagctctccaaaaatctcgaatttttctcgctctgaaccaaacagaaaaaaaatgcagacgttttccccaactaattcaccaaccactaactcacaacaaaacagaattaactttcctctaaatctacgagccacgacttcagctcaagcactcaccaaacaaaa

SEQ ID NO: 30240 - DNA, 931 bp, Oryza sativa
ttgttgaacttaatttaggttttctatatattcattcttaacttttggatagtaagaaattaattctaaaagtattaattaccctaaaaaattactccatccattcttaaataaagcatttctttatactccctcattccatttatatatgacattggttagtaaaaatttaaactaaccaaagtttcatataaatggaagaagggagtatgttctttaacaaagattaaggataaggaaaaaaatatttcatctcaatcacttcatttgccaaatattgaatggctatgataattccatcgtaagcatatgattgtcgcttaaaatgcttagtttcctgtggattgtaatcggtgtcatagaaacacggaggggttatgtgctattttctttatctatactccttaattagtggtggtggtaaatggtgaatctaccattatttgtactaccaactcgatacatttttggggataaagaataatgtggggtctagtataagggcttacacgtcaatcaaccttatcaccaactctttatttttttctttaagaaggaaaaaggattgtgggggctagtgggcccagagagatcacatttaagtaacaaatatatatatatatataaactaaaagataatatttatacaaattaatggtactgacgggttaatgatatttttttaataaaatcctgttacatatggttgtaattgtacaggtaatattatatatatatatatatatatatatatatatatatatatatatatatatatatatatatatatatatatatataaatggttgcatatgtaataccttcaaagaatcatgtctactatctttacattaaatgtaattctttatattttaactttatgctaaccgtacatattggcgtctctacatatataaccatccatgcatgc

SEQ ID NO: 30241 - DNA, 1498 bp, Oryza sativa
tctcccaaacaccctctatataggactagctctctctagaaaactagagtaaactagtacttcctccgtttcatattataaaatttttagtattatctatattcgtatagatactaatgtgtatatggcaatgaaaaagtctaataactaaaacggaggtagtaccatgtttgctgcgcatccatctgacttcgatagtgtccctgtggctagagaaaatccttttctgcacctacaaggggcgcattggagatacgtatcctatacgccggggttcatcaggtcttcgtctcctggggaaaaaaatatttactacggtatggatttttttttttacaaccaaagggattagaatagtacgcgtcaagattgactgagttggattttgaactttcctgggaatcgaggtggatattttgaacgggatcgaacgggagagcatattgttgttccgtccacagatactgtacgtatatactggtatcgccaggcacgtcatagaaatttctgcaagcgtatatatttggatgtggatattactgaaagcgccaaaatccagagtttgaaatttactcggaccaacttatttcctctatataccgtaggttcaagtgtaatattgaggggccttagtgtgaccatgtatgctcagtttataatcgacatctctctatatctttaaaaaagctattctaaatgaggatttaacactagctataacaacgaagctgtaatatcctacgtgatgttaaatccctacctagctcggttatttttttagagagaggatagtgttagcatgccaggcctggtcgatagtgatagcattggtttttaagatttgtctgaattgaagcttaaattttgtcgtttgtggatgttcgggagttcatgctgtggtattttgtgccgcacaacctattaatttcgctgcagcaaccgataaaccgcattgttggtttgtagtaacgccactgttggagccgaagctcctctagcagggtgaagtggcagcccctttgaggtattcagccagggagcgaatgaatagaaatgaggctattggcgtcacgcaaatgaacaagggttgcaaaagatgatggtttagacaatgttttttttggaacagatcaacttgcattgattcggcttttgggagagaaagccgaaaggattacaggaacaaagtcttacacaaaacgaaaagaaacacaacacattacattactgctgggtatatccagctttccagatacagcacactgcaggaacaacacccaaatagaacccttttggactggggacaaactagatacaagcaaaacaacttagatagatgatggtagatgttgtggttttagttgaaccagtttccctagcccagcttcatgccaccctcccaagattactcttttttccttttttaacagcacgctccacttttgagagaaagacagagctttgtaggccacctgcaagggtgatttcaccaagatat

SEQ ID NO: 30242 - DNA, 2300 bp, Oryza sativa
ggcaatgccaggcggtcagccacccgtcctaacaacagctgcagattgttctcatcagggggaatgcacttggcccatgtgaacgccacgccccctacctcatacgcctgcccctctgccgggcccacccctcgaagccccgtaccacagcgacacctgctagctttctccatgcttcgcttcctacaacagtagaggcagcctgcaagcctgatgccctgatcagcgatcacacaccacgcgtggtcgcgtgctgcgggttcctgtatactactacagtaccatccttactactcctatacaggtaatctgaaatagtgctaagcagcttgccgaagctcaaacacaaacctatactgtagctgacacattggacgtttcacatttttatctgcaatgaagaatgtactacggcagtgtttagttcacaccaaaattaaaagtttggttgaaattgaaacgatgtgacggaaaagttagaagtttgtgtgtaggaaagttttgatgtgatagaaaagttagaagtttgaagaaaaactttggaataaacacgatgtacgtactccagtagatgagatacgggcagttggtcgcgtttcacaacacctcctgtacggagtggtggtgatccaggtatgcatggaattgtgcatctactcctctttacaaaacaaattcaccaagaatccagccttcagtcgtgttggtttatttttagaataaagagagcacctcctatatacatgtcatctatgtactggataatgttacgtcacgcacgtcacgctataaagtggaagaattttgaagggaagaagtggtaacatggtgtggtgaagtgcaagaccgtatttttctttattggtatacactctttgtccaaaataaatttttctatgtccagattcatgtataaagattatcttattggggatgaagggtgtgctagttatgggctctcaaaaatctgaaaagtatcatttctttctctcttttttaccactttaaacaatggcatactccatctattaaaaaaatagacttacaagacgtagatcggtgcatttcctatagttatggtggactaatccgttagaggacctaacaaaggctacacgaaagttagaaaggcaatggctaaaaataaggttgtagctatataacactaaaaaatttcaacataaatattttagttacattataactaatgcataactagcatgtaaaaatatcaaaccaaagtgctaactcagttgataaggcacacatttagctgtagctctgatcgtaggttcgattcctcctactatcgcattatagaatttgtttcctactcccttatctgtacaaattttgaaatgaatccaatgatttggagccaaatttgacagtgtcaaaaccttactgtccacgttacctacccaaaaccacgcgtcaaaaggaaggagcaggagcggagagaaggctctatacgctccgccaacatgatcgacatgcaagtttagggctgatagtgggctccgccaactgtcgtgtgacaagaacaagcataccaacccctgtgggttaggttccacttatatatgcatgcatgggcaccgtgtatctctttacggttaaaaaaggagggtcaataccactagaaaagaaggaagagctagtcttagaacatctctatagtctccacacataacaaatcggctttagtgcctaagaacaaaagtacaccaatatcctatatacattttagcaaggaatctagacaagaatatataagtagagtgttacactttccagtggcatgttcagtaaatgggttatgaaattggaaagtggagcacctgatgtatgcctggaggtactgagaaggaaatatttgaggaattgaaattttttcacaagaaatgggaatggtggctctcaattttggatgggtttgctgaaatgcaaagggtggctttccaggctggtcacaaaggaagtgcacagtgggagagatgtgagtttttggaaggatgtttggtgtgataatgtacctctgaaagtcaaatttcctgatctctttgaaattagtcatgatcaaaatgctactgtcaaggatacggtggtaggcagagaatggagcttggagtttagaagaaatttagatgaacaaagggttagagaggttagggagcttgtagagttaattggggaagctcaactaggaactgagaatgacaaggtctgttggcctcatactgaaaaaggggtgttcaccacaaaatcaatgtatagaattttaacttttgggggtatta

SEQ ID NO: 30243 - DNA, 2876 bp, Oryza sativa
tgagggattcaattcaaactgcagcaggaggaggaggcgtggttggtggtacgtacccagggggagaggaggaggcgattgcgagacgaactcgacgacggcgacgacgaggcggagcagcagcagcgaatcgaatggcgatctggagggaatccctccggtggatgcggttgtgatttggttggttggttggagcggaagcctcgccgtcgccgtcgccgtcgtcctcctccggccggcgtgcgtcgccgacgagaggcccctctccgctgctgcttcgtctcgtgtggtggtgtatgcggcgctagatcttttactactactagtactagtagtggcctgcctgccccctgcccgcgacgccgctcgatcacttgacttattaacaacaacaaaaccaatcaacttatactaacaaacttgagtagtattagtactagtacggagtatattaccttttcttttttatctttcctttttgcgattcctatagtattcttcttttccgttgatgacgatggtcgatacgaactaatttctctctctctctctctgccttttttttttcaaaatgcccttcttttctcttaataacaagtttaatattatacctaactagactttaaatcatctatattcaatttaatagccggttcatacaatataaacatatactacataatttataactggttcaacctgtcatacatacatgtatcttagagtccgtattgcaactagctacaaatctatggcacgttgtttttctctctcctattttatcttctcgaaatatatttatatctagcttataatctgctattgtacttgctacggaaaacaaagtgcgcgattatagtgagattaattaagtattagctaaaaacttaaaaaatggattaatataattttttaaagtaactttcatatataaaacttttataaaaaaatataccgtttagcggtttgaaaaacgtgccgcgaaaaatgaaggaagtgagttgagaaagaggggaaaagaacatagcttgatggttttcactgtctctagtcccgatctaccgtctccgtctaaaatataagaatcgagtactatatgtaatatatattttaaatatgttcagatagtaaatatattttactagaaaatatccgtagtatacttgtggcggttaatcaacgtatctgtctgcacaagttaattacatccttccttttaattctctccattttaattgacaggcactgccatcgcttcagttgaggtcaacgtactcggcacaaatcacaggtcaaacctttaattaattaccctctcttacgtgcaccaatcatgtcctccgcatcattatcgatctattagcacgcaacacaccacagtactcgtagtagtagtgcttcatcattaggttaatttatttactcctgcatcgttagattagatctcgggtgaagtacgttattaagtagtactaattacttatctgcggatcgattagattacagctatctagtgctggtccagtgatccagtctcgattgcgagcaacatgaacgctttaattccacaatccacacttacatccatcttgcatgtaaatatacaaccgcaacttgcacaacagaagcaataaccttaagatctactgtacgtactatacctctgttttcaaatatacttcaaacgtgtgtttacatttacaactttacaactgattattcttttatatggtagagagtgtgcgcgtgttttatacgagcatctgcgtttataatttgttttaaaaaattaacaacatcatatactactttactttttttaagtatatgatgttattgacattttaataaatatttgatcattcatattatttaattttttatacataaataaattttaagtcacactaaaagaatatttgatgatgaattaaatcatgataattaaatgataattatatattttttaataagataaatgctcaaatatatcttgaaaaaatcaacagcgttatatattaaaaaattaaaaaaaacagatagagtatttatttagggggtaacatagaggggatatttacattcgtttgagcaagtgacagtaaagaaacaaaaagaaggaacaaaccaacaaggtcattttcgataggctacgcaggccggccggccggccgaaacaaatgggtcacaattaagcacgaatttaattggggaaacgccatcatgtcattcactggatcgaatctgcaagatttaattaagccgtactccgttccgttccaatccatacaacgatttttttggttgctcggttcggtcggttgttcatgtgtcccaatatctcctctccttttcttcttttttttcccttcttcttttaacgatgcagtagtgtactgcccacatcacaaattataaatgttttgacgtctctgcctcaatatacttgtccattgacaaatttggaagtatgtttagttagttcaacattcccgttccatacctccacttgcagtattttatatacgtcatttcttttctatatatacatgtcatttcatatatagacatctgtactccttattaggaggttatgttggtgacagtgaatctaataccctatttactctatgaacttcataatagaaaacaatcaaatctaaataaatagtcatatataaaatcatatttagatgaatatcccctaaattaaaaatatacataacgcattttatgaacaaaagtatattgctatttattttaggtaatattattacattatattttctttttttgagtaaagtatgggtatttagctagtacgtgaaaaacaaggaaaaaaaactggggttttttaaggcagaagtgagtccgat

SEQ ID NO: 30244 - DNA, 7624 bp, Oryza sativa
ggtttagtttaattaggtggttaattacagcagctagcacaggtgcatgctattgttagaaggtgtaaataggcagtataggagatggagcacaagaagaaaggttaactggtggccaaggaacgggcacgccgagagtgtgtgttaaaaggctcccttttaattacttgtggacgattttgatgcctggctagctccctctactagctgcttttaacttcgtgtgccaaatatgtttttacatcattattagacacccttaatttagccccttgcttgttttccaaatgcttaattacttaccctcttgaattaacccatcaaagtgtatgtgtgtgtgcgtgagtgaggatgaagctgtgcctactcaactattatactagtatctatagttagcatagctgttgttttctttttggtgatgaattcaagtaatatactccctttgtcggcttcatttctagtatttttcagataaattagtaatgatgagaaataactatggtgtctcttattcatactcctggttgtatttactaattaagctccaattaaatgccttagtctgattggtttgaaccctttgaaatctaagtttttttatgggatgaattttaagcaccagaaattaagtctttctagaacggagagagtagacagaatagatagagggagctaggtgacaacatgtttgccactactaatatatgtggacatggacaagagattgaaaaggatccaagtaggagtggcgagtgagtaatttgtgcgtggtaacaggtaggccaagaaagaaaagaaaccatgcaagcaagcccaatattccctgggggatgatgtgcatgtttggatgtgtgattcctggggtgatagtgtcacactgcaaggctgtcttgaaccacaggagaaaaaatactctgctttttgatctgcttctcatgacctatatatggttctttctatttctttgcttgttttaataattagtatgcctttaaatttagtaataaaaggtatatgtgaaagtccaccaaattgtttgatggttcttaataattgagatctttatttacatggagagtagtctttggcagcaattccactgatgatgaagcgctaatagacatgaacagctagttttgcttggcagttggcaactaaaattaggaggtagtgaggtagtggtggtgcagctgcagctgtctctactctccattggccacacaaaaatacctgcaatttgttgtcacttgtcaagtactcacttgcatgtatccccacatacacacagtactttgatttttcttcctttttttttcttgtgaacaaacacaattgttcacctgttctttgattgcattgcattggctaataataatagtcacttgctttttaagctaaaccaaaagctagcaaaattgacatgttctgatgcaaatggcacagctacataactagctaattaattcgattgttcttgatctctctaatctgataccctaagtagttagtggtcacaccagttttgtatgtgattttttttttcatttcttagttcactggatctcactagcttagatttggtttgggcgatactaatagttgctgctgctgtggctgcactgtctcaatcaagtaggtcgtcctcaaatttaattgccacaccctaaccactgttcccgtacaatgtatttgtacacgatgcgcgtctacttatcgcctaagaaccatacaactttcatacatacagtaaacactgacgtggcttagctgataactcaattaactacaccaaagtaattgagtagttatacaatgcatatatctaaatagcaaaccttaatttcatccaattttaatccttcaagttgaagaagctagtagtgaagacgatctttgtgttattgtgtgagatataagtcaacgagtgatcgagggaggaacgggtggtgactggttagtagctgattaatagatgattcttgacgtgatgaattgttgtttgttgtgtggggcaacaaggaacttcattagaaaaaagaaacagagtttaattagtttggagaccaatgccaattggatatgatgctgtggtgtggtgggggcaagcaaggcatcagttggaagctggtctagcttagctagatatagcttcctttctctctctaacacacttcctctctctctggatctctcaacactacacatgcatctacacttgctggtcactcacttgttctgcaatccaaactaccgaggaaattaatgatcagatcagtggctgctacctgcctttgttttctctttgccatacttaagcagtgcagaaaagataagtgcccttgagcttgccatgatcctgcccatgattggcaattagccaagttgtccctcatgtggagaaccctagctttaaggatctaattagtgcatgcaacgctagttggacaactagtacccctgaacgtgatcacttctgttaagctgaccattatttatccaaaagattaacaaatctttgtatacacacggcaagccacctatccttctcttaaaaaaaaacaaaaacttctgagagcagctcaaatgtgctgagagctgatgtcattgcctgatcaagttagcaaggtaagttaattagagagtgcatgacactcctctggataataaagctttaagcaagatttgttactaaaaccttgtgtgcttttgccctggccaaagtgcttagtagcatatttcaagtcactatatagggatctgtaccagcagtgattcgggcacacaccaatgagactgagttggggtgaattaaggaatctgcctgcctgcacagaccaaaaagaacacaaataataagtgaacagaataaaatccaggaaacacacagtggattggaatatactagaagtgatgaaatgaaatatgtggtgcagttgatggacacccaccaagcacacataccataccagccatggatcatccagctgcctgcatatattgttaagtagtagtaggatggagatgagctgcctgactgacctggctcaagtggatgatgagtgaagcagtagtgggacactcgacagtagcagcagcaccatccacaatccatgtataattagcagggggatcactggctgcaagtgactgggccaccactcatcacgtcatactcatgctactagacaagagagatccagtgagaccaccagtataaacgacgagatgatcacaaaaattaaggactgttcagatgattatcatgatggacggaaaaaagaagaagagagaaaagaggagaagaagtgtgacaataaatggagagacgagattcactccacatgacaacagctccccgaaggatcccaagcagaagcagcagctgtatcgtgctgtctgtcatgcttggagaaccgttaatcacgatgcatcatcaggttcaggcctcactgacagagtgacagacatgtcttctccaaacaaacctgcaggccctcaagtcaattactggtagttggtgttactactaagacgtactttgtggatacacatggcaattgacacttgtgcagggtagcaaggaggacataaccacacttccaacttccaagctaggatgggaataattcaatatgtggcaggatgattcttcagacttgttgagaagccattgatccataatatgcccctgctgatggaattgtatgattgccccaagttaaattagtggcgtggagtgaagggagagtcaatgcttcatcacataatagattgctgtggctgccaccttaagagtgtggcaagtgttggctttgctcatgggcaaccactcctcacacactgattggtgggcaaaccttattccgatgccatgtgctagaatcatcttttgttccgtctcaagtcatgcctcctctttgcttcctggctgatgactgcatgttgctaattaaactcaacctcacacatgtacattttctaatgatgtggtacaagtatgcaccgcccaatgctccaagaaacttaaccacctactgctgctgacggacacaagcttaattgcttcctacagatgcttctccactggtgcattaacttaagtagttaactaaaagttctccagctccatcagtttgcatcttcatccaacgaaatggacgtcgccacggtaacaaccaacaagtattgggcaaaagttaattctcactgtcctgtgagagatagggaaaagaggaaaactgagaatgagcaaagagaataacaaaatactccaatgccttgtactagctactagctctttggaaaaaaaaaatccaatgccttaataggccattggtttctgaaaatagttagtattattttggtttatttccactgttgctattaaaaatcatttataatactgtcgtttgattagtcaacattaatgtaaagctaaaaaaagctaatggccaaagctatatttcaaagaccacgaaaaatcgagaacatcaaatagaaaaaatagggagggagtaatagctaagtattatcttacataaagcaaggagaccggaaccttcaggttgctcacagccagtagtaattctccgttcagtacaactcttatccaacagtataggaaaatagattccacgaaaaagaaatgtgggtccctgataatgacttgtaatgaatgtcagataatatccgaaataaccagaccttagataatataatccctaacctttctttgccattctttttggaataataagtctggagtctgggatttggttgaatcgaccatataataataacacagtggtgcatatacagctttagcgaagataaaaaatgacctgatcccaaaagtgcatccacagattctccaagattcacacagcagtatcttatgatggagatcaaattcagattatcaccagagttaacatgcttgccgaacttgcaaggttatagttagttcggtgaccggccaaactataatgcgtctctggcaagttggccatcactcactctctttgtagctcactgctcagctgatgaacactttttgctcgcaccactgataagtaatgaagacatcaccttcatggccaatactttctgctgcaacccaagtgatgcttccaaaattagcaactttggtagctacagagtccctgtttatcgcacgcttatcagctatcacattatgctcacatttacaaatctgccactgagagtatgtactgccgtactggcacttagtttgctagctgcaaaatgcaaattgaagaaaaaactgtatctgtgaattttctttctggtaagagagtcgataccatcatgacccacccctctaagaactaacatatcagaaatgcatccctggtttcaattcaacagaaggtcatcttctaggtgcacagttgccgttctagaccattctattgccctgcaaccttttcactcatctactcatagctatcaacatatatactataaagacatcggtgtcttgaggcagaaattagaatatccacaaaggatatctaaccattttgctagccacaaaaaacacacggtgtcacatgtccacacataatcagctgagcgactagtgtcactacagagtgaagtggctctctctcctctcactccctgccactagggagctgataagtggcaaaagtagtaagtggtactagtagcagtagcaggtgtggcaccagagcagcaggagtacacgctgagggtagcaagggacaacaacaggtagcaccaatccaagcagtagtggctgtagtgaaatttggacactgtacgagcatcagcttgtggaagcgaaggaaagaaagccttttttcaggagaggctgggattgaggcatatgaatggtaccgtattcggtgtgacactagaaccagagcgttccctgagtgcgacgctgcaaccaatctcctgcactcactcaagcaacttttttgcaaggccagctgatctgcttggtccctgtgttgtgtgcatgtgaagtgtcaaagtgtgaatcagtggaatccatcttgtgcactaggtcatcacttcacttcacttcacttaacttgtggcctcataccggtctcgtgaccaccaccatccctctcctttttacaaccatccttctgcttaatttacacctgtattgtaggtaaaatcatattgtatttatttcatctctcaaagagatgatgtatttatttcaagtaagtaaacaagaaagaaggaaatatatgtgtgagcttcctaatttctacataatacgcaagcctcacccactataagccgttgcttgtctataaaaatatataaacggataagtctgggactgggatggtttggtctagtctgcctacttgtgtagtagaggattgtgctcttcaacgcaacttgctgtaccatcaactttagatatatgcctttggcttgggatggatgtgtcgtgttgagttgagttgagtggtgctgctcctctcgtcaatctgtggccgctctcaccttggcttactactactttatagtcatttcatatttttcatcctgggtactgcaggtgttttttcagaatcaatagcctctaatctgcacaacaagtttcatatactcctctgtgaatatgtcaaatgacgtctaaggtgctttcagcatctttggtcaaaatcctagggtgaagaaaggggtaatcagaagtattaattgatcaccatcttttcttccccccatttttaagataagatcacaagtccaatcatactagtagtatacgtttttgtgtgtgtgtgtgtgtgtgagagagagagagagagggagagagagagcataacgaaacttggatgcatgggcctcaaagggggaaaagagcaggcccagatttaaaagccactgtcaagaactaagcccagctcagctcgtcgatcagaagctttacaacctagaagcttttctacaggcaatcagcgatctgcatgtacggatataccctagaactagtcaactagaatgggagggaccaaggggttttgtggttcacaagtcagttactcttatctggttttaacaattatttgtgtggggtctatgtagtctgggcacaattggcattttcgcatgggcttcatctggcaagataaagaccaggtggaaacagcagagtgaacaaatattaacccacataaaaatctaaatgtcatcgaatagagcatgctgtggatcaaacatggccaaatacatggaaagctttggatgactgaatgcacagaacagatagaagtaaacatacctcctttttccttggcttggtaaatgttttgtgcaataacctgataggcacaaacaatatcaatgaagttaacttctgtgttcatatgaacttgcagcagtacatgcacaaaaattggtttgatcaccatctttaatatctcattgcttaagcagtgacctggaaaagtatcactccccctcagtatactgaccttgtattggccataaagaagtgaataaaattgttgaagtccgttcagccaattcatttttggtccattcaaatacaaagacatgaactggaaaatttcatattgttgcaacaaatctgaaatatttcagc

SEQ ID NO: 30245 - DNA, 10310 bp, Oryza sativa
  unsure (1)..(10310): unsure at all n locations
tctttcttttaaatttagattgttcccattttttgtgatttaggttgtctataaataatttgcattgtttagaatgattttgagtcacaaatgtttagaaatagtttgatttaggttgtttagaagttttatgacttaggttgtttagaaagtttgtgacttaagttgtttattataaattatttaggttgtttagaattattttgatttaggaagtttagaaatattttgatttaggttgtttagagatttgtagacgtaggttgtttagaaatgacttaggttcaattgtcattaaactttgaacaacttaccatcaaaattgattactacgtcttacatgtacttattatttactacattgtattgttcaattgttttctaacttttttgaaatggttggttgtcgttatttttcaaaaggcaaaggctataagtaacttgggtaagtttgcggcaagaaattgggcaagtttgtgtcttcacaggttcaaaagaaatgtgaggtgggaatatgtgactgtctatgtaatttatgtaaaaatttggaatgcatgtgtgcatgatgttaattttgggatgcatctgtgctacaatggagaatatgtgatattgggtatggctaggatatatgtgatgtttcttttttcagagagtgtggctagcaaatcatgagtctagtcaatatttagaaattgttgtttttcgaaaatacctcataactgaagggtcgtaaacaaagaccgtcacatgtgggctcatctgtgacggccttgttacttcaatccatcaaaggtgagtcatccgacaggtacaaactttgcacccgtcttaggtatctcactgtgacgggttgcaaccaaacatgggcatgtggagacgctcacctgtgacgggaaattaaaatactggcccgtcaaaagtgactagagtcaccagtgacccctaatccttgaccgggggaaatccatcgaaggtgagggttagtgtccatctgagatgacctgatacggcatagtgatgtggaaatatgctttttttatttattttatttagattagggatatgccactgacctccgtcattaatatatgttcagagcatgttaataccagagcttgctgatggagttcagtacaaattacctgctcttactgacttaggctccgttcaaccgggaatagtacgcacagaaaacagagcgatctattagcacgtgattaattaagtattagcttttttttttcaaaaatggatcaatttgaattttttaagcaacttttgtatagaaactttttacaaaaaatgcgccgtttaacagtttgaaaaatatgtacgtggaaaacgagggagagggattgggaaaagggtgtaccgaacacaaccttagtgtgtaatctttgtattgtgcttgcaacttccctgcacacatactgtagtgccttgccaagttgcttcggcaccccttgttcccaactcgtctccttgttttccgcttgcacacttttcaaactgctaaacggtatgtttttgcaaaaagtttctatacgaaagttgcttaaagaatcaaaataatttatttttgaaaaataaattagctaatacttaattaatcatgaactaatggatcgctccgtttttgcgtgcggagggaatgagttcccatcaagaacatgcgaacacagccttagtatggcacttctatgcaaaacatcctcatacacaatatttggctgtatttctaccctcaatccctaaacgaagtatgatccatgtacacatccaaattaatttggctcaaatataaacataagtaattgttcttccatccatgaattatgtgatccatggcgacaaggctgccacatattcgtaaaaggatctactgttcaacacgatgtcttggcagtggtagcttgatgatcagatgaacgcatactacgatacggaagacaacataatggtgatgcagcgagtgcgtgtgcacgcgggtactaagtgagatcaaggaggcagaacaaggtgattttccagaactcatcagggagcaacaccggtatactgcgcagtagaggttccagccgaagtttgacacccatctctacttgaacgaggcaagtataaaatcatccttgctcagttagtacaatatctccaccatattctttccatgaaaccacccaatcccaagctgcaaagagatcgatgcaccacaaaaataagggagaatagagtggctgcatattctatttcacagcaaagcatatatatgccaacgatatttgttcttatataggcaggatgaggaaactacaccaaacgttcatatccctattaccttggtagcttgcaatgagaaaactcggagtgttaggcatgcttgtttcagcttataattaagattatcataatctagattattgtgccaaattactgtaagctagattataataaactagactagaataagatgcgagctaaaatatgtaatgccctcaattgtaagattactgtatcaacaaattttgtaggacaacacaccaggttctaaataagaggtgtgcatccaccatatgatggttcatcgttcacaacaaatcatccacgtacgaataaatcgtccacataggttttaggtacctacatttacccctttataaattgaagggtgatgcacttggcagtatagttcaaaactggaaggtgtccacaaccacctgttgttacatgaacttactgcatgaccaggggatgcacatgctttgcgcagtatcaaattaatgtcacagggtcaatgatggctgaattattgctatcaaacaccgttgctaaaagcacagttgaatgagacttcaaattcagattttggatattgaacatacattttgattctggtgccaacaaaaatattaactcatccatacattgcatgcaaagctccatccaaaaatcagatgtatcaaattcagacccgttccctttcccttcgaacaccttttcctaacataaatccttaaaaactatgatatggcaatgttcaattggtccaagcttttctccgcccgaaaccactccttatttatttttttgtttttggaaaaataatcccaaggtctctctactagtcatcgagttacaaaatcgtccccatcagcaaaatcagatatatgacatcgctcaacttacaaaaccgttcattttagatccttcggtggttttgaacccagttttatccgacatggcggctgagtcagcatggccccacatgtcagcatgccacatcatcaccctctctctttgccctcctttcccttcctcctcctctttctctctctctcacttctctgcgcaggctggccgacaggcggggaggaagccggcgtggtgaggccggagaggaggaggaagtcagcggccgacgacgggcgatgcggcggcgatggtggcggaatgttggacaagggacaggcgcagcttctccagcgcatgcgaggcgcaggacgagcggcccacggttgtcacagcaaggaggggaacccggtgcctggggtgcacaacggcatggtggaagacggcggctcgtccagcggcgcggccatccggtgctgctccttttttttttctttttcttcttcctctcctattctttttttgttctttccctccaacggagttgccagatcagcgcttgcagccggtgcggcgaccctggcgcggggtggagtggctgtgcaacgtacggcattttccgacggaggagggcggcatcagcatggccatgcaagtctagggtggcggttacggcatgggctacccggcagcgaccgtgtgcaatggcagcgcagcgcggcgcctgagatggcgtggcgtgctgcttgtcggcggccaggacagcctgcgggctgctcttcctttttctcgtttctttgatttgctctttctatttcatcttcctgatggccaccgacctcctccccacccgctggccagcctgcgcaaagaagtgagagggagaggaggaagggaaaggaagaggaagggagagggtgatgacatggcatcctggcatgtggggtatatgtgggtcctaagctaactcagtcaccacatcggataaaacggggttaaaataaccgaagaacctaaagtgaaaagttttataagtagaaggatatcatatatatgcttctgcagtttgggaacgattttttaaatcgatgacaagttaagataccttgggtgtactttttcctttttttttcctctcttaggctacgttcgttttcagtggttaccaactccccctctcgttctccatgtgcatgtttttcaaacggctaaacggtacgtcttttgtaaaaagtttctatacgaaagtttcttaaaaatcatattaatccatgtttataaaaaaatagctaatggaccactctgtttttcatatgggagggattagttcccatcctcctgaaacgaacacgccggaccagcctttctctctctcggcccatttcaacttttcacccttcactactgtgcagccaagttcagcacctccaattgtttcttgtcgatctctgtcagcttttgtcccaaatgtaacgggtggcgcacgagttaactgcgttggtttgtaagctctagatcggttctactccctccgtactataaaataccaacttactatcaaatgcaaaatattttagtattacgaatttagacatatatctttcaggtttagattaatagtaatagaatatgtcacacgtaatcctagattcattttttaatggaagagagtagttggaacagcacgccgcctgctgtgaaatagttggtgtccagtgatattgctggttccttaaattaaaaaaaaaagattccccagaaaaatatgatcagccacctccctgatctcctcctccgaaccacaccgttccagcacagccgggccgatcaccatggcgccccggccgccgaggcttgccatgctgcacacgaccgcatgctacgctcgcagctgcaactacctagctaccacgatccacagtggtgaaagctaacacaggtagagaaaccatctttggtcagtcgatcaaattccacaatagtcccggttccattaaaaaccgggatctggttaaaaaaaatttaatctttacacaccaaccgggactaaagatgatttttagtcccggttcatcccctgtcagaggcatgtgagggagccgagaatctttagtcccggttgatactaccaacgggactaaagattaccattttagtttcggtttattaccaactgggactaaaattcaacatagtatataatccctagtccttatcctctactccacaatcacaaccactttctcacacacacagatcgatcatcctctcttctccccctccttccctctcctatcttacacagatcctccccttcctccttccttcccccttcccttcctcctccctcccctggagacggatgaggccgctcctccttccttcccagccccttcccttcctcctccctccctggagacggatgaggccgcgccgcgcggacgcggtggacggacggacacgcggcgtgcggcgcagacgtgcgttgcagggtgagcacatgcgcgcaaacgtcctccctcccctaaagttacttgttgtctctttttttttatattttttgattcactaagatgtaattttgtgattcattgtatggatttgagatgtataatctgtgatgtatttgatttgtgtgtaaattttttaggatttgcgatattttagatttgtgtgtataagtaactttaagatttgtgatgcagatttgggatgttactttatttggggatttggggtttgatttgggatgtgcatgccatccgattcgggagaaaataaaaaagtaacaaaaaaaagaaaagggtaccaacaccaaccgggactaaagatagatctttactcccgattatttcacccgggactaaagataacgatgtttagtcccgaattcatagtctcggttaaaaacccgggactatagggaattacaaaccgggagtaaagacagtttctctaccagtgtaatcacaagccacacacacatgcatctatccgaagactaatgacatctaccaatgctaagcgaaggcgctgggacctttcgtcactggcacaaatcgcagagaaccatactgttcacatgcaatgtccagccaacatgatcaaagtggtcaaaatcaacaatctcgtacttgccctttccgtgatgacacccattcctcagcgaagaacacacgatgctgtcacatcaagtactgttttgattactgctaattaagtatgcaaattaacggggagacaggatgaagaaagctagagggagaggcaaagtaatctactgcaagtagaatacaagaacggatcggaggctcgggaatcaatatggagtatatatgatgtgagttcgtgcatatagggccttgaattctaccaaaggacaactgcgctaggatcagctgaatttcatttggttcgcattcatggctgaattctttgataactactggattttccactcatggtggggatttctcaccggcccgttattacatggcaaagattatttttcgttcattgttttgcttctcttttctttgtcttcaaatgagcgcctttggtaagatcttaaaccactgtgtagtgaaagcaagatcatcatgtacgtacgactacgattagaacacttggatcaccatgggaagaaaactcatttgcggtcatcaaaacaatttgtgaaattccggcgtttagttaatcaattgaaccaccaaaaccacatcgacactagaggtttctggtttgggaaggagctatctcgggatcgccggatagtccggccactgtggattgggagagagctaatgatcccctgcgttgtcctcattttgatgcggaagagaagaactacggtagcacattggcatactagagttaacaggggagatcgagatgagattggggaattttttttaccgttttgaactagtttgacaaaaaatatttgaccagagcaactgaatatcgggacataccagtgaatccaatatttcaaaaattttcttttgaaatattttattatgggttgacgacaagtcgttaggtccgatgaaaaatattagctatctatccactactatctagcggtgaaagtggttacagtgaccttagtagcaacctaagtttttgagttcaaatccccataagaacgaattttaaattgggcgcgaagtcatatgagcgcatatatcctgttgggtgtaatacctattctctaaaaaaagtatctagcaataattgatatggaaattaaattagaattttatgctctgcggtatcaaaaggttcctgggctccaagaattatttttagattgtgcagttttacccctctgataaatctaaatgttatgctataccattcacaaacttaatatagagattgtgagccgttcacattaattacatggttgtaccttggaacaaactgtcttcagtatatggcgttttttggttcttgtcgtggtgccctcaaccagggtttgcaaattaatttgttttgaacttttgtgttggggttagctgaaaatttttattatttgaacaaattttagccgaatttgaataaacttttgaccaaattcataaaaaactgaaagccttgaaaatttcgggctaaatagtttcaagtgcgggggaggggataccaaaattgccaaactgccctcaaattgtaaattgcaaattgctcatagttccgatatttgaaacaaaaattgcaaatagtgcgctcaactgaagaaccaatccatgtatgtttgatgtttcactcaaatttagctggaacaacctaatcacaaattgctgattcctccacggatcaagtgatgcctggatacaggttcctaaaaacgtccaatgcttcaatcttgacttaacgatacagggtagtcaaactggaccagtcagttacaaaacattggtttcagccgcagttttgcagccatctctaacttgagtcggttatctatttatctgtattggagctcaagctgatcagtgtcatgacgatattcttttcacgacaccacccattcccaactaatgggatgcaccacacaaattaaaccaacgagaacaaaacggtcattatatgttcctatctgaaagaaactgtgtgtatgcattgatattggcccttatataagccaaggatgcctggatttttcattttagatcttttttaaaaaatattttataaatagacccctacaaaaatnttattntccttttggnaaaatttggggggaatttccccctttttttttccgggccgggcccccccaaaaaccccggggaaaaaacttgacgccgtaccgtggccccaaagacgttggtggcgttccccggcctatcctctatataaaagctaaatcactaatatgaaggggaagtgaaccatttaaaaaaaggatctatttttaataagaaatatttatatgtaggtcctcacaataaataacattggcaccgatgacctatttataaatattattttacaaataagtctttttttcaaaaaatatttacaaataggctatcggcgccaatgacattggtgcactactacaggagatgtcataggtgtcggtttctaaagttaagggattaaaagtggacttattcctatttttttcctctcttggccagaccagcttttttccctttcagcccatttaaatttttcacccttcacaactgtgccgccaagatgagcacttccaattgtttcttgtcgtgctctgtcagcttctgtcccgaatgtaacagggtggcgcacgagttaactgtgttgggttgtaaaattgttggtgtccagggatattgctggttcctttaacttaataaaaataggtttcccataaaatagaatgatcagcatcctcccttctcctccgaaccacactgtccctgcacagccgagccggccatggcgccccgcccgaggcttgctcctgcacacgaccgcactctaggatcgcagccgcaaccacctaccgcgcacacgcgccgcaccaaggtgaccaaccgttcgacggcggtgaaagctaatcacgagccacacacacaagcatccgaagagtaatgacttaattatctaccaatgcttataagcgaaaatgctggaccttggtgactggcacaaatcgcagagaatgataccgttcacgaaccgtgcaatgtccaaccaacatgatcgaaatggtcatatccatctatcccatacttgtcatttccgtgatgacacccattcctaagtgaagaacacacacgatgctgtcacggcaagtactgttttggttactgctatgtaacatcagttaggatcgacctgctcgtttctcttagcttgtgtgttgttagaatgcagaagtgtgcaaattaacggagaaacagggtgaagaaagctagagggagaggcaaggagtaatgtactcctaggatagaggctcgggagacaatatggagtatttatatatgatatatgctaccagaggagaactaggatatgctgaatttcattttgttttgcgttcatggctgaattctttgatgactgaattttccattcatggtggggatttctcaccgtccccttattacatggcaaagaatttcgttcattgtattgcttctgttttctttgtcttcaaattagcggcttcggtaacatcttaaaccagtgtgttgtgaaaacaagatgagatcatcatgtacgtacgactacgattagaacacatggatcaccataagaaaactcattttttaggtgacttgatataccaaccaggctccaattaatgtattggaaaggggggaaattatgtgggtcaccaacaattccagcgtttataatcaattgagccaccaatgcggtcagggagagaactaaattaagttacccttgcgttgtcctcatcttgatgccgaacagacgaacaatcgcacattggcatagaagagttagcagaggggttttgcagccatctctaccttgagtcggccatcttttgataagagtcggtgctcaagctgatcggtgtcgtaaagatattctcttcatgacaccacccattcccaactaatgagatgcaccacacaatcctacaagaacagaaaggtcacttattagacccacccggtcaacacattcaagatattacttctttcggggctgcagga

SEQ ID NO: 30246 - DNA, 819 bp, Oryza sativa
  unsure (1)..(819): unsure at all n locations
ggtactataagattaagctcgggctctggtgcaaagcactacctacttccacatgtctagtgggtaaggcttagtttgtgccacagtctggttataaacaaaagtacacgaatgnagatgcacgaagtcgggggtcgatgcacatctctaggacaaatgaaggctacacgagctgcggcccggtagtcgagatgtcatggcacagggctggtgtcctgctgctaggggctcaatcctgcctgcctgtcccgaaggttccgcccgtaggtggggttgggtcggtactcttgtttatggctaggatgggttggaaactatgtcacgtcttccgtccgtataccgtggtggtatgtggcacgtggttacacgtgaggaagatgtgtcttgtgggtaaagatgtacacctctgatcagagtataacctattcgaatagccgcgccctcggttatgggcaagcctagcaatgtacccaagttagtgttttaattcttaaaatttgcttaacaactaaaatgtggaatggttggcctgggttggcttgggacgagctgggacccagggtcgggttgccagttcggtctgaatcatcgtaggccttgggttaaggcaggttcgtgagggttcacgcccttgattaataacactgtgtaactctaggatcgtctttataaaatggctttgggcaactaagtgacttttaaatgctgttttctgcaaaacttaacccctatattattaccccttgtacccccttgcattaatcatgcatctgccggtgtggcttgctgagtactgtggttgtactcattcttgctcaa

SEQ ID NO: 30247 - DNA, 2062 bp, Oryza sativa
ccgaccgtccaaagatgatttctccaccagtggaagcttttcgcgctagctgtcacttagtttgctaagaagaacctgtaaatttttgttattcaccaaagctagctcttcttttaagggcgatagctgtgttcttttccggtgagtttttataaaaaaaatatatgatgcgtttttataaaaagtttctatgtagaagttgtttaaaaaattcaaataaatccatttttagttttataatattagtacttaattaattatgtgctaatgagttttcacgttttgtgtgcgctaaaatctctctgtcaactgagagatcgatcagagccttataatatgaatcagatggactacgcagctaatttgttgaattaagaaagtactttcatacagtatcagttaaagtttagttttttgaacttaccaaaaattaagtacaccttataaaagtgaacaggagaagccgtgcattcatatttatatctttcttgcctcctgttctatgcacgatctgcctttctacttcatccattgcaggaaaccaactatcacgccatgcaagcaaggattgatttgcttccaaaatcctccatctgtctatctatctgccaaatgagacaatacacatgctctgtatgaggcattggtcctgttctgcaacatgtacacgtcgtccaggagcacttcatgttacataagttcatttgggaacgagtggcattggaaaacaaacacactgcacatttagactctctcgtactgttgtcaaaccaatgctgaagccacaacccaacaactttgggttgttggctgaagccctaggctcatcgtcagtggcggatgcaggatttcgaagttgggtattcaaaaatttacacggtgaatttgttttttaaaaaatatggttaatatcatcaatgcaaatactatttcttaattagaaaagttataaactatagaaaaatattgaatgaaaacatttatcttgttgggttaacatgattttgaaatataatggatgtatgcttaaaaaatattgtgagcttatggaagaaaaatccaaaaacaggattgaataatcgggaaaaaacgagaaggaagctaggaatcgaacctagcacctgttgattacacttgatgatatggggtatagctattttgtaaaaaaatgggtattcttctgaatacccatgaacgttgtggcgtccgcccctgctcatcgttagcctataatacgttagttgtttgataactttattattaaatttagagttttgcaatacccaatgttaaatgtatagtttaatgattaatttatttctaaatatgtagtttttgtaatatacaactttaaatttatatagttttatggttgtttgataaatgtaggtttactaaatttactcatggtttaattttctttctctgacctaaggttattgtttgagttatgtacctccctttcttacttctgaattgactctctataaaaaagaaacttatgagagccacctacctattatgatacttctattattttattcacattccactcctatttataccgatcaccatgcaaggcttgcttcctctgtccatttatccgaggccatttatctggcaaatgaaataacccctgctatctcttcattctattcagtttcctagcatgcacactacacagatcatgtgcgaggattttacatcgagaatgggtggcactgggaaaaaaacagtattgtatattcattcgtatgctgctgcatccagtaatggagccaccatacgggcaaaccctatgtaatggcccagggccatgtggccatcggcagcagggcaaggcagcattccattttcgtcgagatcaatggatcggccacacagagtcgcgcagtggtacactttggccggtcgaatgccctcgccattttctcttgtggatgactttttgtgttcgatcctgctacaaaactatctaggggtaatggcatgcatctcttgggaggctcagaaactttcgcattgtcacatagattttgctacaaaagaattctgttgcatt

SEQ ID NO: 30248 - DNA, 1021 bp, Oryza sativa
aataatcttatcctaaaactcaaatagtgataaatgctaaatctaggtgacgtatattataggacgctagctagtcaataattatatactaagtctaattcccaatataataatcttatattaaaactcaaataatcttagactaaaactcaaatagtcatgtgtgctaagtgtaactgtcgtatattagaaccctacacaatcttatatgctaagtctaattacaaatctaataatcttatactaaaactcaaatagtgataaatgctaagtctaggtgacgtatattataggacgctagctagtcaataattatatactaagtctaattacaaatataataatcttatattaaaactcaaataatcttagactaaaactcaaatagtcatgtgtgctaagtgtaactgtcgtatattagaaccctacacaatcttatatgctaagtctaattacaaatctaataatcttatactaaaactcaaatagtgataaatgctaagtctaggtgacgtatattataggaccctagccagtcaataattatatactaagtctaattacaaatataataatcttatattaaaactcaaataatcttagactaaaactcaaatagtcatgtgtgctaagtgtaactgtcgtatattagaaccctacacaatcttatatgctaagtctaattacaaatctaataatcttatactaaaactcaaatagtgataaatgctaagtctaggtgacgtatattataggaccctagccagtcaataattatatactaagtctaattacaaatataataatcttatattaaaactcaaataatcttagactaaaactcaaatagtcatgtgtgctaagtgtaactgtcgtatattagaaccctacacaatcttatatgctaagtctaattacaaatctaataatcttatactaaaactcaaatagtgataaatgctaagtataggtgacgtatattataggaccctagctagtcaataattatatacggggtcca

SEQ ID NO: 30249 - DNA, 4961 bp, Oryza sativa
atacagtcgtcggtcagattgcgggcggctagtctgaccgcttgctacaatccggtctgaccagctttagctagccaaatcagctcatcacctcaaaatactgtttattctcatccggtctgaccgatacacacaccccagtctaaccggtgccaaaaccattttgctaataatctccaaatatcaaaaaaccaatattctcaaatagcaattgttaatcacaaaataacaatcaaacacactatgattttacaaaaaacatagtgtaattggctataaaagggaggcaaaggcaaacctatctgcaaatgctcatcaaaggcgggttatgcctgtattatgcatgaaaaaacttataatttgttctaaccctgatcataaaggaaggctagtagttacactatcagtttttcttttgcaagaagaggtgcattgtcatgagtcaacgcgtggagtaactaaacagaagttctgaggataatttggttggtgggcagggaactacaaacattgtttattactccctctatcctattttaagcgcgatcataagtttccgcatcaaatcttgatcgttcgtcttatttgaaaattttataaaaaaaatttaagaacataagtcatgcataaagtaatattcatgttttatcatctaataataataaatgtactaaacataaaaaaaggtcaaataagaaagacgatcaaagttggacacggaaactcatgaccgcacttaaaatgggatggagtgagcacttcctccatacatccacaaatataaatatttctatagtactacttccccattccaatcactcctcgtttaatttcttcatcaacccttatcccaaccaatcaaggattcaaccagatgtatggaagtaattttccgtcaacctaatttttttaaaaaactctaaaagtaaattatattagtggaaggagatcttaacgaatgatggagttatgagctttcaggcgaatcaaggaaacttctccgtgaagaatacaagcacgcatcaaatctaaagaaaacaaaaaaaaagctttaaaatgtcaaaaaagaaacatgtccacatggcttgtttcttcatacaactcatgctctagatacgtaccacactgttggtgtcggcatcacctacgtcattaagcactgacgcagtcacaacaccaatacttacatagaacaataccaccattctactccccactgtcctaacttgaggtgccgctagccaaattccaaccttcatctcatcactccttgcgtgattgcgtcggcctcccacacaaccgacggttattgtccctcatgtatgtcaggccaaaatgaatgctcaagtgtaatgaattaacctgtcaaatgcttggaaaacatttattagtatattttttaaattgtgaataaatatttaaaaactcttatgtttttaaaaactggtcaaataaaagaaaaggctataaatttgttgcggtttcaaaggaaacggattatactcattgttgagagatatacaagtgttccaagcctcattcggtcgttcctgcactggcctccctatgcatttgctcggctcgcaatgcacggtgtcaccactatcccatacatctcctggcacccgaagatgtttctcttcccgtcgatgtcccatccgtcattagaagttgtggccattttggtggtggtaatggaccacatgaaggcggacgctcgtcgactagggcttgctggttcgtggatatcaggtcggctaccaagacagtcctcttcgtctaggtgatcaagctagatacctctactgagtaatctatgatcaagatgtattgcttgtccaatgtgcttctttcctaatgtcacctattcttaaatggacgactgactctaacatgtttctgttgcttccgtaagtgtacatgttatcaaccagcgaaaatgcaaaagagaggatattttgtaaggtaacagtctaacggacagatataggaggaagaaaaacttttgcttggaaggcacaatgcatggtaggtaatttcctctgaaataggtgtgaataaaatgattgacagatcatgggtagaaaagaagaaaggttatccgggaaggatataaataggagaggccaagaagctgaagggagacatatatagggagataggtggctgaaaaatgtacttttcttccacaaaggcctggtttagttcccaaattttttttcctaaaaacgtcacatcaaatctttgcacatgcatagagcattaaaaatagataaaaacaaaaactaattgcacagtttgtatggaaatcgcgagccgaatcttttgagcctaattagtccatgagtagccataagtgctacagtacccatatgtgctaattacagcttaattaggctcaaaagattcgtctcgcggtttccaagtgagttatgaaattagtttttttcattcgtgtccgaaaaccccttccgatatctggtcaaacatctgatgtgacatccaaaaattctcttttcgcgaactaaacagggttgttagtaattatacttcgcagtgtgcagaaaggaaactaaaggagatagcatttgtgttttttactcatgccttaatcgaatgttttctttacaagtgatattacatgtcagtctttcaattttttttcttatttaaaataagcacaacaagcacatgcatagcataacttatatacacgactgtagaaagcatttttactcccggttttgcaacctagagtatgactccgggactaaaaatgggtatcattagtcccgggtaaaataatcgggtctaaaaatccatcttaatttagtcccggttgatgttaccaaccggaactaaagatggcagcgccagcccggttggtcaccattttttttcattgtttcttttcaaatcaagttgctccttcgcaaatcaagttgctccctacatattcccaaatcaaaatcaaagtatcatcagaaatcaatgaatcatatattcacatcacaaattatcaaaagaaaaaacataccaaattcttaaaaaaatcatcacagattatacatcacaaatctaatgaatctcaacttctaaaaattctcagatccaatgtatcgcaaattcttaaaaaaaaaagaacaacaaaatgctgccgctgtcgcctcctgcctccctgccggaagaggggagggcgccgccggccgccggctcccgccgccctcccttccacccgccatctgccgccctcggtgcctgggttcggtgccgtccccgccgcctgggcttggctgtcgctcggccgcttggagaggaggaggcggggagggggaggagaggggaagggggaggaaggagagacgaaaggggaggtggaggctgtaagagatgaggctgagctgagagatgaggctgttaatttaatggggggaggagagaggaagggggaggggataagatcgaccgactgaccgagatgaggcgcatggctcggggtgaattttggccccggttggtataaacaactgggactactttagtcccagttgtttataccaatcgagactaaagataattgggcctggctcgacccgacaactttttgaaccaggactaaaaatgatctttagtcccggttaacaccaaccgggactaaacatcaaaaagtttttaaccaggactaaaaatagtctttagtcccggttcctaatggaaggttcctaatagaaccgggactattgtggattatgggcgaccgaccaaagatggtttctccagtagtgataatatgtagtcaaaacatgcagcatactatagtttcttttatttttgtttaatttgtataagctcgcatgtatatatatgaatttcgagttgttcaaaagagctaactgcacgtctgcacccaatgtggtagtaacattccataagattttccttgctatgtgaaagactggagctgttcatacccatcaaaaccatacaatgcagaagctgtacactatattgctcataattaaagaagtgcaagtgcaatgacaggatcccatcttccatgaaaatatcttaaatttgtcctaatgcatgagtaagaagaggcataacagtaggcaatcaatctctccatgtaatactctctctcactctacagatcttgcaactgcacaccaaatccacacgttccacacatactcatgattgggatgcagcaaacatcggatcattttcatggcccattgtgtcgaccactgtcttttagacatgggacaattgcttatttgaccctgttttgaactgtaattgccgatttggccatactttttgaactttgcttatttgaccctctttttcgagtacgaagcttccgtctgaccctcttttgatgactccgttagggttcgatttttttttaaaaagaaaatgtttcaagagttcctaatgacgaaaataccctccaaaccctattttgactctctctctctcaatcgtgcgtgactctcacggtctcacctctctctcactctctcactcgtgcgtgcagcggcggcggctagctaagggggcggcggtggcggcgagctgagggggcggcggcggcggcgtcaagcactgccccgccggcgcccactcgttgtggtggagggcggcagcggcggcgctttgagggggtccgagtcggcgccgatctgagggggcggcggcaacgatctgtgggggcggcggcggcgagctgaggaggcggcggcagcggcgtgatgtacagccccgccggcgcccgctgtggaggtggagggcggcggcggcggtctgatggggcgcggggcggcgccgatctgtgggggcggcgacgccgagctgtgggggcggtggcgccgagctgtcgtggcggcgacggtgagctcgatgacgaggaagaggagcaacggtggtggagctcaggccgtggtggtgtgcaagcg

SEQ ID NO: 30250 - DNA, 1542 bp, Oryza sativa
caagatgtctcatcttgacttccgcaaaactgctggttcttggatcatatatgagcagtagtcctgtcgatcctaaccatatgagtatcctcccatcatctaataccagcaatggcttacatcgtactcaagaacagggatgaacgattcagtctgaatgctatattctttaacccaggcacgggtctcataatcggttagaaaccataggtccatggttgaacaaaaccgctggtgatgaactaaatagcctttcaactcagccagacaaagttgatgccaaattgagaaatactcctgtggatcaaaatcaccgtcgaatacaaagctgctgctaattggcccctggatgtcttccctccattcctcagtctcaaggtcaaaagaaaagatgaagtctggatgaatgccagctcccagtccactaataatcatagcatcatatagagcatccatcaagaagtacaccaccccattaacgacgacaccgctgttcgccttttgcatctcaacaaagaactgacggctctgttttcccctccaatgtgcatggccttggcctgtgccacccttgactgtaaagacctcacagagctgagggagctcaaggtctgtaaatccgggacggttgaacatccggagcaccttgtactctcccgtggaggcgtgttggtgtaaatatgtattgtaccaaggacctatctgtaaagtgttatgctaatagaatagatgaggaaggggtgagctgagaaggctaaccctagaaaaattccccaaattgaacaatatggtatcagagcgggtcgccggcgactggggaggttgaaccctagctggcgaggtcgcagcggcgcggcgcagcggcgcgggccgaggcgaggttggcgcggcgcgacgacgcacgcgcgaggccagcgtggccgcacgcggcagagacggttggtggccgcggcaggaagcggcgctgtgccggcgcaggacggcagcgctgctaaggcgggacgtggagtgaggaagcgacggtgtcgacggcagggagcaccaacggcgacaacgcgtgcggagggctagctggtgacggcgtgtggcagaggagcaggttgttgctgctgctggtgaggtgttggtgctgctgctacttgagaaggtgaagtgggcgcttggcttgctgttgctgctgtatttgctgctgctgtgctgatttggggaagaaactgagtacttgctgctgtgctgaaaactgagaagtagtgctattgctgctgttctgttttggtgagaaactgaggagtagtgttgttgctcctattagttgatttggctaatatttgatctgccatgggggattgaagtctggtccttgttgtacctctgttaatgtggtaaagaagaagctaagggaagaaaaaaaatgtcttctggggagggaaaggaggttgtggatacttccttgcttgttactaaaggtgatatgaaaggtttgctagaggatttgctgaagatgggcatgataggtcctaggaatgcggctggagtgtctgc

SEQ ID NO: 30251 - DNA, 2248 bp, Oryza sativa
ggcaggggcagcgccctcccctctatcggatccagcgggaggggaggaagcggcagcccgatgtccctgcgacgatggcaccctccccttccggcgtcggtgtttttgtgcttgtgatgttcttgtgttgtcgttgttgttgatgaaatatgttcttgtgttcttgtaacagtgttttctctaggatttggccaaatttgattcggactcgcattaagtgtcaaatcgaattggactttctttttttttatgttattttcgcccttttttttgttattacggacgatggaagcaaattgaatcggatttttttttaaaaaattttttttcaccctttttggttattaaggatgatgacacctcttattttttttaagtagtagagattagaaaaaatgcccgtgtgttgtaacgggtgaagtctatttttaatcttattattgttatatggtttagttaagatgaagttcactctggaagtttgcttggatatatatatatatatatatatatatatatatatatatatatatatatatatatatatatagaaaatcatgagctgcagttagcaatctgatcatctcaagttagcatgtaagtttttttaaacatatttcttatatggtttcttctatatcaccaaaagtgaacgatcttaaaaactgactcaaatatggatatgtatttccaaaagcaaacgaacttaaaaaccaatttatacacggatgacgtatcaaaatatcgacaaaaacatctttaatttttataactagtagagattaaatataatcttatcgtattttcaatcggtacttgtatgcagcttgtgtggttatagccatttatctcaaagcttgatatagccggttcaactcttggcacctcaatttatgcttcttttttttttattttttttggtgtgttgcgcgagctgcttggtgacgcctgtcatcacgtcgtcttctagcgcatggctcgacgtttatctcaccatgttgcacgagctgtttggtgatgctttgttttcacgtcatattctagcacaacctgacccggcccatggttatgacgctggcattctggcaatcacatcgtcctcctacgtgacgccatcacacaacttcttgggctccatgacgtcagcgagcggctagaggcaagccaaggtgagcatgcagccgcacttgcaattaaaatgcacacaggagtttatgcgttgttggctggttgtctaggaactcgttggagttgatgcactgttggagacgaaagcattcgagtgtatgcaagggtatagaagtccaaagtaatcattcaaatgccaaaacatcaagaattctcatgcaaaggacccaagcgtcaaacatcaagaaatatagtacctagggagtagatttttttgacagtatggtggtgtttgaaaatcctgaagataaagattaagtgtttcacgcaaaacgagatggtagtagcgtgtgattaattgagttttaattattagaaacttgaaaaatggattaatctggtattttagagcaactttcatatagaaagtttttacgggaaacacactgtttagcagtttgaaatgcgtgtcacgagaatctaaaatttcattcaacaattgttggacattcgaacgcagcctatggcttttcataacacgttgattatttgatcaagctgaaataagaacactcaattacatagtcactttcattttgcggtcaagcacggattggaataagcgccggtttgacatgaagttcttgaaaacacagggcatcgagataaaataaaaatttatatgcttgttattcatacatctggttaggttagagggtcaacctagattttcacgagcataagcagatcctagattgcacatcaagggtgctagccacatcctcgcgcgagagagagagagatcgaggtgctagcgcatagtgtaaccatcaccatgcgcaccttgcatctcagcacaatgaaatgtgtaacctatcttttatccaaaatcaatcatttcatttcgtttaattcgtagcacaccagagataaccatttctcaaattcctctttcttatatcgattaatgtgtatagctgttcttttcaatgcatctttcctttggcacaaatgcagtaagcaagcttatttcgttaaatagtagcttccgcactctttctacttactaaaattaatgtgaatgatcagggccctttagaggttctaatcatggagcaca

SEQ ID NO: 30252 - DNA, 2017 bp, Oryza sativa
tccagaatggggctggttagcgtgtggtttcatcacgcatgatttgttttgggttgtcacagccacaaaatgatgctagtgcgtcacctgggaaccaacttatatgtcaaaataaacgagtttgtgggttagtttagtctataagtgggttttcacggatagccgcttgaaccctcagccacaagcatgtaaatccggtctttacttaaagaaactacagccaacatatttattttatacttttacatatcttcgatgtaataattattttaaaataaacgataaaagaaaaaaataaacatattctaagatggagaggacagaactgaacaacaaataagcacgctaataaactaaacgaaagcctttcgaaaaggaaagggtgttgggggagtattggaaaagatgatcatgccatctgcaccaccatggttttgtttttttgtttttcttttttttttaaaaaaaaacaccatggctttggttggtagcactgttcacttcaccatcaagtcatctgtgagaatccttggacactttctcccacatgtgagtgcgattccaagcaaaatttggctaataagggcacgtaccgaggcctggttttgatcagatgaagatataagataattaatccattcggttggaaatatttagtactcgttccatcccaaaatataatactccctccatccacaaaagttacacatatttcacatttgagtttttctaaataagttgttcctatttgtagtttttgtgtattcaagacttaaataaagagataaattaaatgtttgattagaaccaagaagtcatctaaatgctcattggttgcatgcttacattcacttcttgattttgtaccatccaagacgatttaatttctccttgaccttgatgaaaaaagtaatatgtgtaacttttgtggatggagggagtaacaaccttacaggtttgtcccagaatatacaacttcttcaccaacattctcttctcaactaattataaccttccatcattcaattttctcacatacctccacttctcaatcaatcacaacattctctcatttaattccacctactttctgtgaaagggcctgtagcctagtggttacgagagcctcgttagcacatgaggttttgggttcgactcccattgggagcaaattttccaggatttaacggcgttatgcttttagtggtaggcgacgtacccgtcgacagcgaggcgcctgtggtgtcttcgtcaatctctctagaatttgccggcccagtcttcgaagatgctcataggggtgagtgcgcgtgcgttgtgagtgtctgcgttgtactgtgtaattttcaaaaaaaaaattccacctactttcttaatatatgtgtccaacactaaaaatcattatattctagaatttgccggcccagtcttcgaagatgctcataggggtgagtgcgcgtgcgttgtgagtgtctgcgttgtactgtgtaattttcaaaaaaaaaattccacctactttcttaatatatgtgtccaacactaaaaatcattatattctattctgtcatggaggaagtaatactgacatttaagatatgatgattcgataaaatctttgaccgcatataatttcttaaattagttttttctcgaagaaaaagtgtgccaaatttgtcttcaaaagtattatcataaacttaccggattatataaatttgttctaaaaaaagttatattacgtgttaaataagttcaggagaagcatatcatttttttttgttttcaagatagttattacccctttatcttaaaatataaaaattttggttgaatcagatatatcataatattacgaatctggacatcggatgtagtgcatcgaaccaaaggccccgttcttttctccaacaaaagttggaagaaaatttggatattcgtggtatgcatttcaaactgcttaacgatgtgtttcatgcgaaaactttttatatggaagttgctctaaaatattagataa

SEQ ID NO: 30253 - DNA, 2098 bp, Oryza sativa
caagatcaaggagaaattaaatcgtcttggatgttacaaaatcaaggagtgaatacaagcatgcaaccaatgagcatttagatgacttcttagttctaattaaacatttaatttatctctttatttaagttttgaatgtataaagactacgaataaaaacaacttatttagaaaaacttaaatgtgaaataggtgtaacttttgtggatggagtgagtacaatcgataaggatctaaggttcaattcagctacttcgtacccactaaaatcaactaattattaaattttcaccagtgtaaacaaatacaacaaccagctgtatcaggcacgttttatttttttctacgaattgaattataccgttccagaattcatgacaaattgacaagtatactagtataagtcacagaacagtccttcacgtacacgtatactcgtcatcgtcttctttcttccttcgctgctaattaatctctctcatgttttctcactttccatctccggagaggagagattatttatttatatttatttatttatcacggtcaaagcatcggggttgtggggcccacacgccctcgtgtcggccgctgcagcggggcccacgcggcagtggcatgagggccaacgcgacgtgcagactggcagtgggccctcgcatgctacgcgcccctcgcaaatatcgcttcgtctctcctgtaaaatttcgtcccgttgcggatttgttttttcttttttttttgcatctagacccctgtaatttgttgttatctctaataactagcctactctagtttaaatactactggctcgttttggttggaagtcttttcttttggtgttgtggtagtagagttctacgagacttgttaaatcgatatcagttatagctcaaatttttccataatttttgcttcgtctcagagacatttattcgtacgaaagaattaaacgtttccgaaaatattttgttaggactagatgtttatagagaggaagcttcacgatacgtaaaccacgaatctccaccataagcttatagggctttagtccccatttgctaaatatattagtaactattaaggaaggtattaaaaaaggaatcaaataaagacttgatgattcgaaagtgttggtgtgttttgattggaataaagcgaacaatgttcaaaggcaaattgttccatccgaatttcatgcaagattaatattcatgacatcccatccctatatagtatttttctctttccttgtgcttttagttcattatcgagctagaatcatattgttctccgttaacctcacatgtacatctcaactccaaatatgttgctcaatcttgcattaatctcatcttctattgagtttatgtagctggctatatgtgagctcataccagtattaccactacagtcactctaaagttgaattccactgtccttccaagtcgatgagttaaaagagtcaaagtatcgcgtaacacaaataatgtgaattgtagcttggccactgacatttcactttgaaccatacttttcctaatctgttttactttagactagctaactttacatttattgtagtttagaccatcttacctttcttctatagctatgtctagtttctatttggaaaacatatggcatgcgcatagatcggggagttcgcccgatgtgccgaaaccaacttgcatgaggttattgatttgctgaataaacaattttatggtgatcaaaactactactagcccaaagtaaaaaaaaaaatcaaacaatgatccgaagtaaaacatcggtaataaaaaggtatcctaaactacaattcacttataaaaatattaccccaaatcattacaatcactaaaaccaagcacttgaagatgaatacgaagtaaaaccatggaaaaccagaaaaaaaagacattagcacataactaattaagtttcaactattacaaactcaaaaaacatatatacttatatactttatattttaaagtaacttccgcatacagaactttcgcacgaaaacacatcgttcaacactgtttgtaagacgcacgttaacggaaaccgaagtagaatcagtttctggtat

SEQ ID NO: 30254 - DNA, 1810 bp, Oryza sativa
ggcgtatcctcctcccccgtcgtcgtccttccctccccgctgtcactgccggccgcctccgccgccggccagccctcccctctcccctcccccctctctctctccagggcattttgggcacaaaagtctctaaagtggcatttcatcctgtaggcaatgtattaagtggcattttatccggtgcattatattgagtggcattttatccaaaccaatcttacagagtgtcatattgtccgttttctcataaaggtagacatctcaatgcttcgctggaagcgaatgctaggtacaatcaccagcgaagcagtagtagctacgggttaagtagctagaatagctaaatgcggaggcgtcgagcgccgctaatgcggatccatgcacgcgtgacaataacagcaaccacaaagccctctcccctcagcctgcttgcagctagccttgcactgtgtcccttttcaaagcgacaaagcactcacactctcacacactcactgcactgtgcagtgcaagcgtgcgtaaatgaaatttcaccaccaacttccataccggcatagtactcatcaagtctctctcacccagttgctagtgtacctgtcaatcactgcttgcacatcatccaatgttcagtcactgcatctgcatgctgttctatctaccgagcacgaggtcacctgtaattaaaccatccaagccctacgtgtccaacaactgcgcgtcgtcggattggtcgagaacccagaacggacgccgaccaaaaaacggacgagacgggagcgacgcacgaacggacgccttgaaccgcaccagaagttaattccgtggttgtttccactttccaccagcaagtggtcgacgactcgacgggcaacgagctagcgaccgagagcgaagcgacccgctgtcccgcttgcgtcggcgacggagtccggaattccggataatatagggtaagcggctatgcgtgcttttggtctggaaacgcatgtgacggcacggcaggtaggcgacgcgaacgcgagcttccggtacgtaacggcgcgaacggtatgtacgtgaggtgggcgttttcgccggtagcttgcggaagttaggaacggtttgacgcgtgacgcatgacgaagttgggcggcggataggttggatcggaggggataagctcatatcgctgtttagatcgggaattcggtccgcttttggtccgatccaacgaattctcccctttgccgacttcactctcaccccatttcttgccgcgactctgcaagtgggttggtcgagcggctggaggggagatgccatgttttgttattccgtcctccaccagccggcaacagaggggatcaaatcaaagaaaatagagcccagtcacgctcacattcataggctcatgctaatctctgtttcacatcattttggccccgtttagttccctaaaagttttttttcaaaaacatcacatcgaatctttggatacctgcatgcatgtatcattaatatagattaaaagaaaaaccaattacacagttagggaaaaaatcgtgagacgaatcttttgagcctaattagtctataattagccataagtactatagtaacccacatgtgctaatgattagctttatcttcaacgcctactagtacgaaatccaccctcgcaagcacgcgtggctagtagtactccggagctagcaaggggcagggatcctgttctaacatgtggtacatcaatataggccctgtttggatccggaggtctattaaatagccctccggaatcttactatttaggagtattaaacttagatta

SEQ ID NO: 30255 - DNA, 4107 bp, Oryza sativa
ttctaacagcaatatgcatagcttgacaataaaatgtcattagtatagagtaccggtgaatgaaattcccacctttaattttcatgcagctgtccacctcacttggattgttcgaaatttccattagagtcgggcttaatttcattaacccacttaaatgacccactattttgactcatttagaaacttctactaaattctttattttgttcatcaatctcaattattcttatatggttcgaaaaccatttagatgaacactttaatgtcttattttgttcatccatctcaatttacttttacatggttcgaaaaccatttggatgaacgcttattttttaatgtcttataaggtgaacaagctttatttagtgtttaccaccataatccgatctcataacttcatttgattagtatcttaaatttcttaaaggaaatcggaggtcgcttatgggtaaacatagccataaaaaatcatttgttggctaatatcttaacttcgtgaaatttccacttaaaactaaacaacgccattaaaatctaagggaaagaatatctctaactcacgagacgttccaaactcccctaggtatgtgacataagcgacaatgacactatttcaatgacgccttacttccatcattatagaataattattctcctcattcttatttaagcttagttcactaatgacgcagccgaatttaaaacatcatcaatgtttgatcatgtccacaaatggatttcttaagtctgcaccctatatgtgacttgtctttccataacaaaaccctcaagtcatgttatgtatatttaattgtgcaagtcacaaattaagagatacaaaattctagcgtccacataatggagctatgagtcataaatgaggtagaataatcttctcttattagagctcttgatgagctcccactgattgtattatttatttaatggaagcataatatcttatttttcataaacttgaatcacttaattttacttagtgaattatcatttaagtaataatagatgtcagaaatttctaagggtgaagtgtctcgaccttaatgagacatatattctcccctagaaatgtggccggaaaataaggccataatttcgacaatgtctcataatgattcaacccaaaaaataatgcccttaatcttcttatttaactactttattgaatcaggacattaagcatgtccctatttcttgcaaagaacttacacaagaaaatttcaagggtagcatacataggacatagaggcaattttatttccccttgcgaggaatatgagctttattatcattaaatttggaattgctacaaccccatagtaaagcttcatctttgccatcaaatgacaagattaataggatcttacttagtttgcctcttagtcttctatatttcttattgatttgcggaatgatgaaccaagtcaattatggtccactttgtcttagtattacaactctgaaaatgaccgtagtctaatgggagaagaatcatatgaaatggagaagtggcgcatatgaaatgtgcgatgtccatctcactaagtttgcacgccatgtgatttatttcttgtgctaccttttaaattatggcggcaaatgtgcatatgcactaaaattgtactaagcattagttttgacaaacttctaaagttcatctcaacgtttgctagatacagtttcgcaatgtcatgctcaaaattctcccctaacactaatagggatgataatctcaatatttatgagtgacatgcgaaacatagcattatattggccttctcccaggctaaagatgcctcttgagtttaggaaaaaattagtgacattagctgcgggagccacaaggaatcctttgttaatgctaagtcatactcaaataggccttaggctcagttaagtcaatgaggaataataataataattccatagactttaactgataaataaaattaagtggcactattattgtggttgcttgtgcaaattacgtacaatagtacattaacttacgcaataataacttaatctttatttcgctttgcatcaccgttgggcagagacaaaacgaaggaatcaataaatgaaattacttataatccaaaatcaagtcaccgttgggcagaaatgattagggaataaacattaatgtcttaagtcacatcaccaaaaggtagaagtgataaagtaaaaaaacccaaatcaaatcaccatacggtagaaatgattaggaaatgacgccattagtgatgccatagaattaaaattaaaatccttagccatatcaccgttggctagaaatggtaaaggaattaagcttactgacagagtagatcctcgatcacatcaccgtaaagtagaagtgataaaaggaattaatgcactaatggcatcaataaaattctaagtcatatcaccattaaggccaaaatgacagagaaaataattagatttcttcccttaattacatcaccgttgggcagaaaataattaaggaaataacaatcttaatgaaatcatctttctttctagataaacttcccgctggttccatttatctagaaataacttactcagtattgcaacagatcttaaatgataagaattgctgatggcatataattagtttaccatggctttaatcaatcatatgcaaaataaacttagaatttcatagtcaaagcaccattggtcataaataattatgaataatcttaaaattaattccttaattatatcaccatttggtagaaaataactaaggaataaaaaattataattgacatgcaattataataacgtgggttaaatatagcttcatatcttaatgcttctagtcgaatttctcgttggttccattcgactataaataattaagtttctaaggaaatgaccatcataatgatgttgacatgaaatcataaatactttctagttaaattttcattcaactagaaataaattaaatggcttaaagaaataataatcttaataaatattgacatgaaattatattaacgttagtcaaatataatatcatatcattaatttctttctagttaaacttcccgtcggttcccgtcggttccatttaactagaaatagttttccgagtgatcaaataattgaccataattttccagcaattttaaatggctaaaataatgccagatgaaattgtgtaattttgaaattaattagggcgtttagtgaattaaattgatttcggcccaattcttccgtagtcggcccaaacttgggccggcccgttttcgcgtgtgtgcgcacgcgctagctgagtgcgccccagccagcggcccaggtggcttccgcggccgaaggcgcgtggcccgtcagtggcgctggcccaacgcggagaggatccgagccgtccgattgatggacggctcagattgttcttgcgccggtaaagtcgccgacggggaggggtaaaccctaatccccattttcatttctcctcttctctctgatctctcccccgatctaatctcccggcgagcgagcgagtggaatcggcggcgatcttggcggtgacggcgttccggcgaggtggagcacgcgtgcgacgacgagcaccgagcggcttccatttgcgccggctggggggagcacgcacgagggcggcggcaagccgtgccgggtgtcggcggtccggcgaggcgggcgcacaagcggcggcgagcaccgatgcggcccggacctcgtcggcgggggggcggagcccgaaggcagccgccaagccgacgcttcccgtccccggcgagggaaagtgaggaggtgaagtggcggcgatgccgcttcccggagaaattccggtgggtttagaggcttcgaaatccggtaaattcccgatcccaaaaccctaatattgagtttaatctggatttaattcgggttttggtcttagggttcttagaaccgaaattagggtttctcgaattttggggattttaggccgatttgctccggcttattggggaaatttcaatcttgtttattcccttttgcctaacagtggggaatttaatctagtttatccccctgttttctccaatttacttctta

SEQ ID NO: 30256 - DNA, 5119 bp, Oryza sativa
ataagccggagcaaatcggcctaatatccccaaaattcgagaaaccctaattaatcaataaattgatctgtgaaggggtttctaaactaaattgtttttgaatgctcgatgtaggcgttgaacaccggcggccacggcagctcatacgggaacgcgacgccggcgtgcgcgttccgctggtgctcccgttccaccgccatggtccggagccacgcttcctccgacggcgacagacagcatgaggtaccccctttccgcccccgacgattacgccagcgatgccgcagccgaagtacacatctccttgcggcccggcagcccgcgggtggccacggacaaattcagggtgttcttgactgagcagtgagcacccagtcgccgttgctgggtagccaggaaaatactctcaggtggtcgtcgttgctcacgccgatgatacggagctcgccgccgccatcgtcgtcaccggcgacgaccctgaacttgcacttgcgggaccactccctcatgtggtctgggaatacgacgatggagaacctcgccgtgagctcgtcaagggctaggcggctaggaaggcaccgaggctgccgcggcgtctcatctccgacgtggggacggcgaccatctggtagcgccgcgtaagtggctcgcagacgatgaggccatcagggcagcagcggctgtcggagtctcggcgatcgtccaggaggcggtgtccgggacgaagtcgagtgagaggcggcagccgtagacgagaaccggcctggagacgtggacgaacgccgcatgggagaccgcgccgccaacggcgtggtattggccgacgaggtcgggcccgtggtggacacggaagcggcggaggaagacactgcaccgtcggcggcatcaacgacgacgacgcggcgctagcgcttgcagacggacgcggcgcggatgaggcaggcggcggatcggagtggaggcgcagcaggacgagctcgaggactttgtcggagatgtcgtcgaccacccacgtagccacgtaggcctcgccgtcgccggcagcaacaagacggtcttcttcctccgcgccgccgtgctccggttcttgcaagttgcgacggctcattctcggatccattaaccttgatcttcttctcgcgtttgtttatggcttgttatagagtataccatatcgtgcatcatggtagtattttatactcactccgtttcaggttataagactttctagcattacccacgttcatatgaactaggaaggtagtccgcgcattcgcgtgggcatatattttaagatgtgtttgagatatttacagttataaggatggaatattaactgtagaacacctctcatgcttcaaaaaacaaatctccgtataatttttctgtcagcatagcgtataatttttccaacctagctttataccatacactatttggttaatcccaataagtaattatcaatagtctttatcatataaaataagaaggaaaaattagtttgttttaaaaaaatatatctaacaaattaagtgtaaattgaaaataaggtgtttttgtctttaaattgaatgttagtggacatttttctaacaaatcttaaaaaacttttatcgctaacaaatgttttttattgtaccatcaagttagacctccttttgtttgttgtatattgatgcaatttgttgcatacttacatatgaatcaataaacatagaggagatatacatatcctagtcctcgcttccctacgatacgtgtgatctatggtgctattttttttaaaaaaaatagctaatcaacatgaatcttaaaattgaaatctaatagtaagaaatataacttttaaaccaactatatactgctaccttagttgctaccttagtgtaacttatatatgcaataatttttggaggaattcataattccatggcgtaccatagagaaaaatccattaacatctatgcacttaaaaaaagatgcaatggttaaatataatttcgcatgcatttttatttttgaagtgtggtgtattatgaatgcgcgcttgaatatctatccatggtatattaaaagtgcattaaatactatctaaggttgattacatggtaatataatatagtttagagcacttacacaaaagattatttgtgttgctcagcttatttgagcatactaatttcaataaaattatgaaggtactgtatttttatcccgtggtttatacgatttatatatgagttagcttttttttttttatttagctatgcatgtttgcaaaacaatgtatgctagtgcaacatgttttaattgtaattcagttgacatgtaaaagactaatggcgtgtgttccttcgaattttttattcaatggcttgcactatttatatgtaaactatgctcaaatcttatattcttatatagtataatataggcacatgaagcttacattactggaatgactccaacaatcagataagaaaacaggcgtataacttataattataattattgattgtttctttttgtttgatagcttaaagaaatagtgagaggagaggaatgaagagaatagggtcgaaccatagagggaaaggaaaggttgggtagtgctttgcacaggttggtgggagagggatggaggagactctctttttctaaatgatttagctaatgatcaaatgcttttttttctcagatttctataatttttaaggtgtgcatatcacaggttatgaatttctatgaaggtagattcagttttaactggaaaccgatgataagatgttttgtgttttcctttcttctaagtttcttctaatttttttaaatgtgacatatgttgacttaatagtgaccccgtattttctctaatttttattatatagaataatttttgatgacataatatatattgtcaattttttgttgtttggttgttggtctatgttcaaattatgtatttcaaattttatataccaaaatatgagtaataaatattctcattttcttatttcgttatagataaaactaaataaaagaacattacaaagaaattaaaaatcaggtgttatttggttgcagaagagatgtttattcaaattatgtatttaaatttttatatagtaacatatggttaatatagatcttaatttatttatgtatctaattataaaaataacagttcaaataaattaaacattagatataactacgatgatttagctatctaactgttgattattgttcttttgaattcttagtcaaaaatacatcgtttaataatttatataatcatcaaataattaatcatccctgtctataataatatatggcccaaagtctatagccgtgcctgacccgtttagcctcaagctaagaaattaagttaaaaactaccatgtattataagaaaaatggaaagaggcaaggagaggagaggcggtcaagggagggagtaaacatgtacgtgtgcatatgtacggtactgcggatgggagaatattttgtcaaccaatttaagttatctataattattaattgatctaatatactgaaataatgaatcaccaagcgttttataaaatatccatgtggcagattaagagtgtttataggatatttaatgaatttttttagcatataatagaaataaagggatagagggagagctagctagacttaatagatcaaagtctatttgaaataatttcaattttcgttatttggggattaaaaaagcaaacgaacggaggacagcaaacgtatgacgttgtatgtcgtacgtgcgtattccccacggagacaggatggagggatgtttttttaaacagtgatctaaccatctaatataatgggtccaccgatttaaatgaaaatcaatggtcagatttatctattttattatggtgccacgtggcggtatgagagcgtttatagggtgctatgtggtgatgcgagagcatttataggaagtttaatggacttttagtagatgatagatagatagatatacgctaatgatctagacatatatgtatatatatatatatatgtatatatatatgtatatatatatatatatgtatatatatatatgtgtgtgtgtgcaatgttagaaagtcttataacctaaaatagaggaagtaaaaaatttagtgcttattactttagcctataaacaatcacctttactcgaattacaaattaatctactgacgtgcactagaagccattgaaaattattcctctatttttcgtctttccttttcttcttctcccttcggctttgcttcgcttcttcatgctaggttgcgccggtgactaagatagcgtcacgaaccctgatttgaggctttaggctttatggtttggcgagcggttagatcattagagcgtccccttcctctctgcagttcttctatttatagtactagtggggttcgggagcttatctcgaatttagattcgaaattagttttaaccaaccacaaaaacggcatggttccaatttaccccaaaaaactttgttcttatctctttagatcggacttgtgggctcaatccgaaaaatcaaccaacagatataacatttatatgatggataaaatccttataaatatgagatttaaatcataatgcttggagtaatgtgccatatgtcaaaaattacatgttattttgtgtaatttgaaccataatatatgtggttttgtgaaatttattcttttttaatctttttaataactactagcaaaatgcccgtgcgttgcaccgggtattagcggggtgactgaagtttgatattaatgatttaccaaaacaccatagtataattattagcatcaattatatgtacagtgataaaaaaaagccatgtttgtttttttactattaatctcaatctctactacatcattcgtgtatgagtcagtttttctaagttcgttcgttttttaaaatacaacaaggacttctaattgcatctcataattttctaaaaacgtccaataaacgaccaatgaaaccacacacaatcctaaaaaagtaaaacaaagcaacattcaattcaaactatatatgccattaattagatctcaatttcaaagagattatggaa

SEQ ID NO: 30257 - DNA, 6189 bp, Oryza sativa
ccccccccccccccccccccgcgcgccgcctcggccggccgccgcccggccgccctgccctgcgcccactgtggataagaggaagtgagagagagagagagtagaaagtgtgtgagagagaggagaggaagagtcaagaggataaggttggggttaaaaaaatggtggatttttttaatgtaaaaatcaatttttattttacatgtggctctttaaaacgaatttaaaggcactaacttaactcatatgaaaaaagttgttaaaaacaaagttgtataacttattgagatctatcatttttactttggtcatttctccgtccgagtttgattaaactatataaaatttgaatttaaaaatataagaaattcaaataatttttcgggtagtaaatgatttcaaatgaaaaaattgtcaacaacaaagttgtataacgcatcaacatctacaacttttgttttggtcatttttctatatgactttgtttgaaccatttaaatttgaatttcaaaatatgacaacttcaaataatattttgaaatactaaatgatttcaactgaaaaagtcatcaacaacaaagttgtataactcatcaagatctataacttttattttggtcatttcttcatccgacaaagtgatagtagtattgtttacaaaatttacatctatatcatttggttctataaactataaaggagatatgtaaactttgtgaataatactactgtcactttatcggatgaagaaatgatcaaaataaaagttgtatgtcttgatgagctctacaacttttatgttcatgactttttcagctgaaattaattacagcttcaaaatattatttgaagttttgaaattcaaatttttaattgataaaataaagtcacaagaaaaaaatggctaaaataatagcagtaagaacacaataacatgatagagcatgattttagaaatatttagaaaaaaaaatcatccaatttagagttcatatgagtgagataaattagtttcaaattttctaattttatttttgcatacggcttcttaagtcaaccgtatggaaaaattgatttttccatgcaggtccttaaatggtccacaaacaaacaaatgaaaaaattcaattctgaaaaataaccactcaaatttttaaaaactttcaattgaaatgttcaacccaaaatttaaaatattcaaccaattttcaaaaatttcaatgtgcttacgaaaatttcagtgatacacattaatttattgtttcatgataacataaatttgtatagaaagtaaacataacattctctatctccccttgcccttataaatagagacaaaatttgagaatactgatgttttgtttttgaaaactaatggctacatcccttcctcgttttaagaaggttattttgaggggtcttgatattttgataattattcgttaccgtattcgtttcgattcgtattcgctccgtatctgtattcgataatattcgattccgttttcgtatccgggtttctgattccgatttcgattccgagaaaaaatataaaaacgaatatgatagaggtagtttccgactgtattctatccgttttcatccctacttgccagcgccgcgcgcctcgttttcctgcgcttcgtcttcttcttcctcgcctccctgcagttactgctctctgctcgcctgcacgcgcctagaggctgccatgcacgccgcaactcgcaagcaagggaccgtccgtccaggcgacgcgttcagctcagctatatatgcatcacagcatcagcgttttcgcgttgccttcctgctggccaggtgattgtttgttgcttgcagctggctctgtctggtgccgtttctttttgtcctgcaccgctgctctgctcgactcccctccttttctctatctctgcctcggccatttctgccactgaattgagaagtgatgcagggaaggatggatggctaggtactccaagcagcgtgatgacgactgatgaggaattgaggaggaagacgacgacgtacgacgcctcaagctgttacatttttggatggttcgagctgcagcagcgaagcgccccggccgcgcggcgtgtgagcgtggcgcgtggtggtggtggtggtgcgagcagtgcagtgcagggcaagggcgcgcgcggttgggtccgggttttccgcgcggcaactggctgtggctgtgcctgcagcctggcaggctacaggagtggctgctcctggccggtgggctggaaaagcgccgtgttggtgtgcgggaagcttgcattgtgacagatggaccgcatgccacacgcgcacggcgcactgcactgctactccctgcatgctccatatatacatggcggttccatacctgtttggcttcctcgttcgtatcgtatgctctttcatgacccaaagaagacaatagcgtatgataaatggaatataaactactgtctacgttttaaaatgtttgacaccgttaactttttagtacatgtttaaccgttcgtcttattaaaaatatttatgaaatatgtaaaactatatgtgtatatgaaagtatatttaacaatgaattaaatgatatgaaaagaacaaaaaattgacgaatggtcaaacacgtactaaaaagtcaacggtgtcacatattttgaaacggagggagtattacaaacttaaaaaatgtttttttaatttattttaaaataagtctttataaaaagtttttgaaaaaaaaatcagcagtttaagattcatgcttaagaaaaacgagatagtaactacgaataaagttagtgtagcttaactacactctggtggtgaaacatattcgtatgagttcaaattctaaacttgacacggctgttcgtatttacgggtaattattctttcagtgatagacgacgcatctgtgtcaaaaataagacttctgtggtgactttatgatactcaagatataccggcataattttcagatgtgtttacagaggtaataggcacatctggtgacaccatgaatatgcgcgcgtttatatgagtggatatgtttattgtgtttcgaagaaaagaaaggcatgggccaaatcaaggagctgattcatcgaactgagccaaacatccactactaaaaaaaattcgttgacggttaaaatgggtttttgttggtggctgattgtatcgctagcgaccaaaggctagtgaaaataatgcatttgcgctgacagggcagttggccgctagcgaaaattgatttccgctggcgaccacgctaagacggccgctagtgaaaatcgatctttgctggtagctaagctaagatgaccactagcgaaaataagattgtgttgacggcaatgttaagatacctgccagtgaaaacttttttctaagaacaaaatattgaaaatccaagtccggaacagctaatgagaaacacaaattccaatcacatatcataatcccccgtcacaaatccctaatcccctagtcgccagttcccgtcgtcgagctgcagacgtcgccgtggctgccacgattgttgtcgtcaccacccgccgaagcccacgctcgagccgaatcgcagtcaccgggtggccctgacccgtcgcttgccgaatctaggagagaggagggggttggaggagcccggttgttgtcgtcgtggcagccgcatccagatccacctccttgaccgctgtggaggactgctcacgcccccgccacctgagcaccgtccgccgccggattagcccccacgatacctcccaccacgacgaggggaggggagtggggcagtcgccgccgtccgcgagctgcatgcacaagtaaacctttcatggatccacgcacgtcttgaaaccacaacactgtctatacacgtaaacctttggtgcgtaagcatggtgtgataggatgtcaaaatcgcttcctcttattttcatcgattaatttgagtaccagtataccaccaatcgagccatcagctccaagggcgacgacgtctttacaccatgttgctaacaatctagtatactatatgattccccgtattttgctgcggaaattacaaagcaagttttaaatatattttttcaacaatcaatctaggagtaaaaagaaaaaataaaacgtcagggtttataagtacttattgttaaacaaacaaatgatatctacactttaatgttgaacatgttgataagtaaatattaaatactataaaaaataatatgtatatttgttaagggcccctttgaatcacaagaatgaaaaaacggaggaataggaaaaacataggattctgacaggaatgtaagtgtaaaacagaggattgcaaaacacaggaaaaacataggaatgaccgtttgattggaccacaggaaaaacacaggaatttgaggagagataaagactcaaaggatttcttccatgaggttctacctcttgttaaaattcctccaaaacttgtatgggaagaggcattccataggaatttcatatgattccatagggttcattcctttgattcaaagggctttgtaggaaaaattcctataggaatgaaatcctctaaaattcttatgaattttctttgaatcaaagggggcctaaaatattatggaatgatatgataggtgatgattggatatgcttgcatgttgatttgtagaattaaatagattgtagatgatgttgcgtgcttgcatgaggttaaatatgtattattgctagcaggtgatcttatcaaaaagaaaaacaaatgatacctgcactttaatgtggaacatgttgataagtatatgttaaatctctactattactttgttggtattttggtacgtcatccgtatttgagtcagtttttaaattcgttcgtttttaaaaatacagatctgtgtatgagtaggattttaaattcgtgtagttttcgaaatacaaaataagtcgtataagaaatttctttaaaaaaaacttgcatgctaacttgagatgaaagtcagactcctaattgtagctcataattttctaaaaaaaaatatccaagcgaatttccatagtgaattttatcggtttttaagttcgttcgcttttgaaaatacaaatctatgtatgagtcagattttaaattcgtttagttttcgaaatataaaagaagtcgtataagaaatttctttaaaaaaaacttgcatgctaacttgagataaaagtaggactcctaattgcagctcatgattttctaaaaaaaaatatccaagcgaattaccattgtaaatttcatcctagttaaactgtatatagtggaaatgatgtgataggtgatgattggatatgcttgcatgttgatttgtataattaaatatattgtagataatgttgcatgcttgtatgaggttaaatatgtattattgctagtgggtgatgatggcatggttgcatgttaagctttggagttagtgggttgcaactttatagaaagtatagattgctaagttctagtagtattataacgtacttccaatcttccatatctatagcctataggctagctagtgatccgcaacgacaacgaggagttgtcgaagcgaaagtcgaaggaggagttgtctattggtatcaaggaggagttgttatcaaggaggagttgttcattgataagcagtgattcattttgagcaacaaccccagccaccccctcgtctttagtttcggtgaagacgagtatgtcggctgtgaggtgcaaggggacggtttatcggagctctaagttgacatggacaaagctatcgaggaggtgatggcagaggccatgaattccatgaacgtgaaggcgaccgagcaagcggtcgccgaggccggcgcggaggcagaggcgaacactgtagtaggcttggatgccgaggtcttggagacggtggcggaggcaaaggccttggagacaatggcggaggcagaggccttggatacaacagtagagggcgacatggtgaccatcgtctctcgcccgtctggctacccaaaggctacaacttcggaggaagcatcactagagaagcatggtgcgtaggttagggcaaataggaatgcattgcatgccatgggcagtgaacgacacctttagttagtattcgtaccggtatactactactagtagtaagtcatattagggctgcaggaatt

SEQ ID NO: 30258 - DNA, 867 bp, Oryza sativa
gcatttcttggatcgtcgtcgtcggcaccgccatcacggtcagcaacctgtggatttggacacctctggaaggagctcttcagagaacggaagcagagcatgacgaagaaaagcacgtaggtgtatcaagcaaccatgctgtagcataatctatcgaaattgcactgatgatcagatgattcagatgacgatgatggatattttggatggcatttgtggagaattctctatatgacataattctttcattcaggtcagaaatctcaagtctaattaattagtacttagtagggaatagtccaatgggcattctgtcgcatgcattgggattttacttgttgatcattcagctaagaacactaatcactccttgatggcgagttctttggagtgatggttccctttagcatttagataaaaaaaaaatactgtactgctacatatacctcacttgatgattaccaatagatggttctttggagtgatggttcccttcagtattaatgttgtctgccacaatttgttcatgatttgatgttttcactttttagtccctgtcacatcggatgtttaaacgctaatttagagtattaaacatagactaataaaaaaactaatttcataaatgagagctaattcactagacgaattttttaagccattaagccataattaatccataattatgaaaagtttactgtagcatcacattgtcaaatcatggcgtaattaggctcaaaagattcgtctcgcgaattagtccaaagttatggaatgggttttgtaattagtctatgtttaatactctaaattaatgtccaaacatccgatgtgataagtccctgtttcccaaacagccgcttaagc

SEQ ID NO: 30259 - DNA, 759 bp, Oryza sativa
caagtcaagatgcataatggtttgttgtgtgtcctaatccagggagctacccaaaaggggcaattgcgttggatgatcttgcattagctattggcaaatccagttttcgttaatatgcatgcaggttggcaggaagtgcagacaagcaacagataagcaatctggtgaactagtctcaatccagtttaactgaaccgtttttgttcacccattaccctctactgggtattattccaatctgaatcctactaccaacaagttaaacaaaagtgttgcttgactaaaatgcattactaccttgcaattgatccttcccgttgatgacgatgaagatttccttctgtacttgagtgatgcctgtcctgagtttagaaaaccattaactggctctatctcaattgcatcagctggttctatgtccacatcaaatttacttcgagcttcctgcaaatgagaacgtatatcatcacaagtaaatcatgctgacagccataaaaaacgttttgcactaagctgacattgaacccagaagactccatgacactatgaaagtaagcaccatccacttcggtggtgtgaccagatcattcaggcctttaacaagttaactgttctctttttttctcagaaaaagagtgtccaaaaggaaggaagaattgatatgcatgaagtatgattgcatggatgttatgccatatatttcatagtaggtaaaagcaaccagaaagaccttatagcataaaaacaaaacaaaaatat

SEQ ID NO: 30260 - DNA, 2395 bp, Oryza sativa
  unsure (1)..(2395): unsure at all n locations
tgatatcctactaaagttatattattacaaatttggatgtgaggatgattaatatgtggatttaatggtagaaaccaacaccagaccttaggtggtggtacaagtgtcatttgagctaggttgttgttgacgtaaatctgacgtctagtaaataccaaacaaatctggttgcaaaatattataatgttatatttgttttctagatttatttcgagagatattttttatataggaggaagtgcattgattgatgtagatataggtgtgatactcatgtcataactggtggtagctaaatataatgtttatgaaaatgcaattcactagatctgtttatgggcatcccgccttgaccggcctaggttgggcctctattttcatcctaaaaacctattccaaagcctgaacaaaccaaaaaagtaaattaaatattaatactcatacttttttttattttagagtaacaataataataactactccattcaaatatggaaactgataagtattttaggttataggctgggccaaactcgggcttgtagttttctctcagctttttcatgacccagcataacctgctttgacatgtctacccttggcagactatgggcaaagatgacacattgcccaaatctgtggaagggatagagaacttcaagtggggattccattagttttcaaaaaaaaaaaagtggggattacattcatttcatatgtagatcacaatttgagatatttactatgctcaaatgatggtatggaatcatttcaatttttcacaaatgtgtgatatggattttggtaaatcttcctaacaggatcagaaccgactacaaagcgaacacttgatttaacaccaaaagttgggcgcccaccccaacccccctccccaggagccacaagtgcaaagggatgtgatttgacatcctacaaaacttaaatcaagagagatttagatgcgaggatatggtccattaatacatggattcaagggtggaaaacatcatcgcttaggtggtggtacaagtgtcactcgacgtatatggtggttggcataaatctggtgtctagtaaatgttgggacaaatttggatgcaaaagattatatgtcgaattattttctagatttatttcaaaagatatttttacaggaggaagtgtatttattgatgtagatgtagatgagctcgtgacataacgggtggtagctaaatattatatttacgaaaataccattgactagacctatttattggcaacccacattgataggctagcttgggtctctatttttatcaaaaacctattccatagcttaaacaagcccaaaaataaaaattaaatattaatatttatacttttttgtttaaataataataatatctattcagatatgaaaactagctcagttttgtagtttttcctcgcacttttcatggcccaagataacccgcattattcgacatgcctatccttggcatactgtggttgaagatggcatgctgcccaaatgtgcgaaagggatcaatatcttcaactggggatcacatttatttcatatgtagatcataatttgagatatttacgatgttcaaattgtggtggtacgaaaacttttctattattcacaagtacagatgtggatccggttagaggagatgatctgnggtgaacattccattaaaccccttaaatttgtgaaaccccacacaaagggggggggggcgattaatacccaaaagaaagaagacatcgctacgctaatatggtggtacaagcgctattggacatgccaaaattccaatgatatatatggactccatgaagattcagaatggcaagcagagttacaaaccctgtctttatctagggatcagggctcaatataggggaaaataaccgttataagttcactagtctttctgcccttccccctacaactcactttcgtaaaaggacccctacaagttcaatttctcttttacttcccctttcactagtttttaacgatttatcaccgttggttcaattcctcgactcctcatgcctcctgggcttcagcacggcaagacgaagttaccccatgtcgttttagcaagaacatctacctccttgtcaactacggatcacctaagttgtaaacgttcttaatagttgtgctgtgttttgtgttgaggtttgccatcaccacccctgcgctcgtggaaggaaagagaatcctagtaaacttaaatcaaagagggatttagatgggagaatatgatctgttgatatgtggattcaagggtggaatccagcgtcacttaggtagtggtacaagtgtcacttgagttgtgtgttggttggtgtaaatatggcgtttagtaaatgccgggacaaatttagttgtaaa

SEQ ID NO: 30261 - DNA, 689 bp, Oryza sativa
taaccatgacatcctccaatgttcatttcttaacttttttttatctgcaactgaaaattcttaaagggagcttgacccaaagaaatccttactactattttaagattttaccttaaggcacacgtcgaaccttcttcctttttggattgttgatcttattttagtgttactaaggatcatcatgatcaggctctcagatcaattctcatgttgcttctcttgattcgttgttttctggcacttgttttgttaggatctattgcactgcatggtaatcgaaactacgtattgtagtaaactatgtaaagataaaacaagcatattaaatatgtaacaatatcttctcaataggtaagactttagttcgtgcacaaatctgtcaactatgagatcatgccgtccatgagccacgacaaccaacttggtactgtattcaatgctatctctatttttgtttacatgagtttgaccaatttctgggattaaaaaaatactcgccacgataaccatgacatcctccaatgttcatttcttaattttttttatctgcaactgaaaattcttaaagggagcttgacccaaagaaatccttactactattttaagattttaccttaaggcacatgtcgaaccttcttcctttttggattgttgatcctattttagtgttactagggatcatcatgatc

SEQ ID NO: 30262 - DNA, 731 bp, Oryza sativa
tcactacatccacaaaatccataaacctaattcaaatacaagggtgtatcaggagtacaggttgcttactcattcatctcgcttagaagacgaggttgtttattagtgcataatccattaagtttttagctaaaatgacttgaaaaatagatcttatatatatatatatatatatatatatattaaaaaacatactatttaaaagttcagaaaacgtacacgtgaaaataagggagaagttgagaaatacgagtgccaaacacaaccctcataaatattaggcatacacatgcatttcaattaggaatccagtgagcttagcgattaactccctccagttatgagtatctgtgttcaactttaatcgtccgtcgtatttaaattttttttaaaaaattaaaaatttaagtcacgcataaaatactattcatgttttatcatctaataacaataaaaatactaatcataaaattttttaaataagacagataattaaagctgaacacagaaatttataaattgggccagagaaagtaccattttactgtaggtctttgtcgaatataatggtgcgtgtgtagtggagtggtgtttccatgtaatccggggaaaaaattccctaacccctgtcaggccaaatctttccaaccaaaactattcatctggctgaacccactcttctctgtcttcctccactcatcttatgtatacttcgaggatgagcagagcac

SEQ ID NO: 30263 - DNA, 1435 bp, Oryza sativa
atgtatacatatatatatatgtatatatatgtgtatatatgtatatatatgtgtatatatatatatatgtatgtatatatatatatatatatatatatatatatatatatatatatatatatatatatatatatatatatatatatatgtatgtatgtatatatatatatatgtatgtatgtatgtatgtatatatatgtatgtatgtatgtatatatatatatatatgtatatatatatatatatatatatatatgtatgtatatatttcttataattgtgaaataaagcaggattaagaatttaagatctattctatttgtgcatattgattataagagaataattatcaacagttaatgataaccattagatgaaacatagctatatgatgcaaggagcagcacttgatggaatttactcaactagcaacgaaaaaataggaaataagttagagattgttattactcaaaaacgacagttaagttatttctatctctaaagcgccctttatgagatcaattttggatgctttgtaacttaagaagtacaaagcaccataaaagccctcattaaaaacatgtgtagcacatttatgtatttgctatcaaatccggtagtctatatacgaaacatttacaacgcggcatatattaggtttcatcaactaattaactacgacaaagttgtaatatccccatatccaacttacgaatcgttccctcctaattatggactacaaacaaagaaatcaccagcctttggataatacatagtaactgaactattgattgttcggtgaaaactttaagttgatttaattttgaagctgttaaccactacatattaagccgagctatttctaatctaacagtttcatattggcatggagtagcctatttgcctcttgcatatgtgttgttaccattctcatcccttgggagagatattgttcatccactttgaacactcaatcctgaatcctaaagtccaagaaatctacgagaaactaaagacaagcaagactagatattatccgtcagtcccatttgccatgcacttcactcttgaacattatgttcgcattctaagaataaagatgattcaagtaggtagcaactaggattgtgtttggcacaacattgtatgcatcaccaatatgaatacaacattgtaattgccaagaaccgaatatttttttatcaagcaacgccactggtttttttatattccatttttcctggcacaaccacatggggcccaacaatgtgcacacacactggtcaatgccatttgtatgatcaatatgtatttgtcagtggacgctagcaaaagctagtagttcttggtgcacacaaaatacaagtggaaactagaaaagaaaaactcgagtcccccttgacttggcttttaagaaagagggtgagggctcaaa

SEQ ID NO: 30264 - DNA, 1805 bp, Oryza sativa
tgtacacatttgttgcggttcgtaaaactacttgttccttatattcatggtaaaaatgaaaaaaaaataaagggtcagcaaaatacaatagaacgcttcaagatgtttcgatgtaaagcattcatgatatgatgacaaagaaaaaggggaagcacttgtcattagtgatgacataggtgcatgactccatccactagtatttaaatcctgctatttgcgaatattaagtacatgcatatgcatatggcacaacaacaaaaacctcacgtagaggctcatttgtagagaatttttaaaatgcctgtaagttttaaagctctatagtctagagacactttttaaagacactctcaaaatcgcctaaaatatttttactttagggacactttagagacatttttaacatactttgttaaatttatcttgtagagccatcttttcggcactttaaaatttgccttatatgtaaaggcattttttccaaatattaatatatatcaagtaactagatataagtaacacaaatcacatacttatatgtaattatatgaggttgagatggttagtgcattgaggaaaaaaatggtaaactcaacaggtcatgagtttaaggattgataagggataattttttttctttttttttcatattgatttgctatagttgccacaacatattaatgcctctacaaagtacctctatttgtataaagacatcttataaaatgcctcttagttcatagatacaattcaccaaaaggcacttatgagacactcttcaaaatgtctctataacactgtaaaggcattttttaaatgtctctatagtattaggaaaatgtctctacaagatatatttgttgaagtatgggtttttaacatgattttaaaatattatgcatatgcaggtagactttcaacaggattgtagtgatataagagatgtgccgctaatttctatctcttagagtgtttgtcaggggggcgcataaagggatgggttcactgaggttaccgtaaacatcataacggaaacataaattcggtcacaagttcaaactgatgttatgcaaggctaatatttgttctttataaataatatatagtattcttttatgcacaccatatattttaaaccatgagacccatgatataaccatgcatcctccaatgttcatttcttaacttttttttatctgcaactgaaaattcttaaagggagcttgacccaaagaaatccttattactattttaagattttaccttaaagcacatgtcgaaccttcttcctttttggattgttgatcttattttagtgttactagggatcatcatgatcaagctctcagatcaattcttatgttgctcctcttgtttcgttgtgttttctggcacttgttttgttaggatctattgcactgcatggtaatcgcaactacgtattgtagtaaactatgtaaagataaaacaagcatattaaatatgtaacaatatcttctcaataggtaagactttatttcgtgcacaaatccgtcaactatgagatcatgccgtccatgagccacaacaaccaacttggtactgtattcaatgctatctccatttttgtttacatgagtttgaccaatttccgggattaaagaaatactcgccacgataaccatgacatcctccaatgttcatttcttaacttttttttatctgcaactgaaaattcttaaagggagcttgacccaaagaaatccttactactattttaagattttaccttaaggcacacgtcgaaccttcttcctttttggatt

SEQ ID NO: 30265 - DNA, 745 bp, Oryza sativa
acgccccccgtacgaagatccgaaaagcttgtacgcccgcgggcacgcccccccacccccccggagaagccgaagaaaaaaaattaaaccagccgcgactgcgacgtctcgatcgtgtgcgcgtgggaagaaaaagcacgcaaaaaaataaaaaaaaaggcggccccgcgacgcgacgtgtccggtgccctcccggcgtttgacgcggcaacctcccgcatcgggccccggccgggcacccaccgggagcctttcgccgagccaacgagccaacgcagcgtacgcacggcacgcgcacgcgcggcgcgttgcaggatttctcggttgatgacggggaaaaaggtgcggtggtgtggtgcctttgcttggtgaaagatgggttggttatctggagctacaagtgataagggggtactgtagcagatgatgttaaacaccggcgtatggtgttcggaagtagcggagttctgcatcagcaaaagctaaagccttgccagttttaatttgccaccacgatctgttttcttgagctgttggtgattgaaaggttgggagtccttattacaaacgtaaatgctcaaaacacacgtacatttatccttataaacatatttaaaaaacggatcattatattttgagattaacaaaatcatcacaaatatctcgatatcaatacgtatatcgcatattaccgaagaaataattagccgtaaatatgagcattcgtaccaattctaatatttaa

SEQ ID NO: 30266 - DNA, 1007 bp, Oryza sativa
tgcccatgatcacgaattcatgactcgagaattgtacacacctcttactcaaaatccttggcctaatcttaattttggcataattttgcttttcttttttcacatagtgccctaatctattgtggagctatgatcgacgtcgatatgaacggtagacaacatcgtagtcgcgccgaccctcgagggaaagaacaccggcgagttgccaagcatcacacagcgaagatggttcctcgtaggtgtccggtaatacgatacgagggcaccacaacggcgaatgcgtatgtttcgacggggtacggagaagaaatctccgaacccctaagatgcgcctgggccatgaaccaattgggccgtttagtcaaaactggaccaatcaccggcccaccctagttgttcctctccataaaccagaagttgccgccgcccgccgccgacggcgatcgacgcgacacacgggtggagaggaatatacgagtacggtggcggccggcggcttcaggagttgttgatggaaaatgggagtattattttcgagagtataagtctgtagtttggttggaatacttgaaaattcgagagtgtttgggagaattaagggtccaattcccaccaatctcttacctagggaggtctgttaattcgtgagatttgaagggaattcaatgtgaaaccaaacaaaggatggagactatgccaaacatgccctacgagttttttttttctctctctcaatcatccagtttaatttgcccttaatcaaagcagggttttatgagctaatcacaccttaatcgacattgagcaattgtacaacggtgccacaaaaaaattcagtgacagaagaaccaaaccttaggttggttggtcggtcagtcagtcagtcactgcagcggcttgaagacctgagagtgcggcgagacgacggcctcctgcaccatcctcctggggtcgccggggtcgcgcacccacttcacctcgctcatgttgggcgtctcgacgaacag

SEQ ID NO: 30267 - DNA, 3742 bp, Oryza sativa
cagcaagccagcaacagcaacgaacattctccgttttcagttagatggtttctgattacaaaacaagagttaaaaaatgtactatttttaatatatcgcatttggtctacagtatatacattattttatttatatttggtacttaatttaagcctcacttagacctttgtacatagccttcaaatttgacggcccagtcctgctaccaagtagctagtagctagctaggcggctactagctgctgcgtggctactggtgtccgcccggcgtggcgaatccggtggctggggtcctaccacgaggccgtcgttcaggcatgccgatgttgatacccccacagcgcgaggcagcgcagcgatgacacgacgagcgcggctcgcgggcgcagcagcgcgcgcggtgtttcggggcggggaagggtgcgtgcgcgacggggcagcgcacatgcgggcctcgtggccacgctgccccaccccacagccaagccccccacccccgggtcgcgtggcggtacacgccccccgtacggagatccggaaagctcgtacgggcggggaacgcccacccacccaccccgagaagacgaagaaaaaaaaataaaacagccgcgactgcgacgtctcgatcgtgtgcgcgtggggagaaaaagcaacgcaaaaaataaaaaaaaaggcggccccgcgacgcgacgtgtccggtgccctcccggcgtttgacgcggcaacctcccgcatcgggccccggcccggcacccaccgggagcctttcgccgagccaacgagccaacgcagcgtacgcacggcacgcgcacgcgcggcgcgttgcaggatttctcggttgatgacgggggaaaaggtgcggtggtgtggtgcctttgcttggtgaaagatgggttggttatctggagctacaagtgataagggggtactgtagcagatgatgttaaacaccggcgtatggtgttcggaagtagcggagttctgcatcagcaaaagctaaagccttgccagttttaatttgccaccacgatctgttttcttgagctgttggtgattgaaaggttgggagtccttattacaaacgtaaatgctcaaaacacacgtacatttatccttataaacatatttaaaaaacggatcattatattttgagattaacaaaatcatcacaaatatctcgatatcaatacgtatatcgcatattaccgaagaaataattagccgtaaatatgagcattcgtaccaattctaatatttaaactcgggccggtgtacgtattatatcacaataaacctagccatttgacgacaagtccttctggtatacgtcgtgcgataatcagcgtatgccattcgcgtggtgtcgtatatctgtactgattccatctttgctgatggttaaggctatatttgattcagcttattagttgagctatttcatcatgtttttcaatgtacattatgtaatgaatttatatttgtgagttccgtaaataaataaatgtatctctcaagtttgtactccgtaatagtgaagtacttaattaattatgttctaatgacccatattatttcacgagcttaaggcttcgttcgttgagcttttcgacaacacgtgaatcaagataagctattaacatatagttaatcgagtgttgattactaaaatatttatttaatttttaagaaacttatatatttgttcatacaaaatacaccgcttaacagtttggtagcatatgcacgtaaaaaacgataaggtaaagttggaaaattgtaatctatataaacacagccttacacactagaaaattgatttatcacaaaaaaatatatggcatcaatactaaaatcatgacaatagatacatattaccaccatttttaaatcgctgttatccgtgataataaatatagtgctaataggttgttgtaacgatttatatttagtggtaacaaatttggatattggcacaaaatgatgtggcaaaaaaaatcgtattgcaacacttcacatcgttgcaataaataattattgtcactaattcacctgtgtaccaattctgttagaaaatacatatatttccatttgtgcctacctaactgagattagaattatggatttgagtatctaaagatttcaaatgaaaaaattgtcacatataaaattgtagattttatcgatagctataatttttatataaaatttgtctcaatcagtgtccatatgaaaaaaagtaagttaaattatgagataacaaatttttttgttggaacaaatttattgatcgtgggggatctagagtcgactgcaggcaaaaaatagtaaaaaaagtaacttaccacaaccatgtgttatgcaaattaccacaaaaattaaaacggtggcgatagaacatgttttttttttgcaacactaatggttttttgacgataactcatttcctattgcaacaaaaatattgaataaaacaacgatcgtaaatcgttgcaacaaaatatggttatttgctaaagaaatatcattgtaatagtataatatatcttcacaaattagttttcgttatagtaatttaatagtaatacctcaattatcaagttttcaccgaacagttgagagaagagatggacttgtggaccagagtagaggagattctggccgggtggctggagccttccttctcctccgaactttctcaccgactaaacgtctgaacctcgttgtcaccgagtcgcgtcaaaacatttaccagcgctaggttccaacttccagtataccgcccacattgacaaaagaaatcacccccgtccagaaccttccacggtgaaaaaaaaaaagaagtcgtactccgcctcataaaaaatcaatctatattaaatgtggcatattttaatactattacgaatataaaattatatttctaatcgtagtattataatatatcacatatatattaggttggtttttagggatcgatggagtactctatatcaaataagcagcaaaagaaaaaatcgccaaaagatggtaacagtgacgcacaattttcgttgtgtgttgacaacggactctggaactgaagttattttaacaagggactagggactgaagaatgcaaggcaaacttttgagagtaatccttacacggcatgatatattattgatgtagtggcttcatatgcgtttcccgtttttttagctggaaaaaacgcaatgaacaggaactgaagcatgccacatgaggacataaggataaggaacaacatggcaacttggctcacaagtgatcaggaaaaatattataaactgcattttttttaatttgagttattctctctgcccctctcatagtctcatgcatgcgcaagggataaaattttctgcccaaaaggaaaggcaaacaagatttgtttagctccatttcatgttaactaaagtctgaacctttgtaaggtctggacctcccattttattttttaatttaaacataactagcaagtctttactactccaaaaaacttacagaatttaccaagtggaaaacattacaattagtttatcgaggttcataatagatttctgatcatatacatggaggtgatatttttcactctgttcagtcagtaggtacctctgggaaggcggaaaaaaatgtgaaatgttaattgtgatcgcaactagatactctatccgtcccaaataagttaatctagtacgtgatgtggcatatcgtagtccgggt

SEQ ID NO: 30268 - DNA, 650 bp, Oryza sativa
ccatctaaacagtcattcttgaagttttttttgaactttttaaattcatatggtttgaagtgttaggaccttccaatcttgtatttttcatttacgtattttgaaaatcatatattccaaacgagcccttagaatgctaataactttcacctatgcgaccacacgtatatgcattacaatttttactcgattatatggatttgttttttttccttcaactctgtcccctttagaacaaaggaatttgagaaaaaatttgatagattggatcctatgtaaccatttggaacaaaggaataattgctcaaattcctttaaattcttttagattgtgtcaagtcataggaattatgaaggattatcaacatgaggtgccacctcttgggaaaaaaaatttctgtgtctgtcagtctcgtttgattcctatgtttttttttctactcaatccaaatgatcatttctactgtttctttgtgtttttttctatctgtaggatttaagataacaagacacttgaatttaaaggagccattaagctgatgcgttccaaaggagccattaagctgatgttaaaaggatatttttcatgcattcgtattattttgtgtgtacatgtttttatataattggtcaaaaacacttggaaaaaa

SEQ ID NO: 30269 - DNA, 1892 bp, Oryza sativa
aaattcttatcgcggtttacaggtggaatctataatttgttttgttattagtctatatttaatactttaaatatgcacttaaaaataattttggccaaagaactaagcacggcctatgtcgtaaaataaatcaacgtaggtactattctgattcgctgtattgccagctagcattgttaccaccgttatggacttattatggtaaatttggttaggggcatttgcaaatttgccaccggttttttgaatattgcaaggataccactcgaatgacagttctagtggcatttttgcaattttctagtggcagttttgcaataataattcaaagtagtggtaaatttgcaattgcccctgttcggaagcatcacagccgcatgtcctaagattgattaggcatgcatggaagtactgatttttttttcagcaagctggcaatgacctgctaaaggctgagtttagttccaaacttttttttcaaacttctaacttttctatcacatcaaaactttcttacacatataaacttccaacttttccgcgtcacatcattttaatttcaaccaaaccttcaattttaacgtgaactaaacacacccgaagtttttctttccctaggagtaactcgctggagttgcattggtattccgtacatcagtctaccaacaatcgttaaaatagaagggtgggaaagctgctgaagaaaggaagtaatccagtcttattagaggcaagttgtttatttgcctaaccctagctggtaagaggtaacgcaatcgctagacagatggctgcaagtagacgctctcggctctcactaatttagaaacgaatttcaaagctgactggtccgtccttacgtataatacgtagttgtacacctgaaccgtgttatttgtaatattttaaatagcgggctaaagtatttagcggttagcttctcaaacaactatagcggaagatagtggcagctacatacaatgggagatttaaaaccctaattatttggtggttcataacgcgcaacagtagtcacgaatagtgatagtcagatggtgtcacattctagcaaagcatatttcaacattgttcagcaaataatacaatatactaacaggtcacccgcgctgcttaataatagtaccagctaaatcgtgatggttgatagtacagcctacaacactctgcatatccatagtcaattactaataagtgtcacgacactaatggcatgacaaccatattatgcacttctctatctaattttaaaatttattgcagatgtatacacatgacacggtagttacccacagacaactcatgcacatatgtacgtattccatatgatatgaacacttgggactttacataattcttattcaaaaaatttacgtaattataatttattttgttatgagttgttttattactcatagtactttaagtgtgatttatatcttatacatttgcataaaatttttaaataagacgaatggtcaaacatgtgagaaaaagtcaacggcgtcatctattaaaaaacggagggagtagcaaaataaccatgctttactatggtaaaatcccgcgcttatttgatatatgttattcacttgatcgaaaataaatattagaccattataatatcagaaaatatcatgaattaatttgtatagtgtacaaaaagtagtttttacaatagtataggaaattactccatccgttattccatagagaatgttactgtaagattcaaaattattactctggatactaatataattcctgtcaattacctctctttttttttcttccaacacccaaccactctgccactcttgagttaggagtcataaccttacatcatttaacaagcgaaaatatagtacgtagta

SEQ ID NO: 30270 - DNA, 1546 bp, Oryza sativa
atccctttgataacaaaaaaagacacgaggcaccaagaacacgcgagtaatcgagcatactgtacctctggtgaccccacgacgaggcgccatcacgcggggtggagctccgtggaactgcccgccggggcagcgacagcagcaggaggaggaggaactcggcagcagcagcatcatcatcggcaggaggaggaggaggagatgacacggcacaacgaggcgaaaaagccaccgcagattcccccagcttccgcttgctattggcgggcaaaacggcgagcgataggaaacgcacctttttcgcggccgcccgccgacagtggatgccggaggggggaggggggtctagggcgaccacggcggcgcagggccggagaggggcggcgcgccggcgagggcgagggcgaggggagtgcgtgtgtggggctccgaggtgtggccttcgtgtcgcgcgcacgtgaggggaaaagaaaagaagaaagggtgtactttttccgaatctcaaagcacttttggacggacgggcgggtggggtggcgcgagcggcgatgtggatggaacattcgacggtgtcggttgctggagatcctcccctcccggtgtttgtcctgctactgcggagtaataatataataataatataagacttcctatgtttcataaaaaaataatatagtactgaatgtgtacatatatgcatatatctgtccagatttgttgtattagaatgtgtcacatctaatcctagatttgtttcttttggaatggagggagtacgatggagcatagcagacttcatcgagccggcagcaatggtcatccgtcgtccgtgaaatcggtggcttggcgccctccttgggcaaaccaggatttttaaaatataggaatatgaacaacacgatcatgtttagcacggcttcagatcccagatctacgatggatttgaactttctggatttgaactttctatgttaaactgtagtgatttaagaatgtactgtaaattttatctaaaacatgaacaaaatgattcatccaaatatttatcaacataatcgtgaactcacattcatggatttgtagaactaggaaaactcagttccaagaaatcttggatccaaagatataccaaataggacctatatatgattgaatatgttagtttagttcttcgtgtgtactcgtaagggttaacaggatcgggtgtgtgttaataatgatgagtgtgcacatgtatacaggcatccgcatctgagtatgtatcgtgtttcgtaaaagaaagtgccctagtactccaaatcttttagattgagaaaatacagaaaaaaaaactacatgaatagcaattcgtatggagcacaaaaaaaatacaagaaatcaagaaaagaagagatagacacggtagattttttttcaaaaggttggacctcatgttaaaattcatattcattagatataaaattcatattaaacggcatggggacataaacgccctgtgtaaatcgtgaggatggacgtgatcaaaccataaagggctgcaggaatt

SEQ ID NO: 30271 - DNA, 4615 bp, Oryza sativa
attcacttgatcgaaaataaatattagaccattataatatcagaaaatatcatgaattaatttgtatagtgtacaaaaagtagtttttacaatagtataggaaattactccatccgttattccatagagaatgttactgtaagattcaaaattattactctggatactaatataattcctgtcaattacctctctttttttttcttccaacacccaaccactctgccactcctgagttaggagtcataaccttacatcatttaacaagcgaaaatatagtacgtagtatttcttttctcaaaccttaatctctactaaaaaatactccctccggcccaaaataagtgtagttttgcactattcacgtttaacatttgaccgttcgtcttatttgaaaaatttttatgattagtatttttattgctaatagatgataaaacatgaatagtactttatgtgtgactaaatattttttaaattttcacaaatttttcaaataagacggacggtcaaacgttgagcacggatatccacggctgcacttattttgggacggaggtagtatataataacttttctaaaacatatgaagtattttacatgtgcttaaaaaaagtcataaatttatccttagtaaaagcaattctatatcagagtatcggtttcacattctctaccacaatgaataatgatactatcattatagacactgacatgtggggtaataggaaggtaaaactcacattaggggcagagctaaaacgagatgcacggagaaggtgccacttgtttaatttgctctgcttaatttatatcaagtttaaactaatgcgagtgtttaaatttgtattgaagggggtgcacatatggttgaaatagatcaggtatagctacaaatttatcttgattgagttcttgggcaccccctcaatgctctagctccgcccctactcatatactagtgattgtaatggtataagtgatattatgtagaggatcctcaaccccattcaccacgtttttaaacaaaaaaactagtccaagctttctcatccttatccacccatattctcatccacccgatcgctccgccttcgtcgccattcttcttttcgcgggcgccgggtaagcgccttacgcttcgaccatgccggcgtgacgccagcctgtctctttgacgtcgtcgtcgtccccaccatcggcgcttccttctccaccaccgacgcccacgccgtcagcagtggtgatgacgacgcgcgcaggcgctcgtgccgcttcactcacctttgtctccctctcccctccactcactctctctctctccctccctctctctttctctctcgggagaaggctgagaaggtggagatgaagccggccgagaggaaggggtcgtcatcgtcgtcgtctccggcggccgaggaggatgacgacggcgcggcctgattggcaagatcaccctcaagctccccaagccaggggtgatcggcgtctctctggcttgccgtcttcgtcggtattctcatcggctgggcatggcgcccacgctgggctatcgccgttgtcggggacaacgaacagccgccgccggtcacccctgctctgcctccatcgcacgtcgccgaggacttttggccggacatcaccaccttctgcgtccgcgccacaaccttctccatcaggtatcagtcgtgatacctcagtatctggcctagtatccacaagtattaggcatggtacccaggtaccaaagtttgtgatacctaggtaccagtcggttctaaggtactaggtaccaggtacccaggtaccaaagtctatgatacctaggtaccagccggtaccaagataccaggtaccatctaccagtcaatacccagtaccaaaggtaccaggtaccagctggtactcaaagtactaggtgctagtggaacgcacctggaagctcacggaaagaaagtaaaatatcccgttctaacgggatcccgttctgtagtctccctctttttaaactatgtgctttacctaaaattaaagttatcttttttttaaggcgaagtgagtattccacaaacaaatattttttttccattctctcactgtaggttattatgggcttatggcagtttgtacccctactatagacagccaacaatccagccagccacgtcgccacgtccgtgttcgtgcctgtgcgtggtagcgcagcggatggattggtggatgatggggccgtggggtgatggaccagcggtcaataagtgcggtcggtggggtacgcttcggatgcgatgaagaaaaccacacatggcgatccacgacgacgacgacggtcggcacggaccaaacccgcccgactgattggtgatttggtggaccggggctccagcctccatcaccttggagtagctgtagctagcagcggctacagcagccaaacggccggcgtacgtttccagcgcaagaaaaaccgagagagcagcgtgggacgggacgggacgggagctgggggagaaacggaggacaccgagaggcggaggagaacgaaaacgagaggcgcgggcgcccccccgttttgtttttgtctagctcgctcgctcgcgcacgcagcacgtacgcagccaagccaacgactggtgccacacgggcgcgcgacacgcgctcacccccacccacttggcctgttggccatcgccattcgccgcactcgcgacacgacgaggggatccgtcctgaccgggagtgaaaaggagggctgaaagttttttttcgcttgcaatgtagcgagcccggcagtacataggacggtaggagtatatacacgtccgttttttttttgttttataatggaacgaatctcggctctttgctttaaaagaagttacattcatttattacattctctcaatgagtaaacattcagttaacttcataatgactgattgaaaaacatcaacactaaaaatggaaaaaaaattattgaaatcttttgtaaatcttcatccgaaattaatgaaaatctacttgtaacttgtaagcttcaacatgcagcatatattagctccatattctcttcatatttttgaagttgtgtctaaagtcggaacagtgcattgctcggaaatgagatgaaattcgatgatatgtatgaatcctcctcgcgcactgaaatgttggatggtaatacacaacttgaactagagaaatcgtgtacaacttgcttattttgtatgttaataattattcttttggagcatagccgatgtttttccggtgcttgaaaggtactagaggtccgagtgtcaatagttggaaaatacccctatggcaatgtttggctaatgggaaatggaaatgatttcccacccataaaaagacatctttaaatcttaactattcattctccctctttcatttaattctaacccttcattcatttcctaattccaatctcatcctccatttttcgttatccaaacacaccctatgtattgatacttttcgatgatgcacaattcctatctttttttttcgtttgcatagacatataatctcgtatgtattatgaattaatttattcggtgtattacgttattattattttttgaacatgctaaatgtttagacacgggcagataaacctgcaaaatggcataaatcttatggtgtacatcatgctatataccgcaatcatggaacaaagacaaaatgtctatattgtactccctccgtttcacaatgtaagtcattctagcacatttctcatatttatattgatgttgatgtatctagacatatatatctatttagattcatcaacatcaatatgaatgtggaaaatgataaaatgatttacattgtgaaacggatgaagtactggttgtcacactataccatcacaccaatcaagcgaagcttgcatcaacgatgatttaaattttacaaaaaaagagagagaataatttgtattcattagccatttcatctaaaagtttaagctgaccgagaaagtctggtaaatatccactcgtatttcaacaaattatttaaacaaagtctctatttgaaaaacatcaacattcaaaaaggggaaaaataattattgaagtctctacgcgctaggtcgctgtcttgttaatcgatcgaattgaataacgtatcaacaaatttcttcgactcaggcaagcaccaagcagatatcaacccaaatcgatcgcatgtcgtcacacacaatctcctttcaccatcttcacgtcattcaggacaggataccacaccgtgcgtatcacgcatttgatatgcgagtgcgctaatatacactcccagtccgatcgatttggcagaggaaatttcatactttcacatacgtgagtctgcctaattgctctccgaatgatctaattgaccaaacgacgagacgagtagtccccggagcgccgctcacgctacaggacgggaaggcggcagccggaagccgcaacgaagccggaaaccgttgagggccctttgaatcaaagatttatatagaaatttaataggatttaaatcctatagaaaattttcctatttgaccctttgattcaaaggattgaagctttctaaatcctacgaaatt

SEQ ID NO: 30272 - DNA, 1287 bp, Oryza sativa
gaagaaatataccaagagctctaacctcttgaaaaatttcctttgagtctatctctctcatccaatttctgtatttttcctgcgctccaataaaacgattatttccgtgtttttcctgtgttttacaatcctctgttttacacttcaattcctattagaattctgtgtttttcctattccttcattttttcaaccctgcgattcaaatgggccctgaagctagcaacttccaagctccaaccgatagacaactctgtccatggtttcgctctcacgggcgactcttgctgcaccctgcatgcagaacttgtagaatcgcgctataggtttctccaatctccaatatacgaactcgcaaaatcatttcaaccttgtcgacttgtcttacgttgttcttgtgtacgtagagcaaagtacagagaagtacattgctcttcaagtcttcgtccagatggggggtgagagatagagagagcgcatcactttttagccttttgttgcgcggacaaggctaatgtttggaacgctgtctgtctttttcctggccatgccgggctcgtgagattcctggggaactgcccaatgtttcagacgaagaccgtggtgcacagcactggtgccgctggaagtaaaactgtactacgctcgggactctgaaagtctgaactctgaaacctgaccgtgaccggctagagacgaacgcgagtatacgcgacaagtatgcagactttgattcacgattcacgtgcccgggctcagcgggtgtccgcaaccatgcaaacggcggcgtttccggtgcggcaaagctttggcttcttggcgcgcggaacggcggcgtctcacgcgcgcggcacgcccgtgtgagtgggatgggccggtgggcgagcggtagaggggaggggagcacgcggcgggttgggtttcgctggcagcagcgcctcgccttcttgggctctcagcctctcaaccaaaatgggctcctgcgctagctgcagcctaccgcagcacagtgcgctcggttgggtggtgcctgccgccgacgacccccgcggttgcggcgtgcgccgtgcgcggatgcgcccatgccacgagctgtgaactcttaattttagctcaaagaattgggtctagattctatagtgaaattgtgaagcaaaacccagctccatctctcattttaaattatgctgaaactgtttgactgagcttcggctttaagagaggtgaaactaaagctgtgctaaacatgttcttaataaacatataaaaaaacaggtccctttcgca

SEQ ID NO: 30273 - DNA, 1797 bp, Oryza sativa
catgtggtggggaatgagtgagcaggaaaaatggaatggccactgccaaattatggccattggattcatcacagttgactgctagaatggcaaatactgcctactactcctacatcaaggcatggatgaacatacattgaattttacaagtgtttgattgatgccaatcttgcaaccgtatcagcactgcatcctcttttttattccgaattatcaacaacgggtcgttgctttacattttacaactggtgcaccgcccttcttttttaaaaaataaatgcatgtagaatttgagacactgtcagtgcaaaagtaagacacccaaggagaaccacaccaggtaaaaaggtagaaaatccacttgtgagaacaaaaaaaaaaacaattttaactccaaaatactcctacctttgaatgcgatgcacttgaagcagcatcaggattaagctaagcacagaggaggagtactggagtacagtaccattttgcaggccgggtctccctgacatcaactttggagtacgccaaggaggatgaacaaaagaaaagaagcacagccttttgccgaagcatttgatcctgccctcacctcgaaatccgtgccgccccccgcttctcttttgcaattcgctgacacccaagtcagcaatggcggccaaatcgcgctccggcacggccgccgacgagtccgcatctcgaggcgccgagtatcccggcgatctagctttgctttggcttcgattcgagccggcggaaaagccaatcctccgtgccggccatcgccggcggccggtctctcgcctgaagcaggagggccgaagtgatggcgcacctcacctcgccgtggagcaacggcatcaccaccgcgcgcggcctcacggatcgatcgatcgatcgatctcatggcgccgcgcacccggagacctcttccctcgccatcgccggcggcggcggctgacgcactactcccaccaccgtcaccgacaccacctagccgacgatctcaccgggaggccgcgcgccatggcggtagaggggggaggcgagagcgaaaaaaaatgtcacaaactctgaggcggaggaggaggagtggccacgtgatgcccgcgtggctttttataacgggctcacacttgtcgcgtgtcgctttgcaccccttgctttctatgctcatctttttttttttgttatttaaagcgaaagcggcgttgttgattgttgaacggccacatcgagcggtttcctgcgcggctttcttttcttttatttttctttctttctccggtgatgatctttgaacggtcccagaggtgcttgtacctttggaattggttgttttcagtatgtgattaaataagtaatcatgtcatcactatgacagtgtgtttggaaggttttagtgtgcatttcttagtggaaaatcttgccaatttgtgaatggcagcagtgaaagaaagcaagccactcgattttctggatgtatattactagtaagaaagaaggtagatcaaatatttataaaaaatatttataaaaatatttatatcatgactaaaaagttaatttaaagcatgtataagcttttcaagaacaatttcaagattttcgtgcaagataactcaatccttatggccttgaaattgttttatccattagtcctaaaatatagcaattttgtctagatgactagattcatagctcaaatgattaattttaaaacatgggaaatataatatataatagtacaactactccctccgtactcataaaggaagtcgttttggacagcgacacggt

SEQ ID NO: 30274 - DNA, 1474 bp, Oryza sativa
tttgtaaaaaaaaattgaataagacgagtggtcaaacgttgcaaacaaaaactcaaaatcccttatattgtgggacggagggagtacttctttcaattcgattttagatttctgtattttaaaacgaagggaatagcttaagtagaaaagcgacttgttaaccgttttgagttgggtttgttatcatcagcgggctcaaaaccgtacagctcgtctgctccccatactattggttcatatgctaatcctaatctactcctaccacagtgtagggcccggctctaggtggaaagctgcagcgtgcaagcaaaggagagcggagagcgagcacgtgcgttttacgcacccccagtctatccatgggaaaatccaggctggcacggcagccggacaccggacaggaggaagtatctcaaaatatctcggccgtctttaatccacgccacacagccgccattattcggtcgacgcggaccatcgttccacccaccgcgagacgatccccgccgtccaatctggtgggccgaggagagcgcacggtcccgatccaacgcaattattcgggccccacacgcgcgcagtccatatgcgcgctcgcatgctgctgcggccttgggccacccctcctgcccgggtgcgtgatcgtgggccccaccatcggtggcaggtgggccacggcgctcggtgcttcggatcttctgcgccgagacactgtactttgtctcatcacgagtacaccgtataataatacggtacgtagtactccgtactagtgtcgtcgagttttccctatctttttaattttattacacatttaatccgtcgagttaattttgtgacactgtcgtagaaatatactgtacccgtagtactcctacgcatgacggcgacgcatgctactactactcccaagtcgtgtaggagtactccagtatttatgggtggggccagtgtgatgtgacagcgtatctttgggcacacgattggctgggccccaccatgtcactttctctcccgtccactacagcgaatagtaggagtactgttcgttaaagctgatgggtgcaggagccaaagctcgaacaagtagagtagggactagtagtactactactgctagggtacaggagtagctggaacaagtcagctgcggtgcatataaatgcaagtccaatgtgagccctctcgttgtgttgctcgtggctcatcgcggccggccttgatcgccaccaccgccgttgcgttcattcgtctactacgactccggcggccggccggtggtgccttcttaggcaggcgatggcggccgtcgcgccgcgcgcgcggctggtggcggatgctccgacgacggggggtccggccggtgtggttcttgctcgatcggcgacggcgagtcgtctcgtgcttttttttccgtgtccctcgtatttggagtttgtgatctggctgaagatggaagttgctgcttccatcc

SEQ ID NO: 30275 - DNA, 2636 bp, Oryza sativa
cccggatccggtccatcctcagatctgagacatgcgccccccgatcttcctccaaaatcccctcctctcctccccggattcctcccccaaacctcaccaccaaacaccacaagatccaaccaaaatcaaaatcactccgctaagattagagagaccctcttcctctcgctacaaatcccctctctctctctctaggctactcctactactctggctctcctctcctctcctctcctcctcagctatggtggtggcctcctcttcttctcgccgctgctctctcgtcttgtggcctcctcctccccctctctgccttggccttccgtctggctcgctttctaggcaacccgctcgcctcatcctcgttttgtcgcttgccacccccccccccccccttcatccccgcatcggacggcccggatacgcgcgcccggcgatcccgcatccgacggccacgggctcgcgttgcgccaccgtggcgggcaccgccgccctcggatcggggcagggagggggggcccacacgcggggggtccgagagcgacgctaccaccgaacccccgcgcaataaaatctctttttcttaccgtaaagcatgggccagaaaccgacacgtggcgggtgcccgcgggcgggaaaaatctaagcgtcgacccgcagtaggaggtgggtggtggatggggaaaaaggatccccatttagccccctaaaaaaaaatactaaaataattctggtatattttaataaaatcagcactaaaataatattatgccttattttatatgaatttaatattggctcgttgtccgcttttggtgggacccacttgtggggccatgtagatggtcctgatctggacagtggggagggcgggggggtttaccggggctgacgtggcacggcgtcgcaccggttgctgcgcttgtgttaaaagggcggaaagtctccaggcaagcattaacggtggggcccacgaaccggacgtagcctccctcacccctcttcgctttttctactcgtgggcgccgacgtggcagtgcgatgacgtcacgtgggcgcccactagccaccaaccttcacagcactactctcactcgcactatttctgaaatactaatgctatttattaatttattatgccgaatataaaattcgataaaaatactgttttaatttcgaaaattggtcaattttaggagtattctagtcagctccgccatcattcatcaatccagcaaggggatcgagaagaagccatcacttgcaactaaaatattcgatctactcactaaattaagcaaagaaacctgaatacggagtaccaatagagttaatctttgctgcggtattcggaatccgaatgggtacttctaccattttctactagtgacgtacttggttcgtgcaagctcttatttaaatgaaaagaatcacgtgcgtcgtcaccagtagttttggcttaacaccgagggttaattcttcatgcgtctacgtggacagatttaaccacaaatataataattagacatacttcctatatctcataaaatataaatttagaactagatgtaacaaattatagtacaataaatctaaatatatatatgtcaggattcataataataggatatgtcacattcagtactacattgatttttcatgcgatggaggaagtacgtactatattggttttgatggacggagtgagtacttcagaaattccccggtcttttggagaattgtgttttattatgtggatagtagaaaaaaaatctactagcaatagcattagcagttactccactaatgacgctagttaaccagccagattaggtgttaatcccgctcattaaccattttaacccccggctggtggtggacgcttcacgcggggcaacacgtggtctcggtccaccataggctgtcgtgcaccaccggagggggaaaaaggcggaggaggatgtggtggggcccacgcggcaggataagccatgatatttttttcaattttctttttctcttttttccccgcgcgggaggagagagacgtgaaggagagaaaaaaaaaggaaaagaaaaggcgagtggcgcacagacccgcgtgtacttttccctgttcgccagccagtgacacgtgggcccaacgtacggcggggcccggtcggcgatttattttcatttatttattatattaattatatgtttttccacgggggagacggggggtgggggtgtctggttcgttcgggagtgggaaaagcgtgtggtggagtggtaggggggggaccacatgcaactcacgtgagccccggatgttgacaaggaggcacgtggttgtaggcctcgcgacccctctcacatgggattgtctgcgctcagccgggggtaaaaaactgcacccatctttgattatttaccgtttatggtttttttaacaagcgtgtaaattatggcattttaagatttttattaaaatgttttaaattagtactatatggtagtacagtgaacactccgcatgtggtggggaatgagtgagcaggaaaaatggaatggccactgccaaattatggccattggattcatcacagttgactgctagaatggcaaatactgcctactactcctacatcaag

SEQ ID NO: 30276 - DNA, 2353 bp, Oryza sativa
aggaaatttagcaagagcttcaatctcttgctaactttcctttgagtctatctctctcatccaattcctgtgtttttcctatggttcaatcaaacggttattcctgtgtttttcctgcgttttgcaatcctctgttttacacttacattcctatcaaaatcctacgtttttcctactcctacgttttctcaatcctacgattcaaaggggccctaaagctcttactaaatttcctccaaaatctctataggattgtacattccataggaatttcaaaggattggataggattcaatcctttgtttcaaagggtttcataggaaatttttctataggattgaaatcctctaaaattcctatattttttctccaaatcaaagaggcccttagttgagaaaaaaatttgggtttgattgtcgcatcgaatatacggacacacatttgaagtattaaacatatagtttaataacaaaacaaattacagattccgccaggaaactgtgagatgaatttattaagcctaattagtccgtcattaacaaatgtttactgtagcaccacattgtcaaatcatggcgcaattaggcttaagagattcgtctcgcaatttacacgcaaactgtgtaattgttttttttttcacatttaatacttcatatatgtgtccaaacatttgatgtgatgggtgaaaagttgttgttttgggaactaaacaacccctgaatttctttaggctccatgaattcgactttgtgccgcgcacggtgtgcgcatgcaagctagcgagcattttcatgatctgctcctgcctcctgctttgcagatatcattgtacagaccaccttccaagtgtaaagatcaagcaattcaggttagttgggaaaagttcagagaaaaaggggaaaatgccccttctctttccctttcttttgtggaaaggtagagaatatcagaatatatcaaaatgccttgttgcaccaatagagttaattaattatacctctcatcaagtgaccacacacaatggagcaagttatcttaaacaaaaaaaaaagataaaaatcttggagcatcttgagcatggatgcaagaacagtaggcaaagaaaagatcagaaggagagcaccaaagggaaaggaaaggagaggaagaaaggtggtgaaagcaaaggtaagctaaggccaccaaaagaccaaaagcattcatgcatgaaggcaagaaaggttaggagaagaggagaggatcaaattataagagtgagaaaagaatacccacacaccgaagcaactttgcagctaacttaggctctcttcgatttgattaaagaacactgcacacaccaagatgcacccaccccacataaccatggatggcattctgaatttcttcttccacttctagatcaaatcagcttctgccttgattactttattaaccgaccaaccatcatgctagtatgagttaccgttggtaaaaagtgctctgtaatttggtgtgctaatataggctagctccattgactggtgatttgatggaatatatgattagcactgacaccccactattacgttatacatccctgcaaaatagtcgctggcaagcggatctagtatctgaatttgcacatgctctgtaatctgtatagtggtcaaactttttttttgggggggctgaaagaaatgcaaatacttgtacaacactgaagttttttcagctctaatggaaggtgtttccagtgtaattgttcactaactgcctgaactggcttagagcaacagaacttctgtatgacactatgacagctagtagtagcaccaaaaaagaaaagaacagaacatttttttgtcttcatattcaatggcatggacacttctactggcatacaagaacgcaaataagagtaaccgcaatggtaatgtaaggtgttctctataaaacatatacatctcagcaatagactagattaatagtaaaccaccttaatagtatgtctacatgggtatgtatagttctctcatgcattgttttgtttttctctatagactatctctaagttagtagatagctttgctctctctcttcatttaatatcttccaaatagaaaaatatgctgacatggatcttttatagagaatctcttatagagagcttatagataacaattatgggtgctcgaagcaatgaggtccaaacgatgcaataggaaagaccagttcattgaatggactcgccaaccatcgaaaagctctgcaaattttgccatttactcatcagtcatcgcactctcccgttgatacaaaggcgatgcacacacagcgtaggcagacaccgagaccacttcttcgtcttccc

SEQ ID NO: 30277 - DNA, 2047 bp, Oryza sativa
tgaatgaaacttcgagctaatccatctgaatttgttagtagtaaatactgtagtacaatttactggtgcaagaagtaagagctccatgacacccagctactctgaagaaaatgttcaggtgttcggcaaagttgcattcagatgttaggctactcggctactgtaagtacacatgttagtacattgtatgagtccttgttatatcgagcaactgaggtggtgtttggatccagggacttaactttagtccctgtctttagacactaatttagagtattaaatatagactacttacaaaactaattacataaataaaagctaattcacgagacaatttttttaagcctaattaatccataattagagaatgtttactgtagcgtcacataggctaatcatggattagttaggctcaatagattcgtctcgcgaattagttcaagattatggatgggttttattaatagtctacgtttaatatttataattaatattcaaacatccgatgtgatagggacttaaaagttctagtcccatctaaacagggcctgagcataggggacaaacaaagggcctgttcactttgatgccatttccaaccttaccaaattttggtaaagttgccaaaaaaatggctatatttagtttgctgccaaattttggtaactatataagaaatcttgccaaaattttggtaagttgccaaaattttggtatagttgccaaaatttcggcaatgctaaaatttggtaagattttttttggcatcaaagtgaacaggtccaaacatagccagatcaggtcactgagcataggagtccttgttatatggtgcaggccggcctgacggacaggtcggggggcattacacctgtcagttcaagttcaagtaagggtctgctcactttgctgccaaaaaaaactttaccaaaattttggcaggatttcttatatagttattaaaatttggcagcaaactaaatgtagccacttttttggcaactttactaaaatttggtaaggttgaaaatggcaccaaagtgaacagcccctaagttgatcgctagtgacatactgacatggcagtcttggcagctttgcattgtggaccaaacgccgccccgcattttatctgcagctttttctctgaaaattgttgatcgtactgacgccttcaataattgtgtcccgcgatgattattttggagtactcctacatcatattcagactcgtacggcttgatctgccatacatgctgttatccaaatagattaataactcctcggagccatggtccaatggattaggataagtttagtttgagaccaaaagttaacaaaagcaaaatgagtttaatctcactggttaggtttcttggatgaaagtagctcgagttctagacttaacataagtttcttggatgaaagtagttcgagttctagacttaacataacatgtgcgtttatatttatgactgattattgttttgatgataaacaacgtatcgacaacaagacacttatgataatttcgtaaatcttagtaatgcatgaaaaatggagacacctataataactttgtgaatcttaaaatatactattcttgaaggtgtttatatgaatatggtaagcatgtgtattgagtgtggtgtactacgataaactgaaaactgttacaggcacgtgttgtagcagcatacgattgttcaatcgattgatctaatctgagatgaaacccacaattccaaagtccaaaacatgaggtgacaaccggcagagatcctcaaattgcagcaattccacaggatcatactagtttaattaattacgacacgaaaggaggggggcaaaagagaagatgaacacagctccaaacgcaaaagctcacaattcacagggcgcgcgccatcctaaccccaccccccccccccaaccccccaactagatcaacttcaggccagcggcggcgacggagagcacggacacggcgatggccgtgaagacggagcggccaacggcggcgttgccgtgcggcgacggggcggcg

SEQ ID NO: 30278 - DNA, 7466 bp, Oryza sativa
actatagggcgaattcgagctcggtacccatatttataaaaaatatttataagaaatatttatatcatgactaaaaagttaatttaaagcatgtataagcttttcaagaacaatttcaagattttcgtgcaagataactcaatccttatggccttgaaattgttttatccattagtcctaaaatatagcaattttgtctagatgactagattcatagctcaaatgattaattttaaaacatgggaaatataatatataatagtacaactactccctccgtactcataaaggaagtcgttttggacagcgacacggtctctaaaacataactttgacttcttgtttctataaaaatatttattctaaagtaatatacgtatacttttatgaaagtatttttcaagacaaatctattcatataatttttacattttcaaactcaacaatttgagagttttccatgatttatattcccaaggtttgacttaaacattgtcctaaacgacttcttttatgagtatggagggagtactcactaaataagtcaggggagaaatcaaaatttgcacacatggatcgctacctatattgccatccacatgagtagatctagagaattttgtggtccacactcttgttatgtggattgttatttatgtaaccaaaagcctgagctacctcatatgccatgacaatgatatacatactccatgtcttggaaaagaaaaaaatagcttatctttgtcgacatgttttcagtccattcactaacgccctaatcggttggtccaacctaataacatatcatttgggtaggggtgatgacctttgcactctatcacaggtagaggcctaacagcgaaaaaaaattgattataggcaagctaattaagccatacaatagtctattcagtactccttaattatttgaccacatggcctaagcaatgaccaaagatgatgatggcttgtattgtgtgctctagatggtttgtcccttctcaaatcagtcactagctagcctgcctgttttgttgtgattgtctgtggtgggccattttccttttcaatttctttattagaagctcaagcagccaagctaggagtagtatagatcatatagcatgcccaacttgagtttacaaaattacaactgacaaattatgtgtacattgttggagaaaatatctcccataattacacactgttgaagtagtatagattacaaaattacaattgacaaattgtgtgtaccctgttggagaaaatatctcccataatcacacattgttgaagtactatagattaattgtccatacttgtttatcatttttttaaaaaaaattaaatatgtatatcaatatgataaccgtagcaggggtctcaatttcgaattctggttgatgcaattaaataagcatgcttctgttttacatttctgagattgaaaagcgttcatgggatagagggcacattagcataaataaataaataacttaattttcttgtcagtctaaatatattagatgaactgaagattttgagaagtagctgttgagagagcatggactgtttgggacatcagctgaggattgtatgtacgagacttgcagctgttaaaagtttcctgaatatggcttaataaacctttaaaacaacattttaaaaagtactgatttgatactctaaaatattcattttgaaagtgccataaataaaaatagccgggtgtccgttgcataatactccatcttgtacgtattctagaaccgtctttgtctgtctcagcaacagtaattactacttcagtcaatataagatgctagggtggtgattatttaattattggatcgatggggatgtattagttaataatttccttgtacgattactaggtaaaggtcacgtacgcgcctgattctctatcttaatccttattatactgcctcgccgtttgtttattggaaccctaatggtacaatgattcccctaaaatattcataccaattccactaagcctctactctctttgtttggcctcttctatttgttccaaaataagggtcctttaatttatttattatatgattgataaaaggttttcatagaatttaaatttctatgaaaatttccctctatgtccctttaattcataagaaaagaaataaattttcccatagaattgtatttcttcatatttcatagaaaaaataccgagaggtatgagctatttataatactccatccgtttcatattataagtcgtttgacctttttatagccaaactttgttgagtttgaccaagttgacagaaaaatctagcaacatttaaaatataaaattagtttcattaactctaacatttcatatattttgatactatatttgttttgtattcaaaattattggtgatatggacccgagggtatcatgtctagagggaggagacggcccccaaacccacgtggcacttccccgaggggggttgggcccggggtggagtggcggctgctccctcccagttggaggctaggccaccctaaccccctccacgcacttaccagcatgcgcgggttaggtgggcgcacccaacgcccaactaaccgtatttaaggcgggtgttgcggccgtgccacgccgtatttaatgcggcgtgcaggtgtggctgacaggctgggtgacgctgaattgaccgacgtagcagggtgagtgcgtttgctaaaaaaatgactaggaaaataagtcaaactatttatataaaatgaaatggagggagtattttctttgtttttcccgtagcactattgaaagttctcatcttcttctttcctatgttttttattccttcagaattggagaattcttctattttttttctattcctatgtttttcctatcctagaatcaaagggggcctaaatatcttttttagcaattattatatcaatgtttataaagtgctacattcgtcccaaaataagtgcaacccatggatatccgtgtccaacgtttgaccgtccgtcttatttgaaaattttatgattttttttaaaaaattagtcacatataaaatactatttatgttttatattctaataacaaaaaaaatactaatcataaaaaatttaaataagataaacggtcaaacattggacgtaaatagtgcaaaacattacttattttaggacagatggaatacgtggtaaatgtattaggagtggataaaaagagaaataattttattggaatatgataaattaggggtattctagtttttttttgtgtatatgtacgtgcaagatgagtgaaaaataaatatgacggagggagtagtttcaatgcatggcttgaaagttatagatgctatcctgtatattgcccgacccagatatgtcggccggttgataaagtgtcaacgttcccaattgtaaaaaaaaaaaaaaggaaaaaatattccatttcagctttgttggcctattttgcattgattattcaatttagatcaggtagtggcactcgcattacaagaaacgatggcacatttacgctttcaaacatgagatgcagtggatgcaaaatccagatctgaatactgcatcatcaggtactaccggaatagctttcagttgttaatttattactatctggcagagattataaaatgttgacctgggcatggagattgattcataccgctttgatattcgttgccagctgctactacctttcaaaaaatagattaatttccagttaagtgcatattttattcccaaataggactacatccatcccattataagtgcagtcgtggttttccgcgtccaattttgaccgtccgtcttatttgaaaattttttaaaaaagtttaaaaacataaatcacgagtaaagtactattcatgttttatcatctcataacaacgaaaatactaattataaaatttttttaaataagacgaacgatcaaagttggacgcggaaacttatggttgcacttataatgggacggagggagtaccacttactaagttcccttgtttgtatcctcgctaatgttattcgatctcataactcttagacaaactttagtctctgttagcaagtgaatgctaaaaaaaaatagattgtttgggtataaagagttatgaaaaccacgatgagaaaatggattagatttcatgtttaaaaaacatttttggcatggttggatagttaaaaagagagtaaaatgttcggtttcatagttgatggttcatcctacactcaatgatagttatggtgtgtttgatactttccttttccatcgcctgttctctcatttttttttcgtgagcatgtttttcaacagttaaacgatgtattttttcgtaaaaaagaaaaatatataggaaagttgtttatttttagctaatatttattaatcatgtgttaatgagttattttgttttacgtgtgtgagggagaagtactctttatttagagtatgcaataagccaatatcgttattattagaaagaggatagcatatcagaaagcatagttcctccttatttgccatctagtaggtgtctcatagacatatatgtgacaaataagaaaagaaataaaataatttccacccgtgtataattgatccccatataaacagatcagcctaggggcctaaatttggaaccatagttactgacaaaaaaaaatgagaacacaatacattgcattcaactagctagtcttgcactattaaatattacatttttattgaccaacatcttactactacaatagtagggttagagaactgaaataccacgtgaaacaaatgtagaaagtgggagtagtacgtgcatttgttctttctttttttcaggtaattgcaaaagtatttctgtaaacacaaaagtaacctgctgtaaaacacgcagctcatcgtgcaaaagaggagcacagataatgcaaaacaaatggatgtccacgagatgactaatagagtaatgatggtgatgatgcttgttacttcgaacatgggaaatgaaattggggaaattagtcttcatgattatctaacagaatctacttttaaaagctggaccagcctaattgtctctcctctactaccactttactccaatttaaaatgcctgtttctggatgcaaattcaacccatgatcttctgcatccaagatatagctcatctttagtcaacactgtatttctaaaacaccactacttagggttagtgtctaagcttgaacaagtttgggtataactaaatttatagtcccattatttcgccaatagctatccgtgccctaaatatgaaatacccaatacatgtatactaacttcggtggagtccaccatataccaagttttatacgaaatcaagccttaaacatatgggaaaagtcctggatagacaatataaacttatgtaagttgatgtggtttatgataatttaaatttaaataataatgattcaaatgtaaaagttgttgtggttttatgtaaaagtttggatcatagattaatcatctaagggctaaaacaattgaggtgatatgacttaataagagaagaaattaagggagataatttgaaccatgaataatcatctaaggacaaaaataattgatgtgatatggattaatgagagaagagagagagagagagcacattaacttagttaggagttaggatgaactatataagtatataaaatattataaaaaataatgatacatattgaaatattatgtgaattatgtgagatgataatttaacatgcttacatttgaaaagctataaaaattaataaattataaaattatagataatataacatgcttacatgtttaaatgtaataattgttattggatgatgatgtgatatctttgtatgttaagtttttcgatttagtaggctctaactttataataaaagagaaaatgtccatatattgcaatgggttagtaccaatggtaatgagctgggtgtgaacctaacctaaaccatgtgaatttttaaccaacctttggtttatgtttttatccaaaggattttttattttttatttttatgtgtgagagcgtgttgtgcacgagggaaagggtggacgaacgtcactgcaaaattatgttgtttcgagacggccggataaatattacaaaaaaatcagtaggatagtatttgaacaaagtgctctttctttttaacttaaaataattttgacattacaaactttttaattgtgtaatgaacaaaagtagccctaaatgaacgtagctcaactggctatgtttcttatagtataacttgttcatttgagtttaagttttggacttaacgacagaagacatgtgctcacctttactgctaattatttttttcaatagtttaaaggtcggtttcttttcttcttttttgaataaacttttgcagagcaggttgccggttgtataagtcaaattaactcccagaaattattcgtagttggatgcgttccctggaaagcagagccaagttgttgatatttggtcaataaacactgcaaaatcatgtgtgtttaatttcccataacacactttccctatttttggcctattttatgcccacctagcccctaatcattttaattaatcacaaaaaatatgtttcgttaatgcattttttataacaaggcggctagtatatactacctccgttttttaatagatgacgccgttgactatttctcacatgtttgaccattcgtctgattcaaaaaatttacgtaattataatttattttgttatgagttgttttatcactcatagtactttaagtgtgatttatatcttacacatttgcacaaaatttttgaataagacgaatagtcaaacatgtgagaaaaagttaacagcgtcatctatttaaaaaatggaggtagtagtattaattttgagatctattgctgctacatcctactcctatagggcaagtgagttaagggactctaaagggactgaaaggctgaaattacgataatgaggtctaacaaaagagatgcccaatacttgaaagcctctttcttgtccagttttaattctttatattttatactgagctacttgcttaattaaactaatgccgtgggagacaactcgaggtaagttggttctaatctttttgtgttctttgtgtttactttattggccccaagataatattatatctgggatcatgtttctaggtttaaatttcttaagcctattaaaaaaaacatgggacatggacaagcaaccaggccaatgccgccatccactcgagagattgatcacacaagcttggtgacgcataatttttttattttactattgcaatattttaactttgcatgatgcatgatattattattatgtttaccactagatacaatattggtggtgaggccaattatttatctagggcaagtgcatggcttgtg

SEQ ID NO: 30279 - DNA, 1651 bp, Oryza sativa
acttagtccggctgttgctggatcgtccaggcttgcaaggccctggcccatctatataattctaagagttcctttttttttcgaggaaaataggagatgttttctgatttccaacaggaaatggatgatttatttgaaatttcagcgtttgaaacaatgttttaactatgtattgagttgatgactgcttttgctcttcttgggtgtggaatataggatttcgcactaatctgtgacattttccccgcgtctggaatacgcaattcggtatcactttactgtattcttagtttctttgtgtttatcagtgatcactggtccataatactccctccgttttacaatataaatcattctagcattttccacattcatattgatgttaatgaatctagacacatatatctatctagattcattaacatcaatatgaatataggaaatgttaaaatgatttacactgtgaaacagaggaagtacttcctccgtttcacaatgtaagtcattctagcatttcccacattcaatataacatcaatatgaatgtgggaaatgctagaatgatttacactgtgaaacggaggaagtagctcgcaacgaaattggagaaataatgtgaggattattcgaagtaccatcacgaaaatgagccatttcctggttcagttcgtatatttttttcacacgatgaatgattcactcgtgctcaaaccactccaatactaggattacaaccaatccacacacacaccaacaaacaaaacaaagctatgcaacatgccgacgaccatggacaaatcttatatccgataccgcaccaccgggttcttgtactgaagacccccattatacaccctccacgcaaggtcctcgagttaaaacgagtgaaattttcacccattcccattatcgccggctccatccacctcgtcgtcgccgccctcttctccggcatccgtgaccgggaccaatggcgagatgacactgtccaaggggagagtgatcagcacggtgactgacaagcggtcagcctcggcgccgtgccctgctccgggtgcagaagaaacggggcgagccatccctctcactttcttcagctttccattgctccacacctagcacgcgtgccataaaaaacaagaggcattaaggcaaattcaagcaagttgttactgctttgatgctgctcaaagagtaaaggaaacaacagacatgacatgatggtcactttgtggtttctcttcaaaagccgagatctttgactcttttttaaggtcctttggtggattccaaaccgagctgtgaggcagtgatgcaccggttgatgcagacatggggcctaaatgggtccaaattgagtggtgacgcacagcctatactttagaatttgatgccttcgcaaaataaaaatggatgctttttagtacatgtctatgcttcttagagacagactctgccactcacgaacaatcaacacatcttttttctgtggtgaacgaccagcaaattcgtagctgtaaaacctgtaattaattttacacgtttgccatttgtttttttaatgcaaattacaaactgaatcaataatatgagtgtctacatgtcaatcatttatgtgttatctgtgcaaaaattaatgctctaatgtcct

SEQ ID NO: 30280 - DNA, 2938 bp, Oryza sativa
ttctgccaaaaacatatcttctacttgcatgtgtcttaagcacttgcttatgaaaaatggttttgataggtattttgttagaggcaagccatacacctgtatgtgaaaaaaatttgcatagtagtgcgagagacaaattataatatatgcgtatatataagactagttatttaaataacagttgactgtataagttttccatgtcacattatttagataatttatagacaaacttgtataatatttcattaatttgttaattatacaattaattatattatttgatttcgtagagaactcgtaccgttacataataggaatagttaattctatcgataatataagtacatggacaactcatatctcctctctctaagcagcactccaaatctcgcatggcatctctccaaggttgatgtcatgccaatattatgtttttaacaccggcaaaagctttgccgttctacattaatagagaggattattttttttaacgttaaaagtatttaaatggcatgggggaagatctcgtgcccgcgaaaaagatctttgttagatctcccggtgtgggtatctctcgaagctttgctgctctcactttccttgccgcctcttctttagttttagctattatggtggcagtggttgacgccatgtgtcgaaaaatctgtgtgttgtgctcacgcaaaagttcctatacaatgagaatgagaagggatttgagtgacatcttcggcgtccgtggcatagagagaatttgttgccaccactcctctatacggtgtcacaggtttcctattgttgttaggtgaaactgcatctattgacatatcgtcatccatatcctctgtaaatatttgtatttcgctagtaggtttattgttgtccccggtgctatccgactgagagtgggcacatttacgggtttggcatcctcttcttttaagcatatccaccgtccaaacttggtatagtcttgttttacaagccaaatggagaacttgcatttaggatagcgcaacacttacagatcatctagttgaaggtagtttaggctgcacctaggaattaaagattgtatatatgttgacttggtcatgtattctctatttaattaatgtgaatttctagacgatatatcttttgtgaatccagtagctgcatgggtttgccgaattatgtggtagagccagacgaactggtgtaaaaggtatgttgtggttatcttgtggtgaatattcccgaaccatctatcctttcattgttggaaagctttcaatataaattcccttcgagcatgtcttttcatccaaagatatgcatgaaacaaaatcctttagaactacaaagctctaagaaatagccatgaaaagatggaaaagaacaactcccactagttggagcagacacacacacaaagttgagagagcggaaacgggaaaatgactaaagttaggcacgcaacaaatccaacaatttccggaagacgagaaaaaacccaaaagagcatccactttacttgttttgttcctaagctagttgctagttcgagcagtcatcgatcagcattgtgttcttaattttgactagatcactaccactccactgaacacactactcatgcaccgctcctatcacgtatatatgctatctgctgactgatgtgcgcagtgcgcttgcctgcatatatatccagatgatcgtgcagatcagtaagtggaaactaggccttttgggttcaccaaaaggtaagacggataacgatacatgcatggtttttaattatgtatcgaaacaaatatatttaacgataaattaaccgttacatgagatggtgcccggctctaatatatgtttaaaataagcgcatatatccgatcctaaatttaaacgagtatgacaaattttataaatttttaggtatgaacattatcttgtttacctagtttaaactgaattgaatattttagatattgattttagatatgtaccatcaaacataataattagctagttaggcacgtaataatgattatgaaataaagttgaacttaagttgttttgttattaggtatagatatgaatcaaatttttacaactaggtatatatatactcataagttgaaaaaaattagaagtttttgagtcaaatcgtatatttgcctcatatatgtgtcctatatatatactacctccgtcacaaaatgtaagcatttttagtacattttaagatgaaggtagtatctttgttacctgcatgctatatatttgttccagtgtaaatgtgttcttcagttgctgaaggaaatacatctccatcgttctctgatccaggggtttgactagctagctcaaatgcggaataatagtggactctacaacttacacttgaacttgcacaccgcacaactcctactagaagggagggagattatgaggatatatattgattgggaggatggatagtaaatataatatgaattgatctattggatcagttatatatatatatatatatatatatatatatatatatatatatatatatatatatatagacacacacacacacaatgaggatggtaaattagtgacaatatatgaatgtgttctattgtcaaaacgaaagggatcgatgagttatatctctaggttaattagtttacaacgaagagttgaagctggaataaacaagtcaaaattatatctgtataacatcatagtaatgccgaccatgtacgcatccacatggccatacagcaacatcagaaacagaatttaattaattatttgactaaacccagaatcatttgctgctgcatcgaatcgttcctctcgtcatcgccgacgcaaacatgcgctagctgatcagagcgaatggcaccacgtccatgccgcctgtttgttagctacactgcaacatacactaatacgctaa

SEQ ID NO: 30281 - DNA, 1488 bp, Oryza sativa
ccgtattcgtgtatgagcatattcgattcttattcgtattcgagataatccgtatttgtttccatattcgagctatccgtattcgttttcgtatccggtaaaaaatatgaaaacgaatatggtataagcattatccgtccgtatccgctccgttttcatccctatatgatggtacgttaaactacttcttttgttctaaattctgttctaaaatatatgaatttctgatattcaaattcgttgaaggcaagctatgagaaccttcgacctattctgctaaagcagcagcgacaacaacaaataagcctgatgaaaggcacaaggtaaaagccaggctacacgaagccagaggctaaaccgctgaggctgtgtttattttacaccaaaattaaaagtttggttgaaattgtaacgatgtgacggaaaagttagaagtttgtttgtgtaggaaagttttgatgtgatgaaaaagttaaagtttgaagaattattttgaaactaaacacggcgtgagtaaagcaccaggtggcaataccttgacagcaaagcgaagcaagccagggcagctcactgaagaagagaagcgaggaggcagcgaagcatgttcggcttgacatgccaaaacaaggggaggcctagtaaacggccccatgcgactctaataagacccatagaccgatcagatggaccaaagagaacagttaccctttgtagatgtcactatcagagaaacaatcatgtaaatttactagtgcactaaattataagattataaatccggattataaatatataaaccgactccaattggtgtgtctaatagagggtcggatttttaaattactatacaattattgctttccattccattccacaaagtttaaaaatacaactgaaatgattaaaaggggatcttttgatctaaccttattagttgttaaataacttagaagtttttatattttaaaacagagcgagtaattattaactgactgaggacaaaacaaaagggaaaacgatggcatgcaggaagattcggattgtttgttctagcagtagctaattaatggccgcttttgttctctctttccacaacatgagatatacatgaggctattctcgacccaatagctagaatggtgtccatagcattaaataagatgccacttaaaataaaaaatgatgtggcaagtgaataaataaggaaagagaaaaaatgtcttgcatgagacatagtttctacacaacatctaagatatcatgtgagataatgagcattaaatttaattatgaaataatagtgtttgcattggaaaaatggtgtctagtactagttttttttatgatgtgaagtttatggaaaatatatctagtgttttgggttgggaaggcctgatcgactttcacagtgcacttgaaaagaacgcatgcatgtttaatctaaggagcatttgctaattgatcagtaatagtactagtattagcatg

SEQ ID NO: 30282 - DNA, 4976 bp, Oryza sativa
  unsure (1)..(4976): unsure at all n locations
catcgtttcaatttctttaaacttctaattttagtgtggaactaaacacagcctaagatttttattttcttttctaggctgtgtcgatgcataagccgatgtaatttcattctaattaatgaaattcttcccattaattgtctgaaaagaatacatgtcaccgatgagaaccgaactgttaggtttttgtatcaacagtcaacagatatatgatattcacagttaagttaagttggtcggagggaaaagaatataattaaagtaaatcatcttcacagttttgttgtaactaacccagggcaagcaaaccccatcatcttgattcttgaccatggtcctgtttggatcctctgggctattaaatagccctccgaaattttgctatttaggttattaaatgtagattactgacaaaaccgatttcataacccctaggccagctattttgcgagacgaatctaatgatgtatattaatttataattagtggctgattactgtagcatcactgtagaaaatcatagattaatatacctcgttagattcgtctcgtaaaataacctaggggttatggaatgagttttgtcagtaatctacgtttaatatttctaaataacaaaatttcggagggctatttaatagtcctccggatccaaacagacccatatgcatgttactttgagtacttcccgttcagggagattcttgtggtctacggagcagcttgcatggacgtgacgtgtccggtcacaacgctattgatattaatcattagattttttttccctttggttcatactgaagtttaaaagtttggttaaaattggaatgatgtgattgaaaagtcgtgtgtatgaaaagtttgatgtgatgtaaaattgaaagtttggaaaaaaaaactttggaactaaacagggctatacttgagtagaataattcatattcagtaatacgaatatactcctattcgagcaacctttttgttgctcgtggcgaggcaacaggcatgggttataaatacctttcttgtttcaactctgcaaaccaccaaccaaagctgttgtcaatagctacacgagtttcaggacatgtgcagcaataaccttttattgacaaactgacaaggcaagatgcatagaggatcacagttcagacctcagttggagatgaagtgactagtgaggcatgaggaagaagatggagaaaaaaagacagtcgaaggagtatttttttccttttctttatataaaactgaggactgaatgaataaacaaactactccacctgcaaatgcacaaagagaaggttgtgagattgtcctcagtttaatttacaccttctttattcctagtttatagataagcgctactccctccgtcctaaaaacagacagacactgaatttccgtgtcaacgtttgtctatccgtcttatatgaagaaaatctaagttaataatcaaccggtttgggcactgtgggatctggaacacagtgaggaaaaattggcatgcgtgatgacggcatgccaaactttttgctcaagattctctctcgattgggaagtgaggaagaagactgctggatggaagcatgccatgcatggaccatggtgatgtgagcacgcactttataaaaatttggttgtctagcatagcatacagtaggtcctggatgatgagagatgtaggaggagtggccaaccaagtgcacggaattcgaggaggaggatgagcacgtaccccagaggtcaaaaaaaggggtcaaagagcatcgccaatccaacgaacaaaaggccaccaaagaccatattcttcggcctctgccctattttgtctcccctctcctcgccttttctccccttctttttccaagtgcaacaacaaacatgtcatatgctactcctgagaggagtactccgtaaaaaaaaaactcaatttaatatatttttataaaaaaatattgtattagattatttggtaggagaaagtactttctccttccaaaaataatcaatttaaaagaagatgtgacctcttatagaacaatacgctatattatatatattttagaagaggtcacatatcttcctacattgatttttctaagatactcgactactcatctactcctttcgtttctaaatatttgacgctgttaacttttttaaatatgtttaactgctcgtcttattcaaaaattattaattctttttctaaaatttgattaattgttaaatatatttatatgtatacatatagttttacatattttataaaagtttttaaataagacgaacgattaaatatgtgcttaaaagtttaggggttcaataaacggagcgagcagatgagatgagatgcctttgccaaggtctcgagtagggagaggacgacgacattcatgcgttgctggtactacaatgtcatgcatgctttcctttcacgtgatgggtcaaacccgtagagagaatcttgaatagtgttactgtagtgttcgtcaaactactaccttgtcaggctatcaagatatacaaacaatgctactagtactggataaatagataatactataatattgcacggaataactgtgtgtatatatactagtatctgctggcatttgggatcgatcggctacaggcatactactagtaaaaaagactggccgcggcaacaaattatggccatatagtgttacctgcaccgagaaagttgaccatatactagtactgcttctatttggagagatgggttgttcagttgtgtacaaaagacacattaaaaattgaccttacgtagtcattttcaacgtactcctgtttggagtactgggacacattttttacagcctcaataccatacgtgtaagggggtgtttagattcaatggtgtaaagttttggcgtatcatatcgggtgttatatagagtgtcgtatggggtgttcggacagtaacaaaaaaatagttgcagaatccgtcaataaactgcgagacgaatttattaatccatcattagcaaatgtttactgtaacactacattgtcaaatcatggagcaattaggcttaaaatattcgtttcgcaaattagtcgcaatctgttaaattagttactccttccgtcccacaaaaaatccattcctaatatcctaaggtggaattaatggagatggagaatgactaaaataccctagattattaaaaaaatagtaatggtgatagtagataaagggtatggaagagataaaatttctcgttttacgtgctgagggtagataggatagtagaagttggtttttttggacaaaattcaaactctagaagttaatttttttatggagaaagtatttttttttatatttaatactttatgtaggtattaaatgttcgatgtgatggagtaaaatgtttttaggatgggtctaaatactacgagtattctcgtagtagtagtagtagtaggagaaggagtatgtgtgtgtggtctttgcagcaacgacgcacaatgcatgcaggaaaggatctgcacattctgccgctggatggccgattctgccgctgcgctgcctgcctgctcgcatgtgtcgcgtcaaataaccgcgagaaaagcaaagcagccagtactcctccggtgtggtgtcctgcaactcggccggaagaatcttgcgtcacagatcgcccggaacagccacgccgatcctccctcccacacagtggcggagccagagatatgtcgtcaagtccggacgactactannnnnnnnnnnnnnnnnnnnnnnnnntatttttttctaacatcgaaaactatttacagtgaagatgttagcagcggagtccgaacgatcgcccgacgctggtggagaatccatttatacttccggttggtaactccctttaatcctaatttttcaaccgggactataaatccgggactaaagatatttatctttagtcccggttgaaataaccgggactaaagatagatatttagtccgggactaaatatacgagagggtaccggcagtcccattaggtctcttttttttcattgtttctagctagagtttaatccctatattttctcccaaatcaagtgggatacatatccccaaatcaagtgggatacatatccctaaatcaaacctcaaataaaagtaacaccccaaaacattcacatcacaaatcttaagttacttatacgcacaaatcgaatatatcacaaatcttaaaaaaattacacacaaaccaaatacatcacggattatacatctcagatcatgcaacaaatcacaaaattatacatcttagtgaatcacaaattgtaaaaaaaaagatgccggcagcggctgccgcctgccgccgctagccactaggcccgtgcgcggcccagccggccgcctgctgcgtgggaagggaggagggggaggagagggccggggatgggaggggaaggagaggaggcggagggggaggaggagggagatcgatctgagagggaggaagggaggaggagagggagatcgatttgagcggatgggaagggaggatggggaggagagggccggggatgggaggaggcggagggggaggaggagagggagatcgatctgagaggataagtgcgaggcggttgtggaggagaggatagggaagaaggattatatattaagcgttgaattttagtgccggttggtaataccaaccgggactaaaaatcttctagatcccggttgataacaccaaccgggagtaaagttaggatctttagtgagtaaagatcggggggcctgacaggtttagaaccgagactaaatatcatcttcaccaaccgggactaaagattaaatatgcccactgtagccaccaaccgggactaaagatcatttttagtcccggtttttagtggaaccggactattgtggatttcggccgaccgaccaaagatggtttctccactagtgcgatatgcacgggagctag

SEQ ID NO: 30283 - DNA, 2697 bp, Oryza sativa
tcatattgtgaaaattgtgcagtaacgttagtgcccgtgtacattaacaatatatgtgttttgcagtaaccgatcgttttactgcaattccatgatgatgttactaagaaattgtaacggaattgatttgcttctttcatggaggtagaaataatctaccttgttttttgtttgaatagcttactaaacaatatatgatagcatattagaatgaaaatgatactatacaaattgtccaatcttggtcaaaccctcaagcggatgctacatttatctagttagaattgtgtagtaatatagtgctaaatagcagtaataacttgtgttttgtgtattaaccgagcatgttactttaattccgtgatgatggttactacgaaattgtaccatgtatcttacacgtgctaaaattaatttactatatgtttttgtttgaacaatgtattgaatggtacggatgagggaggagagtgcagataaggcgggtgaggagagatgcgtgacatggcagagaaaggatgtgttttcacatgataggataaagcctcacgtgctaactgtatacttgttactgcacaaaagtataagtgttactgcatgataggtgtatgttaccacttccaactagctatgttactgcacgataattgtagttttactatgtcatttttacgagatgaagatcgaataggtgggccattggtaaagtctgtaggtggctttgagcgaggtctgattgatgtatgagtgttttgaacaattttatacatttggtaaaaccatgttactgcatgtatatgcccttgttactgtaaattatacattctgttactgcatgtggagggctaaagttcaaaatattctttgaaaagcaatatcttataagatatatattatttttgaaaaccgtttccaccatgatgctatagtgttactgcatatggagggtttccacactatgttactatgaaacttataatcgttacagtaacgacatgatgtgattacagtaacacaaaacagttagtagtaacacttttgatatagtattactgcttgtggagagttaagtttttaaaacatatctttgaagggtaatatctctcacatcatatactacttttaaaaaccgtttgcaccatgatgttcgaaaaaaagtgcttatcaaaagtagatccatcatgactatattatgactaaattttaattttgttactgcaagtaaaacacggtgttactgcacgatgaacaagacattactacgtcgttccgagacgagagctaagaagagagggggtggtgggaaaagtcaccggtgggtttgaccgacgtggggaacctttgaccagcctttaactgaggtgggaggtgggttttggacccttggggggagaggaggtgggttggagggaggggggtatagaacaactattttataccttgggtgtagaatagttttttctatatatatatatatatatatatatatatatatatatatatatatatatatatatatatatagttagcgatttaaaaatcaatacttgaaaaataaacattgataaaaaacttcaaatcaacttcaaaattaaaatttaaaatttaaaatttgactatggctgatttctatataaaaccacaccatatgtgcaatatagtgcatcggaagctaatcctttaacttatctgcacatataaggtctgtttggagagcttaagattctgataaacaactgattagtagccagctttcttaaaaatttggaaaagctggatttttctacttctggcttctaattcattctggattctatactataactcgtgagaatcatcaatcaataactcccctaaccatcccctttttctccgtttttttaatttttttctggctacctcggtgattaacacgtcgccgttttgcgattacggctcctcgagagcgcgtttgcgaccgggaaaacgcggtttaccggtaatttcactgttaatctcacgtttgaggatgcccgcgtggcggtttcctccaccgctggtgtccggtttgcgatctggttattttgcaaaaaaatccttgtctatgtataaaattttaaactaaccctcgtactacctgacagcctgttgtacttttcacaaaaaaccccttaaccttcagagaaatacaatgcaaagaagagaaaaatctgattttaggggtagctctgtaaaaataacaaatacaagggttttattgaaagataaccacgcctacggcctaccccccacaccccgagccctaacccaatcgtttcccgttccccacttcctccccactgcgccccgcgccgccgccggcctggggctgccgcccggccgccgtcgtcgccgtggtgcggcctccccctgtcgccgccttcgtcctccgcctccccacccccctccctcgccacgccgtggcgtgagccctctctccgtcgccgccgtcattgaccgccttcctccgtcctcgccacgtccccctaagcaccaccaccacggcccttccctcaaatccgcctccgtcgccgacccatccgcgccgccgctcgccctcccgcacctcctcctccccagtgatgtctcctgcctccatccccacctcgtgcaaatcgggggaggtggacttcggcgtggaggaggtcagcggcgtggaggagttagcgaacctcgagt

SEQ ID NO: 30284 - DNA, 1979 bp, Oryza sativa
ttcctgcagccccatcattcatagttgccgtgggggagaacattttctggagcgggccatgtctacttcaagtccatttctccgatatacattccctcttccgtaggaagagactggacgccaatttgatcgctatctggtgtctgtaagtgctagacttgaacgtgttaataaatcactatacctatatgcgtagctcatttgatcatccattgttggcaggatgaattacgtggaaatcgaagcggtgagaaagcctgtcggctatctaaacccgtgcaggataagtcagtcgaaccacacatacaggctagacgagaagaagctaccggaacacatcaaggcgatgactcccgaagagaagacagcttacataggacaaaggcatcaggaaaagctgctcgatgtcgctacttacgtagcaatagcgcttgaatctgcgcaggacaaggagtgcgttcatgccctgtatgcctttgagtaagttttaatatccattaagagtatatacatataatcacggctcaactaacaattttgtttgcagcgaccattggatagtctttcttctctatccaaagtacaatgaagtcatcgtcttagattctctcgacaaagacggcaagacatatcaggaatttctaagaattatcgatctgtaagttatatattatcgtaacgtgtttcaatcttcgaggaatgtaaattaattatatctgcaaatagtgcatttaaaaggtattaccagcaaggcggacaacacaaaaactcaagagaacgcatatggatgctgaacagtactacttaattttcataaatgcatgtgtctatccatttgataacctaatataccttataattaattgatgtcgaaagtgtcacaagcaaccggtgggaaccgtactatgcggatattacacctgcgagttcctaagggttaatgggaaatattacgtgaattacgacgaggaaagtaatacacacttgttaaattaatcgctaacttgtattatggcgaataatttccttaatttttcgtgatctgatgcagcttccaaaattcctaagtctgaaagagagctcgacgataaatccattgagaacatacagcgggacatgtgctacttcattcaccgtgagtgcgcacatcagcttgggaagtttttttgacaaggatggagttttgagcctgccggagaacaaaaccctgtctaactggagtaggagtttaatatagccagggtttctcgtgatctagatgcagctagcttgtatatgtcgtcggacggttttgtaagacattcaattacttgtatatgttatgtcgtcggtcgaattttgtcaatgtacatataggtgcttcgaaattatatatatgtatattattatgcttcatactccgtgtgtggctctaaaatacttgaaagagaacataatctatcgatagctcaattagttataacatccacgtgtgactctgaaatacgcgcacaaacaaaagtaaaaataatatatataatattgtttttaattttttttaaaaaaattacaccttcacaggcaggccacgtgtcagaagtcgggcagtccatatcttcgccatcgggccacgtgtccccttaggtcatttttcctagcgggccacatggcctaaaatactgtaagctgccagcgaagaaatatcttcgctgtcggccgtcctaaggctaccacaagcgaagatacttcttcgctggtggctggcttaattatgtccgccaccagtgaagaaatatcttcgctagcggccgtcctaagaccaccaccagcgaagatatgtcttcgctggcggcggacagaggacgggggggcgccaggggagctggtgcggccgcccgggcggaggtgcgccggccgccggcgaagaaggagcggggcttgtggtagccttaggacggccgacagcgaagatatttcttcgctggcagcttacagtattt

SEQ ID NO: 30285 - DNA, 1522 bp, Oryza sativa
taaaaagtcaacggtgtcaaacatttcgaaacggagggagtaccattgttgcagaagctgaccttctagcatcagcaaagcccctgttgaggacttgagggagagtaaagctgccttctctagctaagctcctccaccatatttgactttattttggttaaagaaacctgtaaaactttgaccatcaatagctctcaaaatatttaagctcctccgcctgttccaatgagattgagtcaaatatcgtatgtggagttccaacgggatccagtgccaatagcttctgcatcgatagtacaggtttctgtttgtctggagctaaagcattgagaaaacctttatgctcatccatgttcagaaggatgtggccaaacacttttatatacccactcagcttctataggaggcagcttccactggagttggaatttagagttgagagtttaagtttggaattctaccaaatagggcctaaggtcctgaagcctggtactgaagagtgaagacactctggttgctgacctgaattttatctatgtttttgcaagtgttttggaatttcttaaccctgaactacagaggacgagttattatctcctaattagtctttcactggataacattttttcattcgaaaaatgtttttttagttagatgcattgtccggaagaaacctcgtttttatgaaacaatcacttgtccatgtggttctcgaagtggaggaaacagaaatttactggcttcattagtataatcagaaagtcacagaatctatttatgtttgattcgtgtatgcagcatgccatcaggttcattgttctgttatgttactgcttgtgatatagagacagtaaaaagtttgtgtaaccttgaactgtatatatttcaccgaatcaaaatagaaatgaaccgcaataagaataatcaatggaaatttgtacaattgaacatttcatagagcagctaatttgcttgtaaaaggtatatgtttaagactaatgtaaaatctgtgtagatgtaaagataggctgcctccatttttttttctttttttctttattttttagaagatgctactgacactcaattaacctagagtgttatgcttacagttattagtcaaatccaactaataaaacctagagtatgaggtcaaaatctacttttgtttgattcgtgtatgcagcacgccagcatgtaatttttttcatcatgaaaaaaggagatgaggaaaaacatgctgactattgctacccaagattgttgattcccagcatgaacatatgctgcgagatgagaggcctcagtaatcgcgagatgagaggcctcagtaatcaatggttactgcttctgataaaaagacagtataaagtggggtgtaaccttgaactgtattcatttcaccattatcaacattggaatgaactgctgcaatacagaatcaaagaaaatttgagcaatagtagcaattaatttgcttgtaaaaggtgtatgtttaaagattaatgtaaaatctatggat

SEQ ID NO: 30286 - DNA, 2402 bp, Oryza sativa
tatatgaaatgttcatacatggactagctctcaaattacatcaatcatattaagctatataaacccatatatttagtggagcatcatgtcccacccaattaatcctcgaataaaccatgataatatatatgcaattaaaaaaagaaaaataccttaattttactttacacttacttttcgttgacatgtattctaaagaaaataagtctacctttttcaaatgatgaagaagattataaataattgcttatagatattacttaaatatgatataatataaaactaatatgttagaaaattataaaagaaattaatgtagacgaaaacaatttatggagaaatcgtggtagatgttcaccggttaatattttgctcttataaatgtctcaaacttagcgtacgaagtatgcccgcgcattcgcgcgggcgataaacggcgtctaagtttctactattcaaatgtaacataatggtgaagtggtgaccttaaatagatctacttttttttatcactgctaagataaactcatggtacatatttccaatttattttccaggggtggaagcatctgaggttccagcaaggaaataactccaatataaactatattccttcctgtggctagttgttgaaggaaagcatattgatatattgttactgtgttaagaagattgtggtcgattgcttggttataaataaaagaagaaagggattgtctgtatatacttttaggttgtaaagcaaatcagtgttgatcttgcaaaaaaactagcctgcatttggcattgtgtgtggttttgaacattccagctatactatatatgtagtaaacatcagtgatgtaagacttctgtactcgcgtgctagtgattataaagttgtggttactagaatctcacatgctcaatcgaccaattggtttcagaattttgaatttgtgatgttacatttgcactataaatgcttcaatatcccttccaaccgagatgtaaatacaatgcagatatggggtttgccaagtgctcacagatcgagttctcacctcttgaggtagctaattatcaaccagggtatattaaaaattctgctttacactgctagctactctggaagtggattgagcatttaagctattataaggatgtaagggcctgtttactttccccaaaagaaaatttttgggtgtcacatcggatgtttgatcggatgtcggaaggagtattcggacacgaatgaaaaaattaatttcataagtcgcctggaaactgcgaaacgaatcttttaagactattaatccgtcattaacatatgtgggttactatagcacttattaggctcaaaagatttgtctcgtgatttccccctgcaattagtttttttaaaaaattatatttaatgctccatacatgtgtccaaagattcgatgtgatgttttttgaaaaaaaaattggggaactaaataaggcctatgtagcatcttgctagcttcttcacactggttggaatgcaaaaatacacaagtcattttcaacaatataaaaaaacaaataaactaaaaatgtcagaagtatgtactccctccgtttaaaattataattcgttttgactttagttcaagtcaaactattttaaaattaactaagtttgtagacaaatatagttatatttataataggaaattagtttcattaaattaataattgaatatattttcataatgtatccgtcttgggtcgaaaatgttaatactttttttacaaacgtgattaaactcgaagcagtttgactttaaccgtataatataaaacagagagggtacaatttagacagttctacaaccaaaaggaaccatccgacctgtttagttgattttaagcctaaggatagccacagaataatttacatgcttaatttcttttaaagttctttttctagtaaatattgatagtttgatactactaatccatctacatcctcgagatttttgacccagcaaaacccaataggaataaactaatatgtgaattatttcatcagaagcgtttggtaatcattccaatagtaaatcgtactataggatcaaaattgaattaaatctggccctaattacgatttcagttttcatttttgactaggaagaaaacccgcgcagatacacggtatcttaattatttactgttcatagaaataatattaagagaattaagtaatatcttaccaaatgcatataagaaattgtagattttgcctcataataacaaatatctatgtcgtgaaatagaccgtggactttaatataaatgataagaatgttttttttatacttgaacaaaaatctcttttgtccaagttatgtaaagttgcctattcaccattacttattatgattgccgctagatgc

SEQ ID NO: 30287 - DNA, 5645 bp, Oryza sativa
agtcattcaggcatgttaaaagaaactgaagtctgtcagaaagcagaaaaactcagagtgatagcattggactatgtctagacggctaaaaatctagcagatcagtttaccaaggggctaccacgtaatgtgatagactgtgcatcgagggagatgggcttgagacccacttagagttgcacaatggtggaaacctgtccattgtgatcggagatcccgtgaatttagatggcgaaacaaactattgtgcaactgagagaagagaccctaaaatgagtttatcttcatgatgcacttctcttctaatctgtatagtaggatggtatacaccttaatgtgatccgagtggcttttcataaagaagagatgttggcctacagaacatcttagaaggaacacacctatatgagtccgactgctagtcacagtctatgagatctgggtgatctctagatactcatgaaaaggccaggagtatgacttatacgctccaaacagaggggatgcaaatggcagcctagtaccagttaagggtttgagtgaaacctgaatcgcacaagactgacaattcaaggcatagtccattattcagttgtgatctagtgtagctcttttcctaggtggaagttcaacttaacagtctccaccgaaacgctggtataacaaacaggatcagaatcgagagcatttcctgtgagccatgaaatttggtggggattgttagattaatggtctaggcccaattaaatcctaataaattccattggcccacattaagtgctatgggtaataataccaccttggaaatctaagtgaagaggtctcaacttaaatacagagctagtggagagtctctgttgaccggttgagatggtgctcggacaaccaggcggggcgaggcgaggcgaggtaaacagctgctgctgcgctctctcgttttgtaacggacggtaataaacacggagaattgattttgtatcaatgaacgcttcggttacggaattaaacgtcgtgaattgattccgtcggttacggaattaaacgtcgtgaattgattccgtcggttacggaattaaacaccgtgaattgattccgtattaacgagcgcatcgattacgaaattaaacaccgtggttgatgactccgaacgttactctcgcgctcgcatatatatactccgcaccgaccagaaggattgacgaagttctttctgactcttgcacttcgagttcctccttctatgttcctgagctgcagaattcttccccggttctgttcacctgcgtgcacaggtgtacgggacgagcaggtgcctctggaactccgttcgcttgagaacttgcacgggtagagcggcgatcaagtttttgggtagcgcttcaagtgtggctgctcctgttctttgttcttcgacgacaacgttgcatcttcctctacttctgcttcaccatggctctactggagagaacagaggagacaacatcaacggaggcaatacgaatgcctcaacatcttctgcaccattctctgggtataagattctaactttatttgattttcttcttgttattacatgttcacaatgttatccatgggacttcaatcctatgtgaatgtcaacgatgtctatacttattttaccttaagcatgctcatatttatgtttagccttatcactagattgcttctcattgtgtatgtcatgtttattgtcttaatattttggattaaaatataccgaattatgaccaaatttccaacaggtcaaatactactgccctttttctgttgagaaatttgcttacatttgaatgtgttcaatggaattatttagtttggaaatactatcgaattattgcaatttgacaattgcttgaatttgacctgaaacagatggccaactgatgtagaccgggcctagtttaagcccgagcaggcaccaaagatttaagctgaattaatattctcgcttgctcaatcactgaattcaaaccgtaaaaattcttataaatgaccagacattaggaagtactggtaaggaagtcaggtgcatcaccattttacagctacaaaagttactcacaaaagcaggcattttagagtctcaagaaatagttcagctccttctccagacccgttctaatctacatttcgccttggctacttcctatgtctaataacacgttttttcatgcaaaatatttctatataaaaatgtttttaaaataacataaatctacttaaaaaattcaataattactccctctggttggacaaggttaaggttaagcttttataactttgaccatcaataactttaaaaatatttagtttaaagaaactagaaaaacatatatagatttgtctttcaaaacaatataataaaagtaaacatacatttatttattgtatatattattatagaaaaataaggtcaaaggtatatcttgtagaacgtgacattgctcaaagcatcaattaaaatgaaaccggagggagtaatacttaattaattctatattaatcattttcttgttttgcgtccggctaataatccgtttcaaaacccactttggaattaacgaagcctgaaattcaggcctggactgtcatcatgctcatcttttttttctctacatccttttatatgttcgatgcgaaagcatattgagtttacgcaaaccattcttgcaggacgatctcggataatggacagttcgtacgtagtagtagtacgttgggataaaatttggcaatcgaacaatcactttccagcactcgcgtctcactcaccctcacctccacattcattaatgctcgataggtgatggtactactactagaagatcccacccttgcaactgcaagatatccactgatgaccaattcatccaccactaattactcatctctacaggctcatgtcgtcgtctagcttcagttctcaagctagctagctagatactacttctacttcctatatatgtactcatatctgaatatctgatacagtagcaggcaggcgattcgtggtcgttgaagcggcgaggcatcgatcgatcgtcgccgtcgtggtcgcccaggtccagcaggctgtgctcgatcgcaattaatccatccatccaggacgtacgacggcgtcgctttcgccggtggcttgcaaaggcagcctctccggctttgatgggacccaaacgccgactcgctgtcgctgatcgttaccacctcgatcggtcgccgccgcgctctggaccaagctagctacccagccaacccttccttttgccgcgtactcgctcgcatgaatcgacctgatcttttttattttcgcaaacgcgcaaaatgatcatcagtatattagaagaaagtaaagttttaattacacaattgccgtggaacaaggacaaaaaaatggtctccaaaaccaccaaaaaccgacgatagaaaaaaattgaaaaccctgaagcgatatgatcatctgatatctccattagaagttcacgagtaattgggggagaatttaacgaaacttgatcaaagatgaatactaacaacaacctgctagcttcagtactgtgtatgcatatattgatatatgggaaacctgatcatgaacgaacggctggtgatttacacgcaacttgaccatttcttggttggtttggacatctcactagctagctgaactgttagatcgttcccaagaaaaaagcagatggatcgatcgatcattttgaccaaggaatatgcatgcagggcctatcaatacaagaacgtttgtacgacgttttgcaagctagtcagccagccaaattaagccttttggattcacctgcacacacgtacatgtcagacagtccgagtcggtgttaactcagtcatggagatttcgatgggtttggatgaagctgactttccttttgattcaaaggtagccatcgatcgacaccagcaagtaatagcagcttgcattggtcgacgccaattaatgaccggtgcaacggcgaccatcgcggcttaattaactagctgttgagaccaagtgtcgttgagtctaagagtggattttaaactgtagatagaacgtttacacgttatttgcatgttactttgagggaatgttcactttgatgtcaaaaaaaaaccttaccaaattttggtattgccaaaattttgataggatttattatataggtgcaaactaaatgtagccacttttttgacaattttatcaaaatttgataagattaaaaatgatatcaaagtgaacatgccctagaaattaacttacctcattggcgattttgatgtaggtatacaagtcagcgagcttgatggatgcaattaagcagatggaaccggcggccgggcgtgtctcgcaagttcagttatctgcccttctgctggggcccttgaatatgctggacaacacagggttaattacgatgcgatgttcttaattagtagtttgcagctggactcatagtctcatatgcggacgtattcactggggccttaattaatgagaacttttactggtacaatatactaccagtatatactggcagtatataaaagggcatattaaaaatttgatagaaaataaaataacactttagtaattttctgttcagattgaatctaattgggagtacccggtcctggatcttatcgtgcgctaggggaggagcatactgaccgccatttgatgacgaagcacgtaatgatagcatgatttgatgatagaataacgaagaaaagacaaaattacccttcaaactttatactgcaatctaattaactaaaaaaatcaaatcaatttacaccgttagatcatatatacttgcagtatatactagcagtacattgtaccataaaagttctataattaattaattccgcttgcagtactgcactgtttccttgagcgctcaattttttgaccttcagagttcagacaacgagtctgcaaagtagcacgatctctcgctcataccaaagtaattaagcattgatctgatgacccagagagaacatatagaagcaattgagtaggagtgtgcgtgtgtgtgtgtttatgtatgaacaatgagctggagtgaggtagaacctcataaggaacataccaacaaagttcatgcatattgaaattggttgtatacacggactaatcatagcttcaattgttaggtccaaacaaatgcacttcctgcaattaattttgtctcagattttcagatatatatatatatatatatatatatatatgacactcatatggggcaccatggtgcccgggcaccatggtatctaatgcacaaaatttttcaaattgtgagtatatacctagttataataatttgattcatacctatacttatcaacaaaacaactcaaatttaactttatttcacaatccatgattacatacctaactaattatatgtatggatgctatatacctataatcaaaatctaacaaaaacaagttcaaattcagttcaaacttgctttaaactagttagtaaagtagttaatgttaatacctaagtaattgaaaaagttttatactcatttgaattgggtatatactcaatttcaacaatagtgcccggacaccatggagcaccaaacaaatttactat

SEQ ID NO: 30288 - DNA, 1132 bp, Oryza sativa
aagtagaggaagatgcaacgttgtcgtcgaagaacaaagaacaggagcagtcgcgcttgaagcgctacccaaaaacttgatcacccgtctacccatgcaagttctcaagcggacggagttccggaggcacctgctcgtcccgtatatctgtgtacacaggtgaacagaaccggtgaaggaagtgcaagagttgggatgaacttcgtcaatccttctggtcgctgcggagtatatatatgcgagcgcgagagtaacgttcggagtcatcaaccacggtgtttaatctcgtaaccgacgcgctcgttaatatggaatcaattcacggtgtttaattccgtaaccgacgaaatcaattcacgacgtttaattccgtaaccgaagcgttcattgatacgaaatcaattctccgtgtttattaccgtctattacaaaacgagagagcgcagcagctgtctgcctcgcctcgcctcaccccgcctggttgtccgcgcaccatctcaaccggtcaacagagactctccactagctctgtatttaagttgagacatcttcacttagattttcaaggtggtattattacccatagcacttaatgtgggccaatggaatttattaggatttaattgggcctagcccattaatctaacatgaccgtcgttaatacataaacagagggaataaagggtctgttcactttgatgccaggatttctcatatagttactaaaatttggcagcaaagtaaatatagccacttttttagcagctttaccaaaatttggtaaggttgaaaatggtatcaaagtgaacagacccaaaatgaacttggcattccaaggctttcttatctagcccacagttcagcctgcaagaagcccaatagcagtgcaccttctctactgtagaacatcgcgtcctccacattgggccgcacataaatatcaatcccgtgacggcccaactactatgggcctaaatgagctcaccatcccatcccagcccaacaaataggaataagttcatctgaggttacttaacttgtcaatgaatccaattttcgttcctcaaccgaaaaaccagacacaacgagtccctcaactatcaaaaccggtgtagattaggggggcgcctga

SEQ ID NO: 30289 - DNA, 746 bp, Oryza sativa
tgcacaacgtttcatgcactacaccaagctgagctgagctgagctgagcttggtggtgaccccccgtgaggagacacttctatgcacatgcttacaaacatgaacaatgcaaactgctgagctagcatccaatccatgcatatgataaccaacaaaaaagggaagagacaagttgtactagctatggccagagtatagtactccatccatccaaaatataaatatttttagcatattttcaagtcaaatatttttaattttgactattaattaatagcaaaataatagaaatatcaaccacgtaaaattgatattattaaatttatcattaaataatttatcataatatgcaactcattttatttaaaacatcttacttttatatagatgttgttggtcaaagtagcatctcgaagatcgtgtcagaataaaaaatgattatatcttgggacggggaagcagtagcagtagtagtacgacttgcaacatgaccatgaatgtgctatgcatggctagttgttccaattgaactttgttttgcaggggcatccgtgcatgcatgaacatagtactaataattaaacataccttgcaactgatcagcgagtgcagagcttgtagcgacgacgttgctcggcgtcgcagcagcagtggtggtgaatggaaggatcatggccgccgtactagcatctgcagccgagacagcatcatgcacaggagaggcaagatgatgatgatgatgatga

SEQ ID NO: 30290 - DNA, 2258 bp, Oryza sativa
gcatgagtgcgcgcgtgacagcgccaccacctgccgcctgctggatctcggcttaaaattgggactttagctagctttgttctcctgttggtgaggggcagcgatcacgtaaaacgggacagagggccatgtgaccacaaagtataaatgtctccgtatcggctagctatcagcctatcatcggtcgagccttcaggctgcagctcagctttggttggtttgcttggatcaggtgcgtcgtgtgtggtgtgccgggcggcacggcatgcatggggcggcggaccggccggcgtgcaaaagctgccgcagagaattcatttggaaaaggcgtgcgcttggtacaggtagaacacgtgcacacgcgctccaaggcgagttagagcacgttggctctcggtgcaaacgtgccacatgcatggtccgattcaagtctttgaatagaccctacccgcctagtatgtaccagctgtccgtagccaagttttctttagctttggttaaacttgtgttccacttttgattttttaccaaattaacatgacaactactgttgcttgaattctcgattcatttcgtgaattacgtgcccgcgcgcgtgccgacctgcgttagctgtcggaaaagatagtcaaagaagaattaccactaactctatggtgtttggcaggataaacatctagccacttgttgcaatcaaattgataagccaaaactgtacaacgaactatattattatattgttacgacttacgagatacacgtcatataatattgaattcgtgagtcaccttattctggtagttcttagaaatgcaatggacggcaaaaaaaaaaaaaaaactatagatactagcacagtggtccgcaaactatatcgaccaacctgcccatttataatttgaacctacaatctaacagtaaaaagctatttttattcaataatgtaagacaatccagggctccaaaaaaaattaatgacattttttaagttatatatatatatatatatatatatatatatatatatatatatatatatatatatattattttttacccgttgcaacgcacgtgtatttttctagtgtatatgatacatgaactctatggtgcctggtctataagatttaaatttagtataccaatttaaatgggtacgaaaaagttcaaaacttttttgggtatgaacattaactgaatttgaccttatatatgcgtctttggcttttttttttcctaaataattaattagggtatgtgatatgagatagtgaaatattttaaaattggagttattttgttgcaagttatggttatcaataagtaaattgttacacctaagtatgcacccataagttgaaagctttcaaaaaaatgagctaaattcctgtatctcaaacgagctgaggcctcaattcaatttatcataccgagaaacattctagattagcaagaacatctggcatttatattattatggttgtatatagatagcaaatttgaattcagaaaatagagcaacacggacataattatggtgttgtacaacatagcgttttctttcgcacaacaaggtcgtggagccaagcctcccgtagtgatgaacaaaaccgaactagagctggacaacgacataccatggattcaacaggaactttttcaacttttataatagtaaaaaaaagatatagagatagtactaccgaataattattcctgaaggcacaggcgaacatgcacatatatatattatgacacgactgaaggattatactgttgccaaatgtagttatatgcatatcattatccaaattggactttagttagttgtactatcatagatagattctcaaacaaaaaaggatactatattttctatctagattcctattcgaacaaggcctacaaacaggaggcatatatctataggctgaggtttgacgctttgttactccacgaggcatatctataggtctagccaagcataactgtaactctaccaaggaagaggaataagagtacatgagcaagctgctttgatctgaaccatccattgcaaccgaaagaattcacgtccagtctcgataatgttcgaatcgtcccatgagtggacattaattaatttatatgcctgtcctataattaaggtgcagatttgagaaatgaaaaacatgcataatgttttgtagaatatatccagtatattctcttggtgtttgagatgctcagcagctaggatcatgattttgcatgcacag

SEQ ID NO: 30291 - DNA, 8236 bp, Oryza sativa
gggtagatgggccgagagggattcggcccatcgaccccgggggaggcaaaatagacttttgcggaggaatttgatttggagggatttggattcgggattgaactcgacgatagatcggggatttgagatcttgagatggcacggacactagacaacaagcaagaaacaatttcgcaattagggtttttatgagataattttcccgctaggcgccacgacggaacgggcgctacagttagtcaggccttatctcttattttggataaattgacttaacaagtgttttatgagccaattcgggatcagctcgttaatttagcactctactcggcttggtatcatggtatgaataagagttcaagccgcgcccaaagtgaaccaagccaactcatgctcttttacctttttcctatccctacccatgtcctacagtctacagatagactctttttgccaccgtattcttattggtaagtgacttaccgctagttgtttccaagatatcgtgtggctgtatttgacatgagagaaaagagaagattgagaaaatatgcaaaataaggtgactcattagcgtatgattaaatgggtatatattaactattttaaatttaaaaaataggttaatatgatttttaagcaactttcctatataattttcttttttgcaaaacacaccatttagtacttcgggaagcatgtgtgcggagaataagagaaatcttttctcaatcaccagctaccgaacacagagtgctgtctcattccttcttacgctataatatcctcttgaactatttaatgtacgttgatcagacatcgtcttatgtgcaagctagttattctcgcaagttattctcttagacttttttttgttccttttattaattttctatttttgagactccactcaatcctaatttcttatcctgtggactcatcattttctttttatgagttctccgaatctgatttcatcatatattagctttttttccaccatttttttctcctctttcaattttgatgactgcaaggaatgtaaacgagagcttgtcgggggcgtgtgatctcagcatcgacatcagcatggtagagacccctcgcgggcaataaccggtcggccgacggtttgaccatggtcgagaaaactgaggagaaccgtatgaaaccgtcacggcacacgacacggtcgcgcggaccattgaacggtaggagacgagacccgtagcaagtgggtgtgcaaccgtgctgtgcctatccaacgcgaccccatgccgattcgtctctccaagttcctctctccgaaagcgaccgcgatctgttgaggaggaggaggatcacgggattttcaccggcctcacgggagatttgccgtgttgaacgtacggcagctgtggaatatcaatcggtcgaagagaagatacgcggtagtacgaaacgtgcctacaatgggcgggcagctaaaaaagggaaggcacacatatacgccctgcttggccggagccaagaaaaaggaaagaaaaaacgctggtgctcgtgtagtcgctgaaaaaagagaagaactacacgtgcgtgccgtggctggacgcgccggccagccgtccggctagatatcgtatgagtgtacctaatcgccatccctcgcggggcgcgcgcattgctccggcctcctatcgtgcgcctttgtcttttgctcgcgcgtggctttagttttgccgtgcatgagtgcgcgcgtgacagcgccaccacctgccgcctgctggatctcggcttaaaattgggactttagctagctttgttctcctgttggtgaggggcagcgatcacgtaaaacgggacagagggccatgtgaccacaaagtataaatgtctccgtatcggctagctatcagcctatcatcggtcgagccttcaggctgcagctcagctttggttggtttgcttggatcaggtgcgtcgtgtgtggtgtgccgggcggcacggcatgcatggggcggcggaccggccggcgtgcaaaagctgccgcagagaattcatttggaaaaggcgtgcgcttggtacaggtagaacacgtgcacacgcgctccaaggcgagttagagcacgttggctctcggtgcaaacgtgccacatgcatggtccgattcaagtctttgaatagaccctacccgcctagtatgtaccagctgtccgtagccaagttttctttagctttggttaaacttgtgttccacttttgattttttaccaaattaacatgacaactactgttgcttgaattctcgattcatttcgtgaattacgtgcccgcgcgcgtgccgacctgcgttagctgtcggaaaagatagtcaaagaagaattaccactaactctatggtgtttggcaggataaacatctagccacttgttgcaatcaaattgataagccaaaactgtacaacgaactatattattatattgttacgacttacgagatacacgtcatataatattgaattcgtgagtcaccttattctggtagttcttagaaatgcaatggacggcaaaaaaaaaaaaaaaactatagatactagcacagtggtccgcaaactatatcgaccaacctgcccatttataatttgaacctacaatctaacagtaaaaagctatttttattcaataatgtaagacaatccagggctccaaaaaaaattaatgacattttttaagttatatatatatatatatatatatatattattttttacccgttgcaacgcacgtgtatttttctagtgtatatgatacatgaactctatggtgcctggtctataagatttaaatttagtataccaatttaaatgggtacgaaaaagttcaaaacttttttgggtatgaacattaactgaatttgaccttatatatgcgtctttggcttttttttttcctaaataattaattagggtatgtgatatgagatagtgaaatattttaaaattggagttattttgttgcaagttatggttatcaataagtaaattgttacacctaagtatgcacccataagttgaaagctttcaaaaaaatgagctaaattcctgtatctcaaacgagctgaggcctcaattcaatttatcataccgagaaacattctagattagcaagaacaatctggcatttatattattatggttgtatatagatagcaaatttgaattcagaaaatagagcaacacggacataattatggtgttgtacaacatagcgttttctttcgcacaacaaggtcgtggagccaagcctcccgtagtgatgaacaaaaccgaactagagctggacaacgacataccatggattcaacaggaactttttcaacttttataatagtaaaaaaaagatatagagatagtactaccgaataattattcctgaaggcacaggcgaacatgcacatatatatattatgacacgactgaaggattatactgttgccaaatgtagttatatgcatatcattatccaaattggactttagttagttgtactatcatagatagattctcaaacaaaaaaggatactatattttctatctagattcctattcgaacaaggcctacaaacaggaggcatatatctataggctgaggtttgacgctttgttactccacgaggcatatctataggtctagccaagcataactgtaactctaccaaggaagaggaataagagtacatgagcaagctgctttgatctgaaccatccattgcaaccgaaagaattcacgtccagtctcgataatgttcgaatcgtcccatgagtggacattaattaatttatatgcctgtcctataattaaggtgcagatttgagaaatgaaaaacatgcataatgttttgtagaatatatccagtatattctcttggtgtttgagatgctcagcagctaggatcatgattttgcatgcacagaacaatactgttatagcttagatctcaagccacataatttcattgttaatgtttattaccgttgcatatactagatattatcatcgatcttttcaaaagagaagtgatcatttatcatgatggcagctaattgagcgggtaggagcaaaagtcaagccttatcatgtaacataaatgcacgtgctaaattgtagttcaatttgttaaaccaaacttgggttgtcttcaggaggtgaggttgggaactcaccttctgcgcacgtaaaacagagcgacacattttttatgattaattaagtatttattaatattttttaaaaaatagattaatattattttttttaaaacaactttcacacataaaatttttgcagaaaacacaccgtttaatcgtttaaaaagcgtgcgtgcggaaaataagggaggtgagtttggaaagttgggaaaagaactcagccttagggaacgggcggaaacaagaagaaacaattgtcaatgcgtgatttaaaccagaagaaacaattgacaatgagtgattagtcttggatgcttctctatctgacgagaggtactaaaattgtggactgtcttgaaggagtatagtgacatgttttctactttctttttaaggatattaaggacatttacagtgcacgtggtctcattgagtagcttgatatcacatggctgtcatatatgttgagaccatatatctaaaataaaatccctcacaatacatggtgttctcgtgaaatagtttcaacttttcatgttagcctctaatattttcttattttagtccttgtattttataatctgtataaaagtttaaaattatatattaaacaccttaaaatctaaaattaatataaaataactactgtctctcctccccattcattcactcggtccactctcctctaccatgggttttcctctctttgccagctttcctcttttttcttagtcagtgatacgcttgtcgcctatctcctcgctccccactctaatgctatgcgcagagctctatggccatcatctctctcctttcttcattctctagtgttgtctctcccctcttcacactatgaggttaagtatatcagggcaacgtagtttgacaacgagcatatcagggtagcgcaagcctggcaagctgcctactcatctgtagatcaaagcatcatcggtgtggttcgatgagctcagtgatcggtaatgatagtctcctcctagtaagttcctctagatctacatatcttccctccagccaaccatgctatcaactacacgaaagggcccacacgcgttacgtggccatgtcctctcctaacacgttagcgagtctcggctacccacccctccggtgtggcctcgcattgatgtacatggaaatcgtggcttctgcaaggcatgacaagcctcattagggcacaacacgaatgtggagtggcagttccgatgtagcaagctagagccactcgtcacgtcggcgtactgtgaatgctttagtggatataaaagatgatgtttcttgcttgtttatgtaacatttttaaatgtacgaagtagagatagagttatcaaaatttaacattaccctgcatcgtatttcactgccaaaaattgctgtgaaaatagttactggaaggagaggtgcccaatttctgatgctgcgagtcgacggacagcctatacttctcttccaagttgttcttttctttacaaaaatttattcagtcatttgctaaaaaaaagctatatctaattattatggttgattaatgaacggctataagttacaaaaccacagggtatttagctatttgtcattattagagttgacgtttaactatttgtaattcatgtgttggatcaggtgtggtaaatagttaattgtcacatataaggatggtaaatttagagatggttgtctttcttagagctaaactagaatctctgagatgagcggctgattattgttttgattaaactagtatggtggcccgcgcagattgcacggctagtatcattatatcttctctcatataatagcatatatgttttctcaacgtattattcaaatatattaaaatgacaacataattttaaattttgtactaactttacgaaactactaatgtgtaatattcatattgtattttatatacgtgttagttattaattatttttaatatcaaactttagtaatttataaattatattcctatatggactctagactcgtctttcaatatatttttttaattccgaattttcgttacctgtaaattatatttctatatagactctaggctctttttttaatattatttatttttaattctgaatttttattatttctaattgtatttctatgtagactctaaacttatctttcaatattctttaatttttaatttcgaatttcagttacttctaaattgtattcctatattgactttagactcttcttcccatgtttttttttaaaaaatgaattttagttatttgtaaattgtatttttatacaaactctaaattctacttttaattttattatgtttattccaaattttagttagttttaaattcctatacggactctatactctacttctaatattccttgtttttaattccgaatttctattatttcttaattgtattactatatggacactatactctacttctaatattccttatttttaattttgattttctattatttcttaattttatttctatatggactctatactctacttgtaatattccttatttttaattctgaatttctattatttcttaattgtatttctatatggactctatactctacttctaatatttgttatttttaattccgaatttttattatttcttaattgtatttctatatggactctagtatcctcttccaatattacttattttttaatttcgaatttcaactatttctaaattgtatttctatatgtactctgtttttctttttctccgattaatatgagaatttctaggccgtgagagcgaacgtggaggctcatttttctattcctttcataagttaatagatagattccacacaaaaataccatattcagccattgacagatattgagccatattctatgaatgttatcaaactttcttccaagttgttggattgacagtgagagcatctaatcgacagatattgattggaaccatattctacggatgttatcaaactttctgtaacacacagggagctataactcttacgcaacgtaccttgatcatggcttcgtccccaaattgcgcacatgtacttgcatttattctttggacatgttatgtgccataatgtggaacaatattctattgcatgaatatgatccgcgtcattatcacaagaattgcgcacatgcctttgacacctcagcgaaattgtcacgatctttggacaagcatatagcagagcagcagtctagcagacaaaataattgagcattagtttaatttgtcttgtcataaaaaactggagctattgtcgcatatacccgtctttgtctacgtgtggttcgcctttcatcggcactatatgatgatatgaatagggggtgttattagtggactaattgtttattgatatttcattaaattggtgggccagttcctacttaattaatcgattgtgctgttcagatgctgtagcctgtagccctgtagccaatatccagtccagtggccgtatatgtatccaggccaggacccaactagcctccaacgtaggatggaaatgattttgcagagatgagagggggcgagatggaggagtgcggggttaagcaacaaaaagctgtttcggataatatattaaatgaaaaaacttgaattatagctaagactattgtggccgtacaaattacctctctcaataaaaaaaccaaatatcctttaccctcaactttttatatcggacaaattaccacctgacaaactccggagcggttttaatcgtacgtgacgacacgtgctgtctaaccaacaacaaaaaaaaaaggtaggactcacatgtcgtgaccgagagaagtgatggaactgacaataggccctcactattttttttattttcttatgatgactgggctgctacgtatgcgccacgtatgaccaaaaccgctccggagtcggacatgggagtaattcatctggtataaaaagttgagggtgaaaaacgtctggttttttaattgacgagggtagttcgtattgccacaataggtggggggaggta

SEQ ID NO: 30292 - DNA, 1510 bp, Oryza sativa
actatttttcttgttcattcttgttgacgtacatggttctagttgctgtagctatataataacttagctgttggtaaaataatgttcttgtgacttgtgagaggtgattattcaatggcagccttgattccaggatctgttacgaacaccaaattttgagctaagcgcataagcaacttttctcgtatttaaactgcacttgaaagaggaacccttttaagttaatactcccccggtcaaaagtatttgtcgtttaggacaagatttggtcaaaattttaaaattccaacaaccaattttatgttagaataaatgtataaaatctaataagtttatgatattacaatagtacttttcgaggcaaatttatgtatataatttcttttatttttaaactaagcatttaagaaaccaatgatggttggaattttcaaagtttgatcaaatcttggtctaaacaacaaatattttgaccagaggtagtattaacgttaaaaaattaatatgaagtagcttcatggtacttggaaacagaatatagaatgtaagttctatatgttttctatagggactatctatatttatggcaccatatgaaaaaaatagttaaatgttttagcatgtactatttacaccgtaaattccatatcttggtccatatatttacactgtaaattacaacttacactgtaacttaaaacttacacagtaattttctctaatacttacatatatacaataactagaaagtactagtgcaaacttacattaaaaggtgatggatccaaaacaagtagcaaaagggcaccaatttcaatcatccagatgcatggtgaacctaagctgcatgtgaacctaatcatattggcatgaacgtccagatgcatggtgccataggctcaaggcaaaaacgagcggtagaactacgactgaaaacagaccaaaacagaaatatagcaaaatcgttttctatatatttattctccatatgtaagatcattgggggtgccaagttacccactatcccaattccgcatccttggtcacgtgggtggctcatttgtgaacttctaatgtatcactggatattattctgctgtttagcattttagatcatcggcaatttccttatattccaagcagcttcattgcatttcaaaagtaaccacatgcatctaccaagttcaaatcaatacaagatcaagtgcctatgtttggcgcgatacaaataagtgctgtgcactctctgccctgcattattttgaaccacaagaactacatagtcttcagaacagcagaatacatgacataaactctgttctggttgaatgggttcccagcaacttgaacaaaaaactgaactaaactgataaattgttcatgcagaaaatattgcatgggtaatgctttgaagtttagcttcgaggttttatagtgacaccaaagaaaatatgccattagtcacttaatcttagcgtttgccatcctcacttgggctgaagtctgctgc

SEQ ID NO: 30293 - DNA, 1953 bp, Oryza sativa
gcaccttatatttcctgttcttccggggcactttctggatatgtttttatcaggtaggttgaccaatggcactcttgttcaagtgtaacggaaggttaagagctttggaaaatctggggcagacaaataatgattgtgatttttctgcaagattacaatttgaaacatagttgtctgaagaagaaaaaacttagaacacattgctgttgtactaacttatgacaattggtgatggtttcctggaaacccaagacataaaaccatcatcggaatttatttgacagatggactgtatcgtgcactttctgtgcattttgttttggttagagtgggcttttgtggagtagtctcttttcattagtgttgcatggttttatcctaaaactgaatgcatgtccttttatcctccagttgtatgttacattaattgttgttactgttatctcagctgtagataatgttgttccaccactggattgcactcttttaagtgcttctcctatagagggactaaagaagatcacttctgcgtgcagcaatctgaaggaaccatgtaagggttcaaccttctttatatgattcaaaggaattcatcacaacgttcttgttttgttttatgacatggtatttcaatatactaacattgacatggtcatatccatccacaaagttcagaaattcagtagttctatttttttaatgtttctctcttgaatgcgcagctacctaaagaagaatgagatatgatattatttctgaagcatgtaatgtgcattttagataaaattcagtaattcatgtactgatttgttgctactgtgcaggttctcagccaaggtcagtatctccatgcagtatgataagtgcacacctggttaatcgatctagttttgtacttttgtgagatgtcatcttgtgcattggcagattgtcatcatcctctgaccatcacgatggtgcagcttctgctaacccatacaaggaaccgcttggttgcaaaatacccccaccaaaaagcaacagtgtcaagaaacaaaatccaaatgtggaactcaataatggtattttccttccctactatcaaccggttatttataatagagctacttgttcaagtatatgaattgcaaatatgctttaaaaaaatgggaagtactccctccgtttcataatgtaagttcttctagcattgcccatatccatatagatgttaatgaatataaatatatatgtgtgtctagattcattaacatctatatgaatttgggcaatgctagaaagtcttacattatgaaacggaagaagtatgtgcattgtaaatatggcataaaaggggaacaatcatcgatggcatgtattggccttaacgagaacgcttagtctgttcaggaaatatttcttgcaaccaaaggtaaaattatttgcatgaaacattgatgtaaaagtaaaatttatcaacacgtaacttgtataaatgagattgatgcgcttgttatatattattcgaagtttgatttaatgaactattgcatttccttgcagaaatttcactttttgatttggtcagtgatgagggaccaaataataaatctactgcacgacctgcccgtgaagctcatgtttcgttttctgttaaaggtgcatgttccaagaacattgaatgcataatcatcatttcatctattattgttgtatgtaattttgatcttgctggcttgtatatttggtggggatattttacttctttgcactgttgattcatgctgaggatattttcaccgaaacaacattattctattaagatttgttttattcaggttttattggtcacatatagttcttgcaacttgtgatattgtaaacatgattctgttagaaatttgctattgaattggttgcacgtgtggctgtcatgaagtcattatcattgagtccattgcctttgccttcaat

SEQ ID NO: 30294 - DNA, 1621 bp, Oryza sativa
aagtatatttaacaataaatcaaatgataggaaaagaatcaataaaacgaatgatcaaacatatttagaaaaatcaatagcgtcaaatatttagagacggatggagtagcatatagaggtgcaatcgcctttgactacttggcgctaccgcaagagctgggcgcgtggagctacaacgcgaagaaacgatagaagcagcaccatcaacgataaattcaacgattacttaaaaaatataaaaaataaaattacagccctatataactaaaattacatatgtaaattaagttgatatgatatgtaagtggattgtaattttgataaaaaagatgtgtaagtaaatatgtatttgttattttttaaatataaaattacagtcctatataactaaaattacatttgcaaattcagtcgatatgacatataagtgtactgtaattttgataaaaatgttgtgtaaataaatatgtatttgtttttttgtccgttggatgtaaatctaaagttggaaaaaatttggatgatttttttttctagaaatcacccaataaatggatagtcagatccataaataaacatcaaaattatccctaatcatataagtagcaaagtactgatatagccttataaatcaacggcttagactattctactaatagtagagaacaccgaagcaacgactggctggccgagttgatcttctgtaatccagctagcaacgtacgaatccgagttggcgagttatcgtgtataagaatgtgcgagggtatgcggtagaatcctccgtccatacaccgatcgatacaccctcttacgtatagcagactagcagtaaacccaatcaaactgctgtacttgctagttgctactccacaatgacccgttacaagccattggtgttgccgttgatgctgatcctcttacacacccagctcattattgtcccttcttcatcagcagctacgtacgccaaccacaccggagccctgccgccggcggttgttccatgcttgccggaccaggcatcggcgctgctccggttgaaacgttctttctccatcaccaaaaactccagttccacctttgggtcatggaaggccggcacagactgttgccattgggagggcatccactgcaggaatggggatgggcgtgtgacgtctctggacctgggagggcgtagattggagagcggcggtcttgatcctgcgatcttccatctaacctccctcaacctcgcttgcaacagcttcaatggatcctaactcccgcagacagggtttgagcggctcaccatgctcacctatctcaacctctccagctccgatttcgtgggccaggtacctaccgctagcatcagtcgcctaacaaatctagtatctctcgacctatctactcgatttgaagtagaagaattcacacaaggtcattctgtgttgtcctttgattcagttgaatctagcgtgctcaaagagccaaactttgaaactttaatcgcaaatcataaaaaattgagggagctctacctcggcgctgtggacttgtccgacaacgggatgacatggtgcgatgctctatcctcgtccactcctaaccttcgggttcttagcttaccaaactg

SEQ ID NO: 30295 - DNA, 2187 bp, Oryza sativa
tttttgggttcataaactcgttaacaacagggcagcatatctttggggtatagacaatctaaattgaaggagcaaattaaattaatactccactcggttacaaacaaggtaattagtatcgagatacaaatataatcgttttgatatcgggatattaacataggatcagaatactatcggattttagaaagtacatgtttgtatataaaatatgtaatacgttgtataaactaaagcatgtagtattgatttttgtaaatttgattggtttttatgtaaatatgagcatattatttacattatttcaaatccaccttattttaaataatatttggtatgattgtaggatcgtagaattgggatactatctaagatttcataggataatgtagaaataaatagtaagatcaagatattatgaaaattagaatatactggaatcggtatcatttcagcttagcagtatcttagtattgtaagatacaaggataagaatcgagatactaacaaccttgattacaaatatttgacttttataacaagatctaactaaagttttaaaattctaactatcaatatttttcaaatgctaaaacaaatttgtcatgttatgatggtgctttgtaggtaaatttatgtaggagtatatcaattttctaaattaagtatttgataaattattgattattataattttaaaagattgatcgaaccttacgatatatatgaaatatttatgattagaatagtattattatgggacaatttcgtttttcattattattgcgtgctttttccaccttttctttttcaaaatgtgaggtccaaggagataaattttgttgaattcacaaacttccttgccaattcaacaaaacgagcagtttgtggaacattggtagaaatcagctttagatcggacggtaaaagaggaacaccaatcctcgcgatccagatcggacggtggagcgaagcgcccatattcatcactcgaccgttgcttcatctcacagcgcaaagaaggcgagtggggcgcaaaagagggaaaagaaaaacaaaatcagaaaaaggcaagcgccgccgcggccgcggcgcgaaccaccaccagatggcgccgccgccgccggggcggccggcgtggtcgatcaccgtgcgcctgaggcaccgcggctggctggatctccgcgccgccgcggagaacgtcgtcctccccgggtggggccgcggcggcgagcgcctctccctcctcgtccgcctccgccgcggcctccgcctcgccgtcacctcccggtgcggccgcgcaccgccggagaagaacccgcgcgcctgcaggatcttccgcttcctcaggagcaagctggcgcgcttcccctccatctggcgccgcaagaagccgccgccgccggcgcgcgccaccgccgcctctcaggtgatccaataatctctcctgggtttggatcaagtagcgtttctaacttactttagtaccccattcttgatttgatttcttgtttttgatttgggtctttgcgtgtgtgttagctatggcggaaccgagcaacaatggcgtggccggctcatggcggaaggagatggccggcgaggacgacggcgacggcggcgctgtacctcgtcgccgcgctcgccgtcgtgatggcttccaccgcggcggttcgagccatggtacattaccgaatcgtgcacttccgctgcattttctctcagaattggtgtgaattgtgcatatgctgtatcttgcagaatgggtatgggagaggatactacgaaccggttggtcacagcaagtcatggagattcttggttgcgaagaagattgccaggttgttggagttggagcctcgcctctacgcgtggctcatgaagatcagcttgaaccggctcctcaactggtagaaattcgctggatccattcacctagtggctggatcacattgaattgtggaaagaaattctcagctaggaagtaggaagggttgatgtttacatgcaaactaatttaacttaggttcatatgattatataataagcatacattcagggaccaaacaaagtggtattgtcatctgagtttctgttttgcagtgcggacaatgagagtcaggtagtcagccgtgtgttttgcctcttcggtacaccgtacacacaaccaaaaaatgaagaaaagag

SEQ ID NO: 30296 - DNA, 5034 bp, Oryza sativa
gagatcgggttcgcgccgcggaggagacgaaggggaagaggacggacgacggtggttttggttagactctcactggagagcggcttggactaggggcaaattcgttttccttttcttttcttttttttaaagtaaattccacaatactatgtatcaaattatcacggacgagatatttaaagcgatgtatcacaaaactatagaattaacactaaatttatcataaaactacatatttaatgtggagtatcgtaaaactacaaatataataataaagttatcacaaaactacatattttagagtttaaatccttggcactagtgttttgtttgagttataaacatgtaagtttgcgattaaattgtcactaaacctgtagttttttgataattttattactaaatcaataggtttacgatactccacattaaatatgtagttctgtgagaaatttagtgttaaatctatagttttgtgataatttggtcaaactatttgtagttttgtgaaatttactcttttttcatactagtacttcagctttttctactctttccatttcaaaatatttttctactattgaaatataaggattcccatattaattctcattattcccatgatgacaaaaaccaatcatatgtctcaaaatgaaagttctaagttcaacaaatgacaactaaagtgactaaaaggaaatcttttagccgaaccttagttttgctaaacagcctaaaaaatattatatttcaaaatagatggagtagctttgttttcttttataataaaaataacctcatgttgtatagttgaagttacatgaaaccatatttcctgtcctattaaaacacgaaccctagcatcatataaaggatttaaggagagtgataaaagaccaaaatgccctgattaataagaaagttgcattggtgaatgagtaggtggtagtattaaatgaataaagttttttgattcacgaccgatggtaaataagaatataccccctccgggctgataatacttgtcgttttggacaaggatgaagtcaaactttagaatatttgattatgaatcatttttaaaatatttatctttcaaatatggtgactacatgtatagattagtcttaaaaagtattttaataagatcatatatttgctaacaattttatatatattataatgaaaaataatggtcaaagttgttttttggagaccgtgcccttgtccaaaacgacaagtattatcaacccggagagagtaggtgttggtttattttgggacagaattctagaagttgatttattttgggctgagaaagggtattacgactagtgagacataacctcatatatatggttttaaagtttcataaaaccttatccctgtacatactgagcacacatttacttaaacttttaaaacatattgtatgtgaaagaattaattattgagcttgtgattaaggttgatagtttaactattcactactttgaaaaatattgttttagatattttaaatttagtcaagattcaaataattgtggtgttttatgaaacatttaaactataaaacttgtgtttatttgtcacaaaattacaatacatgtggttacatgtggttttcttcaactttgatcatataatgtggggtttctgaatttactctttttctagagataggggggagggatgagctttggtcacgattttaattttcttttagagaatgccggatgagctttgatcacgattttaattttcttttagagaatgcctacatacattttttttaaaaaaaaacacaagtacaaacgcatgagctcactgtgttgagactgacaaatgcgagcaaccatgtcaaatctaagatttgaacctgagtggggtggttccaccacaaggaaccaatccagttgagctacgctcacttcgcatacctacatagattcttgtttgtgtataaaaatcaaggagcagaatacatgtctccgtattcgcgaaaattaaggggcaaagattccgagttttgaggaaaaatttggaacaatttgaatgaaatcattcaaaaaaaatatttccacatgaaacaagggaagttcaaattccaggcaatatattattattttatcgtagagcacaatttgaatcttctcccagaaaattccgataatgtggccatgcgggtgataggaaaatgaaggcctccaagacggcaagaacaaaatacagggcaagcctatgatcttgtcggcctccatgggcttgtcgacaagactaccctaagcccaaatcgccgaaggcaagtaactgaaccattcctttcaacagtacaggttacagacaccgggttaaatgtgtaattaggatgcacacggctatcttggttgtgcattcttcctgctcgtttcagttgtacagtctgaaacctgaattactagtcattatgccattgtgcagaagaagaagatggccttgtgccattgctgaatgcagatcaggggcaaatgggcaatggcatattggcattcacatcagcttcttcagtgtagctagatttattcagaatgcagacaagatccttgcagcttgggtacatgacgatttcttctatgaaaaaacgcagcttcttcagacttcagacaacatctttcagtgtagccagaacttttctcttttgagtgtagctagatccttcagaattcagcttcttaagtctaccttttttttttcagagttgggcacatgctgatttcttttctgaacaaacacagcttcttgccttcttcagagttcagagcagctctacctgctttccatgttgccaaggcaatgcaaacacaaggtacaagcgacgcatcaatggcgtcctcatcgatgaagctgtcacgttatagtttggtccccttcgacctgaatttggttggagaaaattggggatggaattaatacgggaatatcatatcaatatatcattgatttaagtcgcaactgcaatgtgttagcaaggtgggaaaaatgtcggacaagtttggttgagcgacggtcactgtcaccacgggtttggttcggttggtccttcaattcgatttaaatttactcaaagatataaatttgccacgtctttaggaacaaactccgtgtgttgcatctaccgacagatggcaagttgcttaatttatttatttctctttctcttactgtctctaatctctagtgcaaagactttggttatatgttgcattgctgcttataacaagatatgaggagataactagaaataaattcttcagggctttgatctttgtaggtcagctttttctaccctgttgtcgatcagtcgatgtaataatctctgtaaccacatttccaggatcttaatgaaatttggttggccttaatgaatgtggatgatagctctgtcaatgttccatgagagctgatcacctgaaacaagtgcagttgagctcccatttctcagtcaccacaggtgggagatgcttttgatgaactttgtgttgtcatctcggcagaagcagaagcagaagcagccaaccaggtgatcatccatggcgggtttaacgtctgcatcaagagattcccgtgggctcacgacatggattaggcttaagccaagtactagaattttatttgtagtatgtgctaaaataatacttccatgctcatgtcaaatcatgctgtttacaagtgttttttagcatgacgcattcgttttggtttatataagctgctgaatgcgtcactaattagagccataacggtgctcctacatgtttttttttatatttgctccaaatatcaacttttttgataaaacacatattaattcgtaacaaagtaatgcctttttattcccagttttactcaggtacgtaattaacttatttatcataaaaacaacacctactttttcactggtgtagaatgtattattttctaataaatggctcctaaatgatgtaatttcgtaaaaactttctacacatgaatttattagaaaataatttaaaacatatttttaactttataataattattttttgtttgcatgtatgctaaaatagtcatggcaaaatcattcagttatttagccatttggctatgtaggtaaagaaaaaaccaaagtcgaaagacgaagttaactcccaaaaattttagacaaactatccaaacctacccatagtaaattacacataactgttaactgttttaagagtaagtttactggcttcacttctgtctatattctttcacatttacattggtaatatagagtattttgggtagtaaattgttgtatgagcagaaacactatcttataaaaaagagtaaacttgtccttgaaaccgacaaatttcacacgctttcaaattaaaagagagaaaacccgtaccgatccaactattaaatgatgcacaaataaataaacgagcgcgcacacacagtgacacaaacctaaccaaccccaaccaaccgcgcgcacgcaacgcaagcaacgagtcgacgacgatatccaaaccccccgaccacgcccgaaaaagaaataataataaacaaaaacattagacccccaaaaaaaaatctgagaaagaagcgaaaatatcctctcgacccccctcaccggaaaagggtattgcgtcgcctcccgccgcgacggcgacgacgacgacgacgacgagcgcgggctccctccaccgccgcctccgccaccgcctcgccgcctgcctccgcgcgcctcccccgcctcctcctcctcctcctcctcctcccacatcggaccccgccgcggtgaggctgcgtcgccgccggctcttctggaagggggcgcatcgtgctccgatggacgcgcaggttcagcagcagcagcaggcggcgccgcagcagcagccgccgcccgcggccgcggcggcggcggggaggaggtacggcgtgcacttctcggcgtcgagcttcatccaggcgccgctctccgcgctgctcgagtactccgggatcctccgcgcggaccccggc

SEQ ID NO: 30297 - DNA, 2309 bp, Oryza sativa
acataagcaaggcaacatcaatcaatagcataatctcacctgggaaacaggggttctttcagaaccggaggtgaggatcctgcaccaaagatctcagcttctgttcatgacgaagaccaaatctgaccattcaaaacaccatacagaggcaggaagaagaagaacaggtcaagaacatgtagctggattggtgcttctcggtcaaagcttgaagcaaacgcgtaggagagtaacagagagattcggaaacatgcaaggcacgagacgacggtggcagcagagatgactacagcccacctactcctactactatgtgtattactactcgaaggatccaagatctactcctgcttttaaagaagaaaacttgaagcagagagagagagagagtatgaacctttttgttaacacatggggaagaaagtacggtgtattgttaccaatctctccaaaaaaaaaggaaaacgagagataaaagcaaaaggatggaaacaaaatagacaagaaataaatagtggcacatggtgtcaccagccatgtgtgatgtgttgtagtacttctcaagatttcctttcttttattttcttaaaaggaaaaaatggacagcatggttgctggagatgggttgtgtatgaaccatgcattgaattcttataccatggaaattaattaatgcttgcataagtaggaggaggagaataaattacaaaactaaggggtaaaaaaagaacataattttctagtaaagaatagaaaattaacacgagattgatgagaaaaaatgagtggaggtgttgcttattgataccttctgaaaacttttccatcatcagagttacggacaagatgttaacatacaaacaaaagaagcaagacctgcaaattccaaaatattctgtcagaaggataacacaaaaaaccaatagccatatgtgctcttatatagactgtagcatccatgggaagaaccatacgcaaagctctaccgttggatctctagtctggatggctgatgcgtgcagctccgaagcaagatgaaactgtaggaagagagagtaagcaagtgttaaataggcatcaatgagggagagttaattacccaactaaataggcaaaaaactgaagcatgaattctgaatgaaacgtgcaactgagttcagttcagttcaggcaaacagtggctgtaaaagggcttcaccatgtgatgtttctgaatccctgatccctatagtattaaagaaatgaccatctgatacgaccgaaggattcatatgatttaatactcagatctttgcacacatctccttgtattttagtagctatgctgtctgcttgtatacacacaaggagtacagtatgaagtgcatcagcggccgtggcaatatttgccatgtttctccactagtaaggatctttttgcaagattcaagaattttatgaactaatccaggagcgaattgtggaaaaaaggtagggtcagctcgaggcatgggcaggtcagagacattgacaacggacaggccattgctgcaacctcccattatttctgccgtaatctctgaaagtctgaaactgaaagtgttcttgggttgctgctagtcatgcatacttccctatgcagacaccttctcaggcttcgggctcaataaaagtgaaattgcaagttggagagttgggtttggggcgttggaatttaggagtaaagatttgctggttgtttcttacagcaatagagaaacatatgtgagaacatggtgtgaatttcagaatttgatcgtggaattgtattgatcatatttgaacaaatgataaaacacaaatcaaaattttaagtttggtcactaaagtaaatgtagaaatccagcttagttacataaaacctgaagcctgaatcatccatcgtttcatgtcaacaacgctttaattgtcagcattaactagtaagctaatcgatacatgagcgactagagttgcacgcggtggctatggaggtaggagacgtacacaaagggtggccgagaatcggcggcgctccggcgagcggcggcggcggcgaggcgaggacagacgtgggaagccgacgagtgtgtccttcaccacctgacccccacacgtgggggtaaaacgccgccggcggcccgaggagagccgcattcatggcgggtcgtcccctcccaggacggagaaggcggcggcactccggcggacggcggcgcagaggcgatgcccttgtgacggaaagagagacttacaggtgggacccactaggccggtgaccccacatgtcatcgaggtgtaattttgcataa

SEQ ID NO: 30298 - DNA, 1013 bp, Oryza sativa
attacgttcttccgggttcctgcacgcggccacaggcaatacttgtatatatcaacctggatgttaatttagatactagtagtccataacccatgcattcgtatatgatgaaggcttatctactttgtatctcagttttgttgaatttcagtttataactagtatggcggtccgtacatattgccggttaatattgttctattttatttctcaccgaatagcatatatgggttaattcacgaattcatttataggccaaataaatgaataaccttatttggcctatcttacaccgttaggtgcagcccgtcgggtgaggatggcacaaaccacaaaggtacgttggcacgtaggtcggcaaggctctggcggcgtggcgcccgggcctatcgcacgatgcgacatgttccacagaagaggaaagtcttgatgacccagcaacgataccagtatttgtgctagggatcgataacttgtgatgggccaataatgtgtagtgagccttgcattttcaggtggaataagtccattgtgactcctttaattaagtagtggaatcagccatgcggcgatagcggaggggaggcggatgcaatggcaggagagaacgggcagcacggggaggtggcacgagatgagacggagcggggtggccgccagggccacgacaatgcaccggtggcggagcaggtgcagaggctttcatcacgcggggttgagggcagtagctgagggaaggcagaggcagtggtgggagggacaatggcgtgggatgagatagaacggggcggccgctgggggggggggggggggcgacgacggcacgccgctggcagagcaggcgcggcggctttccccatgcggggttgaggatggtagcagtggaggggaggctgtagcaggagggacggcggcgtgacgacgacctccccaccgctgccaccatccttgctcgcactccctccttctcaatggcaacaagcggaagggggcaccggaggcaactactggaa

SEQ ID NO: 30299 - DNA, 678 bp, Oryza sativa
ttcttggaattggtagttatgggtctgttcttcagtgcaaaattggtgagaagactgttgctgtaaagattcccaataacagagacagccgcaaacctctgccaagcatgcgagagtttaatcaagaggcaagtataaagatatattctgcaatatatcttttatatttctactaatctaagttcatttatagtagctccatgcaaaataaaaggttcatttcatagtaattgctgacaaaagtttaacatgggggattacagttgtctctttgatccctcaatccattgaattcagatcagtgcaattgctattgtgagtttttgactgcgcaatagcaattgcagacaatcttagccattcattttgctacccaactgctgaaaatgaccacaaaagtaatttctccacagtttccggctacagtattttactctgattcaaatgttagctgcaacctcacctatttttcctgccttactttctccctgattgcatgcctactaattgaaatacagttcagaaattccatgggtataaatgcaagaaagtttatgcctacctgaattgttcatatattaattttcccgcaagttagagctaccgtacaatattcttctcattttctcggatagaagagctctgaaaatgcaggttgccatcctcaaaaagatccgg

SEQ ID NO: 30300 - DNA, 3201 bp, Oryza sativa
catctctaatgaactttagctagtctccgattggttaggtttcagggtcaggatggcagaagagggtggcaggtgttcctaggatgaccgaggcagtagtgacccaccggtgggttagcggacatgacaatgcaaggagaagatggtggttctgcctcagtcacgggcaagaatgacggtaggaaaagccttatcatttgagtgattaggaaacaataaaaggtgacatcagatccgataataggagccatcgaaggaggacagtagcgttggcgtgagggtaactatagatgaaggagtataagggggcaaagtggttcatcaagcctcatagagtagttaggaggcaatgggaggtgacgacgcggggtcatcggagtcaagaaagaaggaggcgactagcatcgccgaggttgtgaggaggaatgggtggcatggtacggcgggtcttactggcaccggatactacaccattgaggaggatggtaggaagaaaaatctattatattattaaaggaatagaaaaggcagagtccatatagaaatacaatttaaaaatagctgaaattcggaattaaaaaataaggaatattagaagagaagactagagtccatatagaaatacaatttaaaaatagttaaaattcggaattaaaaaataagaaatattagaagaggagactagagtccatatagaaatacaattaggaaataactgaaattcggaatttaaaataaggaatattagaagtagagtatagaatccatatagaaatacaattaggaaataatataaattcggaattaaaaataaggaatattagaagtagagtatagagtccatatagaaatacaattaagaaaaaaatagaaattcaggattaaaaataaggaatattagacgttcgctctcatagcctggaaattctcacattaatcggagaaaaagaaaaagcagagtctatatagaaatacaatttaaaaatagctgaaattcggaattaaaaaataagtaatattagaagagaagaatagagtccatatagaaatacaatttagaaaaaaatagaaattcgggattaaaaaatgaggaatatttgaagtagagtatagagtccatataggaatttaaaactaactaaaattcagaataaacataataaaattaaaagtagagttttgagtccgtataaaaatacaatttacaaataactaaaattcaaaattaagaaaaaacatgggaaaaagagtttaaagtcaatataggaatacaagtaactgaaattcgaaattaaaaattaaagaatattgaaagatgagtttagagtccacatagaaatacaattagaaataataaaaattcagaaataaaaataaataatattagaagaagtgcctagagtctatatagaaatacaatttacagaaaattcagaattaaaaaaagaaatatgaaaagatgagtctagagtctatacaggaatatatataacttacaaataactaaaatttgatattaaaaataattaataactaacacgtatataaaatacaatatgaatattatacatttgtagtttcgtaaagttattgcaaaatttaaaattatgatgtcattttaatatatttgaataatataataagaaaacatatatgctattatatgagagaaaatataatgatgctagccgcgcaatctgcacgggccaccatgctagttcagtaataaagagagaggagataattcaggtgtatagcaaattactttagaaaatcttaaggtcccaacttttagcttacaacctcgaactattaattgaattattcgtgacatgcttctaaaactgcaattccttcggaaactttcttagtcagccttgcttagattttttttttcaaataatttgctcgcttaatagtatatattatttattttattcatacaagtagatctataagttttaattcttaaaaagaacatgctagactgacctttagacaatccattttttccctactcatcgctatgataaacatggagtaattcgagtcatttgacatgctgtaatgattgggttcactgtatacatatttgtcgacaaaaactagacatttaagcaagatttctttgtgactttcagttatcttcagttgtgggagtaggttttaaagtagcagtagtggtaacagctaaaaagcgatggagggagctagcaatggagcatttcttccctggaaaaagcaaggccaccaaattaagctaagagcaaccaagggtaaacggtaggtactcctgtttctcaatgaattaatctaatactgcatgtgatacatcatcgtagtaatgaattcatgttcataattactatgatatgctatatttagtataaaatttaacttattgtgagacaaagattaatagtattataatgtgtcaatgtgagacggagaaagtagtcatttcgttacaaagaaaatgacaaacacctcaacatactggccgtcaaactaagcttttctttaggactaaacatcctaaataatgcccagatggatcgtcaaagacaaaattatgctgctaagagaaaactcagagttacacatgacgggattagttgggtggttgggataatcctgacaaaaaaacctgcgacaacgctgccgcacgggcgtcctttcatccaggcctctggtcatgtcaccctgcgaaattccagctgccagctcaagaaatggcgcatgaaatcagtaaaatgatctttgaatatttaatcctgggagaaagagctaagctaagctaaatccaagccaaggaatgtggtcctcacgttgtcaaatctccataagatgctgctaatgaagcatcgggtatgctatcatcgtgtcacattgtccaatcttaaatgaagccaggcacacatggatcagtctgcaatattcaaatcatggaacaggacgcttgtcatgcagctggggaagcaggcttggatatcaagggcaataattaaaatacagttcaaggatcaagaacctggtcctggcaaaacaagttctgagacccttaaacatgggacaattgtctctgtaaacaatcaacaggacggcagtaacgacattcggacatactaattctctccgccctaggctcaggttccactcgtgtgctgctgccttggttcggttttgctgcgagcaacaggt

SEQ ID NO: 30301 - DNA, 1204 bp, Oryza sativa
cacactatttctcagctggcagtaaaatgtactcttccaagaaaaaaaacatgtcgttttgtagccagctgcataatgtctagctagtttttaacctttttcacacacatatgtttttacatttaaagaaatagttaattgtatttttttggggggcggatccaagacctggtgaccccggacgaccgcccgagctcgtgcacttcaagctagcagtaaaatgtactcttccagctaaaaaaacatgtcgttttgtgaccaactgcataatgcctagctagttttgtttccacatttaattaattaaagaaataattaattgtatatttttgggagcggatccaagacctggctagtggttaccttcgggcaaccgtccgaactcattgacaagtcacatcaatgtaatagcttccatcgctgatgttcaatggcatccatataatcctttggacatatatgtttgttcatgttctaaaagatctctagattcgccaatgtacattcacacacttaattagtcattcgtacatgcagcgtgcttaagtttctaggcgcataaggcagggtcgactagtatcccttaataaagcttatggtgatatgatggtggcattgtgtgaactgtgaaggtgtccaattatcaagtgtacatggtagccggctcgcactgtctatatcatagctcctcttcttcccttctaaaattttggaaggatgccataatatggttttgaagtttcttggccgccaagctgaagccaccaccacactgagctgtcgatccgcgtgtatttccagtcggtggtagtaacacgcacggtgcatcctgagccagtgagccgctttagcgacacatcacgtgcatcggattatcggaagcacacggtcaaggcaagacaggtattttgttagtcgcgattaatctacaacagttagggcatccacaatgtgctacaaaagtagtccatagggaataaactattccatttagccatttagtaacactgggcaactagtccatataaagaaaatagcaaaagatatccatatgcatatacactacctatatgacataaataatattatatatctctacttctctctcttctcctaatgttacattgtatccatatacattgtgagattgctatagttaaagtttatttatatgggtcccatctatataaaccacttttaacat

SEQ ID NO: 30302 - DNA, 3649 bp, Oryza sativa
tttcaccaaaaagaaaggtaaacaaaaaaaaatgatctacacggataagaaaaaaaggttacagcctaaatagatttattttatcccgatttctagggagaaggagagtttgtcaaacaacatggtcgtcgcagtacaatttaacgctttccattatttaatgtcttgttttgttttaattatatggagccatgtgtgaagcttctcagcacgctaaatattatagcattcgtcatatgtatgactaaggaagtacttttgtttgattgtatagcttattacatactttacactttgccacttgccacttactgcgtggaatttattaattcagctcactcatatatggcttgttatatatgtatgcatgcatgcatctcgatttgaatataggatgtgattgtatgcgttcataagtgtaatttcacgcgttatgtataataaataattaacaaaaattgctatactaatataatattttttttttgagaaatatggtcttccaaaaccctgtcacctcccaatttatatataatcagtggtgaactggtacttaccaccggtatgttttaatgcacatcgtaataagaaaacaattatacgtacagacagtataacaaagacaatttagctaggagaaattgacatggtagtttgaatgttgtttttatgagaaatgagactattaaatatttatttgtggagtgttactatgcaaaatttctttggagagctctacagtttactactagtttttatagtttatatgctcctcatagtatatctcatattttttagaattgctttgtgggggttgataaaaaatctaccaaacttattcttgttagagcatctgctatatgttgggctatatggttgtgtagaaatgatatggtttttgataaatcaccatctatgtcctataatcctatatgcatattcttttcagggcaacatactggccccggttctgagctcaactgctaaagtgtgatgaagaaatcaagtcagtgaaagttatatgtcgtaattttgattcaatagttatgcagttgctcgctaactttggatggagattcacaaatagaatttaataatttttgtgatcttgttatgctgtgtgagttttttttagtttgtgtgtccttttgtttattcaggtgtgagtttttggtgaattggtgtaataattaattggctgtagctctttgagcaaaggtcgggattatattccattattaaaagaaaacatattgtattgtagttgtaaatgtcaaactacagaagagaaatgggggagagagaccccggggggtgacttcacttttttctcggcgaatacgtttatcaccatataattaacgattggtgcatcagctgatttcagattattgactagaaatattaatcatgaatatttctcaagaacacatagcaagtttgagatctttgtatctattcgttagaaaaccagaaacaggcatgtaatggaaggaaatgaggtctttgccccgtgtgttgcagcgggattttaataaaaaaaattatcattaatatgttattattatatcttaattgttgtacgtatttgatactaacatgtggacatttttagccttacactgttctttttttctttcaacaaaaagtgaagagttggttggagtagctaacatttagaccatctagacctacctgtcatttttccccttaaaaaaactaggagttggtagtggggcagtggtatgtagaaccaccaccactactctcttttataagaagcatagtatacaactaccacaaaacaccacatcagtgatgcctccttcattgcgtcatgcatggaggaaggaaaggggaaagaagagggcatgcacggcggtcggctgcgcatggccagcagtgatgatgggccttgtgagaggagctagctagcggcaacagcaaaccatgtgggaggagaggatcctctcctctaacaagcggtggagtacttgcccgtcagagttgcccgtcagagatgactatcacctctgacagtcggtcacccgtcaaaggtgactggacacaacaatgaccactgttctttgaccaggcctaaacccatcaaaggtaagggtttatggccatcaaaggtgacctgatccggtgtagtgggagtaaaggactagtgatagaggactggcgagaggagcggcggcgagtccgttcatagggaagagtctgtgtcgtcacgtggagctcagccagcggcgggagggaatgacactggcagctgaaatattttgttgatttggtgttcgttctgttggatgaatcgtttttatcttttggatattgaaattattgatccgttggagaattcttagatctgttcttggtagatggatgtgtttcttatggggccgattgcaatctcatcagtgtgggctcgcaatctggcaataatgatccgctggctgattatcgctgagacagaagtgccggttccaaaatcgtcaccgacgttagttttgaaccagcactgatgtccaaacctgtggtaatgatagttggaaaattttaaagtctcaacacataatatagtactacctcttttttaaatatgtataacgtcgttgactttttgtccaacgtttgaccattcatcttattcaaaaaaatttatgtaattatttattttaatataacttgattcatcatcaaatgttctttaagcaagacataaatgttttcatatttgcaaaaaaatttaaataaaataaatggtcaaacgttggttaaaaagtcaaccgcgtcatacattaattaaaatacggagggagtatatagcaattggatagtttctttagcggcacaaaaatcatcacttgcttatgtagagcttatctaatgtgtgattatattctttcaacaaaacggatgcgcatcatttctcggtttattcctacatgtatggataatgcatgtatgagaattaattctacaatatgtatatgtcagcggccgtttgcaacgaatcaggagggaggccggaggtacagttaggagaataggcaaccaagccacctagcatgacaacgtagtaccaagattaatgttttattttaccatgaccaaaattattgttcattactgaattaactacctttaagtactcatttttaaacatcctaatgtggttggtgtggttctccaagtcgttggtatatttctttcattgatgaatctctattacttacgtattgaatcctgctatccacgcagcatgcatgcatacaggccgatatatttcttaaaagaaaatacagacgatcaacttaataattttatctgcctccgcaggcaaaatggcgatagctaggtactccctccgtttcacaatgtaagtcattctagcattttccacattcatattgatatatattttagatttattaaaatcaatatgaacgtggaaaatgcgtaggactctatatattgagctatctcctaaatcaacattggctgctaggcttaatatatattttctgctatgatttaactaatgaattaattaattgtcgctttccacgtaccatttcatatatatatatacatgtgcaaaattttaaatgcaagctgttttagacacatgaacttttcaaca

SEQ ID NO: 30303 - DNA, 1265 bp, Oryza sativa
agtccaaatttagtatttcgaaatgtacatgttgaattcttatgcttttttcctacaatggcgctaaatttgagatgattatctttgatttatcatatcttaatttgtgcattgaatttaattctatacaataatattgcttaatttatttttcttcccttgaaagtttcataattttgtgatatggaatacatttggccaaactacaactgataatttaattttatttctattccattattttagtttatgaatcatttcaatttctcttgtggtttgttcttttttattttttaactgggaatcaaactttatttaattggcgtaattgtgttatgtctctactttcatattcatatgtgatttttatccctattttcagggtttatgattttgcccattctttttttaaaaaaaaacaaagctttagcttgcacctggtatatatgttaggtcacgttgacggtgataagtctgtggcattcaccattgaatattattgtatgtttacctctacttttggtcatcactcacatgggtctgccccttatacccttaaatctaggcttcttggttcaattgaattaagagatcagcgaactatgttcaaaatagcatcaacaatggccaaagttatctactctttcagaagcaaacaagatggcaatcataaataattcccaatgtggtgctaataaattaaccaaatcttatctagctgttgctactagacatgcatatatatatgtatgtatatgtatgtatatatatgtatgtatatatatatatatatacatatgtatatatatatatacatatgtacatatatatatatatatatatatgtacatatatatatatatacatatatatatatatatatatatgtatgtatatatatatgtatgtatatgtatgtatatatatatatgtatgatatatatagtaaatttgtttggtgctccaaggtgcccgggcaccattgttgaaattgagcatatacccaattcaaatgagtatgaaactttttcaattacttaggtattaatattaactaactaactagttcaaaacaaatttgaactgaatttgaacttgtttttgttagattttgattctaggtatatagcatccatacatataattagttaggtatgtaatcatggattatgaaataaagttaaatttgagttgttttgttgataggtataggtatgaatcaaattattataactaggtatatactcacaatttgaaaattttga

SEQ ID NO: 30304 - DNA, 2048 bp, Oryza sativa
aactcgttgtattatcttattggagttgtataaataaggccgttctcctaacactgtttcaggttcttaaaaatatggtgccactttttcagtcactttgctctcaagtatacttctatctaacctatctcctctttcacagagataaaaattactgttaaatataattttatttgtgtattagaaaaaatataatgcaaatatttaaaattacattcaaatattaaaacataaaatgtaattacaatatatgttttgaaatttacaatctaattacagtatttaagtgtaagtaatctatagtgtgagaacgatttaactgttttataaaataatatagcgtcataaatatagctactccctatagttttgtgtgtgtgtatgggaggaggtattttgcatttacataaaggctatatttatagttttacaaaatctgtaggttttcatctatagtttcccaaaaggaataagtctattttgactactatatgtaagctatatatatatacatacatatgtatatataacactatatgtaagctagttgcacatgactcgtattatgcatggtcgaaggtcgatcgatgtttaaattagtttcgctaaaaaaaaagtgaagtcaaaatatgaccactctctctatacacagtttgacgttatcaacaactgtgtacaattgcaattttttattatagtttttacatttccatgcacccttaaaaggtaccaagaggcagtaccagtgtacttatctatgaattgagagctgaggtgacaatcttttgaaagaccatgaagccatttgatactgtcatcaaactagctatattgattttaagcatattggactctgattttgtctcgtagaagatggttttaagatgctatcttacatgaatgctacatacatatatatatatatatgtatatgtatatatatgtgtatgtatatgtatatatatgtgtatgtatatgtatgtatatatgtgtgtatatatatgtatacatatatatatatatacatatacatatatatatatatatacatatacatatacatatatatacacatataaacacacacacatatatatatatacacacacacacacacacacacacacacatatatatatatatatatatatatatatatatatatatatatatatgaaaattataagctactaccgggagtagctactcccttccgtaatggatcaggtcaatgaaggggatccattaaccaaccagcccatgtaacagtttattgaattaaataaataactaagtacttagattatggcttgattatcggcagcacacaaacgaacgtaccaaccttctgctctgttttaatctaggtttttttttctttcgcatgcatgtgcattcaaaaaccgagcagaaggtcttgacgagtttctgtcaagattcgtttctgctttttgttatattctgcctatttttgttaacgtttcagattgtgttctgctcttcctgataaaactggtattgtgatcacatgacatagttagcaactgacgagcagagagtgatctgttttactgggaaaagcagaaagtgttctattctagagggagtgatgtagcagaaggtgatgccatatatctacatacacgagaaatttatgccatttactaatcgcttgccagccattgcacgcattgatgcgcactgtatgtgaaccagaaaaggagcaggacaagctttgttaggagcagaaaatcaatacgaaagagagcggaacttcggttagtttgttagcagaaaattagttctaaaaagagcagaacatcaacaaccgaccgcttatatgtagaacaccagggaagagctgatgttctgctacctttcaaacagaaattctgctcaatgttctgctccttttaaaatgggtcttcagaaatgatcttctgctccttttccagatctattcttctactaattagacgagcagaagatcttctgaaaattcatacgagccatctaacttgtttagcgcttaccaccgtaaatgtagt

SEQ ID NO: 30305 - DNA, 2309 bp, Oryza sativa
gatggggctatgcggatttaatttagctttcccactgttaagttgcttgcagttccggttctgaacagctttgtgtctactctttccgacagaccacagattgatagcaccaccattactatgctgagactgtgagcatgcacagctctgaagccttttgtatgacaaggatcaggagttcaggatgcaagtccaccatatggattgaatttggtggccgtgtaatttctgtgtcctgcaaaggacgttgctggtttctttacggctgctatgttgctaccttttcagagaaggtattgcaatctatattcgcaaggctttatcagttcataggtatgttcttatcctatcgcccgacaaatattgttctttcatctttcatattattgatgaaacatcttttaattgagccacaatgagattgatgtaaactatcagcatacaattaaatgtagtgcatggagtttcagaccaacatattctaacaaggaatactttaatagaaggttcaagttagacctcatagctctctctcatttgtgctattctaaaatgaaaggaaacgatgtggtttatgtttctttcttgttagacttcataggtctttctcattttgtgctatgatggaattacaaaattgtagatgcaaagttgattaattgggttattcatacttaaatctttttttctttttttttgccattggtaaatggcatgcatcatgcccaccaattaattattagttgagctattgatttttactgtaagtacagaaaaggatggccaatttacatacatttctctcatttttctcaaataataattaagaattgttcggtgttgtgcaaatagactcaaaataataattggaattgtgttcatttgtgccaggcggtgctattgcgtctcttatttctctaccatgagtgaatagaggatatggctactgttgattggaaatagaagatgaagctttgaagatctgttctctatgaacagctaaaattctgtaaacagtgcttgtggtgcatcattctaaaaagaaaggaaacgaatggtgagtatgagcagaattattattcctgcacataactttgaactccatgccacttccatctacatgactatcagtttttgtaacttgcaagaatcaaactggagaaggaaaaacagaagaaagatggaacaactgcaaatctgtgcactactacgactatatatggatttgttgtgttttttttgtgatgtatgttgtaattgatattgtgaaatatttatcgactgtttgtataagaaatcaataatacatgtgcatgtattagttgtgttttagcgtttcagatctcagcgggatgagttgttaacagccatcttgtttattctgaaattgaaaggaaaagaaatttcaaatatgaagtagtagagccaaaaaaaaagtatgcccatcattttcttcttaatcagtttatgctatcattaattaattatataataaggaaaaatatgtggaaactaagaataaataaatatcatcgtagcgttagcatgtgcatgttactagttagcctataggtgtctgacctattggttatttactgttttgtctccacacaaattttggtacacaaaattgcttaaaagaaattttcattgttatcagcatcaaaatttgactttgagaacccctctatagaagtctggaggggaatgaactagttccaactactaaagtgctcatatattcaataaaaggatcatttatttttaacgtgatcgtgcctaaatgaggatgaatagtttgtttcattgaaagatcatttaacccttttttttcctattccatttgaagaaagaagctaagcatacgacactgccgtctccatcccatcgccggctttattggtcaggcgcggtccatgcaagggactcagagggaagattcctcgtgtatatgtatcattggtcttgccttgatggccggttatcttagagcgggtacaatagtaggctataaaccagctgcaaacatattttaagaagataaataaggagagaggagagcagcgggctacagatttgtagccagctatagcatggactctaagacgcggtgtgtgtatgccaggtgggaccagatattaatagtatagtatgtaactattgtattaatgagctattagattggctatagataaattggagctagtagttggctatactattaaacttgctcttacatgtttgtttttgttttgatggaggttgtcctagaagcttactactccctctgtcccataatataagggatt

SEQ ID NO: 30306 - DNA, 3589 bp, Oryza sativa
taaaagttatagatcttgatgagttatacaactttgttgttgatgactttttcagttgaaatcatttagtatttgaaaatgttgtttgaagttgtcatattttcaaattcaaattcaaattgttcaaacaaagtcatatagaaaaatgaccaaaataaaagttatagatcttgataagttataaaactttgtttttgataattttttcatttgaaattatgtactacccgaaaaaattatttgaatttcttatattttaaaatttaatatttatatagttcaatcaaactcggatggagaaatgacgaaaacaaaattggtaggtctcaatgagttctacaactatgtttttgataactttttcatatgagttcatttagtatcataaaatttaattcgaagttcattttttctaataagtctgatttgccttctctttgggttgggctacctcatgggccttatgtgtaagtcggatatgcaataaaaaatacaggataatatccgacagatatcctattccgacgaatatcacctatatcatatttatttttatatctgaaaaaagtatccgaatttaaaaatttctagatatatcagaccgaaactatctgaataaaaaaaagtcaattcgaacggaaattatccgaatcactttgcagcacagcatttcccaacgcctccaagtcccaggcacaagtgtttggagagaagacacgatgcgtgattaaacagtaactggcgcatctccctagtttcttctggtaataagagccaacacatacgtggaatggaatggtagttttttatagacatcctctcggtgcgtcgtataagaacggtaaagttttttctttcaaactatgcatatctctagccagagaactgactactagtaccttcataatatatgtgttcatgtgcgcaaattggcagactacctacctcaaaactattactatcttaacttatgtcgattcaaatctcagaatcttcaataattaagttatagaaatatcaggatttaatgtacagaaagatttgtccacatcaccaagaatattttttttactcatagttaaatctagaattaagattacctttgaatcgcaagaatagaaatacacgggattctaatagtattatatgtgcaaaacagattattgcaaaatataggaaaaaagtgtaaaacaaaagaattgcaaaatacaagaaaaacatagaaataaccgtttgattggactgcagaaaaacgtaggaatcagatgagagagatagactaaaagggaaacttccacgaggttggagttcttactaaattgtctaaaatctctataggattgtctattccatatgaagttcaaaggataatataagattcaatcatttgtttcaaaggttttcataggaaatttttcctattggattgaaatcctccgaaattcttatgttttttcttcaaatcaaaagggcctaaatgctttactcagggcgatatggataaatctcatacgtttattttttattcaattatagtttttggttttcactacatatggtgcatgtataacaaaacttactaatacatgggaaggaatggctcggagaagactcttgtctagtactactatgttccacaaatcttaacctgatcgatcaacaggcttcaaactttctttttccacacttcgatttgtttgagcgcctctgtttttcccctgtttgttcggagctctgttccgccactgtttttcacgtcattcatattgtgtgatttgtgtgaactgccacatttatcttcgtgtgatttagctcttgtttattttccaacttttccttcaaactaggaaggtaacccgcgcggcacctttacttagtggtgtttgaaattttgttatcatgtttatgtataatggagctggttcatatgaaactataatttatattacatgtgtttagattttttttttaaaaaatatcatattaattaaaaccgtaatatttttttatactaaagatgtttttgtagattttaggatatattagtttaagaaattttttattaaaaatgtggtaatatgatttctttatctaatttattaaattaagacatacccacgtactcttgtttgcttctcctacctccatccataaatcgaaagatttaaattttatcgtagattataagggattataaatactactcgtaccatccaaccatctctcatttaatttttatccaatattactttaaccaccttataattctccaactacccctatttaatgagacttatttaatgagggcaaaataccccttgttgggcttcttagtatttttttcattcctccttatttcctataaaattatatgatccattttaggcagaagatagtaattaaaaagagcttaattcgtagaaggatttatttgtacctttctggattgatttagctttacctatttgtatagttaaatagacctcatatacacgatgagagatataattaagttggtagaaagacgtcacatgtttagtggtacatagtaatgtgtccaccaattgtatttttaaaaaaaggtggttattttgtcagcggtaatttttaggattttcttttattcagcagttaacttaattgccatatggagaaaaagaggtgacaacctatgggctcgtctcgtccgtgaggaggaaagtggatacatgctcgttcgtgagaagggaagtggatacgtgcattgtacatatgaaatctgacggtcttatcgatcaataatctttttaagatatagatctaatagtttaaaataaggtacataggtttgggtaatacgattttttttctcagaatctcttatatttactttagtttattagagcatcatatggtggcttaggaacgtttatagaaagccatgtggtatcttgacagagtttataggacatttaatggaattttagtatataataatagataattcatgtcatgttaattaatatatcaatcaataattaaataatttgtatgtgtagtgccaacataattttttattggttcgccactgaacaattaagttggtacaaagtaatgagtccaccaattttattttaaaaaataaggtggttattttttcagtggtattttttaagattttcttttttgcagtgattaacttaattgccgtatggggcgaaaaaaaaagaggcgacagcttgtgaggagggaagtaaatacgtgcgttgtatatagagactttggcagtcttattgattggtaggttttttttaattaagatatagatctaatagtttaaaatatggtacattggtttgggtaagacgatatttttctcaaaatctcttatatttactttaatttataagagcatcacgtgatggcttaggaatatttatagaaagccacgtggcagcttgagagcgttagtaggacgtttaatggacttttactaataataatagataattcatgtcttgttaattaatatatcaatatataattaaataatttgtaggtgtagtgtccaaatattttttttatgggctcgccactcaaatggaaggaa

SEQ ID NO: 30307 - DNA, 2059 bp, Oryza sativa
tcgtcttattaaaacatttaagtaataattaattcttttcctatcatttgatgtaggcatataattttacatatttcataaaagtttttaaataagacgaacggtcaaacatgtgctaaaaagtcaacggtgtcaaacatttcgaaacggagggagtataatggtaaacttacagtcaactaacgaaatgggtacaattatcggggataaaaataaaacctcacagtaatataaagaggatgatgtaatattcagaggcaagaaggaatggagaaaaaacttatgggtacgtaaggaattttctcatttctctccgcatcaactcctgatttgtttcaaacatgtaatatattatttcatctgttcaaaattatagtgcatacctttaactgttttgaggcacagttcgcaccgttatattgccccaaaaattttcatatgaaagttttttaggactctaaacaagagtatatatgatctggttgaaagttttctttttcaaataagttatttagttgatcgctgtagtagaaagtttttagtcacaagtcaaacttgttggtcaaaattacacactaaagaaaaaaaaataaatataaagtaacaaaccaaatctttttctatacaaaccaaagcacatgcagttgggacataaaaaaattaagacatggcatggctttggtggaaagtggaaaggacaagggtgctaaagcacatgaacatcgtgtgcgcgcatgttcggcaagggtctttttttttttaattttgttgtatactcattttgctaagctcttttttagagtgaagtaaaagaacggtcctcatgtgaatgtatcatgtagatctttgtatcatgtagatatgcagtggttgtggtgctgaaatttttttctccaacgaagcagactccaaacagtagcccgaatgggagtattttccgaatagtttaaaaggttagattacttgtgtgatatatctactaccgtatagagtattgccgatgtgaggagtccgaacctctataaaaatacccctatacaccgctctttaatttactccatactcgtataaaccatggtagtagtactaagctaagccctacatccagaaataatgtagtcgggtttagtccatacgttgtgtgttgtgctgcctttctccctggtttgctgattagtgaggtgggttctcataataaacatatttttttaccaaaaaaaccctcggaagtcggaatccttactaacacatgatgttgacccatccgaagactagggtagccggagacgatcccaacacggggatcgccgcgtacgtcgtgccgagccgaatggcgatggagctgagtaatctagtcaaaatactctctatatccatctcagcttctatagaaaccaatattcattaaaattggagtttagagttgagagttagagtttggagccgtaccaaataggaccctgctctcctcgtcctcgtgcttcgtctgcagggcagtagggaatttgggtcggctcggctctggcccagattgggcagaaaggaaaagaaagataaagaaaggggagtgaaaaagtctattttagctgtctactctattgacccaatttgattctctcagccataaaatcggttatatcacctctaccaagtattaaaatcgtgcaaaacaactccctcaactgttttaatggtggttctagctgacgatggcttctacagggcggaccggtcatcgtaaaaattttaaaatagatacgggcccaaatgtaagtgactacctctcatcccctctctctctctctcccgtgccgtgcagccacactcgccaaaaacctaccactcgccgaatattcgcactagatgtggccttttgtcgtgtccttccgcctgttcatccacccaccactccctcccactactagtccttgggacaccaggcagtttcggtttctagtgtgcagtggctcaagtgcctcatccatggcacatccgcatagtcacagaatccctcctcacacgggtcttcaaggaggagaagggggtggccgagtgaggg

SEQ ID NO: 30308 - DNA, 1809 bp, Oryza sativa
aagtgctggatgcatgaaaactataaatatgactatctcatttgaaaaaaaataaaaaaataaaatatccttatgatttttggatggaactattataaaaaaacttaaaaatagattaatataattttttaaaataatttttctatagtttttttttgaaaagaacaccgtttagcagctcagtaagcgtggatatgaaaaaactaggaatcagaaggaaaagtgcacataaaaagcagcctaattttagaggataaacttttggattaaaatgatacgtttttcaaactgctaaacggtatatttcgtacgaaaactttctatgtaaaagttgttctaaaatatcagattaatccatttttcaagtttgtaataattaaaactcaattaatcacacgttattatcacctcgttttgcgtaaaacaattaatatttatcttcaaatcttgaggagattcaaacaccacctaaatattcgctgattttttgatgcgaaaaggaaatttatcacctttctacacgtcgtctagtactgctgaattatcaggctgtgtctgtgatgtctgaatatctgaatccgacaagacataacactgttgattccaactgatctgatgagacgagaatcagtgcagtattgcactgttgggaagaggccaaggaagggagggaagggaaagctactttgctgcttgcttttttcccctcgaaaaaaaaaatcccctcgaaaaaactttgctgcttgcttttgagttggttgctagctgcatcttagtttccaggttgtgaattagtacttcctttatcccaaaaataattaaatcctaaaaataaatttaaactcttttatcagaagaaaaacacaaatattagagaaatatctaatatcaaataaataaaataggtgaggttttaaactcaagccgactagcccaccaccttatgaagctagctaaaaacctcttcgtgtttctaactagcttaacagatcgagtactgtgaagcaatacagaagagctctctaaagagattttgacttcgcttacagttctccagtgtagtagcattggatcagggtgagatagatcagttctactccatccactttaaaatataaacattcgtaacatctaaaatttataccaacatatatatactttacaaatagatcctttgaagtaaaacaatgctgaagtagtactagaaaatgtccagatttagatgatgggagtacttaatataaatagaagtatttaaaacgtatttactccctctgtcgcaaaataagttttgcactattcatctctaacgtttgaccgttcgtcttatttgaaaattttttatgattattatttttattgttattagatgataaaatatgaataatactttatgtgtgactaatttttttaaaaacaaatttataaatttttcaaataagatggatggtcaaacattggacacggattttcacagttgcatttattttgggacggagttagtatattttagaacggcactcataatggctggctcgacttatgtgacataacagtgatgttatattgtcctagtttctgtgaaaatccattaaatttcatacgctcgcctcgtatggaacgcatgaatatcatgacaactggagtagtacagacaacagttgctccattcacacagtgcacgacgacagaggacgacgtaaacgattgcaaagtcgcaaccaacgagcacatggctgctggctggtaagaaaaagctcaattaaatatcagtgtactgtatatatgtacaaatgtactctccatgaa

SEQ ID NO: 30309 - DNA, 2005 bp, Oryza sativa
caagtttcttccatggccactcggtgaagataccgggtttggtgaccaattcaggctagctgagctcgtacagtacttgctagcgctgctgctactactgttttcagggttagtgatttactgagctctgttcttgctcaatttacagactccttttgtgtgtttgatacgtacatagggtgacaggtttaattagttgacagaatgacagatatcattaattatgcatcatgattcacggtgaatgacggcaaaaattcattaggttggcaacaggtgtcgtctatttagattagagaaccttgccttgcactgctacccaaacccaacagtattgtgttattatcccatggtgttgagttatgtcttgtcaacctatacccatggaagaactttgctttcccgtctcaagtgtatggatgatctaattaccatgtagagttacttaaaagggatttaacctatacaattttcctaccgaggatgaactcatgcaagattagtcacaactgtctctcctttttaattgttaaaagttgtcaatgcacaggttcattgaaggtttgaagcattgtaaagtaaaacccatcacctttttcttagaagtggatttttatccctcgaggggacatcccctcgttttgtgcatgtcgttcaaaaagttatcaaaaaaaatttaaaaaaaatatcaagatagatcaatatatgatatatcttttcgtaaacatgtgagctaaaatttgacttatactattcgaaacaaaaataacaaatttgaccatgaattacacgttctattcatagtcaaatttattatttttgtttctacctgtataagttgaatttgaatttgcatgcttgtgaagtgacatatcacatattgatctattctactatttattttaaaatttttttgatgactttttaagtgacatgaaaaatgaggggatatccccttaaaggataatttgagttttccctttttctttgttaatatagggttttcacagtctgttactcctactagagtattagctacctactgcttgacagttaaatgccttgtcagtcagattgttggcaagccgatcaagccttgaacataaagcattatgtcgatttcatctttaaacagttctctcaatcgattgaacctccaggtgtcaacacacattactatgttctgcctcccaaagcaggtggcggatttcgggcagaagttcaatgtcatagttgatgtcaggctgtcccaatcttaggtgtccagataatgtacaatgagttcattctctgtttgggacacataatttaatttcatggaatatacttccaacttctaacttctaagaatcaaaaaagttttcctcgttccagatagggccttaaatagctctcttgcattgttgatcatgtgcacttcacctgcacgagttttttttttttctgggtcggcgaaagctggccaaagtttatttttagaattgtgagtaagaattaagaaagtgttcaattatctgcgtgccctctaattgtaatagtatattgaaaacaatactttatgtttatacatgtgtgggggtagcatttttaaaataataagagcataagaagagaaactggggcaaatgaccagaagtcctataggctacaacaacttacatttggaaaaaagtaagacactacaaattatgttccgaaacaaaataggagcaggtaattccaacaataatatcgttactccttaaaggatgagttggatgtgttggatgatggtgtgttttacacccacccccatcaagatattttttagctagatgtgtatatacgtgtgtattattatctttagtaaaaagtacattcttatcatgaatgtacatgtacattttttattcatcttatatttatatatgcaagtgtaataataatttctgaactgaggaaaattttttagatctcaactctatatcttatagggtggacttgttggctagttagccataaatat

SEQ ID NO: 30310 - DNA, 5024 bp, Oryza sativa
ccgtcgctatattttaggtgccggagataaaagagttctcaacctccccgaaagaacacgggctacgaatcatcaaaaacattaatcgccactctctattgaaggtgtctagacggcggctttcagaatctcttctccttaactttttcatgatgctagcggctagcttgatgggtcactatagctcacttgttagtctcctttctgtctagttttaaggcgctgatggatgatggatggaagttagtttatgacaattactttaaatattagaaagctaaaaggtcgatttaattaagtttctttaagaagtactccctggttctatattaattgatattttggacaaagttaaggtcaaacttttataactttgaccatcaataactttaaaaatatttagtttaaaggaactagaacaacatatatagatttgtcttttaaagcactataataaaagtaaacatgcatttatttattatatatattataatagaaaaataaggtcaaagatatatcttgtagaccgtgttattatccaaaacgtcaattaaaatgaaaccggaggaagtactaaggaagaaattagttttttcttttataaaattcgtacacttcgtaaggctgaaaagcatgccctgaaatcgctcttgcagacacaacacaatgtttttcatcttctctcgacaggtaaagaatgcgatggtaatgtggacagttggaagcatttcaagtttgcaactgcactgaaaggagtaatactcaaagaaatgcatagcaatattcacaagtacacatgcaaattaaaaatgatgatgatagtatgatacatcagtgttaataagaatttagtaagaaaaagttagtatgtatagccttttttttattttgcatgttagctttaatcgtgctacaactagcaatcatcttttttacctccttactcaattaattaattattctatccgttctaaaatttaagaaattttgcttataatttgggaccgatgtgcaagtaattaatgatcacagtagtcctttcgcagttggttaaaaataaaacttgcaataacccctttcaagaatcccccaaccgtcaacagaattatttgttaactaatcaccgacaacacatttgggtggtcaccataggttcaaattggtctttctcttcggaataaaattcattaaaattaccactttgcagtacatatcgcgctccattcatatatattggtgcaatcttcttttccaaacttgaagccgttggtaaggaaaatattttttttgcaggaaattaaaagtacttatttttaaaaacctaagccagccgaactggttttgtatctagagaggtaagcactgtacaggagtcaccaaaggtgacaggagaagaacagggggaggtcagtagaaaggaaaaaaggaaaaattacatcttaggaagtagctaaggaaaacaagaaagtactttttttttgcacgaaagagaaaagttaattaattttgatatgatgtttcgcactatatgtgatcagtgtacgtgacatattcatgtgattcttttagtacttccacagttaatgttctaactttacaaaaaatattattctgactgcaggaagaagtcaacctgccacttaaaaaaccagtcgatctcgagctgattagccgtaataaacttttatatgtgtgtttctactttctagggacttataagccaatattgaaaaatagattatgatgaaaaaacatcataatcaactccaaaattaagatttaaaactttgggtactagtgataagctgaagagtaaacaatgatctatttgatcatagatttgtagttccagccaatgtctacctcatttagccctttatgctctactccctccatttcaaaatataagcatttttagcatagtgtcaattcaaacatttttaactttgactattaatagcaaaaaaataaaaaatataaatcatgtaaaattgatgttactagatttatcattaaacaaactattataatatgcaactgtttttagttgaaacatcttatttttatatagatattgttaatcaaagtagaatctcgaagactgtgacgaagtccaaaaatactggtattttgagacggatggattatttatttcctcttacatggggctccgccatcaccttccctctgtataggagtagtattttttttccgtagttttttttaaccttagcactttagcggtctttctgtttcctttctcttttttccttgttcccaagaaatggccatttggctggttgtgttgtgtaacaaaaactatgatttcttctaatacatcgaaattcaatctttttacacgttcgcagaaaaacaatttcctcttacatattagaaactatcacaggcacgcttcctaaacttataaacggtgtgaatatctaagaataatattaaaacaactttaattttcaactttgtactagaaaattcattcatttgtacccttaaaacattattacaaaatcagataacgtatcatttactatataatcagacaaaaagaatagttgcagagaccatcgtggctccatatcatcatataattaaagtcataagtacaaaatacggactttaaacaataaagtactccaatttcgtcatgcccaaaataaatcatggcaaaataatacggtttaccgtttatgtgacaagttgacggatgtaggaagccggtttatttttttgctgaatggctcaatagctaaatgatttttggactcgaaagtacaaacaaataaattaattattataaagttgaaaagtaaatttaaaacatattttaagacattcacatatactatagagttttatgaaaatcacagagagctgcaggtgaatgcaatccttccattctttagaaaagaagatacctttaccttataacggttccttgaaagcacatcaagtagtattaaagtaaatttattcgttgaaaggcacagaataaaattgaatccggcatgcatgtcggaatctttagtttgggttcgttttctaataaaaactagtaaatggaaaataaattgaatttcataataaggcactgcctactcctacctagctaacatttgataaaatattcttaaaaatctattaaacctaattatggcataattatgttgtaattataatataacaagcatatgccattacaatagatttcctcgattttctcttaatttttctagcgaatgttttttttttgcggggaatttttctagcgaatgttatgtaacaaattaatccgattgtaaattaatatatgcagtctgcagaatgaccaccatcaccgtcagtgttaatctctggcaacaaactgctcttggtcaaggatgcagacgccgggacagtagccgtacagctgcccagctctcgatcaacttggttttccatcaaaattaaaagtttggttaaaattaaaacgatgtgatggaaaaattaaaagttgatgtatgtagaaaagttttaatgtgataaaaaaagttaaaagtttgaaaaattattttagaactaaacacggtctatattaaggtcataatgatctgatcaaaatctcataactagccggctacctagaatgtgttagctcttgactctttagaagcaggcaggacatgtgttgaagtcgttctctttgtcagtctcttccatagcttaatttaattcgcacactgatcagaccaagacaatcaatcaagacgtcagcttgattagcaagtgcattgttgtgcacatgaatgccccagttgattccaacacgagatgacaagagtgcgtgtcgatctggccttgacaaaagctctcgtcaccctcactgcattatttctattctcctctgccggccgtagacgttttaattattacaaagttaaaataatagatttatttgatattttaaatcaactttcatttaattttttttcttataagatatattatttagcagtttaaaaaatatggtaacagaaatcgaggtaaaatatatattaatgaggaaagaacaccatccacgctgtgcataggtcatggccggatagtagttataaaatatattttaatgctacgaatttttataatgatccatccagatttactagtttgctacttcatccgtttcatattataagtcattttgatttttttctatagttaaattattttaaaagtttgatcaaatttatataaaaatataacaacatttcgaacacagaagaaacatattgtcaaaatatattgaacgatagatttaataaaattaatttgttgctgtagattttgctaaatttatctataaatttggtcaaacataaaaaaaattgactagaaaaaaaaatcaaaacgagtaataatataaaatggagagagagtatattttaaaatgagtgaatagctagctaggatgcattgcgtgcagcactacggtacgtactgtgtacaccgtagagaggcagctgtactgagtacactgtggccgagctagctagtcgccattcacgggcatgtacctagcttaggctttggactgcacagcgatatcacgcgtgcattgtcaccgtggccacagggcaccggcggctagctatcgagtacgatcaatcaatggatatatcgaacggccagccgcgtgtgttcattgaatgaagtgggccggccggcgaccgagacgaagatggtgcatgcagtgatgagatctatctctcacgacttcgtacaagtgaagtcaatcgccctacgcccctaccataggtggaggtagaaaggaatgaagagtgtgttgcttgagttttgatcgatgcagagtgcttaagtttacattgagggcttggttagttcgcaaaaagaaaatttttgggtgtcacatcggatgtttgaccggatgtcggaaggttttttcggacacaaatgaaaaaaaaataatttcataacttgcctggaaaccgcgagacgaattttttgagcct

SEQ ID NO: 30311 - DNA, 1085 bp, Oryza sativa
attgatcaattttgcatgtgtgtgttgttttgtactaggttcgcacaaactagacaagttattgtaccaaaacgagcaatttacaagttgttatacctatttgcacctaccaagcaaattcatgtaccgcgagcgcaatttactctaatttttatcatgtcgatcaccaaccacatgatccatccgagattagaatagatgcagactgcagagaaccaacaaaatgttcagcgtgtgcactcctcgatcaccaaccccactgctctctgaattgacacatgacaccacagtaccacacatgcaaatgcaagcgccttctgttgcgttgcagctgcctcagctgcctctgcctccgggcaccgaagcaattaacctgcaaacaaaaacatggtttaggtgaggccaacacatccatcttgctggatctgtctctgctcctgcttggttttcttttcacagggagtccatcaggattcaggaacacaacatcctctcctgttgcgagaccggtgaacacatcctgcattcctgctgttgcgtgctcgtgcaacagattagatgctgtcggcgacagccgaagttccatgggcttactttgatttgctagttgctactctactgaactccaatgaagtaaagttttttttttatgaggcagtaaattaaacactcaatcaaaaatactactccccccgtttcacaatgtaaatcattctatcattttctatattcatattgatgttaatgaatctagtcatatatatatctatctagatttattaacatcaatatgaatgtgaaaaatactataatgacttacattgtgaaatgcaggaagtacagagccaaaattttaggacacacatctattgtttcgacttaggccgtatttagtttcaaagtttttcatcaaactttcaacttttccatcacatcaaaactttcctacacacacaaacttccaactttttcatcacatcgttctaatttcaaccaaacttctaattttggcgtgaactaaacaaagccttacataatgcaattttagcatcaaatcaaacctgtccattttatagtgcttgatg

SEQ ID NO: 30312 - DNA, 647 bp, Oryza sativa
aactcgggtcttttccttgattcgattcgtttcgtccattttcgttgcttaatcgtggcgaataagcagtggtcacatgcggcacagctagcttaacaaaggtgcttagacaccgggttttaggcaggatttcacactgatttttttggcttttctgctggtgctgttgctagctgctcctccaagcgcgttgtaactgaagaagcccatggtttttcttatggttctgaaattccccttcacaaaattcgtcaaatggttctttaaaatgacgaagcaaacaaaaataatttaagggtaaaaaaaatgtgtgtgttatattagcagtttaaaaacaaatgctagaaaatatactacgatgaaaaaaaataccctaaaatcaacttcaaaattgagttttacaaaattaaaattttggatgtgcagggtaagctaataagcaagcgttgatagacgtatctagtacaaatgatagttatagtgtactatgaacagtttctgaaaagtttaatttactctgtcataaaagtacataatctattttctctacagagaacttcagaatagtatgactatgaacagtttctgaaaagtttactccgatacagagagtgaaaagtcaattttctctacataggattttagag

SEQ ID NO: 30313 - DNA, 743 bp, Oryza sativa
gctacgcaccgacagtttcagtaactaggatgttgtttatatcagaaaaaatgcaggggccccatatttagatcagggaaaaaagattattggatttttctggagaagctagctcaaaagtcaaaataaactgatggctcttataaaaagtggaacaaaagaaaatacataatagatggttggagatgagtttgcatgatgcacgactgcatcaccgactaaatagaaaactagtaatatatatactagcacataagcattacattggagggagaaccactctttttctataataatcagctacaaattgtgctgcaactactctcaaccttttagtttctgttagctagcacaaaacatttaaaaatatctagtacattattcttctttatgttatatctttataagtcaatcataggttattttactacatggtataggcatttctacgtttaacagtataaattaaatgttctgaacttaggtgagcctaactatagtgatcgtgtttataagaaaaactgtgcgtgaaatggcatgtagcctagtggttgcagtgacatgagtagcacccaaggtcctgagttcaaatcttcataggagtgaatttcagattgagttatttgagggctaagtttcctattcgataggttaagttcatgattaaaatggctgcatatatccggttagatatagagcccggctaaaaaaatatccttctcgaaaaactgtgccagctttca

SEQ ID NO: 30314 - DNA, 2910 bp, Oryza sativa
acacttctacagttctactcgatcacttctgtaggttaaaaatatacttgttctgttttgttagattaattttttgacagttactctgttacaaaagtagtacaatacttttgaatatgagtataataaatttaatcattttataaaagttatatcctaatagagcaattttgttagtcaaagagacaattagactgacatgctcccttgttagtgattacagtactacttgcttgattcatttcgttccttccagcggcccgatcgatctagctagaacaatcgatcgggcaatcaatctcgttcgtcagctagctaagctagccatgttgccatcagggtgtacggcgtcttcgtcgtccttgttccagtacgatcgaccagcgcaaaaatgaaaaagaaatcataaagggaatgttgattgatcgagtaattgggcgatttaagtccggactacatacgcaaccaaatcacacgctaatgaaaacgtacgattccttcttaattttgttcgcccattggaacgattttgctgcctggtaggactttactatcatattatcatacaaaatatatagggtccactcccgataccctcttattttaggtaggccccctttaatttaaagaaaaatctagaaattttagaggttttttttcctatatagccatttgaatcaaataaatgaacactatatgatcatagaaaataactcatttcatataagttttggaggaaatttaacatgaggtacaaacccatagaaatattcttttgagtctattatctctcctcaaattatcttgtttttttatggtccaataaaaatattattactatgttttttctttattttacaattctctattttatatttacatttttgtaaaattcccgtgttttccttaccccccctccattttcccaattgaaagggtcccttattctctcttaatttcttgtcctgttcttttatctctctatctttctttttcccaaatgctgtatagtctccttgtttcattacaagtaataaatatcttatacttcattaaccttacatgtaactcagacaagacaagtagctctagttgatcatgtatatgaattatattccgtataaaatcctccatcatcaggtaccataacgtcgacgcatcatttttctcaaaaagaaatgtgaaatgcaggacatcaaaaagcagtaggccccaatgtttctctgtagcagtcagtctagtgtcccccatctgaaaggaactgatctaataaaaaaggtgcatatatatacatgtgtgtgtttgtgggttaggcagctttacccatttggaacctttctttctatcccaagaacaattaatctagcatttatatttttcgttccatttttctctatttttcatcatcagggtatctcatattctgatattcaggtatacgtgggtgtactgtagctgtagccgacaacagaatagaagagagcacaaaggatacttacaagcggcctgatagctacagcgttgcattgcgccatatcggccgtgaacttagctgataatgatatagatctcagatgatactctttcagaaaaaaagcaaacattcagctgtccatccttgggttcagagttcagaccagcagggctgcatgcatgcattttgccacttgctgaatgcgtgagaatatcatctagctacaccaaatgtactactcctagctccttaatgcatccttaattaactgtatactccaaatgaatgtcttatcatctatctgattgagaaatcagaatttcagatcaccaagagcttaattactgtatgtccttcctgaccttatctgagcgatcgagctgactgacgaccaaccggcagcttatacagaaacagtgagagcctgaaaactgtagtaatacagttctagtagctaaaaggacttgacttttcttaattaaccagtatatgtatatgttttcggatgtatacaaattctcctcatgcctgccagatcgatcgatgcacagtttgaagatagataggggatgtataggacaagagagaacacatgcattgaagtgacaaaattaaaaggagggacgcagcaatcatcagatgatactacaagcaaaggaacactccacatgtaaaaaggctgcatgccacatcaccccctctgcctgctcttggctcttgctgcatccgcatgcctccaaaatcaaccggtttattaataacattcaccaagcatgaacagaaatttactaatggatcgaaccagtgcttgatttttatgaaaatggatttaaatccggccactacatttgaaccggaatgtacgtggccaaaggatttgtgctcagggttttaaatttcgaaacttggttttctgccagaggtgagcgaaagaaccgaaattcagatttttttcgtacgaaattatttgaaattttgactgattttgaatgaatttgaataaagtttgactgaattcacaaaaaattgcaaaaaaccgaaagtttcgggcgagatgtgagcatttcggtgggggcgaaatttcgaaccgaaatttcaaaccctgtttgtgcttcacgttctttacaatcaagttaataatattgtaataagtaacagctaaagtagaggatgggattttcattgcattatcaaaaaaatgtatatatatattcgacgaatatttccaccggtttcacctcacaacataagctatagctatctatcttcatcagcagcagaggcagaggtgagctgagcacaacacatctccccttgagtagttgagtactgcacttgagtgatttaaagcttaactagtatactgactgcactaagcttaaacctcactcgactactaccacaaaagtgaaatattcttggctagtctagtctac

SEQ ID NO: 30315 - DNA, 2542 bp, Oryza sativa
ggcgctgttgtgggtacctctccccctttcttggcgagttctcattgggtgaaaaccacatctttcttagatgggcgatagcggcgtccttgatgtcgtgacctccatgggggcatcgtttttggagtcttgcctttgtggtgttgttgtaggccgggcggcgatcagccatgcttaggggggtcattttggtgctcagttccattttcagtggattgtgcttgtgtggttagcgtgtggttcttggaggtgccttgtgcacgtccgtacttgacaacttctgtcgtgtttttcttagtaactttactcctctttaatatactcggatggcctccttcggcctttcccggtgaaaaaaagataagtcaggtgagatcttgttcatcctttttatcaattcattacccctgaggccctaaattaccaatcagtgttgtccatttgtcattgtaatttggtttcttgaaacctttgaagtctgaactcccttttgcatttgcagaagttccttgctggtatccgcatgactttggacttatttcaaactgtgggaactgaaaacaaatatagactccaggcctctcggaagtgatgatgagagctgctctcctacacaccatgaaaattatccacctcaatgtctcaatctcattgttcgtgctgtatgaatctagtaatgagctggcttttcagcatattctgtggtccaattctagtcacatttgagaaaatcaccaggcacgctcattggtgctattgcgcactaccatttgttgtgggatacagacaattcgtatgcggttggttgtattgcaattgctcgcctattcatttttttttaacaatataaatagatctcctgttctgcttattttgaattgctatgggttgtattgtcgctggtagtggcttgtgtctgacgatagcctgattttctggtaaggccactcgagcaatcttctttcccgatcagatcaggcagtggacggctcagatcgatctgtaccgtatgaactatgcataattggcgaatacttcacattctttcttgatcagatcaggcggtggacgtctcagatcgatctgtagcatatgaactagtatgcgtaattggcgaatacatttcgttggcggaggaggtcaagtcgtggcgaacgaccactctctgcaacaaactctattttccggtttcatgaaaatggagcagtgggcttcccctgctatttctggattatttttttaataatggaatagataacatcccggtctttactcaacagagttacagccaattgttacaatctaatactcgaacaaagaggaaaaaaatatttttgaaacagaattatagatgaaatcaagatcaacaccaggctccaaagacaactctctaaacgatcaaatagagtccaagagagcataaacatatccattcaaggcaaatctaaaatgcagtcatgcacaataaccaaaatacataacggggcatgcttttcaacagctagctctaattaatttatgcccgggcatgattttcaacagctcaaattaatttatactccctccattctaaattgatctacatatttcataggtacactaagaccaagaaaaattaataattctctcatgttatatttactctagcaacaaactcaatgcatgcaccatccccaatatttcctagccaatagcaaatcaagatattgcatatgggttataaatacttgtgtgtatggatgcatgcatcaatgtccatttactccaatacacaaataacgaatagactctactaaatgaacacaaatatgtagatcatttaggaataaacttaaaaactatatgtaaatcaatttggaatggagggagtaataatttatgctcgggcatgattctcaacagctctaattattttatgcccatttagtttcactccaaaggggcatgcatggctattccaagtccataggattatcgctgtcttcagtttcgtctttagttcccaaaccaaatccaatatccagttgcaatggctcatgcaagtccataggattatcgctcctgctgattgtttcacccagccgcttgtgaggatattgcgcatgaaatttcaaaggtctcttcaggtttccctttacacctgcacccagtaaaacagcaaaacaaagggcccatgagttagtgcatatagcctacacacaaatgtaggtacatttgtatgagagtgacaaaaagaaaacctacaagagcataaaccaatttagttcaagaatgtttaaaaaatgcaagagcacctaaagtggtcttctctctccccactttgatgggggcagaaatcttgtttctgttttcatttctgacaatttcttttaataaaggctcactttgtttaattatgtgcatgttcttgatatagcgtgcactgacaagaaaattttgatatgaaggcaatctagaatccaaaatgcagttgcatttggctgggtttgtgttccacatagcttgcatttcatgtactctggagtacatcttatctggaact

SEQ ID NO: 30316 - DNA, 1956 bp, Oryza sativa
  unsure (1)..(1956): unsure at all n locations
ctagaggatcccccacttaactaagtctgaaaatagctagcataccacttagtctactttgcaccttcactaaaattagaccataattcctttagtaaaactctttgatcagcatgttaaacataatgcactctaccactatatgaaattacttaatctaattcaaaatataaccacatgaaatgacatatataagttaaacagtacatagagatgcaattttttttatttttatttcatttttttgatatttttttcacacttaggagaacataggaaccaaccgtataaaaaataaactcaaacggataaaatatgtgacttgtagaattttccaaaactctaccgaaacggacaaaatatgttatctattaaaataggcgtaactttctcatacgcactcagaatcaggcaaataatatatgcacggacatctacagaaaatgttacatccgattcttcccagctttgctgggttcggcgatattaaaacctccaaattccgcttgcaagattgtgttttcgaggagagaagtttttcggtagaactttggaaaattccacatgccacatatttcgtccgtttgagtttattttttacatggttgattcctgtgagttcctaagtgtgaaaaaaatatcaaaaaaataaaataaaaataaaaaagttgcacatctctcctttgcactagttcggagagagaggagaggagaggaaaaattctacaggtcacatattacgtccatttgagttcaatttttctatggttggtttttgtgtgtccctaagcgtgaaaaaaatatcaaacaaataaaacaaaaataaaaaatttcggggggggggggcgccagccactctggcgcactccctagccacctcagcatcgccccgccacatcggcaaggggacggcgccagagaggctggcgccatcctgttggacgacggcgccagccactctggcgtcccaaaaaggaccatttttgggataagtttttctaggggtctatttgcgaaataagtttttcaaaaggaccaaaatgtgaaaaatccacagtgtagtaccaagatggttttcagttttcacctgaggggtgatccatgtgacagacgtacagtagttgtagtacctttgcaggtgttctgaaccagtattctccattatagtgccataattgacaatcggtacatgataatcggtaatgccgtgcagagtgttttttttttctgaaccagtattctctatgtcctaccatgtgtactcctaatttgtccaatacaactatactgcatttttactgctacatatctgcaatctgttagcaatccaaagtcccagagcttcagagagaggggggagttggaaggaaacctgatgcaggatagcagtagcaccaatggtcagaataagagcagacaagctttatatcatcctaacccaaggaccactattgatctaaccgtaaagacaaaacaatgacaaaatgacaagagaaaaattagagctttgtggtagagaccatgtgcttgagttccccagatgagcaggtttcaacactggctgggttcttgcgtcgtttgtgtagtactccctccatttcacaatgtaaatcattctagcatttcctatatttatattgatgttaatgaatctaggcatatatatttatctagattcattgacatcaatatgaatgtgagaaatgctagagtggcttatattgtgaaacaaaggaagtactataatagtggaaaatgctagaatgacttacattgtacagcggaggaagcactataattctggttgctttgtccgatgcgagtgtcaatcaaagcgcgcgggggggggggggggggaggtncataataaggagggagaggganttgattagcggcgccgtgagacacgggtgagacaggacnncataagggtcatcgaggagggagaagaacggg

SEQ ID NO: 30317 - DNA, 1689 bp, Oryza sativa
agggtagtaaagaaggaaattaggtatatggggtagtagggagaggaaaagtaagttaggattggggaaatgaattggaagggagaagagtgatgtgattttataaataagagggatggaaaaaagggtgataaaaagtcaatggtgtcaaacattttgaaacggaggaagtatcatgctattgtactcgctctgagaatgccgtgctagcccaatcgcttcgcctgcactcgattataagctataacacttattaaaagaaataaaactataattaaaaaaccatcaaatcagttttaaaatttaaattttaactacatcttatagatttagcttaagagtaaatgaacaatatctctttagaaattaaccatgtgttgttgataaatccaaacgccggggtcatgaagccgccatgctcgccaatcgccagctgctggtgttgatccgatcgatcgatcgatcgatccatgtcacaccataacagcgaccacgcatttcttcgacacaagacatacaattactactagctatactagagtagccaatcactataaaatgcttcagttgctttctaccaataatattataatctacgagcatatcctctctttgtcccctaaaatataattctagagatgaaactggacaagcatcgaggagtacatctctagctagtacagtagctgattagccatgttacgactcaagtcgaataatcaaggagcaatctttgtcatgtgtcttcaaaaaaaaaaagaatccttgtcatgtctgcaatcatgcataaatggccgtggatttaagaagaggatgattatccattgaagagaagtcatgggtgtccattatctacgatgtcctgaactgataacaatcataagttccaataacatactccaacattggagtatttggtgattcaggttctgtatctttctggctgagctgagttcaacacttcaacttgaagcaatcatgtactccaacattggtagtacataaataatggcaacgaaggcagatcaatgtgggacaaaagaaggtgaaaggataaattctgaatctatcaacgccgtgtttagttccaaaataatttttcaaacttccaacttttctatcacatcaaaactttcctacacacaaacttccaactttttcgtcacatcgttccaatttcaaccaaacttctaattttgatgtaaactaaacacagcccaagtgtagtacctggatttttcacattttggtccttttgaaaaacttatttcgcaaatagacccctgaaaaaacttatcccagaaatgatccttttttggacgccagagtggctggcgccgtcatccaacaggacggcgccagagaggatggcgccgtcctcctgccaccgtggcgcacgcgaaccgacgtggcaggaggagggcgccagccatgctggcgccgccgcctccattcctgtttctctatatagagttgcaacggtgtcatttttattttattttttcggatgttttttcacacttaggatcacgatacaaccaaccacaaaaaaaatttaaactcgaactaccacttaactaagtctgaaaatagctagcataccacttagtctactttgcaccttcactaaaattagaccataattcctttagtaaaactctttgatcagcatgttaaacataatgcact

SEQ ID NO: 30318 - DNA, 762 bp, Oryza sativa
ggtgcggtagtcgagcatcaccgaccacccgttgccgtcgtcggcgcgccgcacggtggcctcccggtagaaccgcttccccaccaccgaccccgtcatgaacgacatcggcatcgccaccgacgtctcgtcccgcgtcgttaccgccgccgccgccgccggcttcttcaggtagatatcatctccccctcccccgcccgcttattccctccctcccggagaggaggacgcttccgccgccgtccccagcagccgccacctcccccccgccgccgccgcggatcgctgcaggaggaggcggcggcctgcgagtgtcgccgccatgactggtctcgctccgctgtttgggcctaagctgctgttctagtagaggcaaataagtctgtttcgtctccctcatctcttgctcctgtaaatcgtctccctcaactgcaaaaccggatatagcgccgctcccggaaggctttttttgtcttcggaaagtagtgaaaatcaactccttcgatcgttttggaagtggtttctactgacatgacagtttgaccacggtttaacttgctaagtcagtagatgggatccacgtgtcagcgactttcatgtcacctcatcttcttcatcatctctctctctttcgggctcattcggtttaaaggatttttataggattattgtaggaattcaaacattaggatttttttcctatatgcctcattccttccattcctataaaatcctatcaaatacctaaggattatagcctta

SEQ ID NO: 30319 - DNA, 3663 bp, Oryza sativa
agcagtttgcaacgcagcgctagctttgaatcgcgcagctgagtgcgtaacgctgaggaaagaaatgaaagcgaaggggattgtggtgggtgatggcatttgtctccaagcaagcccgcaggctcccactgcgcggggcaaggcaagcaggcagcggcaggcaaggcactcggcaagcaagccccttcccttccccgggctttgctctgccagccggtttgtgcagaaaagttagcgcgcacacatgaagaaagcactgtctttaccctgcatgcaactgacaaaatgtggcagaagcattactactgtcccatcgtaccagagaaaaaaaaatgattagcccgttcacaatgcacttgtttgagatatgagaaaaaattgaaatgagagtaccggacatcaaacgagataagccattaacataatattaatcattttaaattttaaaataaattcatataatttttaaagtaaattttaatagattttttccgttcatgaagcgtgtgcgtttcttcccctccggcttctctcgaacacttcaaatggcattcaatcccaacctgttggctataagatttctctccacatctgcacctcgtgtgcccctaggaagcccctcgcactaccgcataagagcaagtttaggccatatttagttcgcaccaaactttccacaaactctcaacttttcatcacattacatcacatctaaaactttcctactcacataaactctcaactttccccaaacttctccccaatttcagaaactaaacacggcctaaggcttacatactacactattaataactggtctcacatgtcatacacacacttcgttttggagttcgtgctacagctggctacaaatctatagcccgctgcttctctctctcctcatttatcttattaaaatatgtttgcagctaggttataacctgctattgtacctgctctaaatacgacttccccaaccgcccctcaagccatgtgacgtgttccctcctcccatacacgagtgtatggccgggtttagttcccaactttttcttcaaattttcaactttttcatcacatcaaaactttcatacacacataaatttccaacttttttctttaaacttctaaatttagcgtggaactaaacacaccctttatctctctccgccgagtcgtttcgttcctcacgcatagcccatccatccctcgcaggtgatgacttagggcacccacaatgtggatgaaaagtgggtagtaagaccccttactacctactttaccattgtgaatatggatagtagagcagataataactataccaggcaatagcactactacctggtaacaagcataaaaaaatattaaactctcttctctcactcactctctctcttttctatcccatcattgctttacatgtaggtcatatcttactacccacatattgtatattgtgtgaggtagaaacaactatgagtatgtttagatttatttggaatgacaaatggaaaaagtgttggtggcaaaagttttgacgttgcaaaaatactagttggtgtttagatgcatactaaacttttgctattctagcacttttcggtggagagagagagagataaatagtggtcccaaagcacgttttggcacaatttgctactatggactagcaaatggcaaatgataaattgtcaacttttactagtagtgttagatccaaaatggcaaaaagtgctctaaaatggtaaaattttggaggatctaaaccgggcctataacctagttttgtgagtcccatcttactacccacttgataaatatttattgattatgcccttgggggagggtggaaagaagtacggctaccaggaacataccagtagggaggaggacacatcaacaatgttgcagcctcaccaggagagggtattagggctttttccttgttcttataaataggtcgtttttgtcaaattcgatctcaccaaaggcctatttgtaagaaagaataattgcattttaacattataaaaagaccctcgacgtacatatttttgacgccgatcccttttgtgttagcaacttaccaccatgtatcagcatcgagagatgatctatttttatttttttatatacgcattttcaaaataaaattttaaaacaactaaattataaaatagtcatgcaggatatttcggttggttccgttgccacaattcatccatcttactagtttatactcctcacttatatatatatatatatatatgtatatatgtatatatatatatatgtatatatgtatatatgtatatatatatatatgtatatatgtatatatatatatatgtatatatgtatatatatatatatatatatgtatatatgtatatatatatatgtatatatgtatatatatatatatatgtatatatatatatatatatatatatgggaaaatagttctatactcctagggagtacgtactccctctcccatccaccgttcatttgatcgatcagatatgtactccctccctcatcataacgggtttggctcggtggatccgattagtttttctaattaaaagaccggactgcttattccgtaatttggggtttgctcccaacaggccaaacagattatcccgaaaattggggttttggggggcggcgcggcgacggaactgcgcgacgacggaccagcgattcagctttcggggttttgggggtcagcgcggcgacggaccagcgattcagcggcgactgtgtggctggcggcggtacagagatagcagtttgttccttcctccagtgatgactcctccccttcctccagcgatggatcctctctcaacaacatgtgttcctgaagcagaagtaatcgatctagagtcggctgaatgcaggagcggggcaacaatggcaaaatcgatgggccatagcagtggatttcatccaaagcagcaggttagtattcgtttatttttgtacggcaagatcaagacacgttgcctaaaattttcttctttgccgcagggtcacaggaaaattagtttgtcaccacagtccaaggtatgccacctgaaattgaatacatgtatgcctgtagagagggattaggtgtagttcggttcatgtactctctcagtttcagatgctaatttttccccttttagtgcatatgatggttttttgggtggatgaagttaatgctgttttagcccccacccccataaagaaaaatgtagatggtagtacgtactgaattttcaacggtatatactcattttttctttggaggggaactttttggaatctgctagacggtattaagtattgatttttggtgtggcagggttcttactgaactctctgttaggcaatagtatatactgaatttttatgtggggagctttattctctactttattggacgatagcatatactgcattttccacatctatactgaatctttccacagtgattcatagactgaactttgatacgcaccagtatttactgaatttttcatagatatactgaatttttctatgggaggctttgtactgagctttgttatacgacagcatatagtatgtactgaattttgtatgtggtacatactgaacttttctagaagatagcatatactgcatttt

SEQ ID NO: 30320 - DNA, 3243 bp, Oryza sativa
aattttgagcattgtcaaatcgtgctacagatattggccttcatagactgttggcgctagatgtctgtgactttgatcaaacagagctcttgtttccaatgttactgatggcaaaattttattttattttattttttccttggcaggaactttgcaaaccattttcaagtttcagaagcttctgaagatatcattgtgtgggaatagtaatgttgcacagatcgacacctgttcactcttatcatctgaattaagatttggtactactctaatcccatgataaatacttatatgcaatactcaacctaaggttcttccagctgagagcgttatactgaaaattatgatcagactaaccctgaaaaaattaatgaaattttacctgttgtggtgtttctgggagctggttccatttgctcgtacgcttgtggcctccggtggcagcgcggttcaggtgttcagctacgcgtggctatgttgagttagtacggtgcgatatcaaccagtgcctttgatctgtcgcattttgatcagtgatgctcatttagtgagttcttacctgtgctagattgctagaatgctaaatggtacagtttctgtcttgatagctgcagcacctaaacctgttctacatcatcggtaatgcattttgtatattgataactcaaaattttaaggccacatacttatcggaccaaagcaatgttggaattaatagatgggctaaggcccattcgaagattaattctttgaaaaatcacaaaagcccacctcatgggatggcatgcatgtggagtttagtaccaccttgcttattctaggagagggggaccttcttaaaagggaggatgccctcctagccacttgaagcatgtgtggtggagagaagagggggaacacacgcgcacgctcacctggccaagcaggcggcgcgcgtgcacgttgttacgcgtcgaatggtccgcaaaattagctcctcactcttgcgcagatgtagcctccttttgcagttttgttttgctgcgggaaatttggatttgtttttgttttagaaacattccgaaaaatccggtgcgtgaaaacagcgtggagtccggataagttacgcgcgacttatccggttcggttacacggagtagagatcgtgcgggcgccctgatcaagcgacctatctctatataaaccgagccgtcgccttcacgcaacatacgcgaaatcaatctagggtttgcctcctactctgtgctacgccgtcgctcgtagactactccatcccgctcgccggcgtgcaccagcgatcgggagagcaggtctccggaacctctaccttcgacgtcttgcaccgggagaaggcggcaataaagtttttgggaagcgcttcgtgcgactgctccctgttcgttcgctacggctcgccttcctctccgctcgcgtgctgcgcgccttcgtcgactcccgcaaccgcgagtagttcctgctgagcaaccagtctttccaccacctcggtacgtgttcgatatgttgcgcatatttgatctgttcatgttttactgcttagtttacatgtgtagatctaatgatgcgttcatgctagtttacatctgcaatatcatgatttatttatggaataaattaaatcattatgtgcttataatttcaacaagcaaatgtacatgatacagagagaccatttctgaatttaacaaatttagaaaccaatgtagccatggtccagaagaagtcaaagaaccaatctgactgtatggaggtgtagatgggatcgtgtttgctgcaccaatttctggggaggcatgcgaaggaatgaaagggtgcaaaatggaaaatagcaagaggtggttaaacaccatcatcatgttgccgtaagtatgtaattaggatgctaagcataatttagcaaccgacaactgcatgttttcttagggatttctactactctcgagggatctgtctaagcatttaatggctgaggggtttggctaccatacaggtagcctagcaattaaattgggttagtggagtgtatttggatttttcattgtgctctgatttaatctgcactaatagcttcaatttttcacttttgaacttttcaagcaaattgtttgttttcatgcttctatgtaattggaccccgattaattaaccattgaatttatgccgaaagtacatggcaaagattgtgaaaaagaaatggagtagtactatttgtagatttaaacatatataatttataaacaatttatatgtagcctctgtaagttggttttcttttgaattcaggtaaggtttatctctccagtctagacatcagttttgctacactacagtgtattattcctaatggtatatattacaattgtctatcagaattacgatggtggcatattcaataagatcgttgcttgaggagagaactgggagaatccaaaggttcctaacgaataagttagcttgttttttatttactaagataggcatatggttgcctggtagtgatgatggttttgatgggtaggttttctctaagatggaagacattaatgctccataagcacgatgcaatagtattgtatctaatttagttcttaacgatgatgtcgatgctaaggctccagaacataatttatttatttagatttttttctttcttttacgtttttgtgcttaatacttgtgatcttgtttgaacataatgtcagaaaacttttgaaacatatattgttacttttggttgtttgctttacattataaataatgtcgtagcgttagcacggacatattactagtaaaataagtttaactaagtggaagaaacataaagcactctattactattcttctaatatacactcaaatcttagtttacatctgctaatatacaatcatgtggccaataccccctaacagtgtcctcctggtacttcgagagaccaccctgggttggcgagatacttacgacaacctgtcatggccgtccaaccggggctacatatagaggagtaccctcccttcgaatttgtcttaggaatatatactaacgtggagaaatacccatactgagctatcaccatcagcggcccacctctaatgtcctgcaacatatatgcccaattaatgatatttaataatctaagcaccatgctaacattactaaatactactctatagcgtgcacccgacatagagcaactgataaattagacattaaactcgcaccattac

SEQ ID NO: 30321 - DNA, 1964 bp, Oryza sativa
ttatttactttgctactattttcaaccttaccaagttttggcattgccaaattttagtaaggttgccaaaattttggcaaggttaccaaattttggcaagatttcatatgtaaaaactaaatttggcaacaaattaaatataaccacttttttggtaactttgcaaaaaaaaaagtaaggttgaaaatggtagtaaagtgaacaagcccgaaaagctcaagccaacatgatattcaaactaagccttactcttagaggtcttaagccaaagagaagtgaaaaaaaactaaaaaatgctaattctaatattatgttctaaaatcgacatgtaatccctccatttcacgatgtaagccatcctaacagttccaacatttatatggttattaatgaatctagacgtatagaataacttacgttgtgaaacggaggaagtagttcatagctaaaaagaggtcgtttctcaaataaaaaatgcctagaatcgctaatgcgtgcgcgcgtcctcccacctttttttctttttttaccaattttttcgttttttttcacactttttttctgattattttttttaatcttttaacatgttttgagtttgaaagttttaaaattttgagttgaaaattttcaaatctgaacttgaaagtttttgaatcttcttgaaagttttcaaatctcaatttgaaaatttttcaatttttttcaaatcttgatttgaaagttttcgaatctcgatttgaaagtattcgaatcttgagttgaaagttttcaaatctcaaattgaaagttttcaaaatttttaaatctggacttgaaagtttgtccagattgagatttgaaaacttttaactcagatttgaaaactttcaactcgagatttgaaaactttcaagtacagatttgaaattttttaagttaagatttgaaaagatatgaaaactttcgactcagatttaaaaaactttcaactcgagatttgaaaacttgatttgaaagttttcgaatcttgagttgaaagttttcaaatattgagttgaaagttttcaaaattttcaaatctcaaattgaaagtttgtccagattgagatttgaaaactttcaactcagatttgaaaaccttcaagtacagatttgaaattttttaagttaagatttgaaaagatatgaaaactttcgactcagatttaaaaaactttcaactcgagatttgaaaactttcgactccgattcgaaaattttcgactcgagattcaaaaactttcaactcagattcgaaaattttcaactcgagatttgaatactttcaaatcagaattaaaaattttcaatttaagattttaaaacttttagctcaaaacatttttgaaaaaaaataagtgtgctaaagattaaaaaaaagtaatcgaaaaaaaatcgcaaaagaaaaagaaacaacaactcgtgagaaaaggaaaaaatggctgatgggttgatgggccgaaagcagttagcaagttggcgcgcgtgccaactagcaaccccagaaatgccacgataaaacacgcttgtaggcaggacaattggaaatttccagtttcacgatttcgaagtaggctcgtcgagacgtcgacggcgtggccgtaggccaacacacggggtgtccatgagaccatgatccgctgcctacgtacggacgccggccccacccagatgaactgccctcccctccaccgggccccaccttctccccccgtcggcccggccggcccgtcgcacgcagcaaaatatctccgcccaggcgcctcgccagtttgtttcttgtgtactgtagtaattaacaacccgttccaccaccaccaccaaagacccggtgcacacacggaagcacgaagcgaagcgtggggtccatggtgtgtgtcagtcacactgtgcagggcacgtgggggcagccgctcaagtgagctgtccttttatctcatgtg

SEQ ID NO: 30322 - DNA, 3278 bp, Oryza sativa
cggcctaataagagcccaacttaattcttagtcgctaatccacctcttcggagcgagatactctgaagaattcttcgtcaaagattcaaacaactactacctttctgagtaatgatcaaagtttaaaaaattgatcatttcttgttcgagacgttaaatatttatgatcggagaaagtagctgatagttgtgcgcccgtccatatacattgtactacatgattttgaattaaaatcgtgtcctttccacatctatgtcaagatatgactgtagctagatgtacaggtccaaagtttacggccaatggtgtcggcatgcacgactcttttaaagcattataattaagtgactaatgacgaggctgctttttcagaaagctgctctgatctgcaagacgtatgacagcagcctggactatgtgattcaagcaaccagaaaactcgtgcatcagcgggctgtcgacgagccgagctcaagcgagcttgctcgatacaagctcaaaccggcctataaaatgttcgatgcttttaaataggcttggttcgagcttgatttttaagtaaaataatttatatttcaaggataatctttaaaaaactaataaatatatgataccaatacaagacatacaaaataacatatttgatctcataatttattaaataacaacaaaaaaaatcatatattactaggctcgttagaaactcgagctcggcttgacaaagctcgtgagggggaggctcgggctcggctcgtatggagctcgaatcaagcctaaaacgagtcgagctcgaacagctcgcgagtctcaagcttttttgacagcccacatcagccgtatcatatttataaatgcatcctttataacaaagtaatagtatgataattttatcaaaattgaggtaatgtataaaagtcatgaaaaaacatgcgttccgaaggagcccatgatgttagtagtactggatttttatattttggtcctttataaaacttaacaacaccagtgctgacaccctcacccctgtggcgtccaaaatgtagaggggtcggcaccaaagagactagcaccggtgacctattttttaaatattttttttgaaaattatcccaagaaaaatatttacatcataaccctttttgagtttttttacaaataggtactcggtctactctagcgttgagaataagggttcatttctagaataagttttttcataagtatatttataaaatgagatctaaaaagtcctaaaatatagaaaatcaaggttagtacgaagtacatagcttagtttccctttctcggtagacttatgtttcaattatactctctctgtcccaatataaatacaattaagatcggataagacatttcatagtagtataaattagtgtacttatattgggacggagggattataaaagacgtgcatactgatgcacatcatattgaggcaagcgatagcttcttaaactcattaaaatcctcctaaaaatgcacttgagtgtacataatatttatgagcatcatcataatttgaaaaacttatagatagagccataccatcacatcaccggtgcttcctcaccagaaataatatataatatagaactttaaaggcaagagctagagaagatgaagtgcatcacacaatctacatgcaaaggctgtatccctgaagaacgaaacctgcttagatacctgtttttttatgcatcatgattaagatatactagatgcctatgtcatgtggctaaatctgcattttgtcgaaaaaaagggaaaaacttgtgtgatattgggaacagcgaattttaggtatatagacaatagacttttgcatctatcaagcgttctagtaatccagttctttactacttcctagaaaagcaactacctcatctgcaattttggataaggtcataggctttttgatgatctactcctatgcttgcttctgccaccaataagctttttcctattttattttcttggaaggcaaaaagaagttaggttgacccactaggctcatgctatacgtaaatgaagtgcatttctcaaaccaaagattgacaatttgccctacaccttcatatgagtttcgaacgtatgagttttacaaaacttccatagaaattagatcaattatcataaatatcctctcaaaccaaagattgacaattttcctacacttctacccttgtgactcctttggaactatgaattttacagaacttggaatttctcaggctgtcaaatactagtattttcagtactgaaccacggccaatcttgtgtgatatttgtcttgtggcattatctgatggacaggtacactacagagaaacgtgtactgttttaatacaagcagtactatcaagtcttcagaattaggcaggtcagcaatatggcatgcatccatgagggcaggcaatagactgatagagggtgccccccttgtttctcctccaattcaatgaactttgggacaggagtacaggaccatgatccagaagatgaattattcaatggcaaaattaaaaggctactctgcatttcatctcctaccaccctcacctcaccacctcaccctcctgcctttgatgcttatctgaatctccttttgcagcctgaatataaaacactcctacctttgcaaagttgttaggttaacttgttaagtcactttatcaggattgtgcgtgttccttaactgtctgtcacttttgactcatcttcagacactcattttaatgccaactttcagtgaccacaaaaactgtctatcctaaataatggagcccacttatagaattatggataaacaattgttgtggatcatttgatttgataaggtatcatcaccactttctagtagtagtttagaccacagtttttttgcatgtgtctttgttcatttctacagaataccatatgccatgccaaaagtatcatgaaatgacacataaagggagaaaagaaatatcaccttagaaccccaaataatcagatatatgatgaccaaatcttctccacaagttatccatggatggagatggacccctttgtcctgctccagcaagacgagctggcagtagcaagtgagaatattagtatcaggtagcatgtggtgaccatcctttgctctacacaacacacacaaattgttgccggcaaaagaggtttcttaaattttctataaaggtggccgttcctgtgacgatcaaatcattttttgtgtgtcatttctgctttttttttctttacctcaaaa

SEQ ID NO: 30323 - DNA, 3133 bp, Oryza sativa
ttttagtcccggttggtaacaacaaccgggactaaagatcttcctcttattaaccgggactaaaaatcatttttagtcccggtttttaatggaaccgggactattgtggatatgggtcgaccgaccaaagatggtttctctaccagtgtagattctctcctaacaatctttattcgaaacgccgagacaatagccaacatcaactttgcatcatggaatacatgacacagccgagatttgtctccctgtagcatccaatcctaatgctatggaatacatttcatcatggaatacattattaaagctcactctcacatgtaccgatgaaaatggaggttctataagtacgtactacctttaataagattactgtgaccttggctcctccaccagtttggttgaataataaaagcatcaacagatagccaatcaatggtaaataaaataatagaatttcttcgaccaccttatagcgcttgttcaaaaccgaaggcaacctaacagatgatctattgctcttcattccgtttatttacagcttgtaagcttgtacacttcctgacggttttttagcatgcctatatggcaacctgcaaacataagacgaaaaagaactgttagtggcacaaaattagatatacttttgattcataaagtttgcaactttgtgttttttacgaagcgtacttttatacatgtaagctttgggatagtggctcaagagcaagaaatgtgcaaatctagaacatgcaaactggattccccaatatgtgctcggcaaatttggaaataacgtaggctaagcagtattcagttcagatagattgttaaattgcgaatccatgcaattaatatttagactaaagaattccgatgtgtatagactaatctgatgtgcatggacaactgcaatacatgatgacgatgcatattttaagaccattccaacattaacttcataaacattacgtttgacaattttcaaactgtacttttagtcaaaagcatgtcatagctcatatttgataaacaaaatggtaaatcacttgtaagcaacaaatcaaatcatgctcgaaccatctacatattatgcttaaaaactcaaagttactttgtataatgcaataaattatcgatgtgctgcaataatttatcaaacacatggtcaattaagaatctttcattgatgaattttaacatctggtgggcagccatttataggaatcatacagtataagaatcaaattccttttgcatggaggctgtaggcatatctataacctattatatactgccaaaagatattggtggcataattttgtaacacacaatacctgatagttccagcaacaaacaaaatgactgtttggtataaacatgcttgctcaataaccatctaataggatagcctatttgatctacatctgaaataggagatggaaaaaggataaaggattactatcctgatgcataagcagaaaaatcaaaagctttataatatgcagactgacatatctatccattcaattcaagcttctattatatatagaaacaacaatttgactaatatgatttgccaaaatcagcaatcaaagataacaatgtagacatgcagacaaaacgataggacttttccctcttatgcctctgtcctgctatgcttcgagtaattctgttcacaacctaccaagcaacatacttgaatagttgctatataggttactttgaataaatgcacatttgtatggaaacaaaatggcagcttttgatcaggtggcaaatgaaaatccataagaaagagctctcattacctcctgatattgccgtgtactatgagagtcagcaacatcggtagcatatgtttacacataaatgacaaaggaaaagaaataagtgccacatgatagtaactgacagctatgcaactaatgtaaaacttgctgatggatcaacagaggtttgctggtggaccctacggtgcgtattaggaagcagtgtaccattagacatagacatcacctaagcaggacaatgatagcaagaaaaagaagttatagaaaaatcaaatttgatcagcctggatttttttttcgttttttccattctacctagataatgcaggcgtagggctggaaaacatggtttttcaacagtgaaatcaggatctatgtgggcaatggggaaagcaagccttacaaatcctaaaaagcagagtagcagagggttacgtaacctgtatgtatattcaaaggttaaaaaatattcagaaatataattgttgttgacaaacacaggatagcattaacggtacctattcttgattaaattcttaaagttacccaaagttgttgtattcatgaatttgggatttgtagtatgtaacgtatgagtttcttcattgctactttggggttaccggcatgcaacatactattatgccctgaaaatttcaggttttcagttagccctatagttgtcatgctcaacatagttttatccagttaagactgagttattaccattggctgaattcgtcaagaaatatatggatagctatacttattgggctttctcatagcatgtgcagtaaaccagaatatgaaaaaccttcttcaaagacaaaatccctgtgatgctgaactatttataacagcaacatgatgagcaaaaacagtgattgacaaatcgacacatacatttcttaagggttgaacacaaatgaggtgttacatttcctaattgctgacatatatacttgatcctaacatgtttgacaattcttaagggttgaacacaaattcagttactacaacagaaattcagaactcatgtgaatcctcctgaacttggatgcattttgatttttgaaatgtattatcaaattcataatagcattagcatggggagagaactcatgtgagtactcctgaacttgaggtaaaaggaaatgcaggagtcatatattacaaattaatgtcctctcttgaggtgctaaactgtcagatatttttccagaacacagcaatatataaatttgaattcctcagattacctcatagcagcctagcatgtagccttagatttaataaatctccaattgcttcagctggaaccacaagttgaaactacaatg

SEQ ID NO: 30324 - DNA, 4290 bp, Oryza sativa
ttgatatatatatacttaccaatcattcttattatttttaatttgttaaacttattcaagataatgtattgaaaacactaaataatttagagtcaaaacttccaggttggagctcactactactactactacacaacaacacatatgagatatttctcatctgcccaagcttccacgtgtgaaacaaatgaagaaacggtacatatgggaccacatatatgtcgcttccccaaaatgatacagcctaaccaaattacgtgacggcgggaaaaaaaaactgaaaataacagaaaaaaagaaaaacaatagtagattgataatttattcggggatcctaattgacctattacatggaacgtattgtttacacccaaatttagcacctatggacgaaataggggaaaattgccaaagtttggaaagtgacgggtttccttactcgggaaggcaggtttcgtgttttctttggtttctatcctgagttggatgtggagaagggcctgtagaggacaagaccaacccctatttaagggacaaggccggttcattgtaaaaccccccaatacaatctacttgaatcgttcttttactatgttttctattttaccctagtttagtccatctttgtcggtttgcgccgtaaaccgtccgccgccgctgcgagagtgcgacacctctttgtaggtttgtcctgaaaaccttccgttttgcccacgagacgggtagttatcctcatatcgatctaaatcggcctagaaactgattttgatatctaaatcggctccgctagccggtttagcttttctttttgcaaaacccatcttgatttggccctttggctagatcgaggtggttggcgactccatatcaccgcaaggtgtttaggtgttgcgatcgtgcttgtcgacttatcaaaaaaattatcaacacgtatatgagcacttctaaacaccgaacgtactatgtaaaaattacatggaaactccacgcaacacggctaaccgactacgactcaaattaaccgaaaagattattactcagattaatttcctttgttccaactcgcgcgctatgagactggattaatctcctttactgtgaacacacgggtgacacaacacacccgcccgcatcgcactttacctcggtcctcctcccgtagatagctcaacagcaatctttctctgcacataattcagctctgtccctctctgcaatcccgtgcagctaaaaacccagcacaacacggccatcagccttccaccactgctgtgtatatataatatacgaacagcaatgctactccatcttcacagctaccttcatgcatctatactggattgaaaattataacttctctcacccatgtgcttgcaaaccatcttcacgcaccagtgacgaatctagaatgaaaagagaggtggtgctcttaggtatactgcttaacacaagataatttttgctatagtctaatgctcacaaattatcaaattagtaccaaaccagagaaaatggaaaaatgatttgtgttcttgataaaaataaaataaattagtcgtcctaaaatctgaaattttgatttcctagattaccatggcctacggcctaggataggaaggcaccgaagtggcaccaaagtggcagctcttgttctgcaaactgctgctccagcttatggcctagtgctctgctaatattctgctactatgctctgtccggttggagctggggctttagccccaacaagccccaaccataaattcgctcttgtcacgcacccaaaatttgcacacatcatctcccgaatacattaactcctgcacatagaaattaaggttattttcttcagcaaattattaggcaattatactggttattctacataaattggcctgtctaaaatgaccgaaccataagccaaaattatgctactaacagatacgtgcaccttcagaaaactggctgagctttcttgtggtgatagggcaatggccatacttttgacctaaatcacccagcctttccatgctgttgtctgaacacgagccatcttgggacctactcaacgttccagcatgcatgaacagttgccagtagcaatcagataattaccattttcaggttcagatatcagaagacatacagagctttcaaatcttgctgtcttaacaaggatccagccatccaggtgttaggtcatgtccagaatgcctgaattcataccgaaatactacccccatcccaaaatataagagatcttgacaatgcaaatacatagctaaaatttatattttggatcggaggtatagtaccgaatagttcagttatggcatgaatcgagaaaaatcctggttcccaaaacagagcccttgagacacagtaaccgttctaaccaaaagtccaaaacagaggcaacagagcagctccatgagattggagacagtcacagtctgacagtgccagttgagcaaaaacaagatgcaaaccttgaagcaaaagaactctccaattctgaaacaattacaagatccatgtaataatagtaaaaccaaatcgttccttttccatatgtataaagttttctgttaaagcttgtcatcctaattataactttccctatataaaatcatctaagcttgttgcggcgttacatggtaaaaaagttgtccgggaatccaaactctgctacttgtatacacctccacgagaacctacttctcattcaacttcacatgttatggaggcttggaaaatacataccctgccagaagatgacaatccaaagctcctgttatgcgattatgctggaaatagttatgaatacaatgaagacaacaactcttaaaagcatgatagtgatgacaacggtgcaatctggaaagccactttagataaaccatgaaaatcgccaatccacgatgtagtaaaaaatttactaacatcaataatgacagctcataaacatgcatgttgaaggaggatagcaccagatggtccttttagaaaatacataggtggcacaacttgtaatacaagcagtctatggaaagcactcgatcaaaaaccagtcccataatgctcaaaaaccgatagcccgatattcccattattttcaactaggaagttagccagcgcatatgcgcgggcacctatttaatgtgtttgtaataatacaaatgtttgagtgactttttactgaaatattttttactcaattctaaatctgttcttttttgccaacaattcattttggattgctttgaatgctggttttgattcccttctaattacccttaaagcaaataaagtctaaactaaacttacttgaaaatcgaaatttataaaagaatattgtgtcataagaatggagttggttaccatgaaattatatatcatttgtattatgtgtatttactttttaaaatatttagcacatcttatttttggattttctaaactttaattaaggtaaaattttattgtatgctatatatgtctttacagattttagggcatattaattgaagatattttctattaaaaatatggctaagagactgtttcatctaactatagatatacctctatttacttctactttctccgtctcataattccgacgattcaagtcatatcccaaaatataaaggttgtaaagtactaactgtcccatcgaaccacccctcatttattttgttcctaatcttacctcaaccatctttattttttatccaattttatctcaaccgccatcccactctctatgtatcctttatttaatgagagttgtcataattttttttcctccccttaattcctcctaaaatagcatgatcccttacattataggataaagatgatagaaagtatcaagagctgaagagcaccatttatagatggatttatttggtttgtttgtacctatgtagattaatttggccttgcatgtttataataatgtggatacgtgaactattgatttagttgtagcgacataatattttacttgtaagaacatacttaatatggatatttgaactatccaaaatcaagggtttaaatatggttatttaaagctcgatcaaatatttagcaagtatgctcatgaatttagggtggtcaatgtgcacacaaattgtgctgcccgcgcatatggacatgtgaaaaaacagggtcaggtgctctacgcaaataattagttaacactccctaccatccaacaatgcaaatttgtttaaaatatgggtcattaattcaaataaaaaaatttaagagttgtatgctttaaaa

SEQ ID NO: 30325 - DNA, 3143 bp, Oryza sativa
ggccctccgcgacccgctgccctcgcgccggcttggcagtagcgaggagaaggagacgagaagaagaggagaggaatagagataagaatgagaagaggagataaggttgaagagatgagttaaaaatgagaggaggagataaggttgaggaggagagaggagttaaaggagaggaggaggtacctcgatccgatcgtgcacacctctccgatctccgcgtcgatctttactcccggttggttttaccaaccgggactataaatagatctttagtcccggttagtgttaccaaccgggagtaaaacatatggcgatcttttttcccggttgatgttatcaaccgggactataaatagatctttagtctcggttggtaacaacaaccggtcctaaagattgaaaagtatcctgtagcttttaaaccgggactaaagatatttttagtcccggtttttaatacaatcgggggctattgtaaaatctggttgaccgactaaagatggtttctccaccagtgtaattagcgcatcttttgatgaatatacacattttgtttctcaatgacacagtgtcacaacgagtagcagccggtgccctgtgacgccgatctatgtacatgaaggtcatgctggatccgatatcgctaattagcgatcgatcacctggggtgattgttcttttttcatcactttattttttttcaccatatagtttttcttttcggataagtttacatatctaaagtttatttataggtcaaaagtttatatatatatacctgatttaaatttaaatttagattttgatgtttttatatagaatatttatataaaaaagtttatacatacatatgaagtttactgtatatatttataagtgtaaagtctaaagacatggatatatttttaagggacatggatatatttttaagggtattattttgttttttaaatttatttttttatttatggtgcagtaggaagggaaaaagaggaagaaacgtacgtgttagggggagagacgggggtgcccgatcgctgtgggcgatcaccagcccattagcccttccccggctggatcgatcgatcgacgaaaatattgactgacgcacgtgcgaaattaagaagcacgacccaatgcaaatgtcgtcgtcatccatcgtcgtgcatgtcacgtagccatctagccgacatgcatagtactaatatactttgattaattagcaaatggattaatttctctttcactaatccatgggcaacagtatacagtacgatgatcgaagatcaaactaccacgaattaatgtagtgtcttttgttcgcaaaaaattaaatacacgcgcacgatcacgtacgtcatcacgtacgtgtgctagctagctgtgacttgatggatcgatcgggattgggccggggagttggtcaagattcgccatccatgcaggcatgcgcgtcgatccatcgtgccgtcgtcggcgtgcgtacgtgcatggtggccgccgctcgtttccattccgcgtcgcatgcatgcgacctactcctccgtcaaaaaaaaaaaataatcatatccataaatctacatacacacgtgtcatattcatagtaagtagttagaatttatctttttccatagcagagtagtagttagcactgtgctactctctctcttcctccccctctctctctccagctcaacatatatcatgcatatttccgccgtgtcactgtcctggccggccggggccctcaccgccggcggctcagctccctgcgcgtactactgcccttgatctccagggctgtcccaagctaagatctgggaccctgtgctaaatataaattaaataagacctcatacgtagtgttgataagtactgtttactgggacaaatctatagtataaaggccagagtgtcagacaacaccgatgactttcgataaaacttatagcgaaattgtttgtccatatactataacaccatgatctaagtataattagcacactatgacactaatagacacgttataacactaacgcatcaatttttttggatccgccaacttagtaatggtgatcttatatgtgtagagctatgccaaataagattaccacctaattaagtagtggcaagctggctagttaagtagaaaaagaatcgccgcatcaattcagtttttctaactagtgtaaaagtgaaatccttattacctgaaacgcatgtttacattatcgtcatgaagtaaagttccttaatgtacctatcattatcatctaacacttgctagagccaagaagaataaatctccttctagcctaattcaatgaaaccaaaagagaaaaagaataggttgaaaagatcctaaacattatcgctcatctcgcacgtgcccatggacggtcctgttgatctcctagggattcaccaatcaaccactatacctatgtttttttcctcctcaccccctctctcccctcccaacttcaattacactcgctgccatccctcactctccgtctccagctagctctcccacttggcaatcgctgtctctccccttccctcttcagcggtggcggcgacaatgagctcagttatccctctctagcactttctctccactcttcaaagatggcggcaacaagcttcccaaatccattcttccctagtggtggcgaaggcatggatctaggcaagccagcaacaaggaggcggagtgtcaggggctcggagttggagatgagatctaagcgagtgaggtgtcaaccttagtggtagcgaggatggtgcgatgaactgcatagatcgaggtggcgggtagtgtagattgagcattgtggttgtcgttgctctaggcatccttcagcatagatcggagctgccctctgacaacgagctcgccggagtaggccgctttgtcctccaccattgcttagattgacaccatcgtttctccttctttctcctctgtcgtgccaccttcttccaggagggaccacacgcgagggtaagtggaggcagggacgtggccgcgtgacctcccaacatggatgcgtgcaagctatttcctcacttgtagatggacatcagtgatttcgccaagaaacaagtgtcctcatgagggggtagtccaatcggccgga

SEQ ID NO: 30326 - DNA, 626 bp, Oryza sativa
ttcctgcctgcctgtgacctttgtctgcctctgaacaaattttatattactccatgaccatacaaccttcctagtagctcactcactgaagaacagctactactactagtactgtagtatttgtttttctttaaatttctccaagacaaccaatgcgttcgatctgtcaccctgtctacagtgctagctaagattatgggctttatttttttttaagttgcaacaaatctgttccctaagattcgataccatgatgatccacatagagatgataaaaagtcaacaccgtgcagaggctacagcggctttgataaatctgaccctgaccatgaaaagagagacaccgaaagatgctccctcacatgccctgccaatgattcacacaccataccaacagtaagtatatagtactcttactatcccattgcaaactgtaattaagtatcaaatcaaaataatcataaccatgcattagctagggtaattaagcttttattttctgacagagatatgtcatatcgtatgtgtatctgtggtggtagctagctgagaaagatctcgagccttgagtagtcaaactgatcatagatactcctactgtctaaactaaacaccaagctcggtta

SEQ ID NO: 30327 - DNA, 2073 bp, Oryza sativa
cgcccctggctgcaataccagatcaaatttaagatactacacctctctttatatacaagtgggctgagcaagaagagaaagggatatgcgtctatcatttcatagaaactagctgatgagaggaacgggctaaagagaggacaaaatgatgaataacaacatacattttgcatgtacaacttcaccacaagttttacagaccacacaatctaaactttatggtaactcttgccatacacattttgtaactaggattgggatgtattaggaaatacaactatggctatagcactgaaaccttacgccatttttctatggaaggtagtgtatgtgttggagacttgacgtaaggtttcagtgctagtagccggacaaccaaggaaggcgataacatccctggttaatatggttgtatgggaaatatagagagatcaaaatatcggagtgtttcggaggagaagtacatgcttaggtgaagtgtcgttgtgagagacaggcatagagcagctagggcttgagtcttaggcttacctctaaaatcatgtttaattaaattctctaaattcaccatgcatgtaaattttggacattaaaaaaaatattagttgagcctagtttaaccttagtcttaagaaatttttagcttcgtcactggtgagagacctacaagagctagagcagctaacgttgaagaaactagaaagtgaactatattttggtcctccggcataacattgtcaaaataaataattttgtgattatcatcatatcttttagaacttaatgatcgttggatcgagcttgacattatccgcagcaacacacacacaaaaaaagggtctctggcatgatccgcgagcggataatccgacccactaaagcatgatggggttgactaattaattgtgctttcttttgcaaggtataattgtgtatttgtgtagctaggcaattcagatgttttcggccacaagtttctctaacagcttacctacggtagacatgagactatttcaactttttggcaaacggattatttcacatcagctacttgatgattcgttactatgaactttctacaagtgcagtccctttaattacatcaaccgcacgtctattataatatgtacttttcacatgaacacaatgccgttaaattcaacatacaactctctctttcatctttatcttttcctattataaaagtttaagatgtttttgccacaaatttcgtacgtcgtccctgattgtgtctgtatccgtatgagtttatcgcatactttggccaatgcacaaaagaatcacagatccgattcaatttgacacggagaaaaaaagtcaaagtaatcctaagtccgcaccaaatcggttccgatcaggattttacataaattgggctaaatttaaaccggttcgtgttacactaggacaacttgcatatatacaacatataaaaatacaaaaattggttctaggaaaaatacccaatttgcacaaaccctaaattccaaattttcctcgaattagatcccaaatccaaataaagcaaaactccagccaccagaatcattctcaccggtttctatcttcggccgcacgtcgcatgatttcaaaaccctaaaacgaaaaatacccaaatttagaactcaaatttctgggtaaatccctaagcaaatcagattgatggcttaccaatttggcaaatcaccgccatcatgtgatgcgagcacagaattagcaccaccatgcacgcaccctagccgtcaccctgaaccggccttgcgcctgcttctcatgggccacgcaaggtcgaggctcgctgtcgtggccttggctgcgtgcggaagagaaccaggaggcggccgtgcacggcatcagacttggcttggaagcagatcatcaccgtcgaatccactccacgccgctgccgaggccactccgcccccgtcaactacttgagctgagctgcagcccagatgcataaccggatgccgccaagagaggaagatggggcgcaacaggtagggaaggagctcaaagattgttgtgtgtgtggggggggaggggggggga

SEQ ID NO: 30328 - DNA, 682 bp, Oryza sativa
cgatacaatcgcagagacactgcataaatgcatatcaattctaggcaacaatcaagtcagatggggaacacaaactcataaatgagccgataaggaatggcaagcgcggtgattgaccatgtaatgtaaatctaggaaaaaaaccttgtggattgcttgcagaagagaccatatagcacagttacaagctctagagaaaatgacacatgctagcagaattaacttatcgaactgctatcgcggcttagctttaaagtaaagcagcctctttactttgtagataagggatcggatagatgcattattggtaatgtaataaaaacgaaatatgcaggtttcaggaaaagggataattaggaaaccccgacatatgcagagttcaaacctttgaacaatctctaatcttaggagatcatcggatcacttccaattacaaactgctctggcctgaagtttagtttcttactgcaacccgtaattcaaaaatgctaagcaagttagtgtatgaaacagtttggcagtgagcttcttgaagccaaaaagatgcaacaaccaaacggttggggaaaagaaagtccacattattcagcaaaacctcatacacattacagtgaacaccgcagttacaactacagcgaatcagggccgcagggcgcggcgcgactctacatgagatcagaaa

SEQ ID NO: 30329 - DNA, 1383 bp, Oryza sativa
caaggtaggctcaaatttgcccgagagctttagccaattcagtggcacgacatcaagattgaagagatacaacaccttaatactccctccgtttcacaatgtaagtcattctagcatttcccacattcatattgatgttaataaatctagacatatatatccatctagattcattaacatccatataaatataggaaatgttagaatgacttacattgtgaaacggaggaagtatcttcttatggaaggtcataattttacgaaacatttaatgatggccccaaaaagattatacattaaatgtccttcttcgacatttcatttcaaaaggagtactaatgattttggagggagaaaggacaaaggtcagataatgttggacattatgatagatttaatctaatagtctctatcatgtaaaagtatgtatatatataaatatatctataaattgaaatattctatagaaattttatcaaggagtataaaagcatgggagcacattcatgttattttagaatccatactattcacatagattaattttgatcataattataagccttataggttagagcatagggtttggacatatgaaaataatatagccaagtttctgtaaacatagtccaaacatatatgctcatatacatacacgcgtactcacccatatgaatgcacatgtgcacacttatttctaatagcacatttaagagattagatcattggaccagtatatgtcgagattatcataacctacaacgaaaaaaaaatgaagagttggctggcatatgttgagaacctcgcgagttaatagttaatcgacatatcatgagttaacctcacgctttcttagattggaccaacacgtacatattgagggtaacaaagtcttgttaaagaataattatctgtaaatttaagcacccgtactcttggaatcacttaaaccccgatgtgcaatttcaactataaggaaaccaactagcttagtccgcaacatggtcaggtgtttgttataaaagctttcgtaacattatatatttattgattgatgtaataacttttaatttatgtgaaagaattaggtggtgaaagttgcatttcattaattttgaaaggtctaacattgttttggaccgaagagagtacaacaaacctattccatctgttctaactataagcatctctacaatttacttaccacagttcaagtatttcaaaacaattgaatatacagaaattcattcattttcagttaatcaggcgtttgaaaggggaatgttagtaatttaaaattcaaaattaggctaccaaggtgacaaagagaatggagtaaattgcacccacggtacaagaacttggtgtagatgcgtgcgattt

SEQ ID NO: 30330 - DNA, 786 bp, Oryza sativa
aaaagtaaggcctgtttgatttctagacacagctgcccttttggccagaataaaatctaagagatgctcaccaaggcacagacacatacaaaggattcagcatactgtctaaattatctaaatgtgttgcagatgcatacaaggccaagctttggacatatgaagtaacctttcaaatcataaatcaagttcataaaaattgcaatggtggataagaggaattagtgtctaaaaagtttgtgacatagcagtaagactcagttagaagatgaataaataaataaataaataacaagcaatttaaagtttctggtgatgtactaatgtggatatgaaaatcatcagaaaaaaagtttcaggtaatgtggatagaaaatcattggtacaattccaaatagaataatccatgtaacaaattgcacaagcaacagtaatagcatgtacatgatgcattacaaagaatgaatcacctttttcgacgttatgaagaaggtcctctttgcaaggtacatacagaaatggaaggacctagatacagaaaagaaaaacaactagttggaacaactaaggatgaatggaatagtctgaataactttctggggaaaagcaagatgagaaaatcaagttcaaaaggtaaatatctggtattcattcaacaacacaaattcgaaatatgatagagctaatcatcgtgtgtatatccaaactcaaaagaaaaaatgattgcacacagtattaaatattgcatataatacaagcaaacatcaaatatatggagtagagaag

SEQ ID NO: 30331 - DNA, 754 bp, Oryza sativa
attattccttatcccaggaggcaaggtacaccaaaaattgatacatttcagagtttatcaagcggaagcgtaaatagttaatttattacatgggctgcgaaggcccagcacacacaaagacaaacgagaaacagcggaagactagggcgacgaccacaggcgcttgacggcaggcacgagctaaacaccaaagccttcatcatccaggggctcctcttctgggtttggaaaaaattgggcaagactgagtacaaccaccgtactcaacaagacacacccataagtgcagaataaatgcaagggagtacaagggggtttataatataaagggttagggtttgcagtaaacagcattaaaagacacttagttgctcaaagctattttgtaaatacgatcctagagctatacaagattattaatcaaggccgtgaacccacacgaacctgctttaacccaaggcctacgatgattcagaccgaactggcaacccgaccctgggtcccagctcgtcccaagccaacccaggccaaccattccacattttagttgttaagcaggttttaagaattaaaacactaacttgggtacattgctcggcttgcccataaccgaggacgcggctattcgaataggttatactctgatcagaggtgtacatctttacccacaagacacatctttctcacgtgtaaccacgtgccacataccaccacggcatacggacgaaagacatgacatagtttccaacccatc

SEQ ID NO: 30332 - DNA, 1773 bp, Oryza sativa
tgcaatgcaatgcaagagtgagagtgagagtgagctaggctttagctaagctaaggtatatgaatgagctcgagctaagcttagcttgtgtgtagtgctcaaatgggagggattcaagggtggtatttaaatgggtcttggacagagaggtcactgtggatgagatggcagagaggggtggcatgcatgcactgcacttgtgttagctagacctatagctgcatcatatcaaggttagtttgtaagtattcatcttgttttccaatgtgaggtttggatttgtgtgccctaatttaaccttaggaccagtagaggggaatgttgtgtgctactaatgtttgtgtgtgagtgtgttgcttcaaaattaagaatggttggaatgttctccccttagttttcatacacttcatttatgatgacaatgcatgctagctctctaccacacatgtatgcaaagttatcatcctataggtataatatgggggtatggcatacaacatatacagtccaacaccaggcagcatctgaaagtgccacattaatcaagctagtgaccaagaagcccctgccaaagcaactctttaaattttgctggtcctacatatattctaattgtggtttaattaagctagttctaataatttctgccttaagcttgcatggagtcatgattcactcctgagttagacagtattacaaactaatcagataatgaaaagatgcctgccactgggttaggaaaaggatcagggaaagaagagaacatatgtaacctagtcatccacctttttaacaattgtaatttgtgtgctccaataaattttaaaaaatgaaatctttgctccaagatactacttctatagctatatattatgatacatgtcaaaatgctactacacacaataatgcccattttttacaggccatatggctttgctttccttcgtatccatgtgcttgcttgcgcaatacatgcatgcatgcaagttaaaaagatcaaacaaaaaaaaaccttaaagctatacttatatttgcctcattgcataagcacttaagaagctttcaaatggagtggttagcttgccctcaaaactagatgaacaacagtgtgaaatgtgtagaagggcactctttctcatggcattccctgtgtaatttttttggtatatttcttttggttccattcatgcaaccttgagtgacactcacatgaggtgagggtccagtgggtctccccttctttgactccttttctctagtgaagctttgctttgttcatttgcatgagctagctagacagattaattaaaataaaatgcttgtaacgatcattatccctcacaattcccattgaattcttgccgataatttaatcacaatggacattctatagattagtgcgcatgtgcgtgccggtgttaggttcaaatgagaacaaatcgaaaggagtgatattaaatcagcaaaacaagagaactatccctttcatgtctctctagagccattttaataaacctaatagatgcctttttggagtcaaaaagaaagagagagagctagagctatagccaaaccggagagagacgaattgaagacgtcgtcgaggtggtaatgcatccaatgtatatagcaacatcaactcgaccgactgttaagtgtgtgccatgtgaggtttaagcaaaacaacaactgaggtggatactacttttcaccggccacctgtctaatttctcctccacattaattaattagctgctgtgtaatagcatcttg

SEQ ID NO: 30333 - DNA, 2943 bp, Oryza sativa
tgggccggggcaacaacgcgattggcacgcggaatctgcaggggattggtacatgaagagatgagagagcccttgtcgcacgacgagacatgcattcgcgtgtgacgtactctcgcagtctcgctcgctcgcctcatccgtggaagccaaccaccgagcagggccgtgcttccggacgaacggaacggaacggaacggaacatgcatcatcatcccggtggtggtccgcggggcggcctgcccgttttcgcccatgacgataaggcaccaccacgtcgctgtctcttccatttatacttactccctccgaataaaaaacaatttttaactgtgtatatagacatagccgcttcatcagctaaaaaaaacctaacttctggctatatatttggatactattataacttatgtcttatgtccagatacatagtcagaagttggcttctttttttttttttacagagagagcactttacttaagggtgattggttggttatttcacattgccaagccacatcatagtcatgccacatttttcttaggtattcgtttgttttgatgttataatgatatgccatagtttcttagccttgggacccacatgtcattctcttaaatttgaaacagagtgggtgtgttcggaatagcatgtttccggcatgcacagcaaacacggaaaacgaagcggtccattagcgcgtgattaattaagtattagctaatattattttcaaaaatagatcaatatgattttttaagcaactttcgtatatattttttttgcaaaaaaacgcactgtttagcagtttaaaaagcgtgcgtgcgaaatacaatggagaggggctgggaacatagggttctaaacacagcctgtcactcttgtagccaactttttcttagtcatacgtgtgtcataaattgtctatggtaaggatagaatcaaccaaacacccccttagcttgctagctaagctttttttttttaggaaaaaaaatcgctggcttaggtcgtccgagacgatgaccgtactgacccactccatctgtttttgacttttgactgcctaattaggctattggagacgtgttccgtctgacagctccatcgattgttaaaattaaattgtaaaattttattttgaggttgattttagtttttcaattgtagattaccttttaatatttgtcttaatcactaaggatacaattgtagtttaccttttaatatttgtcttaatcactaaggatacatatataaatgttaaacatcaaatatttttaggtgctaataagcactgctcagtaaaaaaaatcaaaccctagatttcaatctagatataaggtttaaattttttttggaacgaaggggatacacggataagaccatgagtagttggctgaacagctgctgatggtggcggtggtgctctatcagtgtttatctgctcaagggagggagttgccaattgcagctctatatatagagagagagtggcgatcatggatcacttgtttggatgtgaacgattcaggaattgtcatttgtggatgtgaacgactctgggaaagcctttttgattgtgacgcatgaattcgttgagtgtagtggaaattaggccgtgtccgtgtgtggttcatgcctgatgttgattgatgtttttctctcaaacttttggaatttgctctttttatcttgcacggatgaagtatttgagaaacttttagaagcacaggacatgggaatctggtagttcgttgccaccttaaatgattcaggagcttgtcttttgagcgtggtcgaacatggtatatcaaacaagtgcgccacaagagtacatatatgcaaattaaaatttatacgttctaaaatactttttacttcaagtaacatgcaataacgttgccacaaccacaaggttatttttatgaacatctagatcaaaagccaatctttttacaaataataaaatcatgtaacatctaaacattatgatggagatatctgacagagcctttatgtttgcaagttagacaatcttattgtaaatcagttacgagtactatatactaaattttttctatttttatttagacaaaagacttaacttgcataatcgatatcgatgttgctgtaaactgtaagcaacagttgtgcattagtccacatatttttagccgaaagcctttgtttatgtaatcaattctagtgttactagtagaaactataaagagccgtttatattttaaagtactgtaccagtacttatatattactttcttcgtttgatactataaagttgctttggttttttttattaccaaatttctttaggtttgccaaatttatagaaaaaatagtaacatcaataaaattaaattagtttcattaaatataacattaaatatatatttaataatatgtttgttttgtaaagaaaactgttgttatatctttctacaaacttgatcgaatttaaacaaatttaactagtaaaaggacgacttataatatgaaacgcagagagtagtataatattcatcgtagataattacataaacctttaagcacaacatagataatcgcctcataagaaattattcttttacaaatttatcacaacaaaatataattgtccaaacacaattaagattgtagcttgaattggccgtgacacataaccacctccaaaaccaaacacgctcttctttccgaaggagaagagaagagaaagggagaagaagggaacattccaatcaattattcggctgcgaaaaggcaagccgcaaggcagctcaacgcccgtaggcagggagaaagggaaagaaaaccagcaaccgaacgaacgaacgacgccaccgcccaccacctccaccaccaaagccccccccccccccccccccccccaaaaaaaaaagggtaccgagctcgaattcgccctata

SEQ ID NO: 30334 - DNA, 907 bp, Oryza sativa
gcttatctctgatatcgatatccggcagcttgtcttggcgtgtgttggctcgatctgttgtatgtcgtgtcttgattttttttgttcctccccccctcctcctagggggtctatttatagtcataggtgtccccttatctaagtagaactagagagactaatatggatacaatccgagtagtccttatagtttccatatagaactctattcgttcttgcttatccgaatctccttctatatacgagatataattccgtataagacttggtacttggtgggccctatcgagcttagtcaactactattatgtatgtggtatacataaccatgacagtaacacccgacttcaatgcaaatgaacgagttcatgttctcaaccgaagacctttgaaaaaccgttgtcgtgctcacttgaccgttcttggtggcatgaggaactagccattggcatggtggatacaggacctcctaagggctcgacatgtcgtgtcgagaacatgaagaacggcgacgcccatggctcagcagccgtcctcgccattctcatcttgttagcgagctcaatgtagataagaggaggaaagaaggcccaattagcatcgccaggcgccatgcctgtaacgccccgattttcgttcgggattaaaaatcaattaataatgcatttctagaaattatattaaaagttaaagcaatttattcgaatgaattgatgggagaattaaaattttcccttaaaaatcattggccgggaatattttggaatattttttgtgctctaaaatactctccggaatttttcgtgaattttcggagctcgagaaataatttaatagcacaaattttatttaatcaattcaaataaaaagaaaacaaataaaattttcccctctttgtctttgggcc

SEQ ID NO: 30335 - DNA, 659 bp, Oryza sativa
gcttccagcagagtagctacgcactatgtgacccaacaatccaccatagaattccaagaacgagaacgaccttctctatcaatatattaaaaaaaaaaagggggcaagggccttctcttaggggggaaaaaaggaacgaggatttaacccaacactgtctttttcttatccagaccgagagtctggttaacctcgatttccacatataaattagatttctacaatacgatgggacctgaattatgaaaaagaaactgagctagttatattccttgaattggttcttgctaattttattgcatgcaatgacaagggttcccggtcatcatatttcctgtatttacagtcaaataaacttattggcggtatgctgtcggggatgtaatacgtttctattgtctaaaagtatctcacattctatgttatctgttactagtagggtatgcaaggatttgcaacataataataataataataataataataataataataataataataataataataataataataataataataataataatattattattattattattattattattattattattattattattattaaagctgcaacataatattattgcgactatcttcaattaaccagccgcaaagcgcgtgggtaaagtggtaaa

SEQ ID NO: 30336 - DNA, 942 bp, Oryza sativa
  unsure (1)..(942): unsure at all n locations
ttttgtcagatttgtatttgtagaactataattctaaatctaaatagttgcttgatcagatttatagtcgtaagatataacacatctcgcactaggtatatttatattgtaacaaaggaagtattgacttgctaattgatgagaatctaaaaatacacttagcttttttttctttacttttttttttagattttacaactcaagtatcttagaggcttccatcgtttgtcctataacttattagccgctgccacctaaaaattaatcttagagttcattttgattttctttttcattgtagttgtagtttatttttcaaagttgactttaaatttattaagaatatatatatatatatatatatatatatatatatatatatattaaatttgtttggtgctccatggtgcccgggcaccattgttgaaattgagtatatacccaattcaaatgagtatgaaactttttcaattacttaggtattaacattaactactttactaactagttcaaagcatgtttgtactgaatttgaacttgtttttgttagattttgattctaggtatatagcatccatacatataattagttaggtatgtaatcatggattgtgaaataaagttaaatttgagttgttttgttgataggtatagatatgaatcgaattattataactaggtatatactcacaatttgaaaattttgaaaaatttgagtgattttgtacattagataccatggtgccctatatatatatatatatatatatatatatatatatatatatatatatatacaccctcgccatatttttttttgggaatgaagtggtaaatagcatttatgtgagaagggtttaggagaaattaaaattttagaccaagcagttgtgtttnnnnnnntngtttttgncgaggtgtgtatgagtataagataagaag

SEQ ID NO: 30337 - DNA, 2853 bp, Oryza sativa
cgccacacgtcaacgggaacgccgccaggaggccaagagccgtcgtcctctctctgcggctggaggcaggagattagggttgggtagggttgtggggattttttgtgctttctaaaaatctcaaacaaagtctatcttagccctcccataggattagaattttagggggtattaagggggctctaatggttcattaggccagtcacaatgggggtttcactggtgtgtcatgcacatttaataggggtaagactgaataaaaaatgattatttgcatgaaatggggatgagagagaaggaaagagtttcatcctggtgaaactcgtcagcgtcgtttccaagtcctcggtaacagagtgaaacccccgttgaggccgattcgtttcattcaccggatctcttgcgtccgcctccgccgtgcgacctccgcattctcccgcgccgcgccggattttgggtacaaatgatcccagcaacttgtatcaattaaatgctttgcttagtcttggaaacgtcaaagtgaaacccctccactgtggggattgtttcataaaagatttcatttgagagaagatggtataatattttgggtagccgtgcaatgacactagccattgtgactggccttagggggtagtggggtctaaagaccccctgccccacccccacgctgtctccgccatagattgtacaatcggctgcttactcctaaaatatcatgtcagtacaatactaaactattgtatagtagtccttatatcatatcatgctctatcctaacagtgggcattgtctgtcttggagtgtgtgtagctagtacttataggatccatatatagtactccctccatcccataatatagcaatctagtaccggatgggacacttgatagtacaatgaatccagacatgcttcctgtccagattcgttgtactataaagtgtcacatccagttctaggttactatattacgagacgaagggagtatatcatgcatgcatgggtattaaatgtggggcctatgtcaggcatagcaccccgtgagaactggtgcagtgtataaattgacgaaagatattatcacggccccatatagattaaaacaagataaagaaaaccagtcatctctcttcaacatactggcaaaagacataatttgtctgacatgtgggctcggtcacattctctttccattagaattggactatgattagtacccagctcttgctcgagattggccaaaaatgataccatgcacggtgtatgggtgtggctctatcttcctccccccccccccctctctctctctcgtagtgcctcctctaagtgcaacactgcatatgctcttagtcgctggtctgtgttgtctctcctcaagtcccatctctagcttacttttaaaaccaatgtggcagattttcagctagcaattatagttggtacttgctcgtaaagtcataagatatccataagagcagatttctagattccatgattattggaatcgtttaccaagagtcgatgttaaactactaaaattcagtgcgcggaacgtacgtttggaattttgtatcctagcacacatgtaaggccaagggtactctgtccaagagatgagagcaaatttttgtaactttgttaagcaacgtccaactttgacgtttcccgagcaatgtgtgcagttactcaagacttggtgaaatttcacctgagaaacaatctgtgtggcttggagtgggatctggtggaagtctatggcgcagcccaggtacaagcagctcgctttggtgagcaagcacactcacattaggacagccagaccataataatgacatgttgatgttgggtcgaatgaaaactggaggaaaattaagtaggctaattgtgttctcaaggaattttcaaattaaaaatagagcaattcatcgaacaaaagattaaggttctgtaagtgcattttggattgcttgaaaggaaaatttccttttgaaggaattctagcataaggtctaaccaatacaatattagtttcgtttgattatttaatattattgttttaaacaataaacatagttatgcataacagtcactaatattaggctcttaaaattgccactaaggcaaatttctgtggtatagcaaaggaagagtagagagaaaagtcgatgttgagcttaacatcgattattgatggctttccgtgcgtattgattgcaaccatggtagccacacaacgaaacactcgagtaaaagtaaaagaaagaaagttctagtctaacaggtcgtgtacatgacaacggctgatgtttgtgtgtactagtccaatgcttcttcctacaagttagttttaaatcaatctagtactccatctgttctatactacgagaaattttagagttgtacatgattattaagaaagtaggtagaagtgagtggtggagaattgtgattggttgggaagagaatgttggtggagaagttgttatatttgagacaaatcctaagggctaaaagttgttatattttgagacgggggactatgagatatggtcatatgacatatcctagtacgacaaatttaatatcacatctcatactaggttggtttattttgaaatggagggagtactaacgcaggaaattctaactttgcttcttcctccataggtgttactgctagccacacattcactattcactattcctatataattgtccccatgagctgtgattctaggctaccacatcatcttatttatttcaaccattacatcaacacaaattttgacaatttgaccctttgtaaaaactaattttacaaatgaaccgcggtcaaaacttatttcagaaat

SEQ ID NO: 30338 - DNA, 3327 bp, Oryza sativa
gttcgtttgtaaaattagtttttgcaaaggatcaaattgtcaaaatttgtgttagatcaatatcaaacttccatagcaattgttaaatcactttcctcctatcctatgtctccgtatgcatgcatatgttagaaacatctagccataaaaactgccatcaaagcaatttttaaactagaaaccaccactaacaatagttagacaattgcctatggttaatctcatttattctctcatacgtctcttgcaattcctcctataattaggacagtcctcacaccccatcggcatcctctatcttaagagcgagtgtatcgtccttcttgatccatgttaatcacaggtccagcatcggttaatttcctctactgttttagttttattgattatctatgtaatataggataacttgcctgtttttgttatagtgttcttcccagattgaaaataaatcttaagtgcttcattgcttctactcccttatttctacacacattgcaaattttaagcacatcctttttttatcaagttttcaagcacttcattggtccagtttcaacaaatttgcttattccccaatacacatacaagaacaagttttactaatagacaactcaatcatcatacaaaacaagacacacaaccactttataggatagcaaatatattttttttactatatttgtctttctagatttccaatatatgctacgttagttaaattagtttcaggttacgaagtggtacctactgtctactaacagtattgcaatataagggcccctttgaatcgcaggattgagaaaacgtagaaataggaaaaatataggattttgataggaatgtaagtataaaacagaggattgcaaaacgcagaaaaaatataagaataaccgtttgattgaaccgtaggaaaaatataggaattggatgagagagatagactcaaaagaaagtttaccaagaggttgaacctcttgctaaatttcctgcaaaatctctatagaattgtccattccataggaatttcaaaggattggataggattcaatcaataaagggcttcataggaaattttcctataggtttgaaatcctccgaaattcctatgtttttcctccaaatcaaaggggccataagtttgctttctagaacaagacttgatagcaactacttccagcaaattctgcattttcaaagcttcctccaaatagttgtcttgaagatgattcataaatacaacgcatattgcaacatatatcatgaccagtaccataaccactcaattcacctggttcatatcaatagtttggagggcttcacattacacatgtccattatacctaatttacataagtatatcatatggcttttcagttaaaggaaagcttatgtgaaggcatgttcaagttttgactatttgaagtaattctatactcatgtgacttttaagttccttataatgaagttgagagtttctacacattggatttttttatttacccccacacaaatgtttatacctatatataggtaaaaggaaaaccctcagtgacataatagtacaaagagcctagcctctcatgttttaagtaaaactagacctacacgatcatatgcattattttccttcaattttcaaactaggcattgtcaaagagaactataatcatggtaaaaaataaaataaacaattatcactgttcaatttttttctattttgcaccttcaaaaataattctcctttttttatataaaagtacccaccacaatgcgcggggcattacctagttagctacacttcgatgcctccatcattatctgaatcatttacagaggatgtgtacacaaggcactttgtaatttgcatgttgatccgctctaaattgtactctcggtaaaaaaaaaaacctttttcatagaaaagtccctccgtcctaaaataaaataaagctattttattactccacctttatttaaaatgaagttatttcttcacatgctctctcatctcaaacaatcacaactattttttattttatattttctacctactttttctttctaaccaatcaaaatatttcaccaatcatttttcacatttttaatacttgtgtccacctttagaaatacttacattttatgacgcagggagcaagtcctagccgtagaccttcgtactcaactctattgtagaatgttggggtgtacggcatagtgatcaaaaccaacatttttatggcaaaaaacagcttcaatagaaaaaaagttttaaatctcacatgttggaaggtaaaaggatattgttacatgtgctccaccaagaacaacattgttgggtccttcccaaaattttcattattttagatgtattagattatatcatgcagaccaaagcccttttggcatgtaggatagatctaactttgagccctcggtgttagatgatgcacaaacggtatgttgtttgttgtccaagatagtccaaacgaaaatttttcacctgtacaaactttttccatttgtagaaaccttgaagtcaagatacgaacgttcaattaaaccttcaaacagtaaaacaaattgaaagcatcttttacataatctttcaactcaagtcgctcattttctttagtttgtctgaacttgcaacttcaaaatcatgaacttacaacataaatcactaaaatttatattccaattctaaaactttcaacacaaacgtaattgcccttcagcttgaaaacatgaacattgaacacgaaattaacaaaaaaaaattcctatctggaacaactttcaacttttacaatgttacagccatacatgagcatcggcaccagcatcgacacccgcaaccatgcacatgaagggatggttgatagctagctttcccatccaaacacccaaatacaatgcaacactagctgcattgtgcaggttatcctgtgggagcaaaaagcttgttggtaaggatagactttacgagcaatataagacccctaagggcatggccaacgcagggtaccctaagtgctacctaggatgggccaacactcccaaaaagctaatttcccacagtgcaagggtctattcggctactttgtaccgctgctgcactgccacaaccggagaaacaatatacagtgcttgttggctgaaccacagtgaaaataatggcagccgaacagagcccaagttgcttcaggtggtagtctcatttttttttatttcagcccctggtgtttttcattttagccctcacaattttacaatttatatagaagttcaaattttacactaaacaccccaaaagccagaaatggg

SEQ ID NO: 30339 - DNA, 1055 bp, Oryza sativa
tctggcgccgtcctcctgccaccgtggcgcacgcgaaccgacgtggcaggagaagggcgccagccatgctggcgccgccccaggctagcgccgccgcctccattcctgtttctctgtatggagttgcaacggtgtcatttttattttattttttcggatgttttttcacactcaggatcacgatacaaccaaccacaaaaaaaatttaaactcgaactaccacttagctaagtctgaaaatatctagcataccacttagtctactttgcaccttcactaaaattagaccataactcctttagtaaaaccctttgatcagcatgttaaacataatacactctaccactatatgaaattacttaatctaattcaaaatataaccatatgaaatgacatatataagttaaacagtacatagagatataatttttttatttttatttcatttttttgatatttttttcacacttaggagaacataggaaccaaccgtataaaaaataaactcaaacggacaaaatatgtgacatgtagaattttccaaaactctaccgaaacggacaaaatatgccatctattaaaataggcgtaactttctcatacggactcggaatcaggcaaataatatatgcacggagatctacagaaaaagttacatccgattctccccagctttgctgggttcggcgatattaaaacctccaaattccgcttgcaagattgtgttttcgaggagagaagtttttcggtggagctttggaaaattccatatgccacatatttcgtccgtttgagtttattttttacgtggttggttcctgtgagttcctaagtgtgaaaaaaatatcaaaaaaataaaataaaaataaaaaagttgcacatctctctcctctgcactagttcggagagaggagaggagaggaaaaattatacatgtcacatattacgtccatttgagttcaatttttctatggttggttcttgtgtgtccctaagcgtgaaaaaaatatcaaacaaataaaacaaaaataaaaaaattcgggggggggggggcg

SEQ ID NO: 30340 - DNA, 3360 bp, Oryza sativa
aagttgcatagagcatttaacaaacaagattgatgaattagatttcataaatacatatgagttttacgtttgggtctgcaatttctgcagagataaggtaattgatctgtcgtcagaagtagttaattcaccatgctatctgtacaggttgagactgaacattgtgcttgtagctaggtggagtactactcaaatgtttctaattaagaaacaccccctttaggatatgaaactcctgtttttatagagaaataaaaaaaatagctctaaaaacgccgcctcaacattagcttttcttgtagcgaaaacatctaaattcacagtgcaactgttgagttcaagatttcgtctacttccatctaaacatgtgaagcataatgccccattattcatgcatctgaactactacgtcagtggccaatgcaaatgccatcacctaaaaagaatcatgatcaggagtagggccagaagttgttgtcaagccatggcatgtttggtgaactagcacggccaagagatgctacaacaccggcaaatggtggcgtcatgggcatggggttcacttaagcataatgcatacactcatggacaatttagggaaggaattgaagaataatcagtccatcaatcaatcagcatccttttcttagatcatgcttggtaaatgtgaagttctcttgtttgtttgtttatggtaggtgttgttttgagtaagctgggtaggagtacttgtttttggtgactctcactcattgacctgagctggtggtgattagttaaaaaaaaatggaaatgggaggaagtactacatcagtacatgcatatacattgcaaaccaccacaaggaatcaggcatcagcatcagcatcagtcatcacttggatttgtctgcgtttgtgtgtgtgtgcatcttttgtgcatgcatatatgggtgctagtataactttatataggaggcatttacacacagccacagcagcagtgtactgctctgaagatctgcaatatatgttgcttggtgttgccgaaaaggagaaagtccttcacatctatcactgtctaactctccaccagaagcaatttgcattttttgcattcctcacctcacctcacagtaacatagttcttgacttgtattcaaattgaaggcttgtttgttaatctcatcagaattcagaaaccatccaattcatctttcagaagaaagtatatatatatatatatatatatatatatatatatatatatatcgttttgcctgatctctgagcatgcttagtttctttgttacaaaatgctgaaccgagctgaactgaaaatttcagaaatgtgtgatgtgcaggtggagataacatgcagagggagacagctcctcccgatcctgacattgcagcatgtccgtgacatcagtaactgcttggatattttttattcatctattatactgcttgaacagtagaagaaactaggatgatatggcagttactgatgttttatcttgtgcatatgcagtgctgctaagctcacttagaagatcttggtcacgcggcatccggtgaaattttggttgctgtgattgtatttggaatgtggctggatttggctgttaactgtgttgtaaattttgtgttgtattggatgtttgtcgggttgtgttgatgctaattgggctgtaacatttatgctatatgggtttttattgtgtttgattgttgggcctatatgggcctagcccacttgttatttgatactaatataaatgaatataatatggcgggctgaaaaatgatgtggtataatgtttgggtctatatgggcttttgtactggacttggcccatttattatttaagcaaatggatataatataattgggttaaaaatatgctatatcatagatgggtcaggctaaaatctagtcgggcttgccattgggctaagctcataaacaaggtactcaatacatgaattttaatgggccactagatattttatgacttttttagactagataatgacgaatatgagcatcataaagttactttatgacgacagaaggatcgtcactagattaatgatgaaaaaataaggtttcgtcatagaacgcctttagtgacgcatgataggtgacgggaattttcgtcacgcgagtgtcacagattacgaaacgtgacgaaaattttaatgtttgtgacgtaaatgaagcgctatctatcataagatctcttatagtggcttcttgcctgcacctgcgcactcttgcgcctggcgccacaatccatgccacgaaccgcaaccgcacactattgggtgacttgtgctatattgatattggcgataactggctactacgactacgacaactttatctcggctacatcgactacggcacaaaaggctatcatcgtgttgggtacttttgccggttttttctccagtccaagtgtccgcactgctcacgcttggactgcgggggatgttaaagtatatggtagttagagtcatattagaatatgattgatttgggtggactcattccatatatgtaatcctttcttatcctccccatgtacacctatatataccgccccctgagactcaatacaatagttttatgttacgcagtatacctctcctcctataatatccaacatgacaatccaaagcaaattaatattaggagacttgcaatacctttcgacgtgatcactgcaaaatcagtgtgttctaaagatcaaaattcatacagcaggtgatgatcgagcatattgacaaatgacgaatacaagaacgagagtgtatccacgcaaaaaccacgagccgcttctccgtcgatcgagatagtacgctatgtcaccacgagccgcttctccgtcgatcgagatagcacgctatgtctccagggacgctgcctccgtgtcgagctcagccgcgcgcctctccagcgcagaggcccagtcacgcgagcggatcgtgtcaagcaactcgctggcctggagaatcggctcggagaagcgcttgatcgagaggtaatcgaggcaggccgaatcgagagcgcggaaatcatcgtggtcgatgtggctgaggtgaagccataccttctccatctccttgccatgacggatcctggcacgagctacctcctgtgcggaggctatctcgtcgtcgtccagcgacaccaagtcccacaactcggaggggatccgcttgccatcgaccatgacctcgtcctgcttcccctcaacctcctccccctccccctgctcctgggccatcgcggcgtcctggacgatctccccctcctccaggtccatcccggcgtcctcgacgatcctatccgtcgcatcggaggaggccccct

SEQ ID NO: 30341 - DNA, 714 bp, Oryza sativa
attattagtttattactacagtattttattttatggcatcgaatatttcgggtaggcaatattgagaacaagtgatattgatggaaatatatttgcctaaataaaagcttcatgaagtttaggcaactgtgacaaatccgaacttcttctaatttctaaaacgaataaaaatcaccaattaccttagaatagtttccaattccaattaccaaccgcagatatatatatatatatatatatatattaaaaaatccctttcatgtgaaaaatccctcaacgtcaaccgcgtgggacccaccagtcactttatgggaccccacacctaattggcgggaacacataacaaaaaagaaaagggaagaagaacaaacttgctaataacattttcccgcgattccaaaagttaggtacgaaatccacccggggggaatcgatccgacggcccagacacactcgggcccacacccccctcccgcgtgtgggaacccattcctttcttgtcgtcgcggtggccgttaccgttacgtgctccgtcttccctctccgtctcgcggaaccactttttgcagtttcccccctccacaagccggattattattcttttattattcctttccctcctctcgagtccgccggcttctctctctccgtcgcctgcctcttcgtcactttcaaagaccaaacaaaactcgagtagaggagagagatagagag

SEQ ID NO: 30342 - DNA, 713 bp, Oryza sativa
cgtcgccattgacagaaaaaaagtgacgtcgacagaaaaaaaaaaactgatttaattgggctattttgcaaaaggtcttgagctactaaaatgattattattagtttattactacagtattttattttatggcatcgaatatttcgggtaggcaatattgagaacaagtgatattgatggaaatatatttgcctaaataaaagcttcatgaagtttaggcaactgtgacaaatccgaacttcttctaatttctaaaacgaataaaaatcaccaattaccttagaatagtttccaattccaattaccaaccgcagatatatatatatatatatatatatatatatatatatatatatatatatatatatataaaatccctttcatgtgaaaaatccctcaacgtcaaccgcgtgggacccaccagtcactttatgggaccccacacctaattggcgggaacacataacaaaaaagaaaagggaagaagaacaaacttgctaataacattttcccgcgattccaaaagttaggtacgaaatccacccggggggaatcgatccgacggcccagacacactcgggcccacacccccctcccgcgtgtgggaacccattcctttcttgtcgtcgcggtggccgttaccgttacgtgctccgtcttccctctccgtctcgcggaaccactttttgcagtttcccccctccacaagccgg

SEQ ID NO: 30343 - DNA, 2646 bp, Oryza sativa
tgatctcatatattatagtataattatagtataattaagcaataaaatattagttcccatctagtcactccaacgtgattagcatctaccctgtggtagctaatgaaaaaaatgaggtgtgagtggatgttcagaatcctatggaattcccgcattttcacagggttgctatagtattcctacaaaattcctacacgtgcttcctatgaaccgaatgcatgaacatggccaaatccaaaggatttgccaatcctacaaaatcctgtgtaatccctccgttccgaacaagccctaactaaattgctgcacaaagtagtatctaatgtatggaaatgttcatctgtatatgtttcatctttactgtttgagaatccgtttttgctagaatgcatgaaacagaatgatcaaatcttagcacatctcaggtattcatttatgaaatattttctcttttctgataaaataatgacaggaatttttctaatactaaatcaacacattcatttgcacatatctatttttaccataccaatttattcatggtttggtacatataacagttgattcctcaattctttgttcgttgtgtgtatgatgttgaaatagctcaatgattatttctacattcaaaatagaaaaacatcgacaactacattttaattgttagtaagtgattttgtatattaattaatattttttcgagaaatgcatatttttcatgttgcgtatgggctacgtatcgttacagttgtgaacatgtagtactaataacgtatattttacgcacgtttaaaattgtgaagagaatttgcctagcattttcagggaagtgttttcacactcttggccacttggcattggcttgcctcttggttgttgggtggtacaatacgagggcttttcatttgaccgctgcttgtacgtatatatagcagccaaatgagttctttcgaaattctaaacatgctcaaagacttgcaaaatctcccaccttgcaaaatcaacatcaatattgatgtcaacatgcattttcataggaggatatatatggatactaactactccctaattaagctcagaattataagggcttacgccatcacgcgaggtgctcatatgaaccaataataaaatgaatatcatctgtttaattataaggagctagtactgtaacaaaactgtgaaaatgattaaaatttaaaaaatatactactaagttggtgtcgaatataattatttgcaaccaacggtgttctttcgaagtaaaaccggaaaacgacgtacccaccacaacggtacaaaacctaacactactggcacactactagtcggagcctcggaggaggtgagccgtcaacagaagagccatcccggccctgtgccggcaacgaccgtcgaccgctaattctcacgtacgccccgacccgagagagcctctcgccgtccgtccggtacagcgaacctcaccaccagcgtagccgcctaccagctgcgtttcaccttcgccctcgcgagcgcggaaggcggaagcttcacgcgattcacgccgacccgagaccgagacctcgtcgcgcatccgtcgtccgtttctctcctcgcgtacctcgcgacgatcgaaaccaaacggacgacgcgggcacactggcacgtcacgtcgacacgtcctgtgccgcggggccctgtcctgtcctcccgggctcctcgcggccgtccgctcgctgcgtgacggcgtgtgcgggtcacctagctagctagcgccaagagaggaggagctataggagggggggttttagcggcggagagaggccgtggccccgcgtggcgcgcgatctgcacacctcggccgtccgtgagggaccccggtcacgtgggacgtgggcgtgggggcgcgtactgtgcgggaagatttttttttcggggtggggcgagagggatgcaccatactccctccgtaaaaaaaaaaaatcaaaccctaagttttcgtgtccaactttgactgtctgtcttatataaaatttttttataattcgtatttttattgttgttagatgataaaacatgattaatattttatgcgtgatttgtatttttaatttttttcataatttttttaaataagaaaaacagtacaacgttggacacgaaaatcaggttttttttttttggcggagagagtatgccaatagcccagtacgacgacggacggacgctgcagcacaaggcgctgtcgtttaggggtgcaatttggtcgctcgcgtcgtcgctttgtgggcgtccgcgcgctatttccattctgctgcttcccctgaatggcaactactgctaagctagtatagcaagtggtgaaattggtgaatggtgatcgatcgcctcgcggcttggagtggagaaggcgctctcgatcagatatccagatcgatcggaactagcaatgggtgatcgtgctgtatgaattaggaaaggctcgtccaagaaaaatggtactgtaatgttactactattcgacgaatatgggcaaagctcccgttttcagggaatcgagaagacagacacatatgctatgctatacaacttgcacgtacgattgatcgattccggatcgtactgacgtatttgtaacatactcgatctctcactctccgtgcc

SEQ ID NO: 30344 - DNA, 2088 bp, Oryza sativa
tcgcccggtgcggagggagccggatcgggcactccccccgcgccccctcccccacgtgcctacttaggcccacctatttatgctcctcttttttccacaaaagatgtttcacataatgtatttacaatgtttcactatttatagatctaatgttgtagtaaattaaaatactcttttgcaaaaaaaaaaacccacatattttagaaactctctattaagggaattttgtttattttttgttccacccaaaatgtttcacctagtgtactcataatatttcactatgtatagatctaatgttacactgaacgaaacattccattgcaacaaaaaacccacatattttggaaacccctattaagagaatttggtttattttttgttccaccgaaaaatgtttcaccgagtgtactcaaaaatgtttcactatgtatagatctaatgttgcagtgaactgaaacattctttcgctatttgctgaaacattgtttttatataaggtgaaacaacacccaatttaaacgagtgaaacattttcgatctacttagtgaaacaattctgatatatctggtggaacatcttgcaacatttaaaaataattcaataataagataaaagaaaatttcgtcgaaatatatccatgcgtggtcttgttttgaagatttaattgcaatgaatttaatagtgcaatcggatcatcatttggataagtagtttaagagataaatcagtttaaagtaattttgcatgtaaatcggacgctgacgtcagcgcccgattttaccctctcctgatcggacgcccgaccaggagtcatccaaaaaaatctatacgtgaaaaaaaattctcacttaaaatttaaaacttttaactcaaaatttgaaaatctaaattcaattttttaatattttcaactagaaatttaaacttttaacttagatttgaaacctttcgacttaagatttgaactttgaagtcaaaatttaaaaaatttcaacttaaactttgaaaattttcaactcgaaatttaaatttgtaagacaaattttaaaaactttcaagtcagatttgaaaactttcaactcgagattgaaaactttcaagtccatatttaaaaactttcaactcaaatttaaaaactttcaaattttaaaaaaaagaatgaaaaaaatatatggaaaatacgctgaggggagggaggcaaaagggaaaaaatcacgaaaaaaaaggaaaaatcgtgctgaaaatcgctaaaaaaatcacacaaaaaaaagagaaaaatcgggaagtcgcaaaaaaaaaaaagccacgtggccggtggaggggcgcgcgccaattagctcccccgaccagattgggccttaaatagacaccgttgtgtgcccatataggtttattgaatggaaagaacattattttttatcctgcatctgcttttattttctctacgaagagagtggctagggtatttcaaagaattttatgagttaagctaattcatttgaacttccatttaaattttggtgttcgaaagaaatcagtacgatgagctcacatccttgatgaaaaatgggactagaaatataatcaagttgagcatgtgtacattagttgtgcctatatgtgcttttgtatactactcctgttctcaagcaatagttatcttttctagtgaagtaaaatctcctaggaatataaagtatttttatctcaactttaaactctcttaaataacatattatctcttatattcgtggcctgataaagcatattattacttacaagttagtacaactaatatactactagagggtactattctttcttattgttttctttttggaagatcactagcaaagtagtgctactcttgctcgctagaacgttctgtatgacaacagtacataccccaatcatgtggctgtaactagcaccacgagtaaacttggccggatctacctaccgccagcctcttgaaaccaaagtgcatgccaaacagtctcccgtcccatactgccatacatacacacacacacacaagagtacacagctgaatatatatacgtgattccgtgtgactacttata

SEQ ID NO: 30345 - DNA, 2804 bp, Oryza sativa
gttgggttgggtccaacgggaaaggcctccacaatgtcggtcaaaactgtggggaggtgtgggccgggggactgacaggtggggcccaccccgggtgtgggtgggggctggtaaaaagatctccaggaataggatgtttcttgactggagggcatatttgcccagttgtccatccatgctgatgctggggggcggtggatacaaccaaggttgtctctcaggatcgagataggaagtatcattttgctcaaagtaatatcgtatcgtagtatcgggatactatgagattttctttttttaagtttaattaacatttatattaattatatatatagccattctatataaaaaaagtagtaatgatatatgtcatgcaaatagagagacatttatcaagagaaaccatgttggttttgatatatttaactgattttcatataaatttgagcatatttagttacattattttcaaaccatgttattttaaataatattttgtagtatcctagggattgtacgtttcggcttggtaggatcgtagtatcgtaagatactgggatacgaatcgggatactgacaaccttggatacaacttgctgccgttcgatctcctcttttggagatattttcagcgcatgtaaaacgagaaaaataattaatatataattaattaattattaataattataaatttaaaaagtatttatttaaattttttaaagcaatatatatatatataatttttttaaaaaatatcatttaacagtttgaaaagcgtgcaaaccaaaaacaagaaaattaaagtttgaagttgaagaaaacttggctttgtgttattttgtttgatagaatgtttaaatatattttgcattaatttcaaaatattaaaatgaaccaggatatgatgtttctaatcacgtaggttagtagtatattttaaaacagagggagtaataccttttatgtccgttcgagcacgtaaaatgagaaagccatttgtgtataattagttaaactttaatcattttaaacttatgagactatatttatatgatattttacaataacttatatataaaaagttttcacgtaaattatactgtttaacagtttaaaaagcacactaccgagtgccaaaataaaatatatatctttattaggggcatttaacatatcccatccacagaaatggtgttctcaaggaaaggaaagaaaatccactgaaatggtagtacatctatcatatctggtggtttgccctgctggtttccgttggctgtctcctgcaaaccgtgcacgcgcgccttgggagcgaagccgagtcgcacgcagaaattgaccgggcgcgtcgtacgacacacacgcagaaattaaatgcgtctcgttctagaagagttggagtcacgggggaatttctcgtcctctttttttgttggaaactttgaacgtctttgaacccaaaaaaaaaaaaaaggtcggtgggagaacaaaatcgcaaatggcttatgcatttcggatatgattaaaagaactcttttgatttcaatctccatcgtacaaatatcaagtttggcaccatgatgttacaaccgtttttgtatttttgcaaatgtatagtgcttcagttgtcagttcgataaaaatagcccttttttaaaaaaaaaaatcggtggagcatttcgttttctctcgtgtttaatagtggtatagacgtatagctgtttaaagttaatataataaataatatgtccccacagccagcaatagcgccccacctgctggtcgagatcaattagtacttattctattaaactaaaccatatgttcagattctcttctcgagcattctctctttaatctatgctctttccaccgaatcaacttaagtcctgtttggttacatgggctaatgtttaaccctcatcttttagtctcaaattagtcctcaaggatttaaacaggtgggctaattttgagctaatgtaaattagcccctcctcgaaacattagcccctccaaggggtgctaatggggctaattttgtgtggggaacatcaaaaagcagctctctctctccttctctctcctctctttctactctctccaccttttagccttaaattataccatggatccaaacataccaccctaggctaatgtttagcctaccaattcataactaaacattagctctcaaaattagccctgagctaatcttccaaacagggctctatacatatgccacgcgtatcgtgcatccgttctggcgaacattcccaacaactatatataaaaaaagaaaagacaaaatatttaaccatcagcgttcactaatttaacacctaacctacatatggcttacacatatggtaaatatctaaaatgataaatagttaaaatgccataaaaatgaactagtactagtacacttggtccaaattggtatccgtctctttacgaaacaatgagcttcaacttcttttagaatatccagctatcaaaagctcgtcagacaatttagatttttcacctaaaatctaactaaaagccagagattaggtttcctagcttgtccagattcttaccagctgtttttaagaattttaagttccacaaataaacccttatattcatccctaattggagtaatccaaagcgattttatcaaatttcacagtttcacttttcaaagatttttccatttgtcctattagcaaccatgaaaacgaccaaaaagcacctaaaaatctaaatttaaattcggcgttgaatttataattcaacaacgagccaagcatacaaca

SEQ ID NO: 30346 - DNA, 641 bp, Oryza sativa
caaaaaaataattaaaatatggcatatcttttttatatttaccaatatttttcaaaaaagatgaatggtcaaacgttacacgaaaaaatcaaagcgaccactattttggaatggaagtagtacctgtagagaaaaattaaatattagttcttaagtgagtgtggaccgaaaaaattccttatttatcataaacacgttttccaaacttttaaatgatatgtttttttaaatatataaatgaacatgttctttcaaaaatcaaataaatcactttttcaagtttgtactgattaatactagactaatcatttgctaattgtttatattgttttacttgccatcataactcatgccaaattgcttttccaaacccaccattagccgctgtggcaagctcagttgctagcttgaggaggactatacaaagttgcacacacgccatggtactaacgagaactggaaaatatgttgactggaaaaattgtatcagttcatattagaaacaaattactgtcagaatgaggaaaaactcagtccatgccactaaaggcatcagatgcgaattggcgctcctttctcctttcaaggagtaggcataaacataggctctgcagtagtttcatctgaaattttaagatcag

SEQ ID NO: 30347 - DNA, 1023 bp, Oryza sativa
atggatgatgtcagcatgacatcatcatcttctccttttccagttttttctaatagatgaaatcttcggaaaatcataactaaataaccgtagatccgtttcaggtggttcaagttgctaaatttttctaaaatcaagatctacatgttaaaaatatccacatgtactgtttatgcttgtttttgtattgttttgttgatttttattcttttgctttagtttccgacgttctgaaggagagcgtttccgttgaggaaggttcggaagtgtttgcggaagctcaaggcaagtcacacagatcccaaacaaccctttgagcatgttgaacccatttaaagctattattttatttcaactatgcattgttttcgaatgtcatcgggtggtgaacctttccccgttaattaatggccgaagatgatcttattttcctatgggttataatttgattagtatgaaccttatatattggattggttcagctaaatgctatatatgtagggatgctctagagtcatgcttagaaacattagctaactaaaggggttaaatctaaattattttattattaattagggttatattcaatggtagctcacgatggtaaatcgtgtgatgttaattaattgataattaaaacctggctaaggtgggttgtgagcatatggttttgatggttgtgctcatgacaattaaggaccggttcgcgagctactgttgtgatacatttatcgtgccaaccacaagccagcgtgggcaacggctttatcttttgtatagcgtgattcattatagtgcgccagactgagaagtggcgagaagtccatgggggtcgctggggagtccataccttgtttataagggggtgattatgatccaggaaaggtgcgctgtaatgggttatgttgtgcaaggggatattgtcacaactcctttccgaggtaccgtggtggtattgaggcacatggtgacatgatgtggggttgtgtcttgtgggtacagtggtacacctctggtcagagt

SEQ ID NO: 30348 - DNA, 1744 bp, Oryza sativa
tgcaacaaccggggaaactgccttccctgcaatgtgcgatttctgatgcccagtagtcaatctgaggctattggcacttatgatatcagtgcttattttactagccttttaccgtttcttggtgctgcttatctgaattttgtgtggaattgtgaattgtgatggctgaaatgatattctatgtgaaaagaaattactcgatggatgtctgttcaaaacttaaaccgctactaggaatgcttaaacatgtgaatagaggtagtaatatagtctgataatgacaatgatgattagataatgagcaaagcaagggggtaaagagaaaatccgtaaaagaacaattgaatttattaactatctatactaatggacaacaattcttgattgaatttaattaacggataacgatatttggtagataatcgatttttttttcttcttctccaagaagcaaacaaacatgattgataacagaatggtcctttccatttttttttccatattaaaacaacataaattgtcgtcctcatctccaattctccacagctcgtaaacccccaaaaccctgactaaaaccttcgtcatccgccgctgcaccgtcgccatggcttttttcgccgccgctcgccgggccggcacattcacccttcccctgcttcgcccgctggccgccgcggcggcgcggccgcagccccgctcgatgccgttctcgtcgtcggcccccttgacgaagcccgccttcgacagtgagctcgtcaggatcatcgacaacgcgatcaacgacgccgaggaggagagcgacggcgaccaagaccgggtgcgtgcgcgcgcgagctcctgaatctcactaaatcaaatgctgctattcgatcttctgctctatcatcagagaattatcttttgacatcattgaatcccctttgtttgttttgattttagtcgtattatatattaccatgaaataaacttaagcaatctgtcgccgttaggtacttcatatgttgtttgcgttatgttctatgttgctatagtagggattgggattagttatttaactttgtttttaaagaaaaggagtaattttcatactgtaattggtagcataatcatgtttacagcattgcaattgctttgctgagattgaggtaatatttggtacaatgatgtggagtatttgctattccactttttcatgctcatattaacttcaacttctcttgattatagtagattttggtgttatttatttgcagttactgcactattttagtgcttgatcattgttgttgtgccttgtttaattcttgtgtaaggttttgtgcgttcctcataagaattcaatatgccttgctattgtgccttatgaattgtagtacttttttgtctcctgtattcttgttctattagtgctgatgtctaaagtcgtttattttgaaatttttctccgcttagaactctgctggtaagttttaatcattctatctagttcctgtacctttctctgcgattatgcataaccagattgttttcctgaactatacattcatgccagtttgattactctgcgcaattatatatgatatataagttcaatgctttgaacaattttcatgctctccttgagagcaatgtgctgtgactgtctgactgagggcctcattttcattgtcatactgatacaggccaaggagatccctaataactccccctttaaaatctttaaattctttaaaatcaattatgg

SEQ ID NO: 30349 - DNA, 2296 bp, Oryza sativa
tgcgcggctagcacccatacaaaatatttattttttaatatgattttacttcatatttattaaataactatcttattattttaagactttgaaaggccaaaccttatcatccccgtgtttctgtttttatggattttaaaagtcacaccagtgctactcgttacttctgttaccctttttttttcatttgcttgcttgatttaccactgtttttattcattcttcttgaaacctttaaaaattggaccttatagttttttgaatttattgtctcgttaggttttgcttttataatttttagaagtcccgtcaaacactgccactgtactcctctatggctcatccgctccctgctctctctttttcattgggattttataaatcaaatataattatcgtttgggttctctctctttttaattgggattttattaattaaatataattatcgtttgggttcatttttttacttagaagtcccgccaaaccatcagcggcttaatttgcctctctattcctctatggctcacctgctgcctcccctctttattgttattgagatataaaatcaaacatgattatcattatttttatttactttttagaagtctcgaacctttaaaaattggacctcgtagtttttatagtttgttctctcattgggtttaatttttataattttcagaagtcccgtcaaacgctgtcattatactcctctactgtccgtctgctgactcctctatttattgttattgggattttaaaaatcaaacataattatcgtttgggtttattgttttgtttctagaagtcccgccaaaccatcaacaactttgtcactgtactcctatacagctcgctcgctgtctcccctctttagtgtcattgagattttaaaatcaaacgtgactatcattagggtttatttaattaatcttgtgttctaccctatctagactattctttttaatatgctttattttctattttgaattttaattatttataaattttattcctgttagaactcttcattattgggattttaaaaatagaacctgatcattttttggttttcttttcatagtttgtagaagtctcgctagccgtcattgccaatttcctttgccaccctcatcttgtcctcttaataatgcaataaaattcatttcttcttttattctatatattgtagtttactttcaatattttgtctttctaattctagttatttttaattgtattcttacttgaacttttattgtttttctagtttgaattttattttatttttcatttagagtttaattaatctcatgttatgctctagatagactgatagttaaatatttgcttaaaaagagcttgtctgttgtcagtccttgcccgatggggagttcaaatagatagattcttgttttttaaaaccttatttttatatttttcttgtatttttacaacttgtgagtaggatttgcccggtacttatttctgggaaatcattctcaaccgttataacatatgtccaccatgaattggtgcaaattgtttgttgaaaaaaaattggtgcagattttttctttttctttttattacttattaatttggtaatttatagatatccttatgtaatatttggatgtattattaattgtatgtgccattgctgcatgtagcgggcagattgccaatcaaaaggccggatagattttttgtttaatgagcttctctgataaaaaaaaaacagaaaacatgttagttgtcagccttgtccggatgggacttgggtctgaatagaacttggacttttttttttttttgctgtacggtttttttttttgacaaagtttgagtaggactcttatatctgtccaatcaatctcaatggttaaatgattgatctatcataattcaatggtgtagatttttcactttttcttcgattaatgtggtaatttctagcctccacagtgaacgtggtgcctcctttcaaagctgttttaataatataatagatcttatcaaattttggcattatcaaaattttggtacagttgccaaaattttggcaggatttcttatatagttaccaaaatttggcagcaaactaaatataaccattttttagtaactttaccaaaatttggtaaggttgaaaatagcatcagagtaaacatatcctgagatcctcagtgatcaaatgcatcctctgtggtctaagtaaacaggtcctgtccaagttgatggtgaacgttttgggttttagacgaaatttgatggtgaacgaagttgatgg

SEQ ID NO: 30350 - DNA, 1777 bp, Oryza sativa
ttttgggacggaggtagtattttttaattccgaatttcagctatttctatatggactctgctttttctttttttccgattaatgtgagaatttctaggccatgagagcgaacgtggaggctcctttttctattcctttaataatataatagatagatagatagatgattttaaaaattggggaaagggaatagtgaagcaggaaagacttatatgaaggtgatgcaatagtatactccctccgtttcaaattagttgtatttctatgattcaaaactttattctaaaatagttgttacaatgaagtactacttatcccatcaatcacttctaattcaaatttgtttcttttctaccctcaaccatccttccacatccaaccatacatcatttaataaatggtattatatattttcacaaaccttaatccatactaaatatcggtggtagagatgatgtgaaaatagacaccaccactattaatattttaagtagtatagatatgcttgtgatgttctttgtgtgtgaactggagtactactatgggtttgtttggggagattaagattctgagaatcaacttgttggtagtcagcttctgagaatctaaaaaaactgggttttctaacttttagtttctagttctttttctgaattcaactactgcaatttcttagaatctgaatccctgtttgaaagaatttctgtctctggaaaaagatgcagcagctaaaaactgttccaaataagtctatgtaggatgggtttcctgtagaaccggttgtgtgctatccacggctaagttcttgtgatttccacaaagaagttttaattccaacttgtagtttacgaactacaagttgcttgcatatgtacagaattactcctccatctgatgagagagtaccttgttccatctaacgtacagatatttaaattggattaatatttcctaaagtcacttagaaaagcattatgtttgcatcgggaagccatacatggttggctcacctatatttattatactccgtttaactagcatagattgcgtggctagcatcgttatatttttttcttataatagcataaatattttcatattctatttattaaaataaattaaaatgataatataattttaaattcttgatcaaactaacaaatatgtgatattcttattgtattgtatatacatgatagttattaattattttataatttcagattttagttatttataaattgtattccaatctagacctagactcatctttcaatatttcttattattttaattttgaattttcattattcataaattctattcctataaggaccttggactcctcttccaatattcattttacttatttgtaaattgtatttctatatatactctaaactcttcttttaatattctttttttaattttgtatttcctttattggtaaattgtattcctgtatggactctagacctttttatcaatatttattttttttaattttatttatttataaaatgtatttgtatatggactctatacctttttttaatattccttatttgttaattctaaatttcagttatttataaattttattcatatatagacgctagactcctctcccaatgttgcttattttttaaatttttaattttttttctaaattgtatttctatatagactctaaactctacctttaattattttttaatttcaactgtcacttagttctatattcctatatggactatggactcttcttccaatattt

SEQ ID NO: 30351 - DNA, 1145 bp, Oryza sativa
ttcttctttccttcatgtatttcgttttcttttcattcttgtttttttcctttcttttgcacggatcacagagaaaaggagaataaagggaaaaaaataaaaaggaaaaaaataaatgggtatcatttatcagtcaaaataatgccacgtcatgtctgtgtggcatgccacatcaacgccacataggatcatgaaggggttgtggcaatttgggacctagatgacacactatgacaagttctgtgacttggatatgcattttgagagtttagggatccagatgacacacccatacaagtttaaggaccgctcatacactttacttaaaaaaaatatatatggcttttggcggaacgcaagcttccagatataagcttttcggcgtcggcgtcgatggcgagcggcgtagagactagagagacgccactgctgctatccatgatgagaaacgccgttcgccggcgacggcgtcaatacgcatggatcctacgatgtactcaagctgaaaattactacaaaataatctgttttttttttcttttgcgaacaccatacaatacaagcaccatactttcaacttgggatatttgaagtatcaagactcttgacaaacgctcgtcgattaagccgaccggtcattaatcgaacaaacacgacagccaaacaaaacatacagaacgagacactcagacactgatatgatcatacgtaaggtgataccttcaaagcctgggtgatacacacaaactctacaagaagtagtagtgcacacaatttccagggacacaaacacgagcaacaagctagagatcgacgccagcggacggtgatgcggtcggacaggggcttgtgcatgaacatttgacggacttaccacagcagcgccgccaccgatatcccgacggcggcgaggagcggcgggacggcggtgtatagcagcttcttgccggcggcacggcgggcggccgggttgtcggccacccagattgaagcgccgaccagggcgaccccgccaaggaaggccccggtgagcgtgaggcggtaaaaggtgtcggcgacaaagctaccccgcggcggctcgagcgctgcggccaaagcggcgggggccgcggagaccggggcgatgccgactgcccccaacgtgg

SEQ ID NO: 30352 - DNA, 789 bp, Oryza sativa
aatttaccatagacctctgaaaacaggaggccaatcaagacttaagggcactgaaagagaggatagcacttgattgcatccagcttcaactggcggatttctcatctgatggttgggtggaaggaaaggctgttcaaattgagctggccatctgtaaccaacatcaagatgcaacctatctgttgtagcagggcgctgttgcatttccggtgaaacaaaatgatgtggtgctacactaggccactcatatgatgttccacccagtgtgtttctgttgtacacataatattcacctccagttttcattaccccgccattgtcgcttatagcactgtgaaacatattagtaggaataacaggtggcaatattttttcagttgccactacagagttacgatcaacagtatcacttctggaaggcaaacaagaagatggttggagtgtagattcattctggccattctgcgatatgacctgctcattcatactaaagccatcagatgttttcacactctgagaacattctgtagtcaacaacgagctgactctgggagaatgcaaggtatcttccagttttgtgtttccaatgccttttacatctgttccattaagtgcaatggaagagtcacagcaattcactgctttgggaatgcaactcttggactgatggacatatgatgggagatgaggtgagacatgtgttgcttcaacaggtttatttggagcttctgtagcaatatgaggagcatctgtcttcaatgtgccagatccagggttctcagttttcat

SEQ ID NO: 30353 - DNA, 4067 bp, Oryza sativa
ttgcacctatccttgtacctgaatacattggttgcaaacttcgcagtggtaactcaatatagaagttagtttacctttgcatgttatagttttttgtgtctggatctcagttgacctctggttttctagtggagtttaggctactgcatcagtatcacttatttaactggtagtataattcaaccttttagttttatgtttgtacattctaggaatagtatgccttagtttttatgtttatacattctaggaatagtacgcacatagcgtaatttccacagtaccataagagaatcgtcgagaacgaaatcctcaacctagcatgtcataagtcattctctttcatgcacctgtaaatccttgtatgtatcgtgtggcaattatctgttgtcatatttttgacgtaatgccttactttgcttctcttgtaactgaattgtttgttataatgtactccctctgtcccaaaaaaacaaatctagtataagatgtgacgtcagttcaaattagtattactaggatgcgtcacatcctgtgtttgtttattttgggagttgttcatgtttttgttttgactcttgaacatacttgtttctggtcatttattgcactggatttgtcaagttaactagtgacgctgacatcaataatttttttgaagttttgatgaatttgttcattccctatccaacataatagatatttgtgagacccaacatatgtgaaaacgttactgttgtactgcaatttttttggatctacagcatatattcatccatttacttggtgatgtctggaatactgttctcaaacagaattatagatgctttcatcaaatttgctgtaccgaggtaattagtgtagtcgttatttttaagggttatatttttaatgggcgtgggacttccagattatgcttccacttggtataaccgatggcataaatcaatatatatgttctgccgtattttgccaacttcatatcgcccggatatatatgttctgcagtattttaccaatttcatatctcccgaacacttctgctgtgtgctataacggcgtgtatattcgaacttaacgtctcccattgttttgttatatgggtgaatggtagcaaagttcgcactgtcatgttgttgagcttgtgatttgtggagagctgctggtaaggagccatgttgcattgcgtacgtgggatgggttggtgtagctcctttccagcagtagtgaacaaacgaatcgccaatcgtgattgaggcgcagccgcatagcatattgcttgaaaactacgaaatggtataaacaggcgagctatcaaggattcaagttacaaaatgattaagcgaacagtacgtcaatcttagattgtacggcctaactcgcccgtaaaatcccagattctgggctcagatgcttgctaaaatgcaaaacggcgcgttaaacagaaacttctcttgtagaagttcgcaaatttctttaggagaaaaatccaaattccctcataagtcactttgtgttgtcatcctcacctctacaactcaattaggtaaaaagacatcccacaacacaatctctcttctaacatcctcagtatagatttcattgatttctcttgctcaatttcttgtgattttcttttcgtttgcccaatttcttgtgacccacatcagaactacggcgactttctgctcctgaaacacgttacagccacgttgttttactgttcgaaatttgaatcacatatgatagagcgagctttgtggtgaaaacggatcggataatatactgttcgaaatttgaatcacatatgatagatagagctttgtgctgcatctaggggtgaaaacggatcggataatatccgatccgctccaaatccgtctgaaatgaggatatagaatgtgcttttagaattctggtggatacgaatgtggatgcggatagtatgaggcggatgcggattatgcgacatttttgtcggattatccgataagccgtttgccggataatccgaaattatcaacatatataaccactatatctattgcatataatataagtcggtacatccaatgcccaaattcatcaattaacatagattttttagtctaacgcttttatcgttgcatgtcacactcatgtagctatattttttatattatgaacatcatgtatttatgttgtttagcaattaatcgtataattattacgatgggttatttattgactatattgtattattattccttggatttatcgatgttgcattcattgctatacacgtaacatccgataaatttaatctgtttccgaaccaattccgcattgactccacaccattttcgacgcccgaaacaatccgctccgcatccgctcggaatctgcttaaaaatatggtttaagatatggtatgagcactatccgtccaaatccactccgttttcacccctaactgcatccttccgctatggtatcataccaacatgttgatgaacgattggagaaattagtggaaattagacagaagggggaagttagaagagaatttgagttgtgggcgattttttttttacctaatcgagttgtagaggggagagtgaaaataaaagatttgtagggggtatttggattttccccaaaataaaacgataggcccatcaaaccctaaaaaggttaagcacggatggtctatcaaagcaaaaaaacaaagcagtccagtcaaggctgaaattgttaaaagggttcattaagacccaaaagattgaaagggcctactgaggcccaaaatgttaaaagtgcgtggagctaaatttcatgaaattttgtcatgattttgatatccacaaattccacactccacggtcttggagctaagctagcaaaattttggatcaaagaaaatattttatacttttttttaaaggttaatacttataggttttactagaaggctaactctcaaatttatagcatgtaggctaaatttcatgaattttttgtcctaatgttaataatcacaaatttcaacgcaacattcttgatgctaataatagcaaaattttgggccggaggaaaaaaattgtgcatttttcctaaggttaatactcgagaagcctacaactcacgaatttatagtgcgaggggctaaatttcatcaaaattgtcatccatatgttccttgtgctagtactagtgaaattttggaccgaggaaaaaaaattcatgtgtttattccaaaaggttaatactcacaaattttgccacaaggctataactcatgaatttatagtgtgaaagctaaattacatcattttttctcctaatgttaataatcacaaatttcacacacgactatacatatgataatactagcgaaattttgggtcagcgaaaaaaatcatgtattttttttctaaagattaacactcacggagtcatgggttttggctaaaggctataactcacgaatttataaccttagggcaaaaattaatgaaattttctgtcataattttaatatgcataaattttacatagaacgatcctggtgctaatattagcaaaattttgggcaagagggaaaaaaacttgttttttttcaaaggttaatactcgcgggttttgcgagaagcctataactcatgaatttatagcatggatgctaaatttcatgaaatttttcttcttgatgttaataataaaaaaattcatgcgtaacgttgatgctattactagtgaaattttggactggaaaaatttcatgctttttatccaaagtttaatacccatgggttttatgtgaaagctatataactcattaatttatagcctcgagacaaagttttattaattttttttgtcccaatgttaatattcgaaaaattcacaagcgtattttttggcctatgaaaaaaatcatatttttttccaaaggttaatactcacgggttaatactcacaaatttatagcatggtggctaaatccccccccccttttttgctatttttaatgtttttcatgaattatacacacggttatcctgatactagcactagcgaaattttgg

SEQ ID NO: 30354 - DNA, 2608 bp, Oryza sativa
ataatattttgaaatgttttactatatattttatcttttgtttatagtctccacgtctcttctaaattgtgcatcgatcatgcatataaagtctaaatttgcataagttaaccgcaaagtttaatttactttgcattttatttgctttgcatatgtgtgtgtacttttatgcttctctctaacccacctcataaaaagaattgccattgatgatagagattcaccaaattagaattgtttgaaggaaggtagaaggtacctaaaaccaacccactttgttattacaatgtgatccccacacctgggccacctctgttgttctgttattaatttgttgtgacaatgccaatgttcaatgggatcagtatctataatcctagcttaatttccgtgaagcatctaacacaagtctccttcggtagatatccatacgtggctacgtataatgaatctctggcaagtcattaagtcaagacacgcttgattgcttttcataccagaagaccaacagtttgtgtcctgatgacaatgggtattgagacagcacggttttgaccacacatatatttgggagcagttcgacacaccaagtgaattttatgtggaacaaatcctaccctggaaatttcataccaagtctaaggccaagtctactattttcacactaagtcagagctcaaattgttgttagagcaggcttaattacgcattgatcgaggccggtcagctgctcaggtgctgcatgggtaccacggagaagttttcgcactcacacatgacacatcaaacacccccaatgattactagtacaaaactatgcaaatgaactaagggcatgtttgattcaaccctgagataatactctatcttaaatgtgatctacatatcattgagatatcaccaaacttgctctccctccgatttttagtatttaacgccgttaaattttttatacttatcaatcttattattaataaaattacgaaacttaagagcttatagtatgtactataaggacatgccctcgagagcttggacctgttttgtagggctcttgctcttacttcacatccgcttgagttagagcttaatcaaacggtttcagatccatctaaaagaagtgtgacggatgagagtaatctgaaaaataaactagagaagtgaacatttaatattacactcatccctacatccaatagaagtgggcatttaatattacactcatccctacaccaatagttgctcacagtttccaggtataaaacataggacctatttagcatagctccagctccatcgagctagagctcaaccgaacaatttcagcttcacctaaaatgggagcgaaactgggtgtagctctctcacacaatgaactagagaggtggatctagatttaaccaactccacaactccattctagactaactactaaagctaaatttgtaagttggaactctaccaaacaggctcaaaatgttctcgtggcaggattattaagcggaactctcaaaagacatcatattttaaggcactctggaaatagtacttataatttataaaccaaggattcctatattatatttgtaagactgacagtagtattgtttgttgaaacttcctttggacaactaacttctcacatgatggctgatccaacaaccccgatgaatattagatattgtgatcgccatcacaaatactatatatgtttttttcggcactctttattcttaaacaggtgatactttaaatatgcatgaatagtcaaatctccaaatattttgctaacatattgaaaataatatagtttggtatgggagaaatgaaattgatagacttatcattaaaaattacttgtgtatagacatattttgataatttaaattaaataagaatatgagtacaaaaaataataataaatatgcatggtaagttatgttgatatcacataaagaggtaataaaagtaatattccagctgtatgaaactacagctatctcggtcaacatgattccatctgtaagaaacaaaacaaaattaaattaactcgagctggctagggagattattttaaaaactttagatatatgcacacacttcactcttcccttaaaatacatgccaccgcttggtgtcgatatttaaagggcatgtttgtgaacttaatgtttcgagaatataagaaggctgggtctactaacttctaacatttaatttattccatgagtccaataactatattttttagaatttggttaacaatagtctattgtttgaatgagctaaagatgctgaataaaactacagctactataagctgctcaaacagggtacatgaagcataatagacatatgaggtgccacaaccatatgtccatactaccatatagatgttactccctccgtcccttcgtcctaaaatgtagcaatctaaaatatgatgaggcctattctacaactttgtaacagctgcgataattgttctaactattactatatggttcacacaatcgcttaacctgtaaatgtctaagatgaaacttttacaccccggcgtcatgctcaaaaatcacgaagcctggcaggacatgtctcacccttcgca

SEQ ID NO: 30355 - DNA, 1032 bp, Oryza sativa
tgtgggcttttttttctccacccaagacgggctgctggctctggcccaacaaaacccacatgatgaagcaacaaatcgcgcgcatgtgagaatttttttcattttaaattttttatttttaatatttatagaaatattgtaccggtgaaaatatttacagaagtagaccctgccgccctccccgagagtggcagggtgacatgagagacagacaagatgaaaaaaaaactagaaaaatgtatttttggcagggcgaaaattgcatttgcctccttgcagagggcggcaagggacctcagtgcaaaatgcgcacaccttgccgccctccatttggttggcagggatggtataatatttctgtaaatattaaaaaaataaaaacttaaaaatgcgcatgggagttttttcgcgcattacatgagtagcagacaggatggggatgcgcagattgtacggttaggggggaaacggctgatgctatctactccaccacttaagatcactcagtgatatcttctttgaccaatgcttccaaaagaaaaccgtttgagaataacaaaacatttgtgcagtagaagattaaagttaactaagcctgatatctgtgaattttagctacctaatgcagtagaagactagatactgattgatgtaagcttttagtttttcaaatactttgagtatcaccaactccttcttgatcatgccattttgctagcctccaaacactgcatcttttcctgaaaatgttagcattgcatgattatgttctgaacattttagaggaaactagtaattttagaacttcactatgaatagatagtatttttacttttgttagcaataaagaatacttagtacattaccttccttttgttctccctctcctgcagtctcccctgtcatgttctccttagttttgtcctctactaggactaataattttctaatagctatatcagacaagggaagtcagagtgattgtttttgtaaaattgtgtgtttcttgaagtagggaaggtgagctatgta

SEQ ID NO: 30356 - DNA, 1187 bp, Oryza sativa
tttgctgatcaccaaaacctgagaatagatctgagagaatagtaggagtgcacctggtgtaaattttttcttgtactacctttttacccttgatgccacttatttttttggaatttgatactgcagaaccaggtagctgcttccgctgatgcatctttcttgcttgagcagcatgaagggctctagtgaaaacagaactagagccaccaccacctgaaacattcgcacctgctgcaggactgcaaaggtgctgcaaatgcaaaaacataaacaaaacaaattagtaagagatacgatcaaaaaaagactcaaagattaggaaaaaaaatccatcaatggctgccgcgagcttcgacggcgccggcgttggggcgctcctctccggcagcctgcagcctgacactgctataccgtaccaatgtcgggttggtgctgttcatcgtcgccatggccggcaccacattcactgcaaaataacagatgaatatggcaacaaaccttggaactagagttctccatgctagacctttcaacgttatctgcaacgcagccgccggcgaggctactaatctgagtttagatgggttaagaactctcaaaacgcaaagaacggttttagatcgataatgttctgctcaacgggataatcatcctgctttctcgctttggataagcaaactgaagagcgaaaaaaccaccctgaaatatatctggtcagctgtctccgaacaaaattctatctacaacaaactcaggaatcttgattcaattttcgaatctgctacagaacagaaacaatcttgttgaccccaagggaaaaaaaatacgggtaaaagaaaacgggtaaaagtattcgattcaataaacctgttaatagtcattaccattatctgggcaaacgaattgaattggtggcggacagggagggagtagctactcccggtagtagtatataattttcctatatatatatatatatatatatatatatatatatatatatatatagggagcgtatcctatgcacacaggtcctggcgtgtacacaccgtgtacgccaactaaaaattatcgcgaaaaattctagaaaaattcatacatgtactttcaatagcattacatctacgtgcaaagtcgcatctttaaattcattctacatagagaatatcataaaagataaaattctg

SEQ ID NO: 30357 - DNA, 714 bp, Oryza sativa
cacctaattaggtgtagcccccaactatgtgattagttaccaaactaaacatatagttgaaagacaaaataataacacaatttgtgcattatatgacaaaagcatacgcgacacctaaataggcatgctagccgactgctttttagccacaataaaagaaatccgagtggtgtacactctaaaaggttcacgaatgaacacacttgacaggcatccgaatataaaaactctaaagattacccaccaagtattataaagattatggtaataaataagtcaaatagcctaggccatgactatttaccatggaaacaggcatataacacgccaaggaaatgactataataaaaacaagtcattcctagttaacccaaacagcttttgtagcctaaaaaagcttgcaaaaacagcataacgcctttctgtcgggcacctttttaatttgcattgcaataattccaaagaattatatgaccgcataaaaaggatttgatcagcattgggcaacactgttgtgcgcataatattgccaaagcaaaatatgcctaagtccctaaggaacacaatgggccacgctgttaaaaatattgggctgaggtactgttcaggcctaggcccattcgtacctccgatacccttaactggaaaatccgatatccaagcgacgcttcgtcttccccgccggaactctcgccattttccccactccttgct

SEQ ID NO: 30358 - DNA, 1693 bp, Oryza sativa
agagtctaagtaggaatacaatttaaaaatagctgaaattcgaaattaaaaataagaaatattaaaagaagagtccatataagaacccaatacgagattaattaaactcaaaataaaaataaaaataaatccgaaattagaaaaaagaaaataaaagaagagttcaagtaggaatacaatttaaaattagctgaaattcggaattaaaaataagcaatattgaaagaagaatccatataagaacccaatacaagattaattaaaattttgaaaaaaaataaaataatatccaaaattagaaaaactaaaagagagttcaagtagaaatacaattttgaaacaactgaaattgaaaataaaaaaaataaaaacattaaaagaacacaatacgttattaactaatttttttaaaaataaattatgaaatttgaaaaggaaaaataagatttcaattaggaatacaatttataaataattaaaatttgtgctaaaaataaagactattgaaagaaaataccatctaaaacacatgatgagataaaattaagtaacaagcctataaagaagtagagtggtagcggttgatacgatatataaaaattgttaataaaacaccaaatagaatcttaatgacgattaaaaggagggacaacaggcatgccgtgaagcaaacgagcaaggtgattgccgggacttctagaaagtaaaaaaataaaccccatttataatcatatttgatttttaaaatgtcaataataataaaaaggagaagccgccgatggttggcgggacctctagaaaataaaaaaaataaattccatcgatagttatattcgatttttagaatcacaatgacaataaagagtgggcggcatatgggccgtagaggagtaaaccggcatcgtttgacgggacttataaaagttacaaaaaatgaaacccaaaaagaaaataaactctaaaaactacaaggtccaattaaggtccagaacttctaaaaagtaaaaaaaaacctaatgataatcatattcaattttaaaatctcaatgacaataaagaatggagacaacgggcgagccataaaggagtacaatggcaaagccgctaacggtttggtgggacttttagaaagtaaaaaatgaacctgaatgataattatgttcgatttttaaaatcccaacgataataaaagagaaaagacagtggacgggccgtagagaagtataatggcagcctttgacaggacttctagaaattataaaaatgaaactcagcgagacaataacctctaaaaactaagattcaatttttaaaggtttcaaagagaatgaataaaaatagtggtacatcgagcaagcaaataaagaagtatatgatagaagtaaggggtagcagctgttgtgacttttaaaaattatataattagaaatacgtggatgataatgtttggtttttcaaagtcttaagacaatgagatagatatttaataaattttaagtaaaatcataccgaaaaatattattttgttgctagccgcgcaattgcgtgggccacccagctagttatattattaaaacagctttgaaaggaggcaccacgttcgctgtggggctagaaattcccacattaatcggagaaaaagaaaaaaaagaaaaggagagtccaagtagaaatacgatttaaaaatagctga

SEQ ID NO: 30359 - DNA, 1366 bp, Oryza sativa
agatagcgcgcctgaagagggagaatgctcagttaaagggtcttcccgtgccaggaggagtccggatccgcacttgtcgaaacatgatttcggcaataataaaagggggtagcgtacgagacctaaagtggatggatgcagagacaaaggatttagacaggttcaggccctctcaatgagaggtaataccctactcctgtttggggatttgaatccgccgggtgtagtatagatctgacgatcaggttatgtcatctatctctgccccctagagggcctcatgcccaccttatataggatggggggcagaattacaagatagaaaccttaaccaatacggtatcggtttcctaaatcaggactctaggccgttccgtaatatacaaggaaacgtaacacccaagtcatgatctgttacatattacatagatataagttatcccctataactagtcggataaccatgccgtgtggtatggggtacccatagtctccacagtagcccctgagaccttcacagtcggaaggataaccttctctcgaactagattactccaaagccgagtgcttcaatcatcttcgccatggtctcccgagtacttttaccaaatctgaagactgtggatggctaaaaaatatagtcaggtgcatcgactagatgcacctaataggtgtagcccccgactatgtggttaattgaacaaaccaagcatatagtcaaggaataaataatccaaccaaccgagtggttttaataattatagtcaaccaagcgacctgatattaatatgtagcatatgcggtgtgaatccctgaataacatgatccgagtgatataccgactgctttgtaaaatatgatgagtgtaacctaaagttggttacatcattgaaaattcacatagcaaaacagctataaagaagcttatatattgtgaataaagaaatttccaaagtattgggcatacgccatgcgcacactgctttaacagatgtgcttaagtccctaaaagacacatggtttcaccacacccggaaatatatggcatatgtggtataaaatccgagtaaataaactcataaaggatttaccaaccgcctgaaaaatgaccacaatataatcagcctaagccataatattggtcaataaaaatgcacacttacgtggcgaaaagcaatgatattgtatccaatcaattgcttaaaaacccaaacagcaccttgacttatatataaaaaagtcagcgggacagctatataaagctttactgtttgacaccttttaagatgcattgtaccaactcctaaaaagttaagtaactgcggtataaaaggattttaaggtattgggcacttgatcacgcgca

SEQ ID NO: 30360 - DNA, 2560 bp, Oryza sativa
gttgcccctgccgtcgtcatcaatgaaggaggcggcgcaaggtcgtcatcaacgaaggaggccaccgccatccttgctgtgccgccgtgttcgacgccgggcggaagaagggagaacgaagagggagacggaaacagggacgacgtttgagaggagacagaaaaagagacgtgagtgccatggtttcaattttaaaaatttgcagtggcatccagccgataaagcgaatatgtgtggcatttttttatttgccacatttgcagtggcatggatccaattaaccctttaatcaatgactaattagaaaacagtatccccatctataatatataataggactaggatacaacttgtatcctctgagtgtatacttagttgacacctaatatttggtaaccatatatatcattttaaaaagaagaattatagtgtttgctctaccacccttgatcacatctaggcgatgatgctctatagggatgatttcaagggcggatccaaaaaatgtatagagggagggtttatctcctttctcctccaatccccctgctcttccttctctccctcttcttccccctcccacccccctttcttaatggtgatccagcgggatagagggacttgagtcctccagcacccacgttggatctgttcctgggtagtgttttgtccgtcaccaaacattgctacattacagttttaacatatcacagtgtgttagctatatgtttgctttattgtcacacttatgacattgcaactcgatttttaggctagttgtgccacacagaacgtacttttatgtttttttttcacagtttatctaatttcagttgtggcaagacgccaaccaaacatccaagaagaattcaccacgtttgtgcggacatcaggcacggcgtcctgaaaggacggcctgaattgttcatcaccgggaggcaaggacgatgatgcggcttgctggtaggcattggttgtgtgcccctgctgttgcctgttactcctcatagcctgtcggtactattgcactgggcactggctgctagtctgctacagtgcggcacgatctcctccccgatcttagctacagtaattacccatgaaacattgatatctcgtacaagtctgccccaaaacagccggttcatcattatgggtgccttttctgtccatccatgtttagaagagtcctgcatatgaatcaatatcatcccacttccaaaaacaaacacatgttttatagttattttatatatttaagagcggagtgtatattcggtcctaagcttgtatgggtgtatcatcgagacccctaaacattttcaagtttctatattgatcttcgacatcatataggtccaaacatgttccaatttgctttgtacattgacatggcatgcaacaatattttctacgtattagtgtgacccacgtaacattcatataggaaaaaaaacatattttcttctctctaccttaaaatttttaaaaatgattttttattttctttgtcttttctcctctctatctaacatgagaaaatatgtttttaaattttatttttattttagtgggtcctactaatacgtaggcgccaccgtggcatgtcatgtcaacactaaggatatgtttggtagcaagttttcccaactcatctttctcgtgttccgcgcgtacgcttttcaaactgctaaacagtacattttttacaaaaagtttttatacgaaagttgcttagaaaaactacattgatccatttttgaagaaaaaatagctaatacttaattaatcgtgtgttaatggaccgctccgttttccgtgcacagaatacttgttcccaactaatcctaatgaacacagcctaagagcgggttgatgcccgtttagatctatatggcactaagacaaattcaaagacacgaacatgtgttttgagaatttgagaatttagggttctagataacacacctgtacaaatttagagcccgcaagtgtacttaactaaaatatatacactcttgttcatatcaatatatctattaattattttattataattataaagacaactcgaaaaggaaacaacgtatttgctatgaaggcttgaaaattaccatattaatcgaaaaaaatctaagccatcattagatcgtagcgagacataagtagacactattataactacataaaaacaaaagaaaaaaaatgaacattaaatttaatcatactttcaatatctaattatacttttatatgtaagagttgcataacaaattcaattcaataaatttgtgcgccgcagtttttatttaagtttcgctcacgattaggcggaccagcgagggcgtgaaaagctacgagaaggaaaaaaaaaagagctactagtagtactaataaatcaaagagatgatggcataattaagcagcgtgagctgtgacgtgagctgctctgaatctctgattttatcataaaccacaatcccgggcccacccgtcatggaccatcaaataaccgatctccctggcccatgggccccgccctcccagcacggcacaaccc

SEQ ID NO: 30361 - DNA, 964 bp, Oryza sativa
cagcggtggcaacggtcgagtgggtgggtggcggcgcgtcgtctcctcactctttgtccagtctccagttcacgagagagagaacgcgcgtctctcgctgggagagagagagagagagagagagagggggggggggggggcggcggccgggatctgagggaacacgagtttttcaactcgcggagcggcggggatgtgcagcgttgtgtgcttgaggggaggtagtgggttggggttgggctttgatgttgttatgggctttgtggcctgtgggctacgcgaacttggcagtgggggcatgaataagttcactttagatctcttaatttgtcgctgaatctgaaattcatgcttgaatgcaaaaaccaggtatagcgtatttcccatcttacaataccgtgcaaacaagttccctcggtagtattgtgctcggttttaactgacgtgactcctttggctaagtcttcgtctcacatgatattgacgtggcgcttacgtggcaattggatcccgaaaaaataattaaaaccatgggacatacatttcatcctcgcttgtggggccacatgggccacaccaatttttattattttgtgtgtagctgacatgcgggggaatggtgacagtagtggcgatatatagagaaacagacaaggagagtaatggtgatatggaatcaaacaattcatagttttggtgatatattttaaaaggacatgactacgttgaaaccgcaagttatattgtcttgaccagagattcatcttagagctggttgcctactagtataccaaattatacatatctttttttctttttacagttttttattttaaattacttatacccgatatataatccaattataccattgtgttcattgcaattaaatctttacaacaggattttacattactatgttttgatgaaagaaatgtctatgttgtaaattacttttattata

SEQ ID NO: 30362 - DNA, 1081 bp, Oryza sativa
cgtgtgctctctgcaaagcaccaggtggagtggagggatgtgtggtgttttgggtttcggctggagccgtcgcccatcaggttctcctcgtgggcatgagctttcgttcacaggtggtgtaccagtgttggtgtagccgcagtcagagtgggtgatcgccgagatggggtctatttggttgtctgctgattgagaatgtgcatactgcagctggttgaaaccgtcagataccagagcgacatgcgtgtttatcttgcctttaggctttgatactgatgaaatgtgagtctgatcctagagatagcataacctgcatgtggtcgtttgtagcgtggcctgcaggaggtcgtttgtagcagctgggataccacgggcaagggacgagctgttggctttttgcaaacgtgtagtacatccattcacggtagagccagttaggccagttaggttcagtatagagagattcacatcagtccttgatgtggactagcttcatgagttgtgaaactctagagttgtaataaacagtggtgtgctgatggatctagatggcatattgatgatcgaatacaattatacagcagtagatatatattttgagttgcctttgctacgtattgtgattctggtagtgtattcatcctgccaatgattcctcataatacccccaaaaattgtagggatacagaatctgcagtgacatgctgattgaatggtgaaaaatcaagtttttttgattatttcattattgcagcaagcagcatatctgtgtttatattgcactgagcgaaggaagctgtatacatttgtttccccttgaaaaggaatggagtctataattgaaacatctagatagctatccaatatgaatcctgttctacatctagcctatagtttcggtctcttagtttggaattacattaataagataagatttttgagcttcaacctaccataataagcctatagtttcggtctcttagccttgctgaactttatcttacaattcttctatggggtggggattttcaagagaactgtattgaatagcaagttcaacttcaacataccgtaaatccaa

SEQ ID NO: 30363 - DNA, 964 bp, Oryza sativa
attcctgcaagccgctgctcccataaggccgtaactcgcttctagttgcaatacccgcatatattttagattatatattatcttagtttgcatgtttatgtattaacccattaactttgactaaaatctgcgtctgaaatgttgctgcgaaatggctgtcgtttaaattagtccatgaagagctaccaccaagtgagattctctcgctttggcttacttagtaaaccaatttgagatagatttggagcatccgaggcagtaatatgtgaaatttgagatagatttggaggcggtgtgcattgttagctattacaaaccagttgtaaagactcttaaaactggagcatctaagacaggagtgtgtgaaaaaaaaattgattgaagagtttttctcatgctggactgtaaagactcttaaaactggaaaatctgagacaggaatgtgagattaaaaaaatttgattgaagagtttttctcacgctggacggtcaacaaaaatgtgtgaatacttttgattgaatagttttgactcatgctggacgatgaacattagttaattaagagttgttggttcgtatactgccaaaatctcttcatatagaactatatgtcaaaatctatcaaaacaagcatctatatgcttcgcaatatcatcaacataatggatgagcaagcaagcaatcaatctcaaaccaaatgaatgcctcaacaagcgatcaaacctcatctagtgtgtaaagcgcccaagggaactccagtttaggacaatgcaggcaagaagacctgaagattgactgcccgttgctaaaaaggaaaaagtaacataaaacactgacaagtgaagagccaggcagaacacattttgatcaatatccaaacggcagcttctcacataaataagataaccgatagctccaggttgagaaccaaaaaccgaaagaaataggttctttgagcggagtt

SEQ ID NO: 30364 - DNA, 4343 bp, Oryza sativa
tttttagctatcaaaccacactatgaataatactgaatagaccatatttttaagatatacctcgaatatccaatctaattgttgctatattaaataattaaaccaacaattccttatccataatgtcaatagggattgaattaaatcaattagagagaatctaataaatttgtaaaaaaaaattggaacgacaattgtatgttccattgccataaccatgtttagtattatgagtttctcatatattattgcatatataagacatactaaggcagcatgatgtagaagtacttagttggttaaaagagttatatatatgctactatcagctttaaatttaggactcacattgactaggtattgtttttaaaagaacactataaatgacatatataatagggaaacgaggcgtacaatatatatgtctcttatgtatttattgactcaaagaaaataacgaagatcattgataattgcttatagtaatgaattaaatattatatagttcaaatcttataaatatcttgtaaaaaattatctaagcaatatcgatgaagaaaatttataaagaaatagtactttaatttcaagcgtagcaggtgtcattcgattaatattctaccttacatgttactcaagcgtaatctactttacatgcccgcgcaaatgcgtgggctaccttcctagttaaattattaaatgtcgtgggctcctttaacctgttgttcgaatttcttttttatattccaatgtgcccttggatacaataaaccaatactagttcagtagaatgttgtccttcaattattgttttcaatgcaagttttagatacgaaaatgccagtcaagtttgtcgtaataaatgatttcataatcataaaattgtaaagattttcccctggtttatgcaacataattttgtgatggaagccgcagtaccgtatctttgttgattctgaaaggtaaacggcaactctctctttcttttggtgacaaaagattgtatgaatgaaatctctgatcagttaagcggatagtgtttcttcaaaaaaataaaagttaagcggatagtcttcgttgaaaaaaattttaaaaaaacatgaaacgaacgaactagtcaagcccatagcaatccgtagtgttaacttctccgaaagtcaattatgaaaaggctacgctcgtaggagccacgaagcctcctcctcttctcctggatttgcctttctttgggtccccgaatgtcgacgacctaaataattgaccaaaccatggcttcacctaaacacttttgaacaagcaagcgatcgatcgatttggaatggattgttcagccatccatctctcttggttttggtcctagtcgttgtactacagccgaaagtaacgagtagttctcttccctctcccttgcgtatgcacttacatatgtactctcttttactttctttttaggagaaaaaaaaagaagataaggcatttcgtcgttgaatctgtgcagtcatctcggattaaatttgacgaaatacatcgcaatactatgtttggatatacacaaattgttgagtaaatctataagccaaagtttttctttaaataaatcaaacaataacatccggtcatgttgatgccaacgtttgtactccgtacacaaattggcatcaacatttagtcattatgctcggtacatttttacacatttgtactgtacggagtacaaatgtgtaaaaatgtgtcaaacatgctaatgttttagtgtacggagtataatgacgtcatattgatgccaatttgttatttatttttttaaaaaaatatataaaacaacatttttcaacacaaactcttgtctttttccttccgctccctccgtcctagaaaaacaagtattggatgtaacacattctaatactacaaatttagatatacttctgtacagatttattgtactaagatatgtcacatccagttctagaattttttttttatggaaggagtatatagtagtagagtttttttccccttgcaggctgtgtgcgtggtattgttctccatggacaaagtatttcaatttttaaaacgacttggcagagtgtgttttatttcatagtgtccacatggcaacttctgtgatacactacaaagcagtacgttgactgttttcagtcgactttccgtcaccgatcgcagctgtatattcgctcgatcggaataaaagggaactggaatcgaggttagttaggaccgggggtgttggccgacgaatctgcactactgatctccaatctccactgacttttgtcttaaactaatcctcttcgttctcctctcacggtcagcatcaaggctagctaagctaaaagctacagccatgttctgaggttgcaacatggcgatcaagctagctagctagctgcatctaaggagattattacgaccgatattagctagctaggcaaggcaaggaggaaagcaatgccggccggtgggtgggagctcaagggtcaatgtcaggaaataattggtgctcgagatcgagaggacgaacaaaatcgactaaacggggaggtttaacaggtgatgaagcaagatctcagtaggtgaaattagctgtttaagctatagtagctagctagctaggaacagcgtgggcgtgccgcgtgcatatgcgtgctgatccgatgaccaaagaaccaataatccgcgatgtgtgtgtggtagccatgcatatgcattgacatgtaagaatggtcaatagtcatctctaatagtcatccatgtctaactgaaaaaagggcggagctaagaaactatgacgccgagctgatgtgtttttgactttgtctatcaggggttgttcactttgtttctaaaattaacaatctaaacattgtcaaaatcttcactatcaaatctctcattcacgaaaactttataaaagtaacaaactaaatacaacctacacatctcaaccttggtaaggttgatttaggcatcaaagcataaacaaccccttattacattcgtcctaagatataagcatttttgattaaaaaaaatagactaggacatttctaactacgaatgtagacaatcacttgtttatatttttttttctatgcccacacataactacgaatgtagacaatcacttgtttttattttttttctatgcccacacatattaacaggaatttagtgagattagtaataaatttctgatttttgcctctcgaagcatgtattagggaacacatttctagggtaggggcgggtgtcgtgttacgtgtgtatttgtgtgtgtgcatatgatgtctcctgtataatgaagtactctttttttatatttcggaacggtggaagtaagatttttctcagtatgttgatcagattttatttttcagattaacttacccgataattagtggcaagtgttacgttgtgatgtcaattagtaattaccaccttttttctatctcaatgagtccttttaggttgttgggttgatacttgtgttttttttaatcgaaattgaaaatgacttgtcagttgtaaccctcatagctgtgactacaccagcaattattccactcttttaaaagttggtagtttttctttattatgtatgttttataacccaatgtcatggcacatatacacacattacgtgtctggattgctggcttaatgcgtagtagatgttttctttgatttgtatatgacttttggttgcaacattcctgacaaaggactacactaacaagtaaaccacgcttttaggaaaaacaatttcatcttgtattttattcctttgtggactaatagacgacatgtctacattattgtcatttttctttgaaagtcaatatataatttgacaccttttccgcccaaagaataaatactactacaaaattttctcatttcggttgcgacctgaattaaattcccaatggatacaggccggaagcttcctgatctgcgataattaatcctcatcacgacatcgtagccagccgtctctgtacaaatattgatcagcaatgtcgtgagcaacttacgactaaaaaagcgaccattgcctgcatcattaggagcacgattgcgcaacatatctaaaacctgccatatcatattaacacttaacgtgagtcacgacggaattaacaagtccgtcttttggaggatctgtatcgtccaggattttattcccccgctctttcatatggcccctgcaatccaatctaaacacttatttgtgtacatcggcacatataatttgctagctccaaaagacaggcccattacttaatttgcacatcataattaaggcgcaattaagtata

SEQ ID NO: 30365 - DNA, 7817 bp, Oryza sativa
ccatgcccgacccgatgcccgacattgcccgctcaaaccctacccactagagttagcgggcaaaactccgtgcccgtacccatgtctggcgggtgcgggtatgtctgacgggtacccaatggatctcgcatgaataataacttgaaagatatgtaatttaacaaagagaaataaaattaataatttaccaaattattggttatcaacaataatttgaattacatcacaacttagtatcagttagcatcacaaatgaaccgagagaaatggtataagaattaagaaatgagtcaaaattagctaatacatatgtatcaggtcgggcatggattacccacgggtaaaaaaatgaaacccgcctattgcccataacgtcttcgggtctcggacggacgtgcccatggataaaaaatcattaccacgcccatgcttatcgggtacccgaacccatgggtaaaattgccatccctaatagagtctccaataaagggaacatgcacgaaccagatttcgtgaagaaaatactccctgtgtgaggctgagcgtgtctccagtcacacaacaagtttgggggtttttctcaacttatctattatatactaaaaatccattaaacttcctacaaacgctcttaagccgccacgtgggattcctacaaacgcttctaagctgccacttggcgttctaatacattagaaacatctaacccttgattttcatttaaagattttcatttaaatttgtaggtctattattttaattattttagaccattagattagattaaattaaaaacagaattaatccctccctgacgtgtacgtgtatctcgcacgtacgtacatacttgattcctctttttcctccccattcaaaacgctctcaaagccgtcacgtgggatccttcctacaaatgcttctatgcgcgttctaatacattagaaacatctaacccttaatttttatttaaatttataggtctattattttataccattagattagattagattaaaaacagaattaatccatcctgacgtgtacgtgtatctcgcacgtacgtacatacttgattctctttttcctccctccccccccaattcacctctttttttattttttttactagatataccgccaaaatatatttatatcacctccaatttctacactattgatttttgatcatatgttttatcctaagccgctacgtggcactcatacaaacactcataaaccgccacgtgtcactttctaatctagccgtcgattttcactgaaattggtggacccactattttagaccattaaattagatctatttaaaaaagtctcagcttcatagaaattatttactaaaaaaataacgtacatgttatctaaaaaaaccaaacagacatcctgacgtagcaagatgaaaaagccaaaaaaaaccatatgtacgctgtaagaacaatacggtctttaaaatagcatttcctatattctacataaaatttattactccacaaatatgtacggttaatataaaagtaccaaatcagctatctttaaatgctcatcttttaaattatttttcaaaaatatatctaacttataatcctttgtattttttaattaaataaaatactgatcacttataatagttatatggaactgctaaattcattacgacacatggtgccgacatataatagtccataaaacttcctacaaacgttcataagccgccacgtggcactttctaatctaaccgtcaattttcacttaaattggtgtacccgctattttaaaccattagattagatcagcttcatcaaaattatttaccagaatcaataacgtacatgttctcctaaaaaaaccaaacagacatccttacgtaaaaagataaaaaagccaaaaaaaaccatatgtacgctgtaagaacaatatggtctttaaaataggatttcccatattataaaataaaatttattactccacaaatatgcaccgttaaactagattattaatataaagtaccaaatcagctgtctttaagtgctcatcttttaaattatttttccaatatatatctaacttataatcctttatatttttttaattaaataaaatactaatcacttataatagttatatggaactgctaaattcatcacgacatatggtgccgacatataatatgtaatgtcataattatttttcaaataatttagctaacatataataattaatgtcatgatcatttttaaaataatttcacttggtgtcaaatttgcttgacaaatatataacactaattcatatctacatgaagaaaaagtgaaacaacattgtggtttacaattagatttgatttaattttaatttatgtgagattaagattatcttttcttaaaaaaatttagaactatttgattggaatttccaggcagagatcttgctataatacgaccccttaatccatcacgagaattatggtcatatatagtttttctttcgaaattggtttggtaacaaatgaacaatcatgtgcattaaactattcatcatatatgttttatcgtttagaaattctaatatatcgaacataattgatgatgtatgtcatacaccccactgaagtgactataagtgtactccaacaaattagttactttaaatgattttgggaaatatattcttagtaaagatgtcacatgtaactatgaacaatacatgatgaaaataaaccggacgctaaacaatatatcttagtcaaaatataaagaatgatatggtactcgaagattgtcacggtcatatgtcagtatagctatatttttttattaacctcgctcattttgaaagatagtattgtatctacacagtaaaaaaaataagcattaccgattaataccataaacaattttgtctacacaaaactttttaaaaaaatcattcgaaaaatattttcatcacctacattccctcttttttttccttaaagggcaccaagcatgctatgctagcacaagtatagcaagggtcatacatatggatgagttgaagccgccccagcagaagaccactattgacaataatgctttactttgtaattactgatgctattatctatgagggtgctgatagtgaactagaaattgaaattatgcttcatgctgatattgcagcgcatgactatgtcgacttagaacctatgtttaaaggtagtggagaaataaagcctcgacggatatggttggcttcacttattaaaggggacattcatatctgattttaactgtcgtcaaaattacaaaaaaaaaccttacaaattataagaaaaaaaacaaatgatcgtcggtttgcttaaattatttataaaaaataagaaaaataaagtccccaaacctcgtcctccccggcacatgcacacaacattgccggtccccttcaaccttggctcacgctctccgctctccattcctcccccttcctactttttagctatcaaaccacactatgaataatactgaaaagaccatatttttaagatatacctcgaatttccaatctaattgttgctatattaaataattaaaccaacaattccttatccataatgtcaatagggattgaattaaatcaattagagagaatctaataaatttgtaaaaaaaaattggaacgacaattgtatgttccattgccataaccatgtttagtattatgagtttctcatatattattgcatatataagacatactaaggcagcatgatgtagaagtacttagttggttaaaagagttatatatatgctactatcagctttaaatttaggactcacattgactaggtattgtttttaaaagaacactataaatgacatatataatagggaaacgaggcgtacaatatatatgtctcttatgtatttattgactcaaagaaaataacgaagatcattgataattgcttatagtaatgaattaaatattatatagttcaaatcttataaatatcttgtaaaaaattatctaagcaatatcgatgaagaaaatttataaagaaatagtactttaatttcaagcgtagcaggtgtcattcgattaatattctaccttacatgttactcaagcgtaatctactttacatgcccgcgcaaatgcgtgggctaccttcctagttaaattattaaatgtcgtgggctcctttaacctgttgttcgaatttcttttttatattccaatgtgcccttggatacaataaaccaatactagttcagtagaatgttgtccttcaattattgttttcaatgcaagttttagatacgaaaatgccagtcaagtttgtcgtaataaatgatttcataatcataaaattgtaaagattttcccctggtttatgcaacataattttgtgatggaagccgcagtaccgtatctttgttgattctgaaaggtaaacggcaactctctctttcttttggtgacaaaagattgtatgaatgaaatctctgatcagttaagcggatagtgtttcttcaaaaaaataaaagttaagcggatagtcttcgttgaaaaaaattttaaaaaaacatgaaacgaacgaactagtcaagcccatagcaatccgtagtgttaacttctccgaaagtcaattatgaaaaggctacgctcgtaggagccacgaagcctcctcctcttctcctggatttgcctttctttgggtccccgaatgtcgacgacctaaataattgaccaaaccatggcttcacctaaacacttttgaacaagcaagcgatcgatcgatttggaatggattgttcagccatccatctctcttggttttggtcctagtcgttgtactacagccgaaagtaacgagtagttctcttccctctcccttgcgtatgcacttacatatgtactctcttttactttctttttaggagaaaaaaaaagaagataaggcatttcgtcgttgaatctgtgcagtcatctcggattaaatttgacgaaatacatcgtcaatactatgtttggatatacacaaattgttgagtaaatctataagccaaagtttttctttaaataaatcaaacaataacatccggtcatgttgatgccaacgtttgtactccgtacacaaattggcatcaacatttagtcattatgctcggtacatttttacacatttgtactgtacggagtacaaatgtgtaaaaatgtgtcaaacatgctaatgttttagtgtacggagtataatgacgtcatattgatgccaatttgttatttatttttttaaaaaaatatataaaacaacatttttcaacacaaactcttgtctttttccttccgctccctccgtcctagaaaaacaagtattggatgtaacacattctaatactacaaatttagatatacttctgtacagatttattgtactaagatatgtcacatccagttctagaattttttttttatggaaggagtatatagtagtagagtttttttccccttgcaggctgtgtgcgtggtattgttctccatggacaaagtatttcaatttttaaaacgacttggcagagtgtgttttatttcatagtgtccacatggcaacttctgtgatacactacaaagcagtacgttgactgttttcagtcgactttccgtcaccgatcgcagctgtatattcgctcgatcggaataaaagggaactggaatcgaggttagttaggaccgggggtgttggccgacgaatctgcactactgatctccaatctccactgacttttgtcttaaactaatcctcttcgttctcctctcacggtcagcatcaaggctagctaagctaaaagctacagccatgttctgaggttgcaacatggcgatcaagctagctagctagctgcatctaaggagattattacgaccgatattagctagctaggcaaggcaaggaggaaagcaatgccggccggtgggtgggagctcaagggtcaatgtcaggaaataattggtgctcgagatcgagaggacgaacaaaatcgactaaacggggaggtttaacaggtgatgaagcaagatctcagtaggtgaaattagctgtttaagctatagtagctagctagctaggaacagcgtgggcgtgccgcgtgcatatgcgtgctgatccgatgaccaaagaaccaataatccgcgatgtgtgtgtggtagccatgcatatgcattgacatgtaagaatggtcaatagtcatctctaatagtcatccatgtctaactgaaaaaagggcggagctaagaaactatgacgccgagctgatgtgtttttgactttgtctatcaggggttgttcactttgtttctaaaattaacaatctaaacattgtcaaaatcttcactatcaaatctctcattcacgaaaactttataaaagtaacaaactaaatacaacctacacatctcaaccttggtaaggttgatttaggcatcaaagcataaacaaccccttattacattcgtcctaagatataagcatttttgattaaaaaaaatagactaggacatttctaactacgaatgtagacaatcacttgtttatatttttttttctatgcccacacataactacgaatgtagacaatcacttgtttttattttttttctatgcccacacatattaacaggaatttagtgagattagtaataaatttctgatttttgcctctcgaagcatgtattagggaacacatttctagggtaggggcgggtgtcgtgttacgtgtgtatttgtgtgtgtgcatatgatgtctcctgtataatgaagtactctttttttatatttcggaacggtggaagtaagatttttctcagtatgttgatcagattttatttttcagattaacttactggtttatatgtcgttaatcgagcatataaacatacactaattagtggcaagtgttacgttgtgatgtcaattagtaattaccaccttttttctatctcaatgagtccttttaggttgttgggttgatacttgtgttttttttaatcgaaattgaaaatgacttgtcagttgtaaccctcatagctgtgactacaccagcaattattccactcttttaaaagttggtagtttttctttattatgtatgttttataacccaatgtcatggcacatatacacacattacgtgtctggattgctggcttaatgcgtagtagatgttttctttgatttgtatatgacttttggttgcaacattcctgacaaaggactacactaacaagtaaaccacgcttttaggaaaaacaatttcatcttgtattttattcctttgtggactaatagacgacatgtctacattattgtcatttttctttgaaagtcaatatataatttgacaccttttccgcccaaagaataaatactactacaaaattttctcatttcggttgcgacctgaattaaattcccaatggatacaggccggaagcttcctgatctgcgataattaatcctcatcacgacatcgtagccagccgtctctgtacaaatattgatcagcaatgtcgtgagcaacttacgacctcgtcccttccgacaaactcttgtctttttccttccgctccctccgtcctagaaaaacaagtattggatgtaacacattctaatactacaaatttagatatacttctgtacagatttattgtactaagatatgtcacatccagttctagaattttttttttatggaaggagtatatagtagtagagtttttttccccttgcaggctgtgtgcgtggtattgttctccatggacaa

SEQ ID NO: 30366 - DNA, 3808 bp, Oryza sativa
ggactaatagacgacatgtctacattattgtcatttttctttgaaagtcaatatataatttgacaccttttccgcccaaagaataaatactactacaaaattttctcatttcggttgcgacctgaattaaattcccaatggatacaggccggaagcttcctgatctgcgataattaatcctcatcacgacatcgtagccagccgtctctgtacaaatattgatcagcaatgtcgtgagcaacttacgactaaaaaagcgaccattgcctgcatcattaggagcacgattgcgcaacatatctaaaacctgccatatcatattaacacttaacgtgagtcacgacggaattaacaagtccgtcttttggaggatctgtatcgtccaggattttattcccccgctctttcatatggccactgcaatccaatctaaacacttatttgtgtacatcggcacatataatttgctagctccaaaagacaggcccattacttaatttgcacatcataattaaggcgcaattaagtatagacgatttgaataatcaaaagatgactgaaccgtactaccctgttcgccaaatcaccagtctcccttcagattactgaataaacgctgtgcatgcatcagtctaattactaacttagcttggctaagttaatttggactagagcattaaagcccggcgattcgattcgggtcagtcaatatattctatcctgttttccattcacgctgcagaatatattttttttcttgtgatcttccataagagaaaagaaaaaaaaggagatcagcattgcgagtttttgaactttgaacgaacgggaagcaatgcatatataataccagaattttggacctgttaactttaatgctattttcaactatatcattttttaataaaattgtcaaaaaaatgtctacgtttaatttgttgctaaatttagtcaatacataaaaatatcctactaaaattttgataaaatgacaatattattaaaattttagcattattaaaacttgttaaggtttattttgactatacctgaacagcctcagatggacgatggatcgatccagtcccggggccgcggggcatcatccaagctgccgcccggtttggaagtcacgggcttgctcccccatctgcaggtggcgttgggctgcaaaagaagtttggggggttttgttcggcgcgctcgcgtgcaggaggctgacccggcggcggtgtggaatcgtgcgtggattgggcgggcaggtcaatctcggcgaagtggtgcggtctcggcggtggaaatgtgctttttgacccggcctaccgcagcgagcgcgagcggtagcggtaggctcgcggtggcgcacgggcgcgcggcgccattttgcggtgaaaaggagggcagttttgcgggttgggttcagttggtcacatcaggtttggtctgggccggcgcgttacgctgttcgcgtggtagtagagttatactgcttgccgtcaatcggtttggtagacactggacgtcgacacctttggtcagaggagtggccgcacgcttgttttgagaaaatatttgattttccactgaccatgggaaaccgtatcaattcgtactttctcttctcgtttgtagtagcatttttttttcttgtgtgtatacacatgcggcagaatagagaaaaacagaaagagaaaatctggcgtagccagccaacagaagtcagaaggcaagcttggaattccacatcacgttcatccacggtgttctgaaaaataataggtgcatccacagtaataatccaaaggagcagggccatagtgagtagtattacaacaatcagttttaccctggccaggtgtgttctgagataatggtttgtttaaggagcaccaaactaaaagccacgacagtgatcgaaacacaacagtatagcaacattggcctgcgtcgatctagagccaacttgcccctaatcaaagagggggctaatctatctaagaatctattagaaacccaaagagacttgaagatcattatggacgcattatcctggattaaatctggtatccactgcccactagggctctccacttgccggtggggggctgcaagagggagcatttttctgctgctttttgctacaatgggaagtgggcaagtgacctgctctccctggaggtcaagagatcttgcttaggcttaagcctagtttcttctcccgacagctcaagctaatcaactaaactacgtgtgtctatgcggtccttaagaaaaagaaaagacgctgtgattaatcatgcagcaacttgaccactgaatcatgcgacgggaagagatcaccacgagctagcgccatcagctgggaacgagatgcatgtatgtgcagtactgcagtgcaaaaaccactgcgatagctgcttgttgtctgtactttactgtacaattcactattgtcggtcacgtttagcggcggccggtccggtgctagttttctcctatgtctgtgtgatggcactgttggtatatgggtggtggtatattattttcgtttttctggttacgatcttcaaacattgtaatcttataattttttcctactctatccgtgtgacattaaaaaaaaaaaaccactgtcatagctgcttgttgtctgtactttactgtacaattcacaattgtactggctagtggactggtagtacaggagagaaagaaaaggacaaaaaagagcggagtacgaagctctgctccagctagctagctcgacagatccattaatatggttttgacatgcatttgattggttccaagtggaagaaaagaaaagcctctctccagtgatccgggatggaagggaggagcgggtctctcaagaaggcaacttggattcatggcgagttggcgctgcgagtttaccgggtacgtgaagaaggtcgccgccgacgcattcgtcgtgcttaattagctaacatgctgcttgcagcattgctagctgttttggcaaactatttttcaaccggacttaatttgcgctttcccctttataggcactaaggctttcttcgagcacgagttcggaacttctcccgtcacacggaaaaaacgagataactcattagcgaatgattaattaagaaaaacttaaaaaataaaaaaaattaatatgatttaaaaattaaattttctatagaaaattattttaaaaaataaacagcttagtagtttagaaaatgtcgtacgcgaaaaataagagagaagatgggaattataagtgccaaacgtagcctcagacaaggagaattatggcattttaattacagggtacagagagcatatgcacatcatcatactcaacacgtacaactgtcgtctgtagaaggatatcatatcaccatctcatcatcaaaacaaaacaaaagaaaataatttaatatggcaaagagtgatggcccaccactaaagcccaagaatacacagcttctacgttgggaataagttcatctgaggtcccttaacttgtcaacgaatccgattttcgctcttcaaccgaaaaaccagatacaacagatccctcaactatcaaaaccggtgcagatgagatccctcggtggtttagatggcggttttggatgacgtggtgcctacgtggctaatttgactcggtcttcatctgatgtgaactgacgtggcaatttaattcagaaaaataataaaacccgtgggacccacatgtctggtgggacccacatatcatcctcagtcctcccttctccctgctatcctctccctcttcttccctgcaatgtgg

SEQ ID NO: 30367 - DNA, 2393 bp, Oryza sativa
aaagttagttgagattaaaaatgtcagttgagagttgagatcaccttgcaccgtgggcaagcgaatttctagacgtgtggctccatgccacatggcacactttttctccatgaggtcactcgtaggagtggcctccgttgtgaatgtcctaagaaccgtaatgtttattaagatcctttttgttactaactgtttacatgctatctagaatcgtcagtgatgggtgttactcatgacaaaaatgggataattttttgccatccctagcttgggttttgcttggaagactaacattttgtctatatatataagacattattttcaccatccagctataacagaatcccctcttgcctcaacccaaccaagatgtcattgcactgagaccatggaaatcctatatatatatctataaagtatatccccaccatttaatgttaattctcttttttctcatgaagtcacatcatcttaattgtttttagtctttgaatgattcatcaagggtgaaattacatatcttctcccaaagagccactcatacatctcagttatttataacgacccaggtaattattgatcaaggtgtacaatttataaaaatcacttataagaaatcatatagtatagtaagtaagagaaaacaaatatgactcatatctactatttgtcatataattctcctgcaacaacgtatgagattcccatctagtagatatgagtcatatttgtttataaacccacaagagtttgacacaaggccatggttcctgcttttgtaaagaagccatggaaatcaccatgatgctaccttcacgataagacttttttttgtggggcgtttgtatatatgcatgttagggggagggggtggccacaaaagctacactaggaaatgtgagacgatagaagagagaattggggaggaagattgaggagtcacaatgacttcctattttaaatggcaacttcagcaagacaaatagaaaataaaaattttgcaagggttttcacatagtttttttttagaactgttagctggggataattactaagggttctagctaatgaatatctacactaaatattgatggttacaaagtagaaaacctagacaccatctttagaactctgtcgtctttgataattgacatatatgatgttaggcttccttttcctttcaatatacttatgtttttattacacggaagagacacaccgcattcacacatctcggaatacatcaccccttaccacatgctaaaagatgaaaactaatggcagctctccaacctcattaaaatcctattaaaagagcagccccatgtgcataatatttattaccatcaaatttcaactgtggttttctttaaggatatatctgtatacataattgttttttagatacatagaaaaccttttctgattgtgcgactttgctagctgctaaatttgaagtgggttacgtcggcattagttatacatgtttttaaatattctcatacacaacatctaagataaaggctctaagaagtgggttctagtttttttttttaccatgcatgcatatataaccctgttaaatctagagatcaacagtttactttaaactataaattctttgttgacaacagttggaaaaccactacacatagctagatcgacttccctagaatacacagaatgttactgttagtactgaaacaagaagccaacaaccggcatttcgttcattttgacagctgggacattgaactacagtgaatgtagagaacaaattgccatttccaaagaatattatcgaaataaaaagagtatatacatatcgcgatgtctgctactagctagttagcaatgcaacaaatgcaagtagcaacaactgtaatttatggagaacaaactccatcctctgttaagaacaaattaaaatagattcttactgcctccctgagaggccatccaattcgctataatcaactgcatgctttatgaatgcatgcgcacctgaacctaattcagaagccgggaactgatcgaccctgttctttcagtaattaataattctcatttcatcaccaatatcagcaccgtttgccgacaagcgacgattaatcagccctatcgatttcactctctgaacttttagtttttgtcaaaaccgcggctagctgatctggttttaattgttccaagttcagtccaagaagcatccccagcaacaaagacagattcgattggtctgggaagacaaccagcctgctttgcaacctatccatgcatcgatccctaaccttctccatgcaccaaccaaaagtcaatatggatcgatcgagatcgagagcatcagataaatctcctttcgatcatttcaacattattctttcttcaatttt

SEQ ID NO: 30368 - DNA, 902 bp, Oryza sativa
ccatcgtgaactatcattaagccatcattaaataatagtgaattataagttatcccaatagtgtgctaatgtttctaagcatggctaagcaatcgtatctaatatctagctgaaccaatatataaagcccaactagtcaagttataataacccaaggtatcaaggaataaagtaatcaagaacaaaagggctataacaaacaataggttaattccacccaatgacattcgaaaataaatacaatagttgaatagaaacaatagctttaaacgggatcaacatgctcaaagggttgtttgggatctgtgtgacttgccttgctggccttggaactcttcaaattcttctcctgcgaaaacgaactctccggaaacatcggaatctaaacagaaaagagcaaaaacaccaaaacagcacataaacaagcatgaacattacatgtggatatttttaacatgtagatctcaattttagaaaaatttagagacttgaaccaactaaatccgagctaagatggattagttatgaattttcaaagattaaatcggattaaatcatttatttagattttaattgaattatgacgcaataatgaattatttttgaaaaggaaaagggaattattgcgtcagcggctagggttcgcggtggaccgggtgcacggcggcggctcacggaaacgaacggccgagatcgattcatccaaaacggacgaccgagatcgaccggtccacggccggaccacgggagacgacgacgatgacgtcagcggtgacgtcaccaccggcggcggctcgggcgtgcatgctcgccggcatacgacggcacgacagcgcgaacggagggcacctacgggtagcggacggcacggcgaactcaccggtgaccaaagtagcggcgga

SEQ ID NO: 30369 - DNA, 539 bp, Oryza sativa
  unsure (1)..(539): unsure at all n locations
ctaggctctcggccctcggttgtgccagcgggtatagctcactccaagcgtaattccggtttcaccaaataagggttaacccggaaaaacatttgagcaaaggccaccaaagcccgaaccgtaaaagccccgtgtggtttttttcataggcccacccctttccggctaaaaaatagccctaaatcaaagcgcgcacccgcacgactttaaaaccatggttccccttgaactctccggcgctatatacaacacgcgcatacaaaactgtccctttacctccgaaaggtcgctttactacccaccataaatctacccgctaagagcacctcacaagaatggtgccaacacccctattctctgccgggctatacgaacatgctttgatcatcggaactcctattacagcttaaccgtggcaactcgacnggagataatgctctcaatcttacagcgtcctcgccacataaaacactggtctccttcaccaccactccaacatattattcgcatacaacctattctgtgcgctgtaatccacc

SEQ ID NO: 30370 - DNA, 2995 bp, Oryza sativa
gggggggggggggctcgcgtctctcgcctcccactccgcggcacggcttttggagcccgagtctggccgagaactcacgccaagatccgatccggcaaccggctaaaaacaaacgtagtacgagcagtgacgcacgcccaccccacccgcgatggtagcagctcggctaaccccttccacactccacaccagcgcaacgacggaagtgtgtgacgcggatggatgtggtagtacgctgtagcatgtactccctccctccgttcttaaaaaaaagacaaaccatgttttcgtgtccaacgtaaattaaaaagacaagtcacgtataaaatattaatcatattttatcatctaacaacaataaaaatataaattataaaaaaatttcatataagagagacagttaaaattggcaaaaaaaacccagagtttgtctcttttttttttatggagggagcacgagcgctcactgatccggtcaaataaatgtttgtgcctttgtttatcgccttgtgtagggatacggattctaggcctctggaccacagtgggaacgtccgaacgtgaattggttaaggctgtgtttagttcacgctaaaattgaaagtttagtcgaaattgtaacgatgtaataaaaaatttaaaaatttatgtgtgcaggaaagttttgatgtgataaaaaagttaaaagttcaaagaaaaattttagatctaaacacggcctaaccatcgttggcatggaagttgaaccgctcgtatactgtatacttcgactctgtaatgtgtatagtgttataactcacggcaacaagcttgagaaaatggaacaccaaatgtaaagatggcagaaaatggaacaccaaatgtaaagatggcttaattaacgggttgtgcatctgtaactccagaggtgctaagcgttaattatcaaccatgacgggaatgcacatgccttgccttgcgttgtggtccatattcccccggttcagtagtagaagatcacaaatttatttactgttcaaaatacacagccgatggcccccgctggagacgcacgcgtgacgcaagcggcgtgcacgcaagaaattttatgggaggagagtggtacggatgctgaagggaaaaatttctcatacgaattggcacgcttctcgaggctgccgctctgcgtgacgccatcctcccgtcgtggaacacggtttcgacagggcatggccgtcctttcgacagtgcagagcatgtactcctccgtagtagcagatccgtcgaaaacgaaaacggaaaaaaaaaaagaatgagtatctgttgcactgacccgtgggtcccactccatcgtatatgcttctaatcggcgtagctacagaggtggcaaaggagtagtagggtaccaagatactggtatactatggctgtgttgagatccaaagtttggatccaaagtttggatccaaacttcagtcctttttcatcacatcaacctgtcatacacacataacttttcagtcacatcatcttcaatttcaaccaaaatccaaactttgcgtgaactaaacacagcctactagtatcccaaatgggtttatatcatgtactataatgacactgttattatagacaccaacatgtgaggcaataggagagtagaagtgtgggacccacacacctacgctagtgacattatggtagaggatactcatataccccaaacactaccaagacaccaacacgaagagagtacgaacgctagtagggcgttcccagcgcgccttcatggtgttcgaactgaataatcaacaccatgttctccacacaggaaaacccgtgaagatcgatcgtgtagtcaaaactgatcgcccgttctttagcttgaaaaacctgtaaaaagcacatgcacaaatgactgggaagaggagagagagagagatagagtgtgtgtgtgtgtatgaaagctgtggaaggaatcgacagcggttgaagccaccttgacgagtgaagtcaacggggaaatggaggggctcgccggcccgatatgctgcgccgctggacatgatgactcaaagagcagccatatccacttgtccaccggaccacgctacaccgacctcattgcagagatggcatggaagtgtggaagggaggaagatgaggacggatccgtcatcgaccgcttcaatctaccacagagatgttgagcgtcgcggcgaacagcgaaggagaagagaagggtatgatgatggctgttgcaagctcaattatttgtcactcagtcaatccacaacctgctctcggttcatcgctattgggggagtgccggggggctgcctcctccgccaccagggatcgtgcctatcgcggccacccgctcgtcaccacctcagggagcttgtcgcccgtatggatcgaggcatcgctgggagagggtagaggttgtggcgcctgggagatagaggggagaggcagcaccgccaaggagcacatcgctggtgatgggttgatggaaggtgtagggatgccgacgaagtgatgaggagaggcgtagggaaagggagaggtggaaaattttatatttgtttttgaattttaggctgttgagtgtaaaaattggaccacttcataatttgaaaacatgtgatgactgagccacttgcactataagacaaatagatttaggtttaattggatccatgccatataaatatgctgatttagataaataccactataattcgtctattatatttataaccgtgatattaaaatgttacaaaatttgggccatgcactactgtcatgttttccatccatctcagtcttcatcctcatatacacataggacccatctgtcaaattcatcaacttcatttttcctcttatcttcttcttttttttcctctcagctcctcatcgtcgtctgagagaaagtacgagaagtttccgctggcgctcatctgctcctcggataccccatacgcgtgccacatgctggtccgttcgccac

SEQ ID NO: 30371 - DNA, 4340 bp, Oryza sativa
ttaattgtgattgatcttctcgtctgctagctggtaatgatatgtctgccaatcacccgaatcagaaatcgatgcatctgattcaattggctaggctcagatatatctccaaaacttattcaggactcgagttgaatgcacagctaagcagtagcttaacacttgcagcatgcagtgatgggaaaataagaaaaataaaatgagacttgtaataataagggataggtgatcgggcaagaagagcagaaggtgtgtatctgtgggtagtgaatgttcagagcagagaagacagcaggtcaatgtcccacccccccccccccccgccccaaccaaaaaaaaggttttttttttcagaactttatatcaaggacaaactgcatgaagtattgaggatacggatccgtatcatatacaccatccggtcataaatacttaatatttagaacaaaatttgacttgaaattttacagctagcactcaagagttactaagaggtacccgtagctcctagtaccaaacacaacgagaggtaaaatgtggcacctccagaccgtaaaatctctcacttacaaactttgactatcaattttgtattagaatatctaataagtttttataccatgataatactttttcaaggcaaaactaagcatatatactatttttttcctttttaaaatgagcattagaaaaactaatgatagttaaagtttcaaaagttctgactctatatatcatgaccattgtataagaccaaaatgacaaatctgagctaattatttattcattcatttattttttgcaaaacgtaagcacaaaagaaagctaattaaacactgcgttggtcactacctgatcaatctcatatcaacatacatttctgagaggattttactgtgcttgagaggtacccaggtacctcctaaatgaattaatatgcacctttgatttcgaaaggataatctagaaacaacaaataatattaataatggtagcttagtaattccttaaacctcaattccccatctgttggctagcagcatcctatactaatatgatcactaacccaatccatctgtgtctaacccggaaaaatatatggtgcaaagtacatatgtagtggaaacctgaaaactaccgttggatcgaaaaatagacgtctgatatttgtctatgtcatcacgagtaaaaattttgctatgagtaaaattttaaccgtgacattgacgaatctcggacatctatttttgatccaacggtaattttcaagcttccagtccactccagggtgcttatatagtcgcatcctttacaattagcacatcttcccatccggatccaccaaggcgaacattggcaagcctggcatgtgtggaacacgcctcactttgatcgggttcatcgttgtcatatttggtacagtagccgtaacacgtatccccacattctctctcttattctgccaggatacatcctgagtttccagaggaattatgcgccctagagcacgcaaaaacaacaggagctgaatcatgacatttaaatattcaaaaaagaaatccgccttattttgctcataatataattccagtgaaattccaaataaccccctacaactcactagtttttctatttccccctacaactcaatttcatacagaaaatcctcccaacaagttaatttatgtcctaactttaaccacagtcccattgtcaattatttcacctagttatttcaatttctagtgctgcatgggcctccagcgtcatgggacaatagtaactcatgccacctcgataggttggtaacttggtattatagaaattacagctggcgcacaagttgtgccatcgtgttctgccatcatcttagctcatatggggatttgggaaggcagatactgtaagggaggaaggaggttgtgagagaccaaccacaatcattagaaatagatgaaaataggttaggagaaattgtcttgtgtgggggtttaatgtacgaaattaagtagtagtaggcaaagaagaaacacaagtgatttgtagggggtatttttcacatttaattccatttcaattgaaatatgaatgtattacccagcccatgggggacaataaacaagtcaattgctgattggaatgcgcgggatcaggaaaatgatatctcagaacagtcagttgtctgcctgctcaaccgaggattactgatccgccagatgtgctgatggtagttggcatggaaaagacccatatgtcatggtttatcacattggtgtgtagctccctacccatgataatttattggcgcaaactaatttcagttgtatgaatttttttgtttcatacagcgatgattcattcacgaaataaaaggtcaccagtgatacaaccgaatctcatcagtattatttggctttgttgcaacattttactattatccacaaaacccggattatattcatgtattatttcgtagtacgcgctaattaacatgtcaagggttcatgaccataagatcttccaacataatatattctcatgactcatgagagggatttgatctagcaaggtggttctgatttgtactctttggttagtgtttatgataagcatttattatgaaaacatccaagcagatatttaagtaatctaattgtcaagtagtacataatatgcaccattccaaatttgcattttacagacttgcatacttcctctgttcttaattagtgtacagattgaaaccacactgggaaaaaaacagaggatggactcaagaaaagagtgaagctgattgcctgcttcctatgaaatgccaggttcagggtcataacgactggtgattaccattactcgagaaaacagttaagctgagcaggggtgcatgtataaattaattggcactataaatatgaaatactatgcgactgtggtgaaaatttggcgttgtcacctgatgatgacagaagtggtgagtccagatatagtgggttctgataatcaaacaaaccagttgcaaaatattacatgtttttgttctaatgaaattccggcagagctcctgccgtcgtttacctaaaaaaaaagttagttttcatgtattctgattatagaattaattgaagacccaaagcaaacaccatgttaattagtattatatcctgctctagctgttttggacaaggttaacataaaaaaattagaacttttgaccattaataacttacagaatattttgtttggagacagtaaaacacgatgtgtagataagtcttaaaattacttaattttctactgcagggtcaatcgcttaatgttcggctggttccaagaaaactaaacaaaatggcagattatttatcaaaaaaagtaaaagcaactgttgccaatgtacaggttttaaaaaatatgccagaatatcactcatatctatcatcattcatcgacttgtcctacagtggagatgttattatccaacccctttggggatgttaccttaaaccatgcatgtcctttgcttctaccttaataaagtagttatgttttcaaacaaatagataagtcttagaaatactttgagaaaataaaatatctacttattatatacatgtgtgtattataataaaaaatcatatttaaaaatatcttgtaggtgggtcattagtctttcatccctgtcatgttgattatctcttgtctcactgtctcagctatactccctccatcccaaaataactcaattcctgagtttctgtgtccaacgtttgactgtccgtcttatttaaaaaaattatgaaaaaatttaaaatgataagtcacgcataaagtattattcatgttttattatctaacaacaatgaaaatagtaatcataaaaaaatttcatatgagacagacggtgaaacgttggacacagaaacgcaggaattgagttattttaggacggagggaatacatatgaatccctcccgttcattattcacttcccttaaatttggcagaaaaaaagacacaaggattggacaacacaatagtcttgagatgacatttttttaattgtaatctttctgaacatccccataggaacattttttttaatcgtaatcttgctgaacatccccataggacaacataactgttcctgctttggagtgggtggcatcagcaattcagaatcttgacattgctgtaaaatcagagagtgtttgattattatttgagtaaagtccatcaccggtccctaaacttgtaccgctgtgtcatcccggtccctaaactcgcaaatcgaccgttcaggtcctcaaacttgttcgactgtgtcatcccggtccttaaacttg

SEQ ID NO: 30372 - DNA, 4229 bp, Oryza sativa
tttgttttatcgtgatttaaaaattgttccaaattttcgaatcaatagtagttctttcatgatttaaaagtatcaaaatttgaaagtaattaatatatatcgctacacttatctgaagtatcagttatttctatgatttaataattatgaatttaggaattaactggtacctatttgtgcttgtgttggtctcctaatttagtgtactacgctagatgcatgaattttagtggcacttttagatcatcggtgtgttgtaaaagtggcccacatcattacagtagacataattcagaccaaatagtccttaaaactgacaaaaggcttaactcctagttagaaatcatgcaatctaactcctaattagtcagctaaattgaattttttatgaaatcatacattcactgaaacaaatgtatttggatgaagcatatatggagcagatttgttagtgatgtatgtttaacttatcttgtcatcttggtaattgggcactttctagaagcttccacgttaatcagattaatctggccatttattaaatagatcgtaaaatcatgaccatagattaaatattataaccatggacttttaattaaaggcccaacaagagaaacatgtatctgggctaccatttaatctatatcggcttccttcaaagtctacaaactgtgtccatgtcgatctcagccaccggactcaactccacacacggcaagatgacgatacgacaggacatacgtcgatctccttcacaccctgccgctgatgaactccatcgatcgatctccagttcactattttatcgatgcagatactattcagattgatctttgcagctatgattgctattttaaatactcaagtaagcaagatctaattcattatatttaagttttcattaagtattttttacatgtttctcatctattctaaactatgtaaaaatttcagattttaaggtatcgcaatttgatagccataaatttggatggagtttatcaggtatattcatttacttctaagttaaattctcccacatccttcataagcaaccaataggctttactgcgtatctttttcttgacatgaataatttactgtgtatctaatgctttagttggttccacgcgtaaaacagctacataatatttttgacaagtttgtcaggtcaggtatgattacaaacaagggaacgtagctgctgcccctatctatttacgaataagaaacaaacaagcacttcctttaatgtttctctgttcatatttacagatgtttatttacattatctatgtcaggtgtaattagcaaatgtcgacgatgttggctgttcttttaaccaagatgacaagataagttaaacatacatcactaacaaatctgctccatatatgcttcatccaaatacatttgtttcagtgaatgtatgatttcatcaaaaattcaatttagctgactaattaggagttagattgcatgatttctaactaggagttatgccttttgtcagttttaaggactatttggtctgaattatgtctattgtaatgatgtgggccacttttacaacacaccgatgatgtaaaagtgccactaaaattcatgcatctagtgtagtacaccaaattaggagaccaacacaaggacaaataggtaccagttaattcctaaattcataactattaaatcatagaaataactgatactgtagcgatatatattacttactttcaaattttgatacttttaaatcatgaaagaactgctattgattcgaaaatttggaacaatttttaaatcacgataaaacaaaaattaagatttcaaaccgagtataatatttttagttagcaattttaaaattaaattatgaagatgttataattgagactccacacagaatacaacttgatatttaattattatgaatataggaatcattaaatcatgaaaaagcttaactccaaactaagtttatttctgtacttattaattcaaaattgataaattatattatagcaaatgctaacaagagcaacaaaacgagtataaatctatatttctaatattgaaattttaaattatgtaattttgaaaaaatagagtaatagaagaaatattagaatggattatatatgaaattactaattaagattttggcaactatcagcttcattcaaagtaacatattttatcattatccagtgaaagtaataatattttaattattagtcacagtaacccgtgcaacgcacgggttgacggctagtttttttaatatatcatgtcgttgactttttgataaaagtttgattattcgttttgttcaaaatttttgggtaaatataaaaaataagtcatacttaaagaacatttgacgctaaatcaagtaacaaaaaataaataataattatattaatttttaataagatgaatcgtcaaaagtatattaaaaagatattaaaaaactagatgatgtccagtgctttgctgcgagatatatgttagataatggagaaataatgaaatgatttggattaaaatattataaaaatgatttgagaatgattatctagcatgtgtatatttagttttagaatgaagtaacttgtagatataattactatatgcttccatgttgagctatgtgtgcttaaaaggttgatgtggcatgcttgtatgtaggttttaagagtgctaataaatattatgattgcatgttgagttttagatgtttagtgggcattagctttacagaggaagtagtttgttatattgcttagttatcagaacccactatctagatgcaccacttctgtcatcagatgacgatgctgaatttgaccacaatcgcaaaatattgtagattataatggtgattgtacatgcatcatgccttagtttccttgctttcgggagtaattgcaatcagtggccgttacactactagaaaaaatattttttattccaaacctcaaaacacaaatatcccgactagattaagaacatatattaaagatgttttaataccgattctaaaagtttaaatccaagaaacatctttagttccagttggtgttaccaaccgatacttaaaaaagcatctttagtactagttagaaacaccaaccaagactaatgctggagaaattttagtcccggtttatattactaactggtactaaatattttttttagtatcggttaccaaatgcctctagggttagttaaaaagaaagtatctctatccaagttagatgtgtgtcgtaggtgggatagtaactcgtattaggactgagtgagaaatcttaagttcgaatctcgcatcctacatatcttttttcacttattttgcatttttagtaccgattctatcaaccggtactaaaaatctcgatctttagttttggttgctataaccggtactaaagggggtttcaactggtattaaagattgtttctccagtagtgttactatcctgaacctgtaacttcatagcaacaaatcttgaagttcatcggtgccatcctctggcattttcttacctgatttcagtttgtaaactattttgcttcattgattcctttattttatttctctgaacaaatcttgtatttttctaaccaaaatatgaaagtaaccatttgtttctatcatattgtaatggaaaattttaaatcaaatctaaccaagataatatgaagcattgccaaaaaaacagagaaattttgagcatgcatatagagtgccagttgaagtgaatttatttaaattgaactttgcaatggatgaagctcgccatgtttctgtatcaggtttagcatataatttcactttaaactaggtgcatagaagtaagtttcactttaaggtcaatataaatcatcaaacatatggaaattttctcataaattctgattgaaacttcatgaaacaggtccaaattcgaaagttccaaaagatacactcttgatttataaaatttcccttccattatatggtgaacctctagcggaaagtggaaattattcagaacattgcaatttactcagaacattttgatctgcagtttaataaatgaagagagatcacagtctaattttgctagaatatcacattggcgggtcattattgtacccagtgcccatggttacgatgaaaaaacatgttttaatttttacgtagaacataggcttttttactaactagaaggggaaccttcaaa

SEQ ID NO: 30373 - DNA, 2525 bp, Oryza sativa
cccatcccactcacccctcaaccaaacacccctaaaagtgggttcgtcccatcccatccactcaaccaaatactaccttatattacgggacggaaggagtagtcatcagtctttggagcaatttgcagaggtaggctgacaggagttgtcacttttctttcggactttcagcacgaatgacctaaagggccccatcccatcagtcctgcgggcagctgatcaagcatcctgtcaccataccacagacgaaacacaacacttttccactcacttttatgttttctggtatacattggtttccattaattggttgtttcaggttcccctgatcgatcagtgcatgcgttctttttttgtgtttgcgcgttccttttgtttggccaattgtgcaatgctagtcccgtgctgtcgataccttcattcaccctcttgagggttcttcctatcgattcgttttgggaaaatatatgaaatatcgtcacacctagttttggccagtagaagatctcccggggtctatcaatgttctaacttgccgagatcttgtcgagagccagaactatttattctggaaaaagtttatgtataccctcaaatttaaaaaccaagagaatttctttctcaaccaccctcttggataatcaagatggaatagatacaataaacattagtgtgatatggtaacagaataaatacgcgactaaaaaccgatgaagtaccaacatgtcaccttagtctcaaacatagctacctagaacaagtaaaagatgatttttactctattactctccgtgctacccctagtggatcctcactctactagccatctagaaaccacactacccctagtgggtcctcactctactagccatccagaaaccacaccccactcacagtatccttaatcccatcaatcccatgcatttatgagggggtattttagagttttcatcctaatccttatgccctaaaatgctagtattacgaagtatattgctatgttttatgatagagggagtaacttcggtaaaaaaattataagctcacacctaatgctatatgttatttatatatggattattagacatattacaaacatttgtttatagagataactaaaatattatataaaaacaagaaaaaaagcttagaccaagttatatacataagcactgtagtttaaagtttttggagaaatcgtagtttgacaatcatgataaacttaatccataagtccataggctgaaaataactcaatcttattcgttgcatatatcttttcctccttttaccatctccgcgtggcaaaaatataaactatctactagaatggaatgagcagatccattcattaacgaaacagaaaaacatatgtttccaaataatgcctccttttttttgtgaattactaataatgccttcttggagacattatttgttgagagagagagagagagagagaggggttcatacaaaactaactatcgctgatagcgtatttgattggacctctctacaatggttctcacatgaccctatatatagtgacattataatgtagataatttttgttggttctgttttaggttgccacagaattttttattacttccaagttttcattaataaaaacacttacggggaaaacaccagtggtgtggtggtggagtcgtgggtgcaccgtgcatgactatacccaccagggttcaaattttggtgtccacgaatattacgcacatgtaagtggattttcaacaggattttagtgagattaggaatgcgttgttggcttccgtctcttagagcatgtgtaaatacaatttgaaagagaatttgttatctcaaaagtgctactcgctaatgaaaaaaatactgaaaaggattcctcgaccactttccgcaataatattatcgagttcatatctttgtcaagttgctgattgtttcatgtatattaattagccgtttcaaccattaattacattgacatctaaaactcgatgtcaattttgttcctagaattgaaacatgtatactatgttataatataaatttgaaaaaaatataatttaatgtgtgtcattaccaatatgaaacaaaatgttggaatatagagacaagcaatacaaattcattgaaactaaaactcgcactaaattcataataaacttgaaagttttagtgttgggcaaaatttaggttatgcatgtgtaacagtgtaagtttattaattagtcgaacgaaaaagaaggggaaaaaattcaggcgattgacaaataacaaataagttgttaccgtttttttccatataacttgatccagatcattaatataaacgtgatcatatgcattgtttatcatataaattaagaagcaatgaaccacatacacagtcaaacacagctgctaattaatcagagaaagaaaacgaagccgtttataattttcggagagacaagaaatgttacgatatactatagatgatacgttgcgcacgagcgcaatgtgattcgtgatcgattaaa

SEQ ID NO: 30374 - DNA, 689 bp, Oryza sativa
gcggcgggtggtgtgtggcggtggacgagagcgaggagagcatgcacgcgctgtcgtggtgcctctccaacgtggtctccgccgccgccaagtcccccgcggccgcgccgccgccggccgtggtcctggtccacgcccggccggcgcggccgctctactacccggtgatcgacggcggcggctacgtgctgacccagaaggtgatggacagcatggaccgctacatggccaccgccgccgactccgtcgtcgccaaggcccgcgacatctgcaccgccttccccaatgtaacttagctttctctcaactccaaactttgacattctcgttttccgttagcacgttttttagacggttaaattatacgtttctaacaaaaaaaaacttctgtctagaagttatttttagaaaatctaattattcgtcttttaattttataataattaaccatgtgctaacgagttttctcaatgtctatgttaataatatccattcaattgccttaaaccaacgggccttacaagcggaggattttttttgactttaccattcaattgccttaaaccaacgggccttacaagcggaggatttttttttcctaaagtcaattacatggaagacgtacacacacgaatcacacttatggtggtacgattgactgatcatctcgtctcctctgatgtgcaggt

SEQ ID NO: 30375 - DNA, 772 bp, Oryza sativa
atgagaacaaccattctgacatgaccgatataggggcatacctgaacctgatgttcagtatttataatgtccttttgggaattatgtgatggttgcacctctttccagctctctcttggcttagaatccaagaaaaagataagtttatcagcaattcagcattacttactgacatatatatgaatcaccaccaactacccttgttcagtaagcattggtatgattcagttgggatagttgcctagtaggttgcatttcattcctttccttttctgactcccatttttcttgttcttggttggccatgaattctaactgcccaaatcttgcttagctgtaggctacaatgccaaaaggagaaaagatggcctaatctttttgtttagtgataggaaaaaaatgcatttatttcttcggaacaattagccgctgaaatataattgaacttctataatactcccttcgttccaaaatataaaagattttgggtggatgtgacatatcctagtactacgactttgaacatgctacattcattcaaaatcccttatattttgtgacggagggagtataataggttatacttgcattggttgcttactttttaattgacagcctacttgatatagctagttagtaccaatctatactgcatccctgtagcctgtacatgttgatttatgcagagatgaaagctcacagaggtacagattgagcaggatcactgatgattgatgaaacaaccaacctacctgatctgatacacccatct

SEQ ID NO: 30376 - DNA, 889 bp, Oryza sativa
tttcactcctcgccggcgcccaacgaccaccgctgttgttttccctaaatccggccaccgccgctgccccaaaccccagatccggagtttcacgccgccgcccaaggctgctcttccgaccgccactcgcttgcacgtgggggccacttctctgagccctgcgccggttgctgcccttcaccgccggagtcgcgactggtgaccaccgttgcctcgccgcgccgagcgttgctcggcgcgagtgagaagagagcaagagagagacagaagaaagaaggagagcatgatgatgtgttcactggtagggtccacgtggatcctacgctgactcagctaccacatcagataaaatcggggtcaaacccaccaaaagacctgtggtgaacggttttataagttaaggaatgtcatatatctgtttttgtggttggggaacaataccttcggtgtactttttccttttgagaatgatttatatttgtattatttttatgtggcacttaataaatatgtttatatccgtggataaatatgttctattttttttgaggaaaaagatgtggtaaatatgattaacaaggtcaactcctttcttttgcattgtactattgaagagttgtgtatcatattgcaatacaaaaatacaagatcaattcgacttttcgacctgaatggacgatcaagaaaaccggttctcaaccgtcgatattaaggtgaaggaaacaaacacgcatcaaatttattattcatcaaatcaaaagacgtacaaattacagattgttgttacatgaaatcagcactggtgcgtgggttgtagaaatcaatatcaatatgctacagtactattcactattcagaaaaaaaaaaagaaaacgcaacacatctttga

SEQ ID NO: 30377 - DNA, 554 bp, Oryza sativa
actgccagtggtaaaattatcttttagattggatgaacaagattaggtactttattttctcaattttatcttagttctgttagtgtgttagcttagttttctgtaaatgctgggtttataccatcttgacaccaatacttggtcatgacaaacaaattaagaaaaaagaaaaaagaaaaaaatagtctttttcttttgttgcaatcttcacttatttgaaccttcattcatatttgaggcgtccatggcactggtaagtcgaaactgtatcagactgcagattcatggtttttactatgctatctacaaatatactaaaattttacaaatgttgaacatattcccctcaacacatattgcacattcctgtgaccttccaatgtagaagcatttaagttcatttgttcagtgaacattaattacaagctgctggtgctgctcctggccactcatactgtgcaagtttgatgcgtttcttctccgttgatcctgcagaaacagaggaagagaaggtatcatgactgcggactattatgctcctataagccattgag

SEQ ID NO: 30378 - DNA, 667 bp, Oryza sativa
cgaggtaactaaacatatgcatgctttgtcaaatctcatctaacggcacagttttttttcgtctgaaaatcactctaatatgcatatatatatatatatatatatatatatatatatgaacttctgcaggtggacaaacctttagatgccaaggcaccgagtgatatttatggcgaaatgccgaagaccgacgatgtgacatggcaggtgcctgagttccagcatcaccatctcaagcatctgtagttcagtggcttcaatgaagaagaaatgcactggaggatagtggagcttgtcaaggagagagctgtgaacctgcagagcattgctctggatgacggatgccaagcctgcgatgttgtggcgaatgaatatgttctctccggtgggatcaaaaacaagaaaccggtgttgttatcagtgtcccagatcacaggatctcctcctattctcacccttgtatagagggtgtatccggtgccttgtgctcgcaggcgagtatagggttgacgccgactcttttaaatatgttcctaaatatttgacatcgttgactttttaaagcatgtttgatcgttcgtcttattaaaaaaattaaggaataataaattcttttcctattattagattcaatgcaaatatacttttatggaaataaaaaaataaa

SEQ ID NO: 30379 - DNA, 1324 bp, Oryza sativa
tttggatcctcgttcccctcttcttcattccagtactggctgcttccctccgcgattgtatcgtacaatatctgttcctcatcgcggtcagccatctgttgatacaagaaacatctgctaagtcacgagacatttatgttttaacaatctaagtcatgtatgctaagtgtaaatgtcgtacattagaaccctacacaaccttacgtgctaagtctaattacaaatcgtgatataagctaagtctaggtgacgtatattatacaaccctagctagtaaataattatatactaagtctaattacaaataaaataatcttatattaaaactcaaataatattacatgctaagactaaaatagtcatgtatatgctaagtgtttcgtgcgtatatgctaagtctaattaagactacaatagtcaattgctacttgtcgcaccaattccgtagtcaataattacatactaagtctaattacaaataaagtaatcttatattaaaactcaaataatattagaacactacacaatcttatatgataagtctaattacaggtctaataatcttaattaattgcattacaaatataacaatcatttatattattacgtcacttgcctgctccaattccttctaggactagctcttccactcaggcttgacggacgactccgacaacacgtcttttctgcaagatacaaaaagatgtattaggataaatgcgaagtaacatatatatatatatatatatatatatatatatatatatatatatatatatatatatatatatatatatatatatatatatattgcatttcacgttaacgttcgtcctcgttcgttcgctcgttcacgttccctagctcgttcacgttcgttcgctcgttctcgttcacgttcgttcgcttgttctcattcacgttcgttccctcgttcttgcttgtcttcgttcgatcgttctcgttctcgctctcgttcgttcgatcgttctcgttcacgttctcgcggcaacgtacgttgacgtgttcgttctcgctctcgttcgttcgatcgttctcgttctcgttcacgttctcgctctcgttcgttcgatcgttctcgttctcgttcgttaacggcggtgtggcggcatcggggcggcggttggcgcggcagcgtggcggcggcggcggcggcgtggcgacggcggcggcggcgtggcgttgcgaggccgtggcggcggcggcgtggcgtggcggcggcggcatgcgcgcgcggcggcgaaggcggcggcggcgtggcgacggcgcgcggcaacggcgtggcgttggcaggcggcggcgg

SEQ ID NO: 30380 - DNA, 4338 bp, Oryza sativa
  unsure (1)..(4338): unsure at all n locations
cgagaacgaacacgtcaacgtacgttgccgcgagaacgtgaacgagaacgatcgaacgaacgagagcgagaacgagaacgatcgaacgaagacaagcaagaacgagggaacgaacgtgaatgagaacaagcgaacgaacgtgaacgagaacgagcgaacgaacgtgaacgagctagggaacgtgaacgagcgaacgaacgaggacgaacgttaacgtgaaatgcaatatatatatatatatatatatatatatatatatatatatatatatatatatatatatatatatatatatatatatatatatatatatatatatatatatatatatatatatatatatatatatatnncaaaatacccgtgcgttgcaacgagtgaaatctattttaatcatattattgttatatggtttagttaagatgaaattcactatgtgagttcgcttggatatatattttttagaaaatcatgagctacagttaggagtccgattgtctcaagttagtatctgattctttataaatagatttcttatatgattccttttgtattaccaaaaaagtgaatgatcttaaaaaccgactcaaatacggatatgtatttccaaaagcaaacgaacttaaaaaccgactcatacacggatgacctaccaaaataccgacaaaaacatcttcaatttttataaccgactcaaacacggatgacagaccgtggaaacatattcaatttttataatagggtgtatatatatatatatatatatatatatatatatatatatatatatatatatatatatatatatatatatatataatccatgcagcaacagggccatgcaaaaaaaaaaaaaaggtcagctcgatctttagtcccggttggtaacaccacccgggactaaagatggcttagccggccacgtggctgagccatctttagtcccggttggtgtttagtcccggttggtgttaccaaccgggactaaagatcgatctttactcccggttatttcacccgggactaaagatagcgatctttagtcccggattggtactcccggtttggaaaccgggactaaagggggttacgaaccgggactacaaagggtttctccaccagtgaattaaacctttcatttactattaatttaattttcaggttattaattactattttaaaaaaattcgggaatgtatagcctgttttttttaagcagccatgcaaggccgttatcatgcaaatggaaatcaaaatgtgtcataaagataaaagtgtttctttggctgttgtgcaatgacatgatcaacattgtgctccacaggacacggatttatcatgtgcatattttgcctgagtgagtgagtggtgataggggaaacaagaatgtatttgattgcacttttagtaagccctactggaggaagtttagaatttcctggaagacgtcattgtctttctaccaagatgaaagtttttgcaagattgtgcttttgaatgaaagatttcttgaagatagtaataatcttcatgctgacatatatggaagcagcggaatgcttaattttttttgagcacctagcacctaatgtcgacagatggttagctagtttcaagaatgagattctcttgtatcttggaggatgaatataatgatctaaaagagagttttagataggttataatcttcataaagctttgagtttttctttttttcccatgtaatttgtatttgtatttctagaccctttttgttatttataaaatttaaactactgggcaaagccatctgtatgccaaaatcaaatgatgcccaaataaaatatgcaaccttttaaattgagaatttagcccctcaaacaatccaatatgaaattcgctcatatgaagatttaaactcaggactttagagtgctatttaggtcactgcaactaacatgattgtagtcgtttattataagaattagtacattcgatgttggatggaaagaagtacattcggaagaggcatccgatcccgaacgattatcatcagcatattgcaaattttagatcaatgaacagggaaaagcattcgatttcaaaaacgcgcgcacacacaaacacaaaagaattcaccctaactctgtcttcattctctcgagcctctgtcatcatgttgccaattctcttttggtaaagcgaaaagagaataaagatagagagaataattactccatccatttcacaatgtaagtcattctagcatttctcaccttcatattgatgtaagattcattaacatcaatatgaatgtaggaaatgctagaatgacttacattgtgaaacggagaaagtaatttatatgtaagaaagttttgatcgaaggcgggacctcgagcccacgagtcgcccacgcgccagcggctcgggggcaaaccctagccgccgccgccacccaccctcctcccttctctctgcctcgccgccaccggagttcaccgccgaacaaccatgcggggagccaggatggcgggcggggccataccgcggcgacgcgtcgtcactggcacgagggaggcggggcgaagcgcggagcgcggtgagccgagcggagggcggcgcgctcgatggcgagggaggccggggatccggcaccgcggtggctagatccggtgctcccgcggccggatctagctgcacggcgcagggcgacggctctatcatgggcacggaaagctacggctgaaggccgccagcggcggcggcagcggcacgagggccgcgtgccggcgaggggaggactgtcgcccgcttggcagcatgctcgtgcctctctccggccggccttgtggtgtgcgcggggaggagctgtggggtggtggactgggctagctggtggctgagaagatgatgtggtggttcagcgacggttgttgtgtgaggtggtggtggcaatggatggaaatcgctggcgaaagccttgcttagcacttggctggcatgacgacggcgacgccctttggcgccgtttcctttcttggaggcgtagttatggcatttttcttcatcgctatcaatctccaggtgaaaactatgttccggtttccggacggacggtggcggcgtttcatgtcgtatccttcattggggcatcgtcttggagaaccttacccttgcttcgattactgttagcgaactcctgtgtcagctcgaagcactagatgcctaggttttggcgaggccttctccttcctggctccattcttgtattggtggcatccagcttcttcatttgtctctgtcaggtggagtcgaagctgtaacgtcgttggggtgcgacgttgcttggcaacgataacatttgcagtttctctctagggatgttggtgttgccagtgcaggttttggcgcctcaggggctttggctgatgtctaaagtatgagcttgctgttgttttgctcgttttggcggtgcctccaatgatgttatgatcgccgtggagtcggagctctgggtcgctgggcggcaaaggttggcaacgatgacacgtgccttgtgatgtcaaagttgtatgccgcttcttcagcttttcgacatcgatgttcgcctttggattctgccgtcgtagtttggttagagttgtgtggtgctcagtgtgttgtgttgtttgtaccggtcgtggttgaggggcttggcgagtctacttgccgagaggttattttttctttttctgtaacccgtctagttttttacttctgcttaattgaaatataatttgcagttccctgccggtttagtttaaaaaaaaattatatgtaacttgatcatttcctttttcaaaaaacacagcatcccaagtggctagtgccgttgacttgcaagcagcaagtcttgagttcgattaccaacttgcgcgtggaaaatttgtaagttttgaggaaataaatcttaaaataaattgtacatatatttagtatatgcttaaatgttgagttttgtgtgctttacggtagagccaaagctcaaacgatgagaaccttagccacgtactcctttcgttttttaatatatgatgtcgttaacttttagatatttatcttatccaaaaactttgtgccaacattttaaaaatataagtcatgcttgaataaccttaatcataaaacatcataaaaaataaataatgattataaagacgaatagtcaaacatattaaaaaaagttatttgtattatatattaaaaaatgaaggtaatactacttaaaaacttatcagtgttggacaaaaatagcaacacacatagaagagagaacagcaggacgtgctgcgtcaggtggcatcgcgtccaggtgag

SEQ ID NO: 30381 - DNA, 2318 bp, Oryza sativa
  unsure (1)..(2318): unsure at all n locations
ttaattgtttgagccatttcatctaacaataatgatgatgatgatactggtgatagtgttactgaacctgggtaatttacagattagttttgccttattttgttggtccattagccatatgaaatgcaacattatacattagacataactaaatgaaagactcgttacttttgttgaattgttgttaatttgtaatttgatgttcccttttctggcaatgatcttaggtaccaatatgacatgaacacaccaggttctccagggcaacttcgtattgcctcaacacgagatctgaatatgaacatatcagtttccaatacaaacatgttatcacaagcttatgctagctggaacaatattagccttggcaatgagttatacaggatggtatgccatttatttacgattctgactatatagtcagtgttcaattctgataacctaaaagacttaaacaatattaatctatatttaagcacctcctcattcctgtcatcatttgtctactgaggtactgttctttcattctatgatgaccaggaaacgtcttctactagtgaaaggtcgattcttgatgtgcacgaaagaagaagttattatgttatcccacaaaacaaacttggccaagacatatacattagaaccactgaatataggagttcagatgttacacttctgtcatctggggatgataggtctataaaagttccagcttcaagggatcttctggattctcatttaaaggggagatctgttaggttatatcgcttgatggttactgctattattgccaatgctgaggtactttcttctgcattcgattttgtgtggtttgtgttgaatgaacaagtgttcctttttgttgcatttgcatttgcttgtttcttgataacatgttagcggttgaaattcttttcatctacttggttctcattgaattacatttcgcgtttggcaccttaatagcactctgataattgttctgttatgtctatcaaatgcacaaatgttcatggcattctaaactagaaccaatcccgttatcacttgttggttattactggtccccagcatggtactgtgacctaatggacaaaacattacaattattctggctcattgtcagcaatttggttggtgcacttggttccaggcttcggcaaactttgctgtaacttgtaggtgattctattttgaatgtcgtctccgttgtccaaaaatgcgaaaacaggatgtccacgtgcaaacatacgagaagcttaaaagacccgagtagatacatttcaatctttggaaacactctgttcaaatatatagattccattccttcccataaccatcgaaaaggccatcgagtccatggactttgtgttacaggcatcgataatcagtattgcaggtctagagatgctgacctcttcataacatcatgcgtcctatgatactgtcataggaagattaaaggaaaagtgcccacattaccatgttatcaatgattactcatttttatactatcataaaaaacttgaaggttatttttttctgttcacaattcaaaacctatttgcagcacacgaattccatttggattcagcttcggtaaatatttcacttgctacgaggttgttgaacatcgtctgaaggagaaacacataagctttacatagctatctacttgtggccacgtttatgatgttgtatttccatatggaatgattattgtggctcacttaattttgttgttggtacacctttattctatatgcttaaaatacttaactcttgttgaagtcatctattcttgcacgaagaaaatatntgcctgtcataaacttggctttccttcccagattaaagttggtgaaagacagccactggtgaatatatggtagcactacggatctattcagaagattgtattgcatctggtgttcagcaacaaagtgctcgtacctgtgctgctgctggagaccaatcttcacaaaacataagaaaggtggaatggaatgaaatgttcttctttaaagttgaaagcgaggtgtgtaaattggaaatatactaaaataatatgctgcacttactttacatggtatttgttctcgtgatatggctactgcctgatctccattctgttatttaaaccttttcaggataattatgttctggaatttgttgttcttgatgctggtggaggttgtagttttgatgtgcaacacatttacttttctttattttcttgaaaacactggaggactgcgcttcctttcattaagaagaagaagaatacaaaacatttacttttcttttctttattttct

SEQ ID NO: 30382 - DNA, 2815 bp, Oryza sativa
acgcccttgattgacagcctgcttgtacagtagttcatcagaattgtatacaggccacttcaattcacttcctttcaggtctttttccatctttcaggtctcttccctacacagatcttaccaacaggttaacactgacatatctccatgtcttctgtcttggatcaagttttctttcagaactttaaagtgcagacccgtcagttattgtatccccaaagatgtttcaaattgatatgaacataatgtgagttcaagtagtgggatgtttatgagcttattaccaaactgcagatgtgccaggagcactgatgatgtaccagaaggggatgatactgctgaacaaggaggcgtatcggatgggctacaggggaggccgtccagcctgaaggacccaattcagactcggcgtccggctagacaggccaaggcgaatcctcgtaattatgggcctgattgggccatgtaagtgtgctgttgaaagctgtgtgaattggcgtgtgtgaggggaaagaacgagtgagtgggtgagattcagacataagcaatgtaatgaactgaattaaaactcagaacgggcaacttggtggcgatggcggcggcggctcaatcctgttggattggagcattgtaatctaaattggttgccctatttcttgtgttcttcctgaattatgttgaggtgttcgagttagaagagttgtttacaagatggcctagtcctgtcattctgcacattagtgtttgtagtctaattttctgaaccaaacaagcatcttacattggctgtgtttgagcatccaaagtctcaagatttgctatattatctcctgattttggcatgtgctatgtgaatttcataatatgatctttaacaatcatattttgcttgtcaaatttgaggatatgtattgatcagtaaaggggatatttgttgcttctgaacctgtacatgcaattgttgtcaatctttgagttatgataatttattaaatatttagtcacgtggatttcacgtgcatgcttactagtatgtaaaatgtagaaaaaataggagggggcccaataaaaaacctacctacatggtttattttcgtagtcccgctccctctccttttctcttctaccatgcgttaattccttttccatcctccctattactttacctatcctcctttcggcctctcctccctttatctcctcttctcgacggttggtaaccggatccgatagcggcgaaagggtgggatgagtggtggtggaggcgtcagatttgcctcgtgcgggaaggggcgatgccgtgatggttgctagggtgaccacgacgacggtggggaggggcgaaacatcggcttagtgggaccacgacaatgacggtagactcgaggtatgtggatccgtcggtagcaacaggagaagcggatccaccggtgacctctccctttcatcgcttttccccatacttagcgcatggatccgcatcgcccggcatatggaagcagcaatgacgactgtagaagccttaggagaatggatttgtcgccaccgggcggcatgggagcagcaatgatgactgcaacggcctcaagagaacggatctaccgccgccgacttcaatagcagatttactgccaccaggcatgggagtggcaacgacgaccgcaatggcctcgggagtgcggacctaccgccgctggccttgggagtggtggatccgccatgcatgggaggatcgactaacgactacggtagccttaggagtgcggatcgaatgctgcctgcctcaggagcggtgagtggtgactaaagattgtggtgaccttaggggcagcggtgacaacgaccctgggcatgggaacgacgaccgctaccaagctagggtttcaaaaattttctttttggctaaaaattctttttacaggcaagcatcgtgatgtgccacatgcaaaaatcctatttttcacttgcagttgtgttgatcgcctaggaaaacctcaatttttacatacacctagcgcaaggagttgctacttccacctataaagatgcatttcagccattttaaccttagccaaaaaaaatgaacttgacatattttcattcaacttgattgataagatgatttatatgtaagtgaagtagtagaatagatcgaggagtccaaggaagaaacggtacatatcatacatgtcatcgctttataggaaaacagatactttacccagttataaatatttaagcaatgtctgatccatttttttcaaatttttgaccattaattttatatatcagtataagtttataaaatccaataagttcatgatatataatattatttttcaatgcaaatgtaggtatactattttgtttgtgttttacactaagcatttgagaaactatttatcaaaatttattctgattgtcaaatatttatgatagaatagagcaggacaattaaattgcacactttatatcgagctggacatttcctttttgttttctccaaatccctgcatatatatgcagtcgcgcgcatgcatcgatgatttacccagcaaaacacacatatgatacggccgagatcagccagcttaattagttaattattggtggaccattagatttggcgcgctgtaaatttaagggcggagctagaacgaaatagagagtaacacttgcttaatttactttagatcaaatttaagcagatgtggatgtataagtttgtattgagagggtgtatatatggtgaaaataagtaagatatggctacaaaattttgtttgaccggattcgtgggcagcccctcgatcgg

SEQ ID NO: 30383 - DNA, 799 bp, Oryza sativa
cagatctagtcaaggcttagccccttttatcttttgtttttccgctgcatttatgtaagacttttataatgtttgtaagacgtggatctgtatgtcaactttgtcgcttgtgtaccccagccagtcctggacggggattttaatgcacattctgcttggaattctattcgggaatttctgggcgtgacacgcatgggagaggtgtgtgcaaagctagggccacctatcggcacggaaaagaagcgtcgtaggggcgtgggatcggatggtgactttgcctgtccaagtagacatttaccaccttttagttgtagtgaccttttagttgcagtgacagagattttgactgttgcgcctcgtgagccatgtgggccacacccatcacccacccgcacgcactcgatcgattaaccacccaaacaacgccaatgcaagcagctcgttcccaagttgccacaacacaccatgcatcttcgagttcgactcgcgggcgcacttgtggagattatgggtaccccatacccacacggcacggttatccgactagttataggggataacttatatatatgaaatatgtaacagatcatgacttgggtattacgtttccttgtatattacggaacggcctaaagtcctggtttgataagattgtaaagtagatttaggaaaccgataccgtattggataaggtttctatcttgtaatcatgtcccccatcctatataaggtgggcaggaggccctctagggggcatgagacaattagatcgtcagatctatactacactcggcggatt

SEQ ID NO: 30384 - DNA, 1440 bp, Oryza sativa
tggcaaccccagttccagtatgtttggcgcgaaatttaagccccccccccccaacgtcaccaaacggcggtcaccgaagaaacgggccgtccggtactcagccccaatccggtcggcgctagggtgttcaagttaagcgccatcgaccctggcgttaaggtcggggtccagatctggtgatagtttttgccagggaccaaatttacaaatagttttcaaaaagggtcaaattgtcaaattttcgggactaatttgtagctgcacgctacacaggttcccacgcgctataatcggcatgcaactagtactagcgatagaaaacactttcagcgggccggtgtcacgcccagaaatttccgaatagaatttcaagcagaatgtgcattaaattccccgtccaggaccagccggggtacacaagcgacaatgttgacattcagatccacgtcttacaaacatcataaaagtttacacaaatgcagcagaagagaagaaaggcaacaggagctaagccttgactaaaactgcagcgggaacaccactccacaggcatccttgacggcacggacgaagcctactcctcggagaaaccttcatctgacacaacctcgaactctggggttgggaaaagtagagcaagactgagtactacccactgtactcagcaagtcataccggaatagggatatgatgcaaggaattatcaaagaagagctagagtggttcatttgcataaagcgagcatttataaacagaagttgaaagattaaacagttgtaataattaattaatattaactatccactgtccaacgctgacccacgttgcgacaggcccaaccatccacctaaactatccaatttcaaaagattacactagggtgagactaatcacggtgaatctggttgaccgcccataaccgcgggcacggctattcgaataattttactctgatcagaggtgtacaactgtacccacaagacacagccccacgacacgtttccgtgcgccgacatgccaccacgacatatcggaaagaggccgtgacaggacccttcacataaccccctctagccaagcacaccacacctcaggtttcacccccgtccccagagggcaacgggcagtcccctctcgtgcctaggtgaatccggaagcgacagaggccgtcgcagggcccgccccgctccatcacgcccacccttgcctggatgcgtcgactagaggagagctacactacaggcccagccgttgcccacgctggcttgtggtaagtacgataagttcttccagggcatcccgcgaaccggtccttaactgtcatgggtgcgtccagcaaaccatgcacccacagcccaccatgtgatttattttaattaaccaacaccaaagcggtgtcactaatccaacaaaaccattagaaccaatagtctaaacatt

SEQ ID NO: 30385 - DNA, 2942 bp, Oryza sativa
aaatggctttggcccgctccaaatgtagagactttatttctatatatggtaaaagaaatattcttttgtagagacccctgggaaaacaacggttttcactctcatgagctataaagaacaacgggtgcgaggtgataagaaaccagaagcagattgtgttgttttgaaacttcattttctgatcatccagatcaaagacatcgttacaggatcagcggaaaagggcattatgtttttttttttgcctgaacatatctaaagtattgaaagaaataaagtttcttgcaatctggttgggccacgtcatccataaaacagggaccgtccgatacaactgctggtaaacgaccaccgtcggatctgataagagaagatttcagaaacaacccttcaagaaacttctctcagcttctagtcctcctatgcctgtgtattttcattttccccctccctctcctgtgtatcgctgcgactcttcgcacgcgtcgcttcgccacctccgctttttctccttccaccgccaccgctgtcttctcctcccggccctcactgccatcgctgcctcctcctcgtccccagtgccccacagcctccgcctcctcctcctctccctctcctctcctctcatctccgtgtaacactactagatcatagcagaggaagaactagagtaggagaggtgaagaacagaggaggaggagacagagtcgaggaagaaaggggcagagcagagttgagaggagagattcgtttttcctttcttcatttcacacctctctcattacagggttccttacttataaagatcatacatgccagcctggccgcttggccgaatcacacaacacacatgcgcacacacccacccgacacgttactgtaaacgtcatcctggcattgtagctcgtcacgcgtgtggcacaggcgtgacatcccgccaccgccgctgtcgctggcgccaccccctcctcttcctcatccctatccccaacacaaccacctcctatcagggctggattcggcaattgtggggataatctggattcgagaggcatggctcgacccgacagcgacgcactggtggatcgctgccacctcatcttgcgcatttttccacctgagcgcctttggttccccaggacctcctttgtagcgcctcttctcatcgtcctccaatgacgatggccaagggaaatacaaaaggtccgaggaactgcaccattatgtaagtatctaaaaacctctagcttctcacggtgtttatgttggtgaagcctgtacgatgtgtcctaccacgggcttcacctagcgttaagaagttgaatccatgcatgccctaactgctaaattggaaataacagtacatatcaattaagttttgtaataataatgtaagtagtaaatttagactaaagggtgatcaataagttctataatggagttcttaattaagcctctcatgtaatttcagtttttgagtgtgcaaatttcaattaagagcactataaaaaagaatgcatcctatcaaatgtatgtattgatagttcaggttcattataattataaatatttacacacacaattgtttcaatagctatcaaagatatgtgtgataactaatggatttcaaactagcagaaaaatgatttacaaatggattgaaatagtattttgctccggatgcccgaggtccgactcgctgaatcaagccaacggcagtggctcaccgggagataactaatactaataatcccccccccccaaaaaaaaaaagaagtaatactaactattcatgtatttagaaaaaaaagaaaaggttgcccctaacattatataaatgaatggtgtatttctagatgtgtgtatctatatatgtgtgtctaacgagcaaaagttgtagcaagcagaggagtggaaacctagaaaagatagttctacaaggtgatttgcttaactgtaaataaagtactattaacgatcagatgtatttgactctaagctagcctctggtttgctgtgaagggtgtattcactgattcaataatgatttctgtgaatttatgaagcaaataataaagcaatcaaatatggtattattaagtatctcttgatgttacaagttttaaagcagcaattaaaatgactgcaatattgatttgcattattcgttttcacctgaagtgacattaatgaattaaatggcctttccaaacttgtggtttcactttttgttcgatttactgccgtgcatctaaggcctctatatgaatcatgaacattagtacattttgaatggtaaaaactggataggagttgttgaggaataatgttgtttcatagaacaataaatttatttttgctgactgtgtcataaatcaagtcctttttagttttgctgattgaagttttctatttaacataattgaaattttctactctttcaccacttccgtggtaattattgaacaggaaacagaaagcagcaggaagaacatctcagatggaaagcttcaatgtgttcttaattatgctttcgtttggtcaagagctttattccctgagcctcttaatacattacaaccagttctcaactggaaattaaactgttacaaacggataaagatggtctgttcatgctccagttaaattcatatcaaatcattgttagcatacagtgacgtttcaagtggatttacaatttagtgaggtggcgtgaatgcatggccttaaaatgtcttgatttgtgggaaatactttcatgaggcaaagttactgatcttgcaatctatagaagctttaaagtttgcatccaacctgttttgactggatggaagaaaaactaaaagtgtaatggcccctctatatttgaattggtttcagatttaataaatgccaatatatagatgaactacttgcagtaaacgaagtgtcattcagcgcgt

SEQ ID NO: 30386 - DNA, 624 bp, Oryza sativa
ccggtggtggaccgacaacggtagcatcagcagagggaacgaaagcaacgacctttcactcctctcccctcctagaaccaagcttcgggtgcatcgtctcgtcgacggcggctccttcctgcctcgaggtgctcttggcaacggcagccatgatggcatcgacgatggcgacggggggcggatctagtggcggtatggttggagaccaccggtagtggaaggagtagatggggcaccgcagtggcttccccactcccttccgcttgcctccctctcccaaatctggctgtagggggcgactagggtgtggcggcggcgatagcagccgaaggggttggtttcggcaatagctcgtccacggcagcttcagcaacctccaaggtcaccgatgatgacgacgaccagttttgatgtttatttgcatgatatttcatttgcatgtgttaatcttggatgtcaatttgaatctagatctctgaatgttgattgattttttttttccttagtgatgttgcctataaaaattaattttctcaggtgatcatcttaagtgtttgcaaacaaaaaatctattttcgtaagcggatcgcaacactgctagtcaaaatcatttattttcaatag

SEQ ID NO: 30387 - DNA, 992 bp, Oryza sativa
tagattaatttatttgattattctatactatagaagacaaattataatcatttttgttgtcgaaatgataactgcatacgtcgaaagacgtggttactcaacagtggttggaaggaaacgaagtgtattgaatcttgaatttcttctttttttctggatccccccattacatggccctaggggactatttatagcccaattacaggttcttactactagggtttaggttgtacaggggaatttacatgattactcttacaaaagggacatttacaggggtacataatgttataggggctcatgggcccctgatgggccgtctggcgatcgccggccctatagcccctaggcttgatgggccggaaaggcttcttcggccctcgcgggggcgaacttgccatggcgaagtcgtcttccttcggcagatagtcttcgccttgcacccttcgcctgagacgcctctggcctggcaaggcactcgtacgactcttcgcctcacgccgttcttgctccatagctttcgccacgggtttcggcagatttggtcgaagggcctcatgccatccgccaacaagccccttacgggtaagggtgagattggagcttcggccgagaccgtgcaaagtatgtggtatggtatgcggcgccccctttcaaccgatgctcctcccgaaacctacattattcctgcgaatgaagtttgctacttgtgcgcctattattattttgccgcgcttcgcctcctgcgattggtggttatatattttcttttcccgggccgaacggaacagtattggactttcccttcgtggggtttttactgtgccgctcggttggtgggaatttaccgtttcgcctaccattgcgacacgtggcgctttattactggtgggtaggcgaacggtcgcccgggtgagctatatattcccactgctctttccttttcaccgccacacttgccattttaccgtgtgcgctcttttcctccgttt

SEQ ID NO: 30388 - DNA, 1355 bp, Oryza sativa
tttgtatataacttgaaaaaagaattaacctatatattcaccgtatgattaaaatttataatctatctaaacctatactaattgggcattttctagagccaccactttaattagaaacttttggccattgattatctagactagattgtgttttcaaaaccgtagattgtaaaatcaacagcacgtttaatattggggccactgctaaagtgttgaagtccgtataaatattgtacgtacatgattgttcatagattgagaatccacattaataaacgtgtttgtttctatctggagtttgtttgttgttttaccgtatatacaggattttctcaaagtttctaaattatctctcggacttgccttaatctaataaattagtgttttatacactattacagccaacagaaaggcagagagccatatataggtggtcgatggcatcagcaagggacctccttaatcaccatgtagctaatcctctttggtacggtattgtatttgtggatactcatctttacctatatctttacctctactattataaaaattgaagatatttttaccggtactttgttacgttatccgtgtttgagtcaattttttaattttattttacgttgtctgttaaaaagaaaaaacagtccgactcaaagaggtaaaaaaaaaaagtgtccgactcaaaagcgattaaaaaaaaccttctgtcgtcactcatcagtgaaaataggaaaaaaatcatctagagtccgacttccgtaaaaagtcttgccacgggtattttttccgactttttacatgcgattgagtttttttcgcacgcaattaggctcttggttttttttctcttttttttaatccgatcacgcctccctggcgcttttgttttttttatcaattttttgtcaccggttttttctcccgtgcgattttggtttttctcatctggttttttaatccaatcattcgccgcacgcctcccgagttgaacccaggcaccgtgccgccaccatatcgattgtgcgttttttcctccaatttgattgcaaaaatcgattcctcattcctcccttatcattttctccattatttttcctttcgattcggttttaatttatcggatttaatctcctttaacaattgcgattcctcattcctccatcatcattttctccattattttccctttcgattcggttgtaatttgtcggatgtaatctcctttaacaattgctgatgatgatggcgatcttccccgatcatttttatcccgagttttgcactttgattttagaaaaaaatgaaaagaggtcattgtggatcaaaaaacctaaccacatttgggtgatcgagaa

SEQ ID NO: 30389 - DNA, 711 bp, Oryza sativa
ttaacccacccatgtggaaaaagtttaacactaaagaggttgaagaaccagcccttaaaagagaaaattgttgaaagtagaaaccaacttaacatctctagcacccaagtaatgacgtggacctccaaaataaggataccagcatcacttaaaaatatgaccacaaaaagatagtgttaaatactctattgtgactatagtttacaagacaccgatggaagcatttaatctggctaccatttagttttttctttagggaaatatcgccgcagttaacctttaaattataggcagcacaaatcaagattagttaatttattcgatataccaccagtttgagctttattaaatttgtggtaaaagaacatgactcacacatgagctagtatttataagacacaacaggttgccagatattgaatatatattatatatgccacactgcagctgaaggtacctgactctgttctggagtctacaccctcgaatctggaaaaaaaggggaaaaatcaaacattaaacaggcagtatgtgccatattatcttgctacaaaattcatggtgcataaatattaacatacaacggtactagctgaataccagtgtcttgcaataatcaacaaatatatgttctaaactttaaagtcgtatatatttcttggaaaaaaaaacatatacaattcgcaatccaacatcaaccagaaattgaaa

SEQ ID NO: 30390 - DNA, 772 bp, Oryza sativa
aagttcacatcactaatcaaaatttctaaacactgcaaatcccatatacaagtacaaatttgaataaaaggcgtcacagatataacaatagtatcttataacatcatagccaactaatttaacaagcaagttcaaaatgagcaaatattaccaccagtgccggaggaaggaaaaaaatttaggtgtggcctatgaattaccacggaagttagcacagaacgaaaaatctcaatgcacgtcattatacgacacaatatcatctcaataagtctacattaagcatggcaaacaagaactactcacaagttcatgattcatcatccatttgcaaacaagtgtagatagaagaataggttctcagaaaatatctcatcttctcaagattcatgttttcaacaacacatcacatataggaactacagtactaagaatagatagatatatatgtggaatctacaaaacaactagtaccaaagattgattaatgttcacatatgtagaatctgttgatggagtgatggatacttggctagttggcttgcttgctgtcactgcttggtgctgcacgcctgcacagatgttgtgcccttcgtcccaccctgctcgcaggcccccctggtccctggcggctggtcgcgctgccgcctggttggagaggatgccgcagccgcagctttgcgccctggaggccggaagcctggcagccacgccctccacacctcacccagccctccagcgcgtggcgagcaccgcagcagccgccgtccactga

SEQ ID NO: 30391 - DNA, 699 bp, Oryza sativa
cttaccgatgcagccaactagctccttaactatcctttcatctttccccattgttcgtgacaccagactccaatgaagaatttacagatgagggttaggattttaggataggggaaagagggcagattccttacgctttgagggatttccagggaggcggcagactagcactgcgtgacggacaaggacaggcggcgaggccagatgaagctagagggggatggttgatggggttagcggcagggcattatatctagagtggttaggaggcaagggcatctcgatggcgcaagccaccggagatggagaagacaggcaggatgaaagctagctctcgctgcccaactgagaaagaggaggaggaggagaggggagaaggaggtggaggagactagtggtaggtctcaccagcagtagtgtggctgggagggtaacacgctagctcaggcataggagacatatgttcgagtggtgcgcatgtgaaagataggaagaggaagagagataagataatgtgggtagggtaccacagttgcacaaatcttaatgtggtctggatcgtctaaaagctactaaatttatgggtattatcatgtgactaaaagctatacaatccctcataaataacgtacgtcaagcaaatacctactacatccctcataaataacgtacgtcaagcaaatacctactacatccatt

SEQ ID NO: 30392 - DNA, 803 bp, Oryza sativa
tctggatctcatccaggagctgctcatccatcaccaccactaataacaaaacttactagtagcacataagataatttgctactatattccccttccagtcctctacaatcaactacctactcttgcatacccaaaatccaaaatctctcaatcctcaatccaaatcccaaactacgtaccaagctcgtctcgttagctagtggaagaaggctaattaatcaataagcttagcatattggaggaatcaggaggaaggcaagttggctatcgagtgaatggaagagaagaagaaaaaggcaagctaagccatgaaaaataaagaaatctaattcaatggagctagccaggaggtatttgaggatcagtcgggaagctatctctttgcccaaatcaccgttgccaccgcccacatcgactctgacaactccgcgcgacgtgtgctccaggtgcctcgtccatgcgtgcgctcatatgtctcattgtgcgaggatatcggtacataacatttccttttttaaaagtaattacactataattgggatgtaatttatattaaacttatatataattgatagcatagtgcgtgtggctggttggctagctagcggatgatcttcttttcgagctatttttgttatgtgaagcatattccaaacgaaaattgcgaaaaatatagagaagttattcatatttacaataacaatgacacacactgctattcttttttttcgagataatcacataaagagggtcatataaatattattaagattgagaaaaaaaattaaaaaaagaaaatacta

SEQ ID NO: 30393 - DNA, 1406 bp, Oryza sativa
aataaattgatgcatagaatgcaaggtttgcacttaagatacatgccacttgaaagtttggacttagaaatatgccactccaaagtggaattattttgaaacatgccactacgaagctaaattggttgattaaattgcccctatgaccttcttcctctctttccatcatcccactccagaagttctctcgtccctctctccagcagggctggatgccggtgagatcctctcccctggccagcaggccgcagacctccctatgccctgtgactggccagccccaagcccctcattccccctccctccggtggcacattgattctgcaaaggaacttaccttgccagcttgcagcagcttggcaagaagagacctccaagccgaggcagccctcggtgcagacctccctgaggaagagctaggaggctcactggcggacccaggattttgccgagccctgggccaacactaattgctatcttgaagtgggctattggagtagctaggaatttttcgttggctagttcgacttcaaaagttcacatcactaatcaaaatttctaaacactgcaaatcccatatacaagtacaaatttgaataaaaggcgtcacagatataacaatagtatcttataacatcatagccaactaatttaacaagcaagttcaaaatgagcaatattaccaccagtgccggagggaggaaaaaaatttaggtgtggcctatgaattaccacgaaagttagcacagaacgaaaaatctcaatgcacgtcattatacgacacaatatcatctcaataagtctacattaagcatggcaaccaagaactactcacaagttcatgattcatcatccatttgcaaacaagtgtagatagaagaataggttctcagaaaatatctcatcttctcaagattcatgttttcaacaacacatcacatataggaactacagtactaagaatagatagatatatatgtggaatctacaaaacaactagtaccaaagattgattaatgttcacatatgtagaatctgttgatggagtgatggatacttggctagttggcttgcttgctgtcactgcttggtgctgcacgcctgcacagatgttgtgcccttcgtcccaccctgctcgcaggcccccctggtccctggcggctggtcgcgctgccgcctggttggagaggatgccgcagccgcagctttgcgccctggaggccggaagcctggcagccacgccctccacacctcacccagccctccagcgcgtggcgagcaccgcagcagccgccgtccactgatggggattggggaaggggattgatggattgggggagggtggaggagatgattcaagagacaaaacaagacaggccgcatttacactaaacaagcctaatggg

SEQ ID NO: 30394 - DNA, 1190 bp, Oryza sativa
catccatgcattgaacttagatgtgtatgtcaaatctaagatttcgaaataggaaaatgcatatgctagattctatgtggttgcatgtttcctcgctgttagattttaatctaatggctaggaagtcgtcttcaaccttacaccaagggagagggggactagggaaggcaagaacataaaagggagggtagcttaccgatgcagccaactagctccttaactatcctttcatctttccccattgttcgtgacaccagactccaatgaagaatttacagatgagggttaggattttaggataggggaaagagggcagattccttacgctttgagggatttccagggaggcggcagactagcactgcgtgacggacaaggacaggcggcgaggccagatgaagctagagggggatggttgatggggttagcggcagggcattatatctagagtggttaggaggcaagggcatctcgatggcgcaagccaccggagatggagaagacaggcaggatgaaagctagctctcgctgcccaactgagaaagaggaggaggaggagaggggagaaggaggtggaggagactagtggtaggtctcaccagcagtagtgtggctgggagggtaacacgctagctcaggcataggagacatatgttcgagtggtgcgcatgtgaaagataggaagaggaagagagataagataatgtgggtagggtaccacagttgcacaaatcttaatgtggtctggatcgtctaaaagctactaaatttatgggtattatcatgtgactaaaagctatacaatccctcataaataacgtacgtcaagcaaatacctactacatccctcataaataacgtacgtcaagcaaatacctactacatccattctagaatgtttcaacttagattgctatgtccagatttgtaggttgtaatatttcaggacgaaggacgaagtatagccattagagatctcatatccaattagtgtacccttctcttcttacacccaacgcttgtatattgggatcctctctctaagtatgtagtagaaaataggtactatataatattatatatctagtaagagggtaggtagttagacaattttggcagctcatcatcgatatctagtgccatacaacacacaactaatttactgtaaactactatatctatatgtatat

SEQ ID NO: 30395 - DNA, 720 bp, Oryza sativa
ggagttgcctctgatttctgtataaaaattatcagtggtgagaaccggttcgtactgtttgtaagagcttgatggagagagattcttttttattatgaaaggtgtcatccaatgtattgggtgtcaaagaaagcgaccttgacaaggccataccgtatgtatgatgtataagcaatcaataagttttttttaaaaaaaaggaactttacatggaagtccatgtaatatatatatatatatatatatatatatatgtattccaatctgtcttcaactttcttgtatttatatttaagcccttgattttaagctttacactaacaaagtttcatcttgtttatcaaagatatagccttttaacaatcctaatagtttcatgtggtatgaggtatggtatagtaaattaacaataaattaagagcctgactagaatgtatttctatagctatggcttatgtagccaaacatgcgtgatcgatcaactaaaaataatttcgagggcaatactttcatacttctactcttagactcctagattgattctaaaattaagttctaaaaggagttggaatagcttcaaccattggagggaagaagaatgagcacatgactgatgggggttgaaattggaaacatttttttaacatattcatagcaaaacttttgtagaaatagtcccctcaaaacagcaaaacataacaatacaacttttatatcgtg

SEQ ID NO: 30396 - DNA, 911 bp, Oryza sativa
atatgtatgtgtgtatatgtatctccctttgtatgtataaatatgtagatataaacagtgagagtgtgtccgggtgagtgtgttcatcaagggacatgcatgatcttagaattataatatttatgttttttctagagtgtttattcgagatatccttttttcgctttgcatatgtatcccagtgtaatatatccatatatatatatatatatatatatatatatatatatatatatatatatatatatatttcattggagaatagttaatatgatccctaaagtttcgctcctagattagtttagtccttaatcttttatattgtccaaacaagtcctttaaatttgtcatgtgggctaatatagtccttggtcccaccaaaatcgccacatggacctgccatgtcaccttcttatgcaaaatctatatgatttgtccaatttacccttacgcacaggaaagtaaaaaacaaaaggaaaaagttaaaaaatatatggtatttgtaagagcaaaaatatacctcaaaagggtgaaaaaaagaagtatttttttcctatggttatatctaattcacccttatatttatttttctatgatatacgtaagggtaaattggacaattcattattgattttgcatgaatgatgacatggcatatccatatgatgattttggtggacccaacgaatattctaggccttatgaaaaaggttaaggatttctttggaccatttaaaaggttagggtctaaactgatttacagagaaactttagggactaaagtagctattctccctatattcatcactgcttcttcccctatgggtatatatatccgtagtcgatcgaagaagcaatgataaatatataggaagagaaatatagtatgcaactgaatgattgtattgggt

SEQ ID NO: 30397 - DNA, 1937 bp, Oryza sativa
caccggacctccagccgatgtgtgctttaaccttcggatcgatgcttatttatcatatcattgctagccgattggtttatactggattatattgttattttattgcatcatcatcagccgattgcctttatatcatccgatgtgtgttcgatttttttttcgtcaacccagatgtgttagcaaccaaatttggtaatattggcatcgggaaagaagattagatcgaagcaaagtcggaggcggagatcgagttcggaaacagagcaggaatcggctggagtccagatcggctacgagtaggatcggttgggtctgagtcgggctaggtaagccgatgcagccgattccgacaatgcaactgtatgatatcgggttgaattgaggcgcttcaaggtgattgccgcacatgatagagtcatgagaaggcaattgtatctagtaattaggatgttttatgtaattaccttagagatatgtttgggcaaaagtctgccgcaaagacttatggtatcttagagtttgtgagagatagtagtcgtgtccataatggacatatcttgtaattctcgggtataaatagacccgagccctatgtaacttttaacacatacgttcaatacaatctcggcgcatcgccaccctttttgctttagttttatttcgacgagttcttgcttttgggttgagctgcatcggtttcgatcttcaacaagaggtaaaacttgttatgatgaattatgttctcgggattagtgcttccatctttatgatactctaatcttgtctatgtaattcgtcaagttatcatatatcttacataatcttcgacaatatcgtcatctaacctacaatcggctaacatctgttaacagaaggcagccgatttgtttaaatagcgacgttgacctagattatataagatatctactactctatgaaacttccagcggcttgattgtctagatattgttcttattttcatacttaatgctacatcagtttgagtttgatctataaagtcaatggcttaagaaatatcaattttctagcctgcccctctggtcgccgattagagtagcgtcggagtttcagccgatcttacctgatttaatcgtatttgctctatatgcttcaatgatacattaaatctgccctttatgtcaagatcttactgcatttaagtatattaggctcttgtttgatatattttacttgttttagtatcctgatatagagtagtatcggagtattagccgatacatgctagatctatctgatcagctatgctattaagatatataaggctgttatcaatatatattttgatctaagtgattcatactgtctcggcatggcgaccgatctatcccagtcacttgatttaagtatatatcggtataggaactatatattgttaatatttacagctgatcaaacagatttagttctttattgcctatttacaaccgccgatcgattcacatatgacatcggctgccagataaataatgtgtcatcggcacctagccgatcggctatcatttatagatttaactgcggtttctttgcttttatttcttgttgattatatgatcaaatcaactggcacgctcatacattcgaaggcgagctttggacctgcactggagttaagcaaatctcccagttctcgtgtttttgtcaacagtcgtatagtaaattttgcctacttaaaaacatgataaattctagcggtgtgattaaaggttattttagacgtaactttattaagggtctattgttagaatattattaaacatgtttagatgtatgtttcctttttattattaaatatataaaaattggtggatatatagatataagtacttttatttttagtacctctttatagctagacatatgtggataattctccacttttagcatataataataat

SEQ ID NO: 30398 - DNA, 1204 bp, Oryza sativa
aaaaaaattataatctatataacaagaaagaactgcttgagatgtaacagcttcccccatataaatcttcatactacatatcaccttaacacgcggaagtcaccgatacgctcaaacaattttctgcgctgtcgatgcttcaaggcagctgtccaaacaacattcacctgcagttcatagggaccttgctcaaggacacattcttcatcattgtgtccaagaacgagctcaaagattgagccagctccttcagaaacacagacattgagcaccagttcatcatccaaattgacggctacgaaacagcgagtcagatcgactgatccatcagctccaagaactctgttcctgccttccacttcactgtcatacaggatgattttgttctgatcatctccagtagtccaagcagtcactttgccagtgaaaaacttggatacaacccccttaattttgactgcaacagaagcttccacagctaattgaacaggactatacacaaaatcaattctactcaggcagctctctagcgataaagtcatcggctgctttgtatagcagatggcattgtgttctcgcacacctttgcagaaatctttgtcgacatcaccgtctctaatcttcaaattgaactcgaaatacattttgtctattgcacccagcgctcgattaggtcctgtcagagttagtgtgtcctcctataaatagattagggaaaatcatgtcagaaatgccaccagaaacactaggctcgataagtcaaatacagttcagacagtgccaacaatatgttaagagaaatttgggtacataatacatacagataataattttaggtctatgaagttatgaacagcctgtgaattgcatttcaaactcccatgttcaaatgagcaacatgccaatataaattcttttgtttccacttttttccagtacaaaacgtacatgatcccagagcactaccgttgcactggattaacaaaatagtataacaggtaaaagtaccaggatcttgggatatagaaactaaataagtaaatcaaatctcacaaaaaaaaggggaagtcatggattgattgatgttccaacagtaactgtcctgaccctcttagacagcaggaatggactaccaggcaatcagattcagtggatatatgatattgacagcaaggtttaagatctggcagtagggattttaatg

SEQ ID NO: 30399 - DNA, 781 bp, Oryza sativa
cggcgtgctagggttcaagagattcgcactcgcaccacgtacggtacgctcgcctcctcgatcgatcccctcttcctcttggtatgcgatgcataaaagaacaaatctaaatattgcaatttttgcttctcttctgaatttatagctgtggcgatgacagcattggcaagatgggtgaactaaccaagaaggtcaccatggagaaggaggaggagcatggaggtggtatggctgctgggaaggaggagaagcagcagccaactctgaaaaagcagcagcaggtgggaaaggtgaagaagaagttcctggattttggacaggagttgacatgggaggagaaggtggtgagcgttcttgacatcgttcgccgctatcagttaactgaatacgaccccaagttaaaagaatttacccctacccgggtcagtttctgtttctgcaacatggcattctttgaccacgacaaagagtgtgagtatcctttcacttattctaaatttctaaatttgcacgtatcatttcattcacttgtctaattagttctcgatccgtttattcctatgaatacatgtaaattcaagcaatatatacttgtgaaaacttcttcctccctatctgttgagtctctagatcgatgtcatgtgtagtaataataatgttcttgtttgatttctgtttctggccctatttttgcagcaaaaattagtcctgggtctccgattcgcactatcccttcctccaagtttgtgatgttggaaggctctgttaatgtcattgcaat

SEQ ID NO: 30400 - DNA, 2017 bp, Oryza sativa
gatctccattccttgagtctaatccccattctctgattttttttctttgttatttgcgtgtgtgcaggacagcgggaacgagactacgagagtctaacaatggtagagcaccttgcagactggatagattgatggtaatgcctcgtccaataattagtacatctttattcactgcaaattgcaaatttatatcccggttcctcccctcccaaacgtgaatgcaccgaaatccccatctctttatacactatcatgagctggcattttaactataatgtacactttctaccgttgcattgagtagtattgccttcagctatgcatcgaaagcagttacgatctagacatccagtgttcaatcagtaaaatttattagggtagcaaaaccttgataaaaaatttggatgtcgttaggtttagaacctttaggatttaagttttgatattagttgtggtctttttattactgtgatatgagtttagatcattttatttgtcagataaagttagcaaagaaaactgggattagctcaattttttttttggcatagtgtaggtgctgatctgatgatgagctaagaacaaactgaaggtactgagatctgagggattaacctgtttcaaagaaaactgggattagctcaattttttttggcacagtgtaggtgctgatctgatgatgcgctaagaacaaactgaaggtactgagatctgggggattaacctgtttctgatctgatgatgtctatgttaaacgagagtattttcccttctcaggcataactgactttttttgttcgtttgatcgtactaaaattagtattttcctttctcaggcataactgaactttttgttagtttgatcttactaaaattggaggcaaatccaacacccatgcacaaaaataaataaattaattttaaagaatatatgagacaacatcatagttttcagtttgttgttttcttaggaaaaaaaatacatgtatgaagaatctgaattctgatataatgctactactagagcctggagaaactctagccatattctaattcttctttctttctctttttttttttacatccttcaaattgtcatagttcgatttccatgagcctgtaagcattggaggcgacgaaatggcagttggtagagcataagcatgaacagtggcagacatataaaatttgtcctaatgaattttcctactacagttttaaaacaatcgatatttgacaaaatatttatgtgttccatcttgcatattagaacaagctatttgatccatttgtgttctccattttattgaaattcagggtatcgttggtgaggtgtaacttgccaaggactgcatcttcatcattgcctgggtgtccacctcgctgatctcgtccacgccaccataactccatcagcaagcctcactgatctgctccgcttcgcctccgggactccatcccctgcttctctgatctgggacgccgacgagccatggactcctgcatcgaagcactgccacctcctccgccttgagcatcactgtcgccatgaggtcattgaatgcccatgcccccttttgcaaatacctacttgtttttcaagtttatgttgaatgaagctatcagttctctttctgttcgatttgccaccactatttgataacctaggaatggcaggtaatgccaatgctcccaggttgcattgctctgtttttttcctagaagatagagtattatatgttgcttcactgaaatagtaggtctggccattattaccatgcacccgctcaaaatagcatgtctgatctggggcctgggtgcatatccaagtcactatcgatcgcctgctgtccggtctccgtcgccccttcatcaggttgacgtcgatgcgtcgccaacgctgcgccttgctgcagtacactctggtattgtagcccatcctctttcacgtttatacattctctctttgaagttgaaggaaagtaaattacaattttctgtgtatacgttgcatttt

SEQ ID NO: 30401 - DNA, 1020 bp, Oryza sativa
tgctcaatcagagatagaggccaataataacacactgccatcttgacatttatactctttttcgtcatcattttctaaaattaaattgttgtcactcttttttgatctcttgccaacttactggggatgcaagaaaatgcagattttgtatggaaatctaggccaatggaggcactttaacctactacctccattccaaaataagttaagctagtacgggaagtgacatatcctagtagttatatcgcactactgtgaatctggataggatatatcatattccgtactagattaacttattctgagacgaaggtaatatatttcattttgcatttctgaaaagcaacacggccatattttaccaaaatttaatcacagatgggaaacggagatgactggaaacccaaaataatttcaactttctttgtgtgatgaacaattggcatatgagattattggttttcatatttagagattattggtgaagtggttttgaagatgattggattttcaggtgatgaataggtgctgctgattgtcaggtccggtcagactgggcaagtgctgccggtcagaccggaggtatgtgaatggtcggaccggcctgcccacggtttgtccggcggactctgtatcagtttcggttttggtttcgggctgtttctttggatatccgtggatagttcatgtttatagcttctatatggatactatgagtatgtaatactgttgtttgctaacaatgagtcaagttagagatagcttggtctcagaatatggtttctttgtttgattcatgtgtaggtgacttgatgcctcaggagagtattgccggtgatggatcgggagtcaacttggagataaggtgacgtccggatggtcaaatatcatgcggaatacttaggctaaagatcaatgcacatggttggtgaagattccatatgacatacgatggagatattgtgtgcgttgcggagtcaaatttggaaggagtctaaatttggtacaattggagtttgt

SEQ ID NO: 30402 - DNA, 943 bp, Oryza sativa
tttgataatgccaaaattttatcatgatttcttatatagttaccaaaatttagcagcaaactaaatgtagccactttttttaacaactttaccaaaatttggtaatattaaaaatgacatcaaatgaacaggccctgaatgaatgaatgagagagttgtcctcctttctttcgcctcacttcctggctcctgctataagaaacacttctcttcccgtaaaaaccgattaaagaaaccaatcatgatacataaaaccaatcaacctattctgttcaaatactttcactaaactgaataaagaaacgttacgacagacgggcctataaccagtaacaagttgaaaaacagtttggcacgaggcaaaatatactccctccgtcatataaaaaaccaatttaatattaaatatacgttttctagtacaatgtatctagacattagtatgtctagatttgttgtattaggaaacgtctaatccaatacgaggttaagttttttttaacgggagagtagacggtaatcataaagagggcttaatcaccttcttttttttttaagcacgcacataggaaaaacatcagggtatgcgggtatgcaggcgttcaacacttcaacgtactacgagacaaggacgccaaaaaaatacttcagccgaccgctccgacgtgtaactgtcaccgggcccaataattcgtgggccccacacgccatccacataataactccctcacccccacagcccattgacctccttcctcctacacccacccacccaacccaagccgtcgtcgcgttcacacacgcgcaccctctctgcccccacaatccatcccgtcctctcctcctccctcgcccgacgcgcatcgccttcgccatggacgccgcgagccgcacctggccgcccccgaccccctccccgccgcccttctcctcccgcccccgc

SEQ ID NO: 30403 - DNA, 3573 bp, Oryza sativa
ttgggatttatcggcaacattactctttcagacatagatcatttattcaattgcgatttattagtttgaggggtttttttattccgataaattttcgttaccatattggcgcctgttcgttttcgctccgttttcggtttcgataatattcgattccgttttcgtatccgaggtttccgattccgattccgaaaaaaaatatgaaaacgaaaataataaagatggtttccgtccgtttccgtaccgttttcacccctagttaggggtgatgagcggtgccagttgccacccaaaatcctttgaagatgagatgcactactctgtttcaatcataactagcatggtggcccgcgcagatttcgcggtaattccgaatttttctgtaaattgtatttctatatagactctatgctcttcttccaatattatttatttttatttctgaatttttattatttctaattgtattcctatatggactctaaactcatctttcaatattctttaatttttaatttcgaatttcagttacttctaaattgtattcctatattgactttaaactcttcttcccatatttttcttaatttcaaattttagttatttgtaaattgtatgtttatacggactctaaactatacttttaattttattctgtttattccaaattttagttagtttaaaattccagtatggactctataatcaacttctaatattcctttttttaattctgaatttctattttttttcttaattgtatttctatatggactctatactctacttctaatattccttatttttaattccaaaattgtattatttcctaattgtatttctatatggactctatactccacttctaatattccttatttttaatttcgaatttctattatttcctaattgtatttttatatggactctatactccacttctaatattgcttatttttaattccgaatttcagtgatttgctaattgtatttctatattgactctatactctacttccaatattccttatttttaattccgaatttcagttatttgctaattgtatttctatactgactctatgctctacttctaatattccttatttttaattccgaatttcagttatttcctaattgtatttctatatggactctatactccatttctaatattccttattttttaattctgaatttcaactatttctaaattgtatttctatatagactctagtctcctcttctaatattacttattttttaattccgaatttcagttatttctaaattgtatttctacatggactctgctttttctttttctctgattaatgtgagaatttctaggccatgagagtgaacgtggaggcttctttttctatttctttaataatatgatagattttggaaagattctggtgacctcctgcaagttgctctgtggggaggttgctgcggctagggatgtcttaataaccatgcttgctgtatacatgtactaaaaacttctcctcacttaataatcggccagcgtacttttgccagacatatgaaaataaaatactttcagaaagatataaacaatgataactttgtaccagcatcatgtcatgtcaagaaatgacacaacagatttcactcctaatattttctttaatgagacatgggaatctttttattagcatgatggagaaaattatgtagcagaccctatatagacaatagaggaacggtggcttctggaatgtcaaaaccgatgaattgtcttttctgcaatttggcgaaaaacaaactcctaatgcacactgcgacagacagggcatatcacctaacagcatcttttgtcatgtccagcactgctaaaggctgtgaatactccaaactaaacgagctgcaccaatttcatatccgtcttctcctctctgccactgcataatctaggtccagtatatcaccaggaacgtgctcatcgtcttccttgcagccggtgatgctgtggctgtacgcacctaaggcctctggggactggggtgagtctttcttctttgccatatggacttaatatatcttctgctttcccttgttcaattcctgcttcctgtcatggttggagtcgatcgagacgttggctcactcagtcatcttcttcttgtactccagcagaagacgttgatccggctcatttcagcctcacacccagcaacacttcgccttccatgcttaagcaaaacctctcaacttgttgcccatttcttcttcgtcgttgcccgttgacccaagaagctgtctaaaggtaatcccattgttctagttctttcagatttaatatgttctagttctagttcttaccatccacatgatgccctcgccaagtcaccatgatatcatcatccaagatgaattggaactttgcacaccaaccaaataggggtagagggatcactgcactatatgaaatttacagcggttagtatcgaatatgattttatgaaataattgccttcttccgttcattttagtatgttagactgtgtattgtttgctgttaattagttagtcttattctcaccagtcctatatacaattatgtaattgtaaaagataaaccattctttagttgtagtcccatattaagagtagatacactacactacacagaaaaaaaacatacttctatgaatacctcacatgataagaatgtaatacttttagtgttggttatgtacctcatactgtgcatgatttgtccctagaactttagtttaagtatgataagctaattattgtattaatataaatggcaattcagtagttatacccatggatgtctattttatcaatacaaaagttttagtgaacattatatatttttcagatcatgctaacagatatcgtgcattccttgccaacctacaatgctgtcactttctgaaacgttaaaagtggatctcccttgctgatttttcctatggcaaccatattagattctttggttggatcatgtgccaataagttgaaagagattattactgaagaggtgatacttattctagggatacaagaagagctcgcagagttgcagcggaagactgaactcatacattgttgtattagtgatggctgtgatgctgaggcaaggaggatggaagagtcagcagttgacaattggcttggtcagctaagagaagttctatatgatattatgatgttgatgatattattgacttggctagatttaaggggagcattctactaactgatcatccttcatcgtcatcaaggaagtcaattgcttgcactggcctgtcaatttccacttgcttttctaatgttcaggcacgtcatgaggttgctgtgaagattagaagtctcaacaggaagatagaaaacatttcgaaggacagagtatttttgacactcaagagtacggttcctactggaagcagttcagtattgagagtgagaaaaagttcccacctacttgagcccaacattgttggcaaggagatcatacatgcctgcagaaaaatggtagatttagtgcttgaacataaggggagaaaactttat

SEQ ID NO: 30404 - DNA, 657 bp, Oryza sativa
gcagatcgttaaggtatggtcataactcataagtatgcaatttgtaggcttcgaaaatgttaatttttagctatcagaatttcagtaaaacatttggaaagatttatgcatggcaagaggcacaggccttttcacacacgccgtgtacggaaaggaagacatgtcacttgttctaaagttgcatcatggtgcactatgattttttctgcagagttacatgcgtgcttgcacgagcagcaggtttatccttgcagaagccaagtgctaaaagataagggagaggtacaacacctacctaaaaattcagagaaagcactgcagaaaattgagcagatctcacttcagtttgcaggttgcaatcaaacacactgaagttcctttgcatgtggagattgagtagtttaaagccacctgcttcaatctcattgctccagtagcttcagagttcagacacagcttgcaactatgtccagaagtaggattttactcggtgatttctgattaaccatttgtcttgcttccatatgttgctatgctgcataaaaacctcatgctaaacacaggctccagaaatggggatctagcagcaactcttcttaggtatcgttttagtatgagcatttaaacctaaaggcatttacatataatagggtggta

SEQ ID NO: 30405 - DNA, 1730 bp, Oryza sativa
ccccctataaacaagaacaggtcagcatgggcagccttttctagccaccctatgatcctttaacttgttgttgctcatcactagcatgcatgggggcaggctcatccacccctggcccccaatgttgcttcaaaggatgtgtcatgtcctagaggaaaatttttcaccagaatatatatacacctcagcaaaacaatcttgtgagatcctatattgctatcatgctagtatggtttatcttttgccccttgaatggtggatgactctctctatgcactactagaaaaagtatttttcccaggcggggggcaaaacaatcttgtgagatcctatattgctatcatgctagtatggtttatcttttgccccttgaatggtggatgactctatctatgcactactagaaaaagtatttttcccaggcggtggaaatgggtcttcccaggcggacgctggctccgcctatacctcacaatcttcgcaggcaggccggcggtccgcctagtaagaccattatcgtaggcgaactggagctagaggtgccgcctaggaaaatagattcagtgcgccagaaaaaatgtgattgatctgcctgcgaaaataggtacaaaatttttttaaaaaaatgctacaataataatttgtgataaataattttccaaataattaattaattgatgcataaaaaatattagtaactaaaaaacatttgatattaacaaatatacatatattgcataagtgaaaagtgtcgtcaaaatgttacaatatttataacattgtcacttcgaatacactatctaattatattatggcaccgcgttgttccactcccaagattcttgtattcttatcttgtagccaggatgctctctgggtcgaagaactatcctttgatatgacagcactcacggtggatgaagtgacagagatcgcgctgcacatttgtaatgcatgtatcgtcaaagcttgtttgatattctattctaggcagctgcatgcatgaaagaaccacaatatatatattagtaggttctaaatgtgcatttctccaatgcacttatacgttgagtcgagagatttacatcctctgcgttaaccctttatttcccattaaccctgaggaattcgcatgcgtaatacctgcagaggaccgtgcctctagattgcttgtgacacttaatgacatatcatagaaggaaaaagttaaattttgtaattagtaaaacaattggagtacatttactgtgtggactattatatatatatatatatgtattagcagcttctctcttgtttgaatctgctctccacccttcttcttgtagtagttgttcgaactgtatgaattttttaccgtttcgtattaaggaggagatttaattgtaaaacattaataatagaaatgcaagagtatcagaatcacttataatgtgattctgatactcttgcatttcgtgcgaaactttctatatgaaagttgctctaaaatatcatattaatctattttttaagtttgtaataattaaaagagtaaattgtattggtggtacacaaacttattaagtgggtgcaatttagtatatgaacttgtaaaatgctcgttttggtacacaaacttatctaatccgtgtgaactaggttcaacatggcttgccaaggttaattccacctaggtgatgttaattaggatatggcgtgcatacgtatagtgagtatgcataaaacat

SEQ ID NO: 30406 - DNA, 994 bp, Oryza sativa
ctggacagccgccgcgcctccccacccgcccctgccggatctggcggccgcgccgccgccgccgccctcgccggctcagcgccgccacgcttcccctcccgccctgccggatctggcggctgggccgccgccgccgcccccgctggctcggcgccgctgcgcctcccctcccgcccttgccggatttggcggccgggccgtcgccgccgccccagccggcccggggccgccgcgcctcccctcgccacggcacaaagaaagaggggagagatagagaagaagtggaagagatagaggagaagtggagaagagggagccggccgaccttatctcctcatgtgggccccgctgggagaggagacatatatatatacagtggcagaagtcatctcaaacgggctgggacttaaagccgtttgaggtgagtaaacctcacctctgacgggctgtccggctgcgacccgtcacaggtaactagtcacatatgacaggatctgacgtagtgacatatggttatatgtagacgtggaggagaaagtgagtgagtattatttctcctaagtcttgatctatcggttgagatatgagtatcactctacaaaattatcacgattcaatctgatggtgtatccgatcccaatgcccgaaaactacgcctacatggttccttttcagaacgagtagcagaagaaacttgcgatagatcgatcgggatggccgatgcaaacggcaaggcgctagctgctcgctatactccgtgctccataaatcaagagctagctagctagctactcatacctgcaggggggtggtggttagtgggagtacagggaataggctctcctactgatactgtaattattcggagaaaggcgccatgaatcaatccatccatcgatggagctagctagtgcaggtagccgtccacgccaccggtgcgtggccaatgcatggactcgccccgcccgcgcgaagtcaatggctgccgttttgt

SEQ ID NO: 30407 - DNA, 882 bp, Oryza sativa
tgactagttacctgtgacgggtcgtagctggatgcctcaccgatgacggcatcccgtatgacccgtcagaggtgacggtcatcagtgaccatttcgtttgcccgtcacaggtatcccgtcagagatgtgaggatctggtgtagtgagatatggttatattttgaagtggaggagaaagtgagtgagtattatttctcctaattcttgatctatcggttgagatatgagtagcactctacaaaattatcagattcaatctgatggtgtatccgatcccaatgcccgaaaactacgcctacatggttccttttcagaacgagtagcagaagaaacttgcgatagatcgatcgggatggccgatgcaaacggcaaggcgctagctgctcgctatactccgtgctccataaatcaagagctagctagctagctactcatacctgcaggggggtggtggttagtgggagtacagggaattggctctcctactgatactgtaattattcggagaaaggcgccatgaatcaatccatccatcgatggagctagctagtgcaggtagccgtccacgccaccggtgcgtggccaatgcatggactcgccccgcccgcgcgaagtcaatggctgccgttttgtggcccgcgcgcgcgtattaatcacctcatcattagctctctactccgatcgatccaccaacacacctgcaggaggatcgaagtcagcgcgcggccacacacgcgtcgtacgtacgtacgggtcgcgttcgcgtgcacacaggcgcacagcccccgtgcgcgcggtctcatgaacggtgagccatagagccagcgcggtgatgcaggcgatcgatccaccgttagaggtcgtactccctccgtttcgttt

SEQ ID NO: 30408 - DNA, 4196 bp, Oryza sativa
cggctatagggagcacggtggggaggtgtctagggggcgcggggtgctcggggagaggggaaacgaatgaagggaggcacgtgagtcgtttatataggtcccggagggggagaacgtggccgggagaggcggatttgaagggggaagaggcgccggcgacgtgggcgagtggggtggtttggcgccggttttggagggggggaaaagtgggggaggagagtggaggaggtggggtgacgcggtcccgcggtcggggcgagcgcgcgggtggaggaggaggcggaatcggcggcgacgtggggaggccgtggcggcggtttcggctgagggagccggaggttagggatggccctgactggtggggcccacctgtcggtggctcggggggaaggagagaggaggagacggttgggggagaagatgacaggtggggcctcgggttgacggggaggcaaagcagacttgagggagagagagagccgagcgggctgagggagaaggccggcccgagagggagagaggggggggggaattgggccgaaaggggcccaaagagaggagggaggtttttatttgttttctttttattttaattggttaaatgatcttcgtgactttaaaactatttctcgagctccgaaaattcacggaaaattccggagagtacattagggcacaaagaatattacaaaatattcccggccaatgatttttaagggaaaattttaattctcccattatttcacttgattaaattgcttaactttttattcaatttctaggaaatgcatcattaaatgatttttaatcccgaacgaaaatcggggcgttacaaatctaccccccttacaggaatctcgtcccgagattctgggatggctagaaagaaagccggtgcagatgggcggtctgactgatctgcaccttgaactgccacattctgcttcgaactgattgattgactggttgatcaaacctgcacgattgaactggctggattcgacctttctgttcctttgctttgccaaaactggaccgactggttctgcttgaactgacccagtctaggactgcggatgctcctgaaacttacttagtttggactgaactgttgaggttagcaattttggtaacctgagaattcaccacgctggctataagaggatgaaaatggaatctggcatttataaatcatttaccctatgtccgcttcgactggtcccaattcaaataacaagtaattccaggaaaacctgcttgacctgtctttcgtctgaactgcaaccatcctcgatgctacttctctaagctgaactgttgacctggcctcaagggtgtacattagaattgaacctgttgacttgagattgggagactctgctagtggctcgcaacggactcctttaattactaaccaaattgctgcactgggttgaacattcaagtgaaatgccgacgaggtaaaccaaaactcatctctgagacctaccccccttacagtgggtagtcttactttcgcctgactgagaacttttgaactattgtccttgaaaaaaatgaccaacatttctcggatttacagatgccctgactttgaagactgaaacttcatcggtccatcaaattgaagcaatggcgatgcactttcatcccgacaagatttggaacttaagccttagttgatgataggaaattccacataaaagtgactctcatttagctcatggacacactgactcttgactgcaacacactactgctggagttctttccgctacacttgaccttgcatcgagctttgcatctcccgcatcaatacatccatcatctaatcttggacaccaaatgttgatcacgagcagggttcttctggcactgggataccttgtagctttcaactgaaccattgattggtgactttaattgatcttatctctgacactgaccatccgctgccaggacggaagagaggtggaagagaggggttgctaaagataaggtactaaaccacttgcctactgatatgttgtgagtagacttttattcttcaagttgcttaagcaaacaacctagtatggtcgcatccccaccaatgatgcaaaccatacccctacacacaagcaaacaacacacgatctagaaagctaacggaactactcttctgggaaagattgggtttaggtcatctccgagaaaactccacttgatcttcgcagaacgacgactctgaactgatcttctcactccttgcacgaagcttgaggctcgaattgacttgacttccgaacagacatgaagctgacagctggtcctctaggtttgacaactaaaagaattggagagattgggaggagaattttgaaaaaccgtttcacaaagaaatgccgaagggcgagaggagacaatttgcaagtagggttttcagaaaacttgtccttagggtttgaccatttggctcaacctacagtcaagttggctctgataccactttgtcacgcccagaaatttagcccaaatttccagactattttgtgtattaaatccctgtccaggaccagccagggtacacaaaacgacaagtaatatacagttccaaacgtaaataaagcgtaaaatacttacaaaagaggcacttagtcctcgcaccgaaacgaaaacagcagcagcggaaaaaggcgatcctagcggggcttcagctccactccacaggcaaaactcaactggggtctgagccttggtcctctaacttcgtcttcagctcagaagcactacacttctgaaaagggggaataatagcaagactgagtacaaccaccgtactcagcaagccacaccaacgatgcagacgtgcaaggggaacacaaggacggtttgtggctatttgcataaaggcggttgtaaaacattttattgagcaaaacagtaaaactgttgagtaattaaagtaacattaaatctccactgatcaacgctacaccacgttgaacaggcccaaccaacccacctaaactacagtgtattaggtcgatttattaagtgtgagactaatcacggtgaatctggtcgaccgcccataaccgtgggcacggctattcgaatagttttactctgatcagaggtgtacaactgtacccacaagacacagccccacgacacgttcccgtgcgccgacatgccaccacgacataccggaaagaggccgtgacaggacccttcgcataaccccctctaaccgatcgcaccacaccttagggttcgcccccgtccccagcaggcaacgggcagcccccctttcgtgccgcggtgaatccggaagccgatcaaccggacaccccggccgacccaactccatcacgcccaccctcgcctgggtacgtcggctagagaaaagctacactacaagcccagccgttgcccacgctggcttgtgataagtacgataaattcttccagggcatcccgcgaaccggtccttaactgccatgggtgcgaccagcaaaaccatgcacccacagcccaccattcagtcgcattttagttggataattacgaccatgaagcatggccaggtgtctcgagcacgcagctcactctgatactaaaaaggtctaatactgcagttatcccatcaactgagctagtggtaattaagcatggctaagcatatagttctagctaggtcacataagtaacatgagctagtcgattcattacccaaggttgacaaagaacagatatcaagtaaacatggcacaagcgagcagataggtaaaaccctgaccccatgtaattagcaaaacatgcatatttgtttgcaaacagtaaaacatttgtaaattgggatcaacatgctcaaggggaatgtgtgacttgccttgcttcttcactttgatcttccgaactcttttcctcgcgaccgcggacttccgaaacgacggaaactacacgctggcacgcaaaacgagaaaaaactctaataaaaaccaaggaaacaggacataaaaactaaacaaacatgtagagctcaattttagatgaattttgcaagttgaatggctcaattcggagttcgaatgaattagatatggattttagaaattttgagccatttaaatgaatttctagaattaaaccgaattattgcgcaattaataattaatttctcaaaggaaatgacaagtgctgacgtcagcaaa

SEQ ID NO: 30409 - DNA, 596 bp, Oryza sativa
tccagtgttaatcgcagagaaaggggtaaaataaatttcgctatgctcactggcgtgaaggtggtacgctgccgtggcggaaagctccgcatcgtcaagcacaagtcgtgccgttataacttcggcgaagactacacccctgattatctactctaactagtagagtactcctacttagtactgtcctaataaaaacccttatttgattaatcctactcttatgcaggatacatattcatcggttagttttaaaactctgcattgcatagctctgtaaactctgttagtagagatgaatgatttcaaggaagcaattctattgttaaggacctgaaaaaaaaacatttataacctgaaatacttatcatctgatcagatagcagtctaagtgccaaaaactaatactagtgacaacaaatggcagctgccataacagataagcctgaaagcaatatgtcagcttccttgatgatgcatatgtggccatgcgggttagctcgtctctctataattttcattcctttaacaggctgcataaatgcatgtagtattgacgatgagaaaaacacaatgcttaaatcatcattgggcaaaaa

SEQ ID NO: 30410 - DNA, 2139 bp, Oryza sativa
tttatcactcatagtactttaagtgtgatttatatcttatacatttacataaaatttttgaataagacgaatggtcaaacatgtgataaaaagtcaacggcgtcatctattaaaaaacggagggagtattttgttttatccagttgcttcttaagagctcgccgtgtttcgttccaaaataattcttcaaacttcaaacttttccattacatcaaaacttttctacacacacaaactttcaacttttccgtcacattgttccaatttcaaccaaactttctattttggtgttaactaaacacagccagcgaatgctttggtcaggagttggcattctgtgagagaatcagtgctttgcagtggtttgctgctattatgtgttctttgtaatcatcatacagtgtcgtaccaatattgataatggtgtggcgttaatgtgatttcctctcttttgatgtctgttgctattaatgccgatttattgttttagaaaaaataatgagtcgatgaatattcctctttgtcgatctgagaagcacatttctagttgttttcgtattccgataaatattcgttctgatccatatcgtttcgtttttgtattcgataatatttgactctgtttttgtatctggggtttcctgttttgattttgatttctgagaaaaatgaaaacggaaatggtagaaccagtttctttccgtttctgaaccctttttatcccttgaagaaaacaataaaataaagttaatatgggtgttggggctggtatggaaatgacatggacaagattagatattgtaaccacccatataaaacttgctcttaagatactatgtgctaggagaaagtcctattaagcaaggcagatgctaggacatatgttggatatgtagaacatgaattagtgggagggagaaacatagatgttaagtttaatatgttttttattccaaaatatagcaacctatactagaacatcacctattagtatgaatatgatggattggtcttgaatatgaaacattttgcctcaaaagatggaacattacacattcctaaaacccgagttttttttaaaaaaaatactatatttctaaatgttgttatcatgtggtagtatttcaacaggacatcatttcaagaaaacaaagccctatactccggtcctctctacttaatttcactcggccagctgaagggtgtctaatttggccgcctgcaggacaccctttatcacaagagcttttagggatcgaataagctcctatgtccgacctagaactatctcagggtcatatgtatatatggtccaactagctgaaaaggagaacgtgggagttgtggaagattaattgaacctgaataatctaagttttatcataatattatttttcctgatgcaacacacatgtttttttagtatgtatataatagtcttccatgtaaatctccacatcaactatggggtatcatccaaaaaaaatacacatttcggggtaacacccacaaattcagttcttgagattctcatctcctagcctacccatggtctgatcaggctgcactttcttttggctctctcgatccaatacacaataacacagtatattaccagatatatattctgagagatgattctccctgatccccaacataacttacgttggcatgttctgtgctgtttgcatctgaaatcatcttgaacgctcatcattatttatggcctgcacgtcgatgccaatgaactatcaaatccaatgaatataaacaatacatttcgtacttcgtttcatctttcttttcctacaacataactaaatctaaacaaataagtattctatggcatagtattataaaagttgagtcttggaaaagctagtatcggcttattgtgtacttgacagccaatggaaatcagtccgtttgccatagttgatgaaaatacggttaattgtattaccaatcatgaaattcacacgaaactaaatattccaaataagtataacataatttatgacatggaagcagagcatttttatcatgacaattttctgtgaacttaataagcacacaaaaactatcaaaaatttaatgagtttactctaagcggggaattaccagttttaagtttcaaca

SEQ ID NO: 30411 - DNA, 695 bp, Oryza sativa
ttgaactgagagttctgaaggtatcagtgttctatcattgtacatctatctttgaaagcgggtacaattgcagaaatatccattatgaaacaatattaatatatatgacacatttttttaagactatgtctaagttatatcatagacacactttcttataggcatacagcctttcatagaatttcatatgattgttcaaaccaagaagacaatattacgggagaaactaggtgtatactgtataccatccaaattttcttctttagaaatataccacataccacaaaaaataaagtttactttaataccgtccaaacttcataactcttgtaaattgaccactatcattaccacctgttggaccaactaatagctattgaactagatggctgatctggtgtggcttggctttgggtaagaaggattggcctctgtctagtgcctcactttccttctgcggttctgtctactgtcctggtttggaagaagtcaaaccaagccagatcagccatctagttgagtctctcttaggagattggacgtgaggtaacgggaatagtagttgatgagatttgtgaagtttggatggtcttaaagtgaacccagcaattttggtgttatctatcttaagaggaaagacttgagtggtatacccaatgttgtattctattaatagcaaaacacatgaagatgaa

SEQ ID NO: 30412 - DNA, 739 bp, Oryza sativa
cttaagcatggcattggcaagagaagacagtagtgcgacagctttgtattgccaagctaccaaggggatcgttttgtcctgtctccacctcaagctttaaaaaatgaactgtggttagttttcaatacttcttttttgttaggttagagggcaaacacattgctaatcacacaagggaacataaagaatggagtgaaccatgtgtgctgcatattcaaggactaaggagtgcattggtatgtaacaataattaatatatgtacagttagaataattaaggacttgctatttattttctttatgagtatttttttattattatatatgaaagacagctacgtgcacacactacacttatgcattggtgagtactccctaaaaaaaaccaacttttggcaatgcgtctagttcattgctagaagttggttttttatgggaataagggagtacatgagtgtggatggaagtgctcttgccatatcaatttaagatgaaaaacattgatcttgatcggtggcgtttaagaaaaaaaaagtaatttgtagtattaaattaaactgcaattttcaatataaaagtaagttgatagagtatttgcagcaaactaaagttgaaacaaaagcatcacattgtttggtttgaagaatgcaaggacattttagtatcatgtactccctctaaccacaaatgtaaacatttcaagcgtttaaatttttatccaccaatataagtattcata

SEQ ID NO: 30413 - DNA, 675 bp, Oryza sativa
gggtatctagacatgaggaagagagaagaaggaagaattgaagaagccagggatgaatcaatcaaaaaatttagtggtggcatatcttaaattactgtaaaattatagtcaccttttacagatatacgaattataataacccttagaaaaaagtgaaaatctgatgttgcccgtgttgaaccttggacctttatgacctttactctactgccaaaaactaatagttcgctttacgatgaattttcgcacatgagacagatggtccattgtttaggcacgctcatcttcgccgcaggcacatatccttttctttacagaaaagaatgaataagcatgcacatactgttatgctactttactatccgttgttctttgacgcaagctgtgcaaagcaagatccattctgcacgtggttggaacagagaccacgtataaacagctcataaacaataggttagtaggagattttaattgtggacaaaaaaacatccctcagctaaccattttcgaggccagcagtcagcagaacaggcccgcaccccttgccccgttgtcagattttcagtgggtttcagtttggtccaatgcagccatgcagccatgacttgcatgtcactatgaaggaggaaacatccgaactcaaccgattcgccgctcttaattagccgcactgta

SEQ ID NO: 30414 - DNA, 658 bp, Oryza sativa
gcttattcatgatcgtctcatcctcgatctcaactgatacaatcactactgctatgccctcaagcttgtccacaaccaccattatatcgacctcgctcgacattctcgttaaatgtcttgtgtagtttgtcttcaaacatatatgctctcaagaaagtggtgaggaagaagggtggcaaaagatgtaagcttgaaaagataatgcatggcttttaatagtaggacggtaaagatgagaacaaagatgattctttatagtaagatggcaaaagtgaactaaaattcctgctatatgtttaaaatcgtaatatatttactgtatgtcaattttgtctatctaaaagtataatgtggaaacaaataccttttgcaacctattattatctgtaccaatctatattatctatgattatggagaagattaaccaatgaccacatgaatatatatgatgtgcaatttgttctgtgccttatttcaaggctctttttacattatttctagtaggattttttgttgttaaatgtgtatgatctaatggtgtagaggtccaagtggctgtttatgttttgtttgactcgctgacgcatcaaaatctaatccttacgatctagatatattatgatctaaaaatgtagatttttcttttctatagcagat

SEQ ID NO: 30415 - DNA, 665 bp, Oryza sativa
tgtgtggttgtatataattcgttgaaaaatgtttcatgcacctaatatagccaataatagtgccttcatttttctacattgtccttacatatttctaatcaataacgatgcttaatccttgacttttcattgaaatatgaaagatcataatagctatatgccaacgttatacgactgctataaaagtcacattggcaacagatacactgagctatcttaagatcagatttgagatgttagtatccatagcattttcatatgaggtggtcatgcattcagacttgagatctcagagtgtctaatcggctgccacgtgcaccttctagatgctaaactttttttttttgcaccactactcctaccgacacctcatgtacgtatgtgtacaaattaagtactcccttcgtatttagggtaggacgcaattgactttttaaccaacgtttaaccattcatcttatttaaaatttttgtgtaaatataaaaatatttatgttatgcttaaagaacattggataataaatcaagtcccaataaataaatgataataatatatttttttaataagacgaataacagcgttatattaaaacacggatgaagtataaaatactagtattccgtactatgcacagtagctaaatacagtattgtttggggagcag

SEQ ID NO: 30416 - DNA, 2567 bp, Oryza sativa
aaactagtgtaaaatactagcctgtatttcttgtccatctagactgtaaatggcacctagatcccccgtttctcgaaaaaaagttccagctgaaaaaggcccattacaccagaaagaaagtaaactcctccagaaaccacacatgaaaaccatggtagtcaggctcctctcttcttgccttgagcttgcgtagccctctcctctgcgtctcctatgtggacccccgtttttataacaagaatcattcgtgtaaacagtaccatttccctggatcaagtagtctggtacacacgagttcatagctgaaataccagatgcacatacacgagaatctagtgctaattattacatcataaacccgcaggcattgtcttaaattatcggaccgagcggtccggaatacatccaaaagcagaaatagataaggcagcggaattaaggcagcggcatgccattgccacaggcaacgaccgtactaagacctactgagcgccatcgtcttcatctccctcctggtagtaggcatagagatcctccggaggttcatctcccgcttctgattaattttatatttgcaagggtgagtaccaaccgtactcagcaagccaccacatcaacaatgcatatgatagggtatttcaaaggatggctatggttcttttgcgcaaagcaaattttgtaattcttttcacaagcctaagacctagcattgactgatcaaattttagtaccagtgtttgtattaaaacaacgacggttctgtccaccatccaatgtgatcccaaggatagcttcctgccattgagtcgttatggttttctgaggacgcccaccttcccccttctcaggaagtggctccaacaacataaaaattcatcatgcaataacccatcccacacaaattaagaatttaaagactaaccaagagtaatacatgtcccggtgctcaataaccgcgagcacggctattcgaatagatttggtttactcacactgcagtggatgtacactttacccacactccgtgactgcccaacacatgagccttgtctcaacacatgagacacgtcacggcaaagcttttcgataacctcgcattggcagtacccgctccatgaacttttgcatcctcatgcactctaggcgtacacagtttctagcagtgagaggagttctggtgcacccgggaagggaagatttacacccatgaattaagttataattaggttccactcaacacacgacagtcctaacaatggcgacaccattgtagagcccctgccttacacatgagaaaccactatgcatggatattgcctccgctcggctatttattccgctaggtctatccccattcaagaagtgtggtcgtacggggtcgtttcatgcttaacttcatggctcggtccttaattgaccggggacggtactagcctttcccggatatcacccaaatccaccgtccgccccggtctaaaacaaatgtttaattcctttcatgtcatcattatcatggcaatgtggcgctcatgtctccacatgccgcatctcaattaccttcccaaaggtaattgcccaagcatataatatttgataaatatgagtatgcaagatgctaaagtagcatttctaagcaattgtcataattgactagggattcatacgtaatcatggttacaaggatttaaaggtgaacaataaacaaggcatggcataatcacaaataggatgttcatcattgcatgtaatcttatttgtaaacaagaattaatttcgcaatagggatcaacgtggtcaaagaatagtgatgatttgccttgctcaaggtcttgcgggtcttggccttcacctggatccgcggctccctcggtctctatagttacgtgcgtaagaacaatttgaattcgattagaattcaaacaaaatccaaataatgaccgaattgaaaaacgagcgcgagaggtgaattctatatcggctattttattcgcgaagtggaatttttcctcctcctaagatgttttgcgtttcctaagaaattttgtgatttaaaattatgtcctagacttcatctaattatttagttcttaattatatctaaattactaccgcgaaattgattccttatggagatgactaagaattaatctataacaatctataagaattcatctaattatattttcattaatcctataattaaattctgatatttttgaatattttgaatctccccctaatttttcctttcttttctctccctctctcttttcttttcttttcttttcctctcctttctttcttttcctctttttcttttctttccctcccagcccctttctccctcggctccttctccctctctccctttttctgcctaccgagaccggctggggaaagggaaaaaggcggcggcggcacggtttaccggcggcaacggcaacggcgcggcgcacggcggctgcgacggcggcggggaacgcggcacggcctaaaagggtgacggtggcgcggttgagatggggaggggggggggaaaattggggaaatggtgtggggaggtttgg

SEQ ID NO: 30417 - DNA, 663 bp, Oryza sativa
acaaataatcttgctatgtctatcaaaagttgggccaaattcttttttttttctcaaaagaacgaaatttccactagtgtcacgatcgaaagacgaaataagattgctcatttgagcatccggtccatttcctgatgtgcgtacataaatgctcattcacaattcagtccaatcaatttgtgacctgacaaaattactgaacaataaattcaaacacacaaccacaaaactttgcactacatgataattcatcctggtctataaaatgacacgaagaaagatatattagacgatgaggatggaacaagataaatcgaggaaatgcgcaagcattatggtgttgttgtgtgcatctacagttggagcccataccagaattatcattaaaatgttgaacaagccagaagcccaaaatgcttttccgttcgattacgcttgtaagttcacggttacttgaccgacctcgtacatttaggaagaactactctccgagggtgcttaattttctcatcaggtggtcgtgccgctcgatatggccaataggccaatcgtgtgcccctttcccatggctcccccttcacatgaaaccagatagaatttcaaaaacaattaaaaaataataagttttaaaaggataatagaaaataaaataaaaattaagtt

SEQ ID NO: 30418 - DNA, 1316 bp, Oryza sativa
agatatacatgcagaacttgatatctattaatttcttatctcctcttactccatcatccatactttttgttcactatagtttgctattatgtttgttcaaaagatacgaaaatagtgaattggtactgaaagatgaggtggtatatataaaaggacgacgaaatatataatgcctctatgcatttaatacccatctatatatgttcgtagcaggaggtagtaattacatttctctcatcaatctgttggttaattattttgaattaaagtgtgaagtaaatgtatatataattatgctttctgcataaactttttgtgctattccttaatcacccttgaagagctaaaaatagcgaagaccactttgtatacatgcaccatagtcaagtccaaactaagtatatagtggccacaatgtaagtcggattgcgcacaaccggcactgaagtcagccaggcatataaaggttgacaccctaaaatagtcaagataactaccatttggtaccataaaaacaaaatggatgcacgggaatgcatgtctttattatagtgattttagtgactaacgattacatgtcttcccgtggatcccctatgttataagtatgttacctttgttgtatcaccttaaagcaaaatcccaaaacattagaggaaaacaaaggattagaacggataagtagcaggcatcatgctcagcataccatgaagaaaagaaaaccatagtacctggcattaagttccaatttttaaagtagagatcatgtagatgcacaaatttaatttatagaccactgctgaagaaatgatctttatactggtttgtaatcccctttagtaccagttgtagcaaccgtgaccaacaaatcgagcctaaagaagatctttagtaccggttctaaaatgcatattaagtcaaaaaaaatgtgggggatacatattcaaactcaagacctctcacctcaaccctcacacacctaaccatcccaccaactccacatatttgacttggatagagattatttctttttaaactaaccctagaggcatgtttagtccgggttggtgttaccaactgggactaaagatctggttggtgtaaccaacctgtactaaattaaagatgcatttttactacctattggtaacaccaaccggaactaaagatgtttttggaacttggacttttagaaccagtactaataacatattagtaccagtaccagttcttaatctaaccgatatatttgtgtttttgtgtcatgacaaaagatcagttatacagtagtggataagacatttttttgggtatgc

SEQ ID NO: 30419 - DNA, 764 bp, Oryza sativa
aacagggagcagtcgcgcgaagcgcttcccaaaaaccttattgccgccttctcccggtgcaggacgtcgaaggcagaggttccggagatctgctctcccgatcgctggtgcacgccggcgagcgggatggagtagtctacgagcgacggcgcagtacagagtagaaggcaaaccctagattgattttgcgtatatactgcgtgaagacggcgggtcggtttatatagagaagggtcgcttaatcagggcgcccgcacgatctctactgcgcgtaaccgaaccggataagtcgcgcgtaacttatccggactccatgccgtttgcacgcaccggatttttcggaacgtttccaaaacaaaagcgaatccgaatttgcagcaaaacaaaactgcaaaaggaggctgcatctgcgcaagggtgaggagccaatttttcggaccattcgacgcgtacgtcgtgcacgcgctgccctgccaggccaggccaggcgagcgagcgcgcgcgtgtgtttcccctcttctctccaccacacatgcttcaagtggctaggaggacatcctcccttttaaggaggtccccctctcctagaataagcaaggtggtactaaactccacatgcatgccatcccatgaggtgggcttttgtgattttccaaagaattaatcttcgagtgggctaaggcccattcattaattccaacaatcccccaccaaatctcaaaatcccactgagatttgccttttccaatgtactgtttatatac

SEQ ID NO: 30420 - DNA, 707 bp, Oryza sativa
aaaaattcatacctaattcatcttagctccgatttagttggttcaaagtctctaaatttttctaaaattgagatctacatgctaaaaatatccacatgtactgttcatgcttgtttatgtgctgttttggtgattttgctcttttctgcttagattccgtcgtttccgaagagtccgttttcgccgaagaagagtttgaagagttccaaggccagcaaggcaagtcacacagatcccaaacaatcctttgagcatgttgatcctatttaaagctattgtttcttttcaactattgcatttattttcgaatgtcattgggtggaatcaacctattctttgttatagcccttttgttcttgattactttattccttgataccttgggttattataatttgactagttgagctttatttatattggttcaactagatactagatataattgcttagccctgcttagaaacattagcacactattgggataattaatgactcactgttatttcatgatggcttaatgatagttcatgatggtcgattgtgattggttaattaattaatgtgccaactaaaacctgataatggtgggttgtgagcacatggttttgatggtcgtgctcatgataattaaggaccggttcacgagtttcggttgtgaaacattaaccgtgccaaccacaagccagcatgggcaacggctttat

SEQ ID NO: 30421 - DNA, 659 bp, Oryza sativa
aaaatagtttcgttcacgcggggaaggggtgttcccgatattgaagaattggaaagtgatattgcatgcataggttataattatgaactgaacatatgcaggtagcctcacatttctttcatcacaaaaattcttaaaaaaacattctgtagatcgtgaatgtcaagcgtggaaacatggtgtcatccacagtttaccatgtgccagagcaacaattcatccaactgaaaccataagcttgcaaggtcaaattttcctggatgcctccttgtccgatcaacctgagatatacatgcagaacttgatatctattaatttcttatctcctcttactccatcatccatactttttgttcactatagtttgctattatgtttgttcaaaagatacgaaaatagtgaattggtactgaaagatgaggtggtatatataaaaggacgacgaaatatataatgcctctatgcatttaatacccatctatatatgttcgtagcaggaggtagtaattacatttctctcatcaatctgttggttaattattttgaattaaagtgtgaagtagatgtatatataattatgctttctgcataaactttttgtgctattccttaatcacccttgaagagctaaaaatagtgaagaccactttgtatacatg

SEQ ID NO: 30422 - DNA, 762 bp, Oryza sativa
cccctacctagactttgattatacacgtgatgtatataaattgttcacatagttcttttataaatcttctcttgcgattaaataaatatgataccttgaaatacttccaggtgaaatgcaacaatggtatatccatgcgcttgcggattacttctgtaaccataaatataccaggattatttctttgccattacttggaatttatatttttagtaaagtcgttaagaaataccaacacctagacttttgcggcccgataagagctatttccgctgcattatataatacagcttaatttgggggggcatgtgttaacaacggaattttgcatcagactcaaagaggaagaatcaagatcgaagtggatttgatgtggaatcgagttggaacagaaatcggattgcgcatcggctagcgtcgtatcggcgggaaacatggcaggaagttcacctagccgataaggcgagcagccgatacaatatgacttgggctcggtattggcctagattagaataacttttattgccaaatagagatagagctcatttaaggcaattgtatctgttaattaagttagttatgtcgggttttgttagatttagcaagagaccactgtatatggtcttgtttgtatcttatctttaggaaggtttgagtcgtggctataatagactaactttgtactcggggtataaatatgaaccccatagctctgtaatacgggagacaatccaatataacttcggcgcatcgccacccttt

SEQ ID NO: 30423 - DNA, 1470 bp, Oryza sativa
atgatggcttaatgatagttcatgatggtcgattgtgattggttaattaattaatgtgccaactaaaacctgataatggtgggttgtgagcacatggttttgatggtcgtgctcatgataattaaggaccggttcacgagtttcggttgtgaaacattaaccgtgccaaccacaagccagcatgggcaacggctttatcttttgtatagcatggttcattgcggagcaccagactgagaagtggcggagataagcccacgggggtcgctggggagtccatgccttgtttataagggggtgattatgatccaggaaggtgcgctgcagtggattgtgttatgcgaggggtattgtcacaactcttttccgaggtaccgtggtggtattgaggcacatggtgacatgatgtggggttgtgtcttgtgggtacagtggtacacctctgatcagagtaaaactattcgaatagccgtgcccgcggttatgggcgggtctaacaatgtctttcgtgattagtttcacacttctcaccatagtaaatgatgctataattggtaataatttgattagctcctggtttggaatggtacattcctggtttggagatagaactgtgcagccgggatggttgttcagaatggttgggcctatacaacagggtatgttgtatagcgttggattaatattgttaaattaattaactgttttgttaaattctgaaatgtttgctaaatgctgcttttgcaaatgaaaccctattatgccatcctttgttatcctgtgcacttgcatatttgctacgtggcttgctgagtatgtcatatactcaccttgcaatcattcatcagaggaagagttctacaatgaggctgatggagtggaggattaggagtagccttggtcaagctgcctgtggagtggagccgtctgcgccgtttattttattttccgctgcttagatctttattgtttgagaggaactatctacctctgtaatgacattttatacgcttattaattagagtaataattgtactctattatcaatttgttattgtgtgcctcggctgattcctggacgagggttcacacacatgtaagcgtttggaattttggatagaaattccgggcgtgacacccggtgtgactggcaccaaaaccatttcaccatatatctctaaatatcagtatcaattatctctcgtgccaattgtttatcatgaaataataatcaaaacacactttgatttcacatatgccaatgtgtattaatgtttgtggaaagcaaattatcatttgctgcgttcagggagctcactttgggaacttttcccccacgcacatttaacggagcaactcatttgcacatgtttagctaagtatcagctaaaatggattttttaaaaactatgattttaagcaacttttcaagattttttttttcaaaaatatacaccttttagagtttgg

SEQ ID NO: 30424 - DNA, 672 bp, Oryza sativa
aagccatgtgccgaagcacgcaagcaaaggccaaaagacctaaatccaagctttgcaatcaagagaactacgcaggcgaaggttatatgggcgaatggcatgtgacgaagcacgaaggctccgcctggactaggatccatgcgaaggagaggaccagagggccctccagcccagggaagccccttccgtcataaccaggcagaccaagttggcccatctagagcccaaaagtgtaaaggacactgtgtgccctcactaatgtccctttcacaagggtatccatgtaaatttccctgtacaacctaaaccctaggaggtgtaagcctctggtctaggattataaatagcccccttggaccatgtaatgaggggatcctcaaaaatttttatcaagttaatatattgttttactattcaaaacatccaaccaatttccatgttcttcgacgtgacgcggttgtcattcgacaacacacaacatgatttgatgttaacatagccttgaaatctgtcgttaacaaacctactatcaattaataacaatacaaatctccttcacattcgcaaaagtatgcacaactactttgagatttgtgattggtcaaagaaacttctctcaaaatttctcattgtctgtggtcttgtgcatgtaagacttcatgtggagcttca

SEQ ID NO: 30425 - DNA, 796 bp, Oryza sativa
atatgcatgtaagacctcagaagccggtgtatcaatcgaaaatcgattgattttttttctcacaaacaaggcatatgatagataaatgatcaattgaaaatcggttgaatttttttctcacaaaacaagcatatgatagataaatggtctctgatctttccagcctacctaatttttttctccaaaacaaaccgttctgttttttattctatgcgcggtcgacaaaaaaaccatgatttcttaaaatcgacccaatctgaacgatcatcctgggcttaataatttttttgtccaaaataaaccgatctgctttattctatacgcgatcgaccaaaaaccatgattttgaaaaatagacccgatccggacggtctcggacttaatatttttttccataataaacggttctattttattctatgcgcgatcgactgaaaaaccattttttaaaatcgacccggtccgaacggcctcggacttatttttcttatccaaaataaacagttctgctatattctatgcgcagtcgaccaaagaaccatgatttttttaaaatcgacctggtccaaacggtctcaaacttaatatttttttttgtccaaaataagctttattctatgctcggaagacctgaaaaccaattttttttaaatcgaccaggtccgaatggtcctggacttaatattttttttccaaaataaactatcctactttattctttacgcgatcaaccgaaaattcttgattttttaaaatcgtcccgatctatacggtcctggacttaatattttttcta

SEQ ID NO: 30426 - DNA, 6635 bp, Oryza sativa
accatgcaattgatgtgcatgctagtatgccccccatattccggatgcctactattcatatcactcccttgaatcgtaacaaaattatggagttcttgcctcctctattatagttcctatctcaatcttctatctatctatctatctattatatactaaaaatccattaaacttcctacagacgctccctaagccgccacgtggcaattctataaacgctcataagtcgccatgtggcgttttaatatattagaaacatctgaccctcaattttcatttaaattggtgggtccataattttgcaccattagattagattaaaaatagaccctcatacgtatgcctccctcaccgcctgcaagtacgtacgtacaagtacgaacgtaacataccccccagacttttttccttttcttatacaccttcttttattattttgctttacctaatatacctccataatattattggtgtttgaacatatgtttatttactaaagaaatatgtaattatcatttattttgttatactctgtccattaaatttcctacaaacgctctcacgtcaccatgtgtcactctacaaacgcttctacgttgctaagtagcgctataataaattaaagaaaatcatataaattcttagagaaaataaaacatttaatcctcgattttcacttaaagctaagagaccattattttagacaattaaattattagatctataaaaaataatctctccctcctaatatcccgtttaaattattaaatctataaaaaataatctctcactcccaatatcctattcacatacaagagaaaatccttgcatacaattcatccgggaaaaaaaaggcaaaagctatacggatgtacgaacgaaataaaaaccaaagatattgataactatgattgaaaaaaaatcactgccaagattaattataaaagcaccagcctaaacgatcagccaagataatcaccatcagctcacggctccagcacgtatatgcattatctgctcttcttatttttaggttgttgagatatcttaggcataataaaatctaaacaacatttgatttatatcttcgattgaatgtagactttcatggttatcacggtcagtgtcatcttcgtggagggctccatgcatgtattaacttttggtcagtttagttctttacattcttgacaattaaatcaataatttaaatctatatattgatgttttattatcaaattaaaaaatagtgtgagccatatatatgccttcaccctttgcattttctatgatatagagataaaatatattactctacgaactttaaattaggtcagtgtcatctgcgtggagggctccatgcatgttttaacttttgaaaactataagttggttttatgattaatttagttctttatattcttgacaattaaatcaataatttaaatctatatattgatgttttattataaattaaaaaatagtgtgagccataccatcaccctttgcattttctatgatataaagctaaaatatattactctacaaactttaaattagtgaacccgttattttatactgttaaattaggtctattgaaaaaacaacccccccccccccaaaaaaaaaacaaaatctcccatgtaagaaaaagcaaagtaacatatatacacatgtaaaaatatatagctaaaaatatacatacatactatgatcagagaaaatcaatggtttctaaactatgattttccatgatataaaaaatattacccaaccaatatacgcagttaaactagatcaaagatgtaatatgaattcaatggtctgtaagtgttcatctattaaatatatatcaatttcaataattctgatgtattcctttaattaaatgaactattattgacctatagtagttagtgctaactgataaatacataatggcacataataattaatgtcataataatttttcaaataattatggtgtacaatatcacctgacaaataatttgaatctacatatgtaaaaatgaaaaatgaaaacaacagaatttagttatatttttttcaagtagatcttatctaattttaatatgtgagatattacgattttcaaatattttttttgaatttttcaaaactatttgattggtatttgaaaagtgagaagcacacatgatacatagacatgataaactttattaaaaatacttctagcgagtgatatggctatactacaaccccttaatccatcatgagaactatggtcatatatgtaggttttttgtttgtcatatagttttggcaacaagtaaacaatccagtaacacccataatatattttcttatacttcaggaattccgatgtgtcgggcatagttgatggatgtatgtcatacactctactaacatgataacctcactcactttcaaataagaatattgtatatgtattattgaaatttgagtaatattgatttacactataaacaaattgtgtctactatataccacaaaacaactcaaactttaaaaaggattattgtaatcacctccgtcttctctttttccattctcaaaagggtgccaagcatagataataaagcttgctatactaccatgatatagcaaaggcatacatttggatgagttaagccaccatgggtacttaacgatgcaatcctttatgagggtactaatagtgaattagccgttaaaactgttctccacgatggtcttgatgggcacgactatgtcgatatgtgacccatgtttcaaggtatcgaggaagaaagccttggtagttatgttcggcttcatccgttagatgggtattcatatcaaattttaacagtattatcctattaactcatagaagtgatattgttataatatatttttttgataaaatattattggaatatttatacatagatttggaaataagtcagatcgacatgaacagttaggttagtagtggagataatttttttagtcgattaacgatgtattgttcttattttgatgttacaaatacaatttcatctattaaataatcactcaggtttcaaaagaacgataataagtatccataataaaataaaataataataataataagtagtggcgatattaggcaaatttatatataaccgggacatagtgatttatgtttgaatctaggaaacgcttttgatataaacattaaacaaaatgcccgcacatctgcgcgggcttctttcctagttatttttaattccttctatgggctttcctagtttgcttctaccaatacaatctgatgagtgacatttattctctcttttttacatgtagttttcattggtccaaagatgagctgatgcatatatataaggataaagaagaatctacaataatctttgtccaattcattttcataggcgggagccaatcgccagaaaataaaaggtgtggtgccatgaaaaaacattttttttagtactgactaaaatattaaatagcagaaaaaaaagatttgtcacaacgagatgtatgcaataaatttactgttactcagaaatcttttgttctatgcaaaaacatgtctaggggatgtctgaagaatcttcattccacttgaccttgtttagacactggtgcctgccaacccactaaaatataggtggaacggggcagtaaaaaatgtaaaattcattgttgacgagagtgaaggtgattaatgtcgtgtgatgtaaatgttgataattcgaacaaaacatgtctatgaagtgcaaaactgaaggatcctcgagaactatgtggtttctcccacaaaaatagtaaaagtgaaccatgaagttgcatctttcatggcagataggctttatttagcttgtgatttactacatgatttagctcctattcattcttgtatatattagttaattcatctgtgcttgcaccataactctgctaagcttttgtttttgttttgttgtctgcatctttctgtactatctcaataaagcaaatgaaatctttagcatttcaaaaattccagcagaacataagttttatcctcttggattcatggacgtttttgcacaatgttggaggcatgccacgaggaccttcaaccgaacctgccgaaaccgcctaaccaatgaggaaccaagccaagaccatcaggttcgactaaggcgaagccatatgtcgaaagccatgtggcgaagcacgcaagcaaaaggccaaagacctaaatccaagctttgcaatcaagagaactacgcaggcgaaggttatatgggcgaatggcatgtgacgaagcacgaaggctccgcctggactaggatccatgcgaaggagaggaccagagggccctccagcccagggaagccccttccgtcataaccaggcagaccaagttggcccatctagagcccaaaagtgtaaaggacactgtgtgccctcactaatgtccctttcacaagggtatccatgtaaatttccctgtacaacctaaaccctaggaggtgtaagcctctggtctaggattataaatagcccccttggaccatgtaatgaggggatcctcaaaaatttttatcaagttaatatattgttttactattcaaaacatccaaccaatttccatgttcttcgacgtgacgcggttgtcattcgacaacacacaacatgatttgatgttaacatagccttgaaatctgtcgttaacaaacctactatcaattaataacaatacaaatctccttcacattcgcaaaagtatgcacaactactttgagatttgtgattggtcaaagaaacttctctcaaaatttctcattgtctgtggtcttgtgcatgtaagagttcatgtggagcttcatcctcgacaacttttctagacttcacgagactttgtgacatacaggccagacatcttagaatgtctgccagcaagatcttttgcgtcttatcaagaccatgcttgtagaagctttcctgatgcctcttattcatatcacactatcaagtcataacaaaactctggaattcttgcctcctctattatagtctcaactgtctttccttaagttatgtggtttagcttcgtagattgcttctaccaatactatctattgagttgtgaggaagagtaaagagtggcatttattctatctttttaaacagtgaagaactactcattgtcattgggcaaaagactgggtgatgtatatataaggataaaacatccattatttatttgcagtctgtgcattaattgtacgacacttagggaataaggatcagggtttaattttttggtttggccgattctatcggaggtcaaatttaaataaaatattaccaaattcaaaaaaaaaaaataaaaatttcagctaaaataatatcgtaccgggggttggggtccgaaatgaccaaaaatttcgttccggaattttgaaccctgctaaggacaaatggactgagcagaacaaacaagatttttcacaaggaacatccctttggaacattgttttcacgatatgcaaaaacagcaaaaaaaaaaagagaattaaatcacttgcgccaatgaatatgattgataccaggcaatgcagtagacctatttattactgcatactactattcattatttttcttggttcactgcaaatgtaaagcccgaacgaatgtttgggctttccaacactaagaactcatacacgcacgtgactttcactggcatggctatccattaccctctggcacatgaggttaacttaacaaactatatattccctccggttataaaatttttgacgtttcgaacatgatctcacatatcaagaagtaatttattagagtgtttatccatattttgtccatattaaagatgatcctgtgctaattgtaattacatctctatgtatatatctagtgcgttcgattccctattgttgagacattttttaattgcatgcattcagggtcaaccagtccaagattacatgctgaacaaaaatgtcaacaattagcattctctggttccaagcctgaaacgtcaataatattggtgcctgagggagtaaattacttagcagctggttccaagcctatataacatcaatagttttagtaccggaaggagtaattacttagtaattagcagcggtgttttcagtctgtatgtggtcagataggagccataatcagatagaatttttcaaggagttgattcttgcatagtggcaccactgccagacaaatttgcgaatgtgtaatacaaatttggtgttgtagtggttgaaaatagagtttttgcaatacacatactcaatgtagtaatatttgtctgggctctaaaagttttttagctctgccagtgcctgtatatgcggttttttgcacgtagaagtgcttgtggagctaagatagctctgctggattgtgccacctggaatgtttgccaataaccaatttttgccctttgtgatcaaaaaatatgtggtagtcatagttgctttctagaacttgactggtacgctagtacagccaccattttcctgatgcctccaattcataccacactctcgagacatagccaggctgtctggaattcttgtatcctctatagcaaaattcgagct

SEQ ID NO: 30427 - DNA, 666 bp, Oryza sativa
tcccatcagcaagctttgtgcgcataatgcctcacaatggccggcactcacacgggtaaggatggtgctcagagtcagagatacttggcaactcacactctcgagtaaccacggcagctgccacagcgagacacattagaatgtcagcactactagtcactatggatgtaatgaaaaccttcgaattatttttcttgttcggtccacttcttttctgatgcttcctactcccatcacatcacaatgcaagacaacttgaagaaactagattctcttatatatctacctctcccattgtcttgttgattgttgctcgcctgctaattgctcctagttgcaacgacgagagcccatatgtattgtagtgaagaaagatgtatatatatacccaaatctggagggatgtatgaaagagttggacaagctagttattgaagatgatacaaactgttatgtcctggatggttggtaggcaatttttttctgtcgtctgcctccagaagtattttaaaatttaaatagcaattactatcaccttttgtttggaattagtatttaaatttggacatgtcaagacatatgccataatttattttgccttttgtcccatataactatgagatgaagatttccgagaaaacaaataggggcaccggcctagtacta

SEQ ID NO: 30428 - DNA, 582 bp, Oryza sativa
cccatctaaacagggcattataaacgtttcgtgctatggtggatgggcagcaactctttgcttccacctggatcttctcttgttgcaggactaagcctagcactagcatacacgcaatcaaactgttcacaccttccatgtttcctagcttgttttccaatcagatttactcgaggatcaactaaaggaagagggctgtggttgtgcatacgattggagagtgagacacgcctatttataggtgaagcctatacagatgattatgttattttaattcacaatagttatattgatgatctgtactctgtattgtttgtttagagaccaagccacttacactagtacataatagacttttccgtgcggtcaaaatacattttttccgtgcagaggacctgcccgtctacacccaggtatctacgaaaatccatatttttgcgttcggacgggcggaccgcacgtgataattgattatcccgtgcggtcgtgttaagtagaccgtacgggataattagttatcccgtgcggtcctattatattgacctcacgagataatggataatcccagtcggctagcatgtg

SEQ ID NO: 30429 - DNA, 4795 bp, Oryza sativa
ttactgcaaaactcaacccctatattattatccccttgtactcccttgcattaattatgcatctccggtgtggcttgctgagtactgtggttgtactcattcttgctctatctttctccccccttcagtaagagaagctttggagaagaagtcttaggtggagtcctggcttataccccagttgagcgcctgtgaagatggagccgtaggcccgctagtccgctgctgtttatttttgattgtcaggccttaagtgcctttgtaataatgtaaatattatcgatataataaagatgtgtcttttatatcatgtttgtgtggtgtaccccggcttttcctgggacggggattaatacactagcgttcgggaaaaggcaattttcccggtcgcgacatttggataccttgtgagctgtcacttgggcttattactcttggagatcttctcatagacggttaggtgtttcccgtgagcttccaaagatcttgtggatgtcccgggaaagtttgtgaagattttcctcacctccggaaggaaacgaggtaactgagtaaagattcttgtgctgagttttcagaggttgtcctaggcagagcaacttgcacttgtggtcttttctagaagaaattttgagttggatcttggtggtcactcaattctagaaaatgacctagaagtgttgagttgaaggttgtggatctcttctgggatctttgcataagtgagccaaggggttaatcgagacccggctctttggagcacctcaacggagagtaggattcgtgtgatccgatcttcgggaaaaaatcgtctttgtctctcttgtgcatgatctttgtgtgaatctgctgatattctgcgatctttatcttgttcccctatgtgcctaaacttctcttgctaggacctgtttttcatctcagtttaatttatctctgctgcccggaagttcctggctcaagaactccggaagttctgggctactcatgctgcccggaagttccggtgttcatcaccaggaggttccgggccctgtcaattgaaccgatgcaattgttgagaaaatttcaggaaagcctattcaccccccctctaggctacatctctgcacgttcactgggatcgttccctgtgacatgtcttcgattataaaattttttgccgcatcaaagcaaaaatcatcagcctcttcgttacgacccgcgacttccccgtgaaaagtccatatcttgtaataatccataaatccacgctctacaatgtgcaaatatcatttgggtcttgcatcatcttttcgttcctgcaatcaaagcatggacagaaaatgtccctcttgttctccctcaaagcatgtgcatttgcctgatcaacaaaattggatgctttcttcaagaacgccagatgaattctttttgctggtccatctaccaaaagaacatatttcatgagtcgaattgtactatatttaacatatgaaaaaaatacaacttaaacggacattatattgctattcatggtctagtggttccaataaaattaaattaataaattaaatattacttagaattactagatttgcaaacctaatatatttgtcgaattccactgaaaaaatttgaaataaacagagggaactaaacaaaaattaaattaaagttctacggagaatttaaacatgcatgcaacatttgtaatcaataataaaaactgtccatttccaaaaaattgtaaattttcttagcctttatccaatgacaaattaaattaatggaggcaaacctaaaaaggaatcggactacggaatactttgaaaaacatgtgatacaaacaatacatattagctcaaaaaataaataaaaaacaaaaagtgcctacactctccatttataaaactgtaaatttcttcgcattgcaccgataaaaactaacaaaaatagaagcaaatgaaggagaagatcaagcattacaccttatatatggatcaaaatcaaagatttgaggtcgaaaaccttccccttaatttttcaaagtttacgagagaaaacgccggaataaaagcggcatggtcgggctagagtgtacatagaccgacatcatcgcgtgcagtcggattaaatggcctgcacaggataatgcatcttctcgtgcgggcgccggcccggcgccggtcctcgagtttttttcacgcggcgctagttacggccctcctagaaccaaacagggccggcgtttaggaaaatgatttgtgtagtgttacctactctgcctattgtgtattgtgtagtactccgtccattccaaaatttaagactacaaagctatatttggagagagcgagagagtagcgattaattgattgtttttttattaaaaatgaaccagcggtgttgctcacgcccgaccggcagtgataagccagcagtagcccattacgtggtagcagtagtgattgaattattttttcagcaaaatttttaacaaacatctaactatatcaggccagtaatatactagctacatgctggtaaggcagaagatatggctttaatataccagtacgttcacctcatgtgcagctaaaatatttcagaaatcggaacttgcagtctacagaacaccgtacatgctcgatccacatgggcagctactacgtaccacagctaatgcaaacaaacaatatatatggcgcacaatatatatagttattaatgatccaattagttaaataatcactgcatcatgcagtgtagcttggtcgtgagatgcttggctgcgcctataaatacgcgcctcactcccaatatccgcatagacgagagcaacaaattagcagtagcctttgaatccattttggtttagtttgttgatcctcgagtaaacatcacttaaaactagataggaaatatggaaggtgcgaagagtttgatcatgtgtgctctggtgctaagtggtgtagctaggaatttttttgttgggtagtcctatttcctgtgagggaggaaaaaaataggtgtgaccaagtaaaaaaaaataggtgtgaccaagtccctagtagatagaaaaagaatgatgaaaaacaagttatactacaatatttacaaaatttgtccctgcttgtgccaacttattatactacaattttaatatcgccatactatctaatatgcatttacaaaatttgttaaagaccgcccaattcgaataaaccatcgtaacataaacaccatgacagaaaaaaagacagctagctctaatctaatcgtataaacaaactcaaactcaaagcttgacaaaaatgcaataacaaatatataacactctagagttattaggttaactaacaagtttaagaagcatgatatatcagtaagtatagttcgttttgcaaatgatccatgaattgtaaagactgaataagagcaaatcaatttaagagtataaatctcaaaggtaaatacgaaatgctttagcaaactttgtggccaaagaaatttattttgatagtggggattaaggtctctaggctagaatctagggtagtcctgtgtccatatggaccaccagctagctacgcccctactgcggtgctaggcttactcctgcagcaggaaacattccatgtggaagctacgacctgctgcccatccacctcggcaagaaaagtcttcaacttatgctgataccgtgccccaatggacgcttgtgctaaactctctggctgcaaaaatgttgatgggagttgccagccaccttacaatcatttcacccttcaccgtaactcgggtaaaacggacttaactattaactctatttctctattcttttgtactgttaattaatgttgcaatatttatttctaaactccccatctcttagttacgatttcacaagcaaatttcttatataaccgccagtaaaaaaaatagagtaccgctataaaaaatattttttctaagtagtgcgtggcacattacaaggattcggccgcgtccagttataaagtttgttgatgacaagaagttgtacgttggtcagaaacctgcattagcttgcaaatacccaatcctgatgttctcatggatcgctactgttgtgctcgagtgggctctaatgctactgatatgtttacatatatgtacctatactaacatgatatttactagatgcttccaagttaataaaaatatctagccaattattagctggatatgttatactatcatatccattgatcactaaatctacgtgtgtttgttatagacaatactaaaatctgtctatcctaccccacttctgaaacccccatctacttctaaatcccatctgctctgaatactgttccatcagctattttcgaaataatgtcttaaatttctttatcaaacttaataagcagtattatagccgatgaggcatgtttagggtcttttattctttgatctatccagtctatagccgatttggtctaactccatcggctgagacgaccaacgatacgctatcagccgatcaactatcggctaactctgcttctatctttcttgctgattgcagaatcaaatcagctatcaagcccttgacactctcgaggctacccttggacctgcactggagttaagcagatctcccaggccgctgtgttttccatcaaaagcacgtttaatggagcaactcatttgcacatgattggacaagtattaggtaaaaaggattttttttaaaaaaaaaactacttccactatttcacaatgtaagttgttttagcattttccacattcatattgatgttaatga

SEQ ID NO: 30430 - DNA, 748 bp, Oryza sativa
ccgcccgctccctccctatactactagatacactcctcccctactacagtacaccacacaaaaatttaaaaaaaataaagagttagaaaaatttatgtatagaaatactatatataaaaaatttaaattcaaattcaaatttgaattgggtatgtaaactttttgacttataaactttgggtctataaaatttaggtgtataaactttatatgtatagaaatacaatatatagaaaatatttgaattcaaattcaaatttgaatcagatataattcaaatccaaatttgaatcgggtatgtaaacttttgacttataaactttgggtctataaactttaggtgtataaactttagatgcatagaaataccatatatagaaaatatttgaattcaaatttaaatttgaatcgatataattcaaattcaaatttgaaacaggtaaatttgaatcggatataattcaaatataaatttgaaacatgtatctaaactttagatgtgtaaacttgaggtgtataaactttaggtctataaactaactttaggtgtataaactttagatgtatataaatactatatataaaaagatatttgaattcaaattcaaatttgaatcggatatataaacttttgacttataaactttgggtctctaaactttaaatgtgtaaacttgaggtgtataaactttaggtgtataaatttactaaaataggaaatcaggtggagggagggaggggggagggg

SEQ ID NO: 30431 - DNA, 1112 bp, Oryza sativa
atagttccatggtcaggtctatagacttgttcttgcagttctgattctgactttctgaccagtttgtgatgcccccaggtacatatatatagtaagaaaaatctgggtattgatcaatcctacagttaaaatttcaaggtatcattcatctggtaggctggaagcaaatcagtagttttttttatctgcagagaaataataatacaagagtagatatattttttggggggggggaaacaagagtatatatattgcctttggaaagtagaagtgacaattacatttttgttaaagaatatcaattgcaagtgataaaacataagacgtgatcagttactaaactatgcatagaactatctaatccaacacggcctgcggtgaagcatggctagttgctgaatgggaacatcccagactaatttctgcagcagattattggttaatacctacaataaatgaagagatggagcattcttgtttttatatttccagagcacgctcagcatgaccatgtaattcatactgtctgggtggaatttgtaggcacagggccattctgaattggtcgaggctcttcgccatcagcacgttcgacactcccatggatatcctgggaactgtcaattctgaacttcatggaggtgtatatcagccacaatgcaacccatgctgttctgtgcttgattagattcttcatgtgcattgtttcgaccacccacatcaggactttgcacatcagaatctctaatttgggtgtaattggcaagaattgacatggagaacctaatcatcagcatgagagttgagatacaccagtgatgataaaaagaccagagaaactccgcaaagtgagaggtgctgaatctgtgttgggaattgcattacttggagagacagcctctgcaccaaaccatttcgtttccatacgtgacccctcatccccacttgttacatccaacatggcagttgaaagattatgcaccagtggaaaaccaggaggaaacacctgaaggggaaccaaaaaagaaaaaaaacatgatcatgccagttaggccagaaaattttgtccagaatgtagcatagctcttaaaaggatgatgagtgaattcagt

SEQ ID NO: 30432 - DNA, 1473 bp, Oryza sativa
  unsure (1)..(1473): unsure at all n locations
atatatcttaaaggtgctggatttgctgccctccgagcgatttgggaagccagcgcccaatgcgacgtccacacgtcataataaaataaaaaaattaataagcgttagattaactgcgagcccagccgatccactcatcaatttttgcagaaatcccctcgttatttcggtatttacgatcgagtccactgaatcagagccgttcgaacccacgcgtggacacaatctgaccgttcgtcttctatctagatggctccgtccttgcctacccgtggaatcggtcgccgctcgtctccccacgtcgcatcccgtcgtccccatcgagcaatcctcttcatccctaatttcttcgtctagaggcggcatcgatgctcctcgcctcctccaagatcttccatcgtaggtcgtcgcccatgatggcttgccatctgctatcccatgcccacatggtggatgcatgatctcctctcccgtcgacgcactccgtgtaaccgcatccatcggcgtccgtctccccgtacggtggctaaccagattagccactgaccagtgcctccgtacacggtagttgggttttgttctgttcaagctccctcctcggctgctccgttcatcttctctggatttctctggtgagtccgctgcattctttgccttcttttatccccttctttcactcttctacggtcaactgcatcaacggctgcaagatggagctgagttgggagtctgagcaggcagcaacaggaggaatcagggaacaagggaganaatgtgaggaaggaggaaactaggatacctaagtaatttgctaatgcagttttaggctacctattcaaatccctcatcgcatggtgtacattcacattcagataggattggcttgatatttaggaggtaggttcatgctttatcttaatttcgttattttttttattttcacaaaattgttcaatttggatacagctaactttttcagtctttagaggccaaatcaaggaatgcaaataactatgaagatgtacagggttccttaagccctctattaaggtaaagaacatggaaatccaccaagtagaatagaagttatcacaatctgaactctgttgtattgcatctcaaccataactcgagctgtcaactttcaaagggttttcatcctgtctatatggtcaaatattgccactctgtaactaattaattgttgtaaggtatgagatcctcaatccagtgcttgtgtattaatttacttattgtatcaagctttcctattaacaaagttgtggtttcttgttgttcttgttctgtatatattgcaattcaatatttttatatcagctactagatgccaatgatttttgaaaactgacatggcacctcacttggtcgcattgacgaaactagagtaatgttccatttaatttcagcgatatgtgcagttcattatgatttctctaatatacgctctgtcaa

SEQ ID NO: 30433 - DNA, 1998 bp, Oryza sativa
ccaatgacatataagggaattaaagagccaattttcaatgacatataaaggatcagcctaattttcagtggtatataagggattctcttcttatgatatgttccgtagaagggataggagagggtttataattaccagcattatgtgctgcctcggtaagttctccacgggagtactcccaaacgtgcagtgtggtagagctcatgatcggatgcttgtggtacaactcctccaacgccatctcgatgcaggtgcggctcctcctccccgcctcggtccgcaggtgtaccaccacgcccaccatcaccggcgccgcgttcccacacgacgacgacgacgcgagcagcaaaacgagcagtaaacaacaatgagcaagagcagtaaaccggctgatgatatgtgtaagaaccatcatcatatactagtaataattaattaagcttcctctaaacgtatagtactaatttctctcaataggtttaaggagttaaagacagcatacgtatatatatagtataggcatgtgtacacgttcgtcgatcgatcgatcgatcgatctccctgcagacgagaggttgacgctttccatgcattcacccggtctgtgaatacgtgtgcgtcgtcgagcgatttgtttccgtctaagtaatagcctgtagtacgatatgtgtgtgtatactaattaagcgcgtcttcatccaagtggttatagcagaataataagcaaattaatgaaccaaaaacagtgacctggtttatattcaagatcgatcgatcgtcgttgacgacaggctagcctgcaagtagctaagctaattacaatacctttgtgcatgcattcgtaatttcgcggggaaatttcttttatataaatgcatcaaaacatatcatgggcaccatatatcaaaaatatataccttgtgaggtgattagtactaccggttgctaaatccgtgggttacaccggttattagttactgttgacagtattgccgggccggccaagaaaggccaaccaaatttacttaagaactgttgacagtacaaacatcaaaattttaataacatgttaaatacattggtttctagcaaaatatatgctggttattttcaaagtatataggtttggattaaaaaaaagagtctagcagttataactgctaaccaagttaatttcaaaattcattagtaacttttatgaacgagatagtacatcctaactgctgagaaatttctctcttgctacctactccgatgcgtctagataattacgcatgaaggttgattttgggtttgaaaactccttccctcgaagaattcagggttctgcacatttcgctatttagagctgtcaatgttcaggtctacaatcagtatatcttccaagcgaattaatctgactttcttgcaagcagaaaagagtggatacacgtactgatcccctgattcaaatgatcaacaagaaaagttagcattgcttcaacttatcacagcctgtatctgcattggggaatctcatctgacaagttacaaagttcatcatcggttcatgtttttatctcactaactggtaatttacacaatattttacatatttacatcgacgcaataaaaccgtcaaaacagaacaactttagatgatgaataaacccactaaaatatctactcctacataactatatccaaccaaattaaggccctaatttggattgcaaaaacattcagatagatacaactattcagaccatgcaaaatcaggaaaaaattcccgcgtccaaaacaaagcccaaatgccatctgttttttttgcaatttcataggggtactgtacataaccacgctgacatatcatccagtgttcatctccatctgagcatcatgttcaggcacagtgccattgtgtctgcaattctgcactgggttaggcctttcatcgccaacactaccctgcatcggttgggcaccctgaaacccatcatttccatcttcttggacagc

SEQ ID NO: 30434 - DNA, 1771 bp, Oryza sativa
atcccctaagtaaaataatcgatgcgcacagttttgcctggtctcctgctgttctactggtgcgtcccacctagtcaaatatacaaatctttgacattaattgatatctaaatttttcatgtatggcattagctgctagcaacatactccctctgttacccctcctaggttgtatttttttaggacggaaggagtaggtagctagttgacgtgactgtactagagaaagagaaccaacatgtaggtgtgctttcatgcattagtccagcatgcatgcatgtagccacggccaaataactagccactgaaagtactaacctttacactaatatatctactaaaactactataaaacatcaaataggtgtcggcactgtaggtgccggttttactaaaaccggtacctataagccttttcccacctccgtggtccgaaaacataaaaaaggcatctttaagatgttataggtgttggttctatgaaaaaaacacctataataaattaaaggtgtcggtttttttaaaaaagctggcccctttctgatcgagccatgagccgagccgcctgaggagcggataaggaaaagcgcctcggtctcatcgagcagataagggagactgcgcctttctcacgcgtctctctctctctctctcggtctcttctcttcctttctcttctccaccacatacctcctcttctcttctcttcctcctctctttctcctctcccggtggcaggaagagcggcaggaggagcggcgacatcggtattggcattgtcagcagctgcagggaggagaggcgtgcggcggcgtcggcgtcgtcaacgtgcagcgggaggagcggcggccgcccggaagtatctaaaagtaccctatttctatcgagaaagtatctcacagttcatttacataaagactaacccattaccccaaacataaatcacttatccatctactccgtagctagacatcagaagttcgtactatccatagaactagccatatgctcgtaaaaaaccaaaggacaaggttctatgcatcaccgaaggcttctactagctctactgctctccatctcccatgccccttgtcacagcaagagtagaaagagttatactgatggtgtaagtatagtatagggtcaagtataggctttatatagggcagtttccttcagcctaaaggagaacatatgtcccagattcatgatgagctggataggtagataggtttccccctctctcgtcctcacctcaagagtggttgatcctatccatttcatcaatacacagatatatttgtctgtcttcctctccaaaataattcaagagttaaaacagattgtacatagttaaatgtcatgtatagtactattccttattattattattattattattattattattattattattattattattattattatattcttgttgtttattaatgggtggatttgggttggacatgatcctatgcttaatgcacaggctcgtaaagtccaattcaattgcacagtgtggaagacaacccatcaaataacttttcgagcagagtgtgagtaaagagtccacgcaatccagtgagaacacaatggctaaatataactatgtgtgcatcattgttatttatatgattttttatgattgcttctatgatttaaatactttttctaaaaaatcaacaattaaatattatgaattatatgtaaggatgatccactttttcaacggtttgtacactagaacaaattatgttcatct

SEQ ID NO: 30435 - DNA, 1460 bp, Oryza sativa
gggcgtgacaggccgggcggtgtatggcggccctgtcgcactcgtcggggagggacgaggctgttgcggcggtggcaacggcaacggcggtataggcgaggcgaggcgagcgcggcagggatgtccgagtcgggcacgcgctcgtcagggcgggaagaggctgcggcgacggtggcaacgtcggtagaggcggcgcacgacatcgacgtcggcggcaacgacggcagaggctgcggcgcacgatggcacttccccctcgccgtcttcgaggccccgccgccctgcaccagagacgggattggaagatagtggcgggcgggggcggaggccggtggctcgcttgggcaacagacggcggcgcgcgagaaagtgcggcgggcgggggcaggcagtgggcgaggacgggcgggggtaggcagagggcaaggacgggcggaggcgagagcggcggacggcggcgcaggaggaagggggcggccgccgcagtgccggtgtgtccgagctctgcgccgccgcgacggtagggaaggaggtcgccgtcgccgcctcactccacgtcccgccgcccttgcctccgccgccgctaccactggagccgaagatgaaaatgaagataaagattaggtgtttcacacgaaacgaggcggtaataacatgtgattaattgagttttaattattacaaacttgaaaaatagattaatcttatctttatagcaacttttatatagaaagttttcgcacgaaatgtaccgtttagcagtttgaaaagcgtgccatttttatccaaaagtttatccagtttttgttggagaaaagaagagggccaatttataatatacaatgcattcaataagaaaatacttatgatccatttcatcatctaaaagaaattagacttagtttgttttaaaaacaagtaggtgtaaattccttttctttatggaaagtttaggggctctctctttttttttcacaaatataaaagcactattgttgctaataattatgtttaattgtacaatcaaattagtcctcccttgtagcgcccgttccatcgtggcgcctagcgggaaaactatctcttaaaaaccctatttacgaaatccgtttctttgcttgttgtctagtgtccatgccatctcagatctcaaatccccaatctatcgtcgagttcaatcccgaatccaaatccttcccaaatcaaatctctccgcaaaagtctattttgcctccctcgggttcgatgggccgaactcctctcggcccatctccccctccctccccggctctctctctctctctccctctccctctcccccgctctacccgtgcgctgcgcacgcgtgcgcgtgagccgcgccgagccgagcgctctccgccctcgctgccgattctcgccgggccgcccgttgatttccgcgcgcgcgcgcgccatggtggtcgaccgcctggtcgcca

SEQ ID NO: 30436 - DNA, 963 bp, Oryza sativa
cgaagtttccattacatatgtgatttgcactatatattttcccgggatgaaaggtggcgagcacttttgtttgtccgaataaaggacgcacgcacggcgtgcgattgtgctacgtgcttctcgtatctgctcttgtacgtagagcccacacagattgttgggttggctagggctgcgttctatacccatggtttctaacttccgtcacttattttccgcgcgcacgcttttcaaactgctagacggtgcgttttttgcaaaataaattctatacgaaagttgctaaaaaaaaccatattaatccatttttgaaaataaatttagcaaatactaaattaattgcgtgctaatcgtactaaatactaaatggggtaattgcttatttgaccctattttgaaagctaactaccaatttgaccctattttttttcagtttgcttatttgaccccgcttttcaaaatcgaagaggaaagctgaccctattccgttaagacgagttaacaccgttaactaagtggtaaaatgacgaaaatacccctaatacatccatctatcctcttaccactcattcttatccactctctctctactctctctctctctcaccagagcactgccgacggcggagggagcggcggcagctcggcgacgaggcggccctccgtcggcggtggaggagcggcggcggcggctgctaaggagcacggctcggcggcgcgatgcggaggaccgccactggcggcagatgcggagggctgcgtacgagcggcggtggctcgatgacgaggcggccctccgctggtggcggaggagcggcgatgaggggcggcgagaggagcggcggctggacggcgcgatgcggagggccgccgctggcggcggatgcggaaggctgcggaggagcggcgacagctcggcgacgaggcggccctccgcttgcggtggctgcgaaagagcgacag

SEQ ID NO: 30437 - DNA, 1478 bp, Oryza sativa
tggaagtataactttcggtctatgcatcatccaagaatacacacagccatatttcggtaggatttcaacttggtaaataaagtcaccacatcgatggtagatttgcaaatttcaatcagtcaagagcggatctagcgtgggacggtgggggctcgagactcctactggcaataaaaccatgagagctcccataaaaccctcactaatttttttttatcatagggtctgttcactttgccaccatcactttcagccctaccatttcttttgttactaaaatttggtaaggtacaaactaaacaaactcttgccatcatcactttactaaaatttggcatttcctaaaacttcttctcatacaaacactagtttagtaagacacatccatcatatatagtcaaaatttgagaacgccaaagtgtgccaaaaatttaacattgtctagcttattcaaatccctagctcactattttttcttggatctgtcactagtcacatctaaatctgcagcctgcaaaattctgcaataaaaacggtcacgtttttaagtgttctgctatgcagaacaattctccgagaatactgggtgaaagcgtatatgcaccaattacggatgcaagctggaagatactccaaaaacagatctgggcgtcttccatagtttcagaactgaaacatgaattcgatcagacatgtcatgcccagtctctgaattctgatgcctcaaatcactcactacatccccgagactaaaatctgccgcagtgctgccccgttggcccaatcctgtgcaggcccaaaaactttgggctgtaaatcttggtctccatggaccaacgagaccaccgtgcggtgcgcccatgcgaaaattaaggagccatatagaactactacgtcggcagcgataactgcacgtttgtggcagatccagcggcggccctcctccacgcggatctagcggcggctgcgctcccccgcaccgatccgacggcggccgccctcccccacaaggatccggccctccaccgtcctccctggcgcggatccggtgacagagggtgacattggtggtagggtggcgaggcgaagctcgttgactgctatagcgacgacagactacggcttgtgagcacgacgacagcattggtggcggcgacaaagagctagggattgggctagcggcgggctatggtttctgccggtggcaggctagggctcagggatgaatcgaggagctaggggtttcaaatttgatttttggaatttttgttttttggctaaaattattttcgcatgaaaatcttatttttgcatgcggttgttttgctcatatataaattttgattttcgcagacaccaaggtgcatcgagccacccagctgactacggaaatcggtttttggccatatgcaaaaatcgtcttttactagtgaattccctattaatttaagcaacttataaataaaaatattaatcaa

SEQ ID NO: 30438 - DNA, 1561 bp, Oryza sativa
agtgcaaaaaattttatggctggaggtacgtagacagactacataatcatgaaattaaattgcatctagcaattgttaattgcatcctcaccagtaagagtgaacaatcgaaatcgtaatatggtgatttatgattttttttagatgaaatactgcctgacatttgccgagcagtgttgtatggtgatttatgactgaagcagtctaattccacagttagtaaatttaaatgtactgataatgcaatagaaatgtaaaaccaaataaccataaacaacatccagtcattcagtgttcatcagcactgctgtgcttaacattacgttaaattgtgtatgcagaaactgtatacatttctttgtgtcaatatgctttttatcgcgtccaatttgatgcatagtacactttagttttgactgtgctaatccaggtcattgagtaattagtccctaatctatccatctcctacttattcttcctgtgatcattgccaccccaaactctgaggtcctcatcgatgaaaatgaggaatgagcacaggaaggataaggggagccgggaacgagatagatttagagttgataaaatgtacaaggaccatcaataaattaggaaacatagatagattcagagtttggggtgattcatgcagatgcactaacataactcagagaagacaaaaggtaaaacatagatgcagagatgacaaaatgtacaaggaccatcaataatttcgctactaacatccggtcaagccaaaaggtacaacgtagatagatgcagagatgacaaaatgtacaacgaccatcaataatttcgctattgacatcccgtcgagttgcttaacagaagatagagtagaggggataatgtggacccccgtttttataacaggaatcattcgtgtaaacagtaccatttccctggatcaagtagtctggtacagaggagttcatagctgaaataccaaaagcacatacacgggagtctagtgctaattattacatcataagcccgcaggcattgtcttaaatcatcggaccgagcggtccagaatacatccaaaagcagaaatagataaggcagcggaattcaggcagcggcatgccattgccacaggcaacgaccgtactaagacctactgagcgccatcgtcttcatctccctcctggtagtaggcatagggatcctccgaagcttcatctcccgcttctgattaattttatatttgcaagggtgagtaccaaccgtactcagcaagtcaccacagcaacaatgcatatgaaaggggtatttcaatggatggctatggctcttttgcgctaagccagttatgtaattcttttcacaaacctaagacctagcattgactgatcaaattttagtaccagtgtttgtatttaaataacgacgggtctgtccaccattcattgtgatcccaaagatagcttcccgccattgagtcgtcatggttttttgaggacgtccaccttcccttcttttaagaagtgctccatcagcataaaaatcatcatgcaatatcccatcccacacaggttaa

SEQ ID NO: 30439 - DNA, 1549 bp, Oryza sativa
ccagtgagaggagttctggcgctcctaggaaagagaagtctcacacacatattaaattatggttcaagttaagttctctctctcacacactcatggcagtcctaccaatggcgacaccgatgtagggcacgcctctcggccctacctcaacggctgtcccaccgtagcgcacctgcctcactcaggggtgaatcatctatgcagggatactgcctcgctcggctatctactccactaggtctatacccatacgagaagtgcggttgtacgggggtcgtttcatgcttaacttcatggctcggtccttaattgaccggggacggtactagccttttccagataccacccaaatcctccgtccgccccagtcgaaaacagttatttagtttatttctcctttcacaaatcatgtcctcaatatcatggcaatgtggcgctcatgtctccacatgccgcatctcaattaccttcccaaaggtaattgcaagtaggatgttcatctttgcatgcaattttatttgtaaacaaaacaatttcgcaattgggatcaatatgttcaagaatagtgatgacttgccttgctcaaggtcttgcgggtcttggccttcacccggatccgtggctccctcggtctctaaaattatgtgcgaaagaacaatttgaattcgattagaattcaaataaaatccaaataaatccaaatgaaagtcgaatgcgaaagtcgattcctttattttaaggcaaacccaatttcgattcaaactattttgcgggtataaatgttttgttgtcataagtttttaacttaatctacccgagcattatatccatataataggttagagatttctatcgcgagctaaatatcggacgaaatcctagaattattatatgatttaatttagtctatgactaaatgattaaatataatacacggctaaaatccctagtaattaaatccgaatttctaccgtgaatcgattacttatagggattacccaaaaataatctataataatctataagaattcatctatttgtttagttattaattacatctaaattactaccgcgaattgattccttatagaaattaccaagaataatccataatttatattaaattttgcaattctacgactataattaatctataattaaattctaattattttaaattttctaaacttcctaatctccctctaatttcctatttatttccttttcctttttctcccttccttttttttctttcctttcttgttcatttctttttctctttttctctcttttccttttcttttctttctctcctccctcccggcttctttctctcttcctcggcttctccctttctctctctctaggctccctgctacccggggcggcgacggcgaccgagcaaggggaggaggcggcggcttaccgacggcggtggcgtcgacgacggcgcgacgacggcgcacggcgcatggcgcggcggcacgaaggcgtcggtgcggcggcacgacggcgacagcggcgcaaggcggcgacgcacggcgcggcg

SEQ ID NO: 30440 - DNA, 4027 bp, Oryza sativa
ctatgagttaaaatttaactcggcgattcactcatgagttaaaatttaaaaattttactggagttaaattttaactcatggtgacgtggacgaatctcggacatctatttctcgatgcaacggtagttttcaagtttccactatatattttccttttttatagatgcatacttttgaagaagtccataatggaagagacaagtagactatataattaggagtagaatgctagtggatattgttaattgtcaactgccaaattgcccatgatgattgtctgtccagcgacggattaactacccggccaacatgggcagttgcccgggctgcgcgtgctgacccattgagatggagttatttatctactttaaaatccatcgattcgttgacttccggacaaagttgagcaggctgacttttcattatacaattagggcctaaacaccgttgttgatttgcctgtcccgtaatggaggacgtgacctactcaactagcatgcatatgaatcgtctattttataataaaatcgtcttgcttttcaagctatagtgaaattttacatgcatattgaactgtttttttttagaagattgttctgtcttcaattgatagtaagccaagaggttaattattgcgaatagttgctaattgacatcttaatttatgtttatgtgtttttttacttaccaaatcaagatttgacaggtgagcatatatacatacactcgactaatcgatccgacataatggttatagcttcttcaaaataaaggtcgaaattcgcttcattatataaaaaaaattgattcgacgtgtacgctcactggctaactagctcactgatcgtggcctatgatttactcaagggcaagagatatataatctccttaattcagagtttcacattttttttggagcaataggtgttaccatattcatatatatctcttgccaattatatagatcgacattggaactggtctaaattaattaattgatctttgaattgtcataaacttaccttaaaagtatttagagatggacaaacctctgtccttaaaattatttttaatcctcagtgtggaatctctttacgccaatttatatagcagtactaaagtttaggttgtcatgaatgcacacatgctgtttactatatagagatgggcaaagatctgtccttcaaattatatttaatccttgttaggtaaccctgttcttctttctccttgctaataataggtattcggaaattaaggagttgctgaagtgttagacatgacaaattaccttctgaaaaattggaagatcaaattataaatgtttgaatcatgagagacgctccgttgccctctacttgcagtattctactccaagtagaattaatctcaaccgtttattttaaagggtagattagtaaagtgctaaaaccgaataggggtaaatctggcacttaatttttttttctcatttgtgcgtcctatggtcaagcgtcgccgatccctcttcatcgaacagcagagtcgccgtttcctcattaatcaaaaaggagagcgcagggaaagaaaaagaaaagtagatcgtgaggtccggccaccgccggcgcttgtgcatcgcgttccatagatgtttcttgctgtaggtatttggtttccattcagcttgattgtttcatatgaaatttaaatatattagttatatatctgaatattacacacgatggacaaatcgaaacactccaatccagcaatgacagatacaaggcaacggaagaataatccggtatgttttttacatagactttacaattgcaattacaacaagtaatatacattgaaccacaaaaacgatgatatacacagatgggtactttcaaaaccacaagctgttaataagctatagttctgaaaaaaaacatggccataagtaacaagccaaagccacccaaagccatcttgagataatgaattcacaggaattacaggacatagcacaccaggaatctctcaagcgttgattgacgtagtgatcattagcttgtccaccttgtcatgctcagtcatttgaacaagctcacttgctccggattcagtttactggcattcaacttgaatcccttcttttaggaggaaaaattatgaccaagaactgcagacaagcagaaaaactgttcgagaattagaggccaacgaaaaaagaagattcagtgcagatgttcgatctgcaaacctgcaagcagcaagaaaaacaaatcaaatctgacctgcaaagcagaaaaagagtctctcatgtcagctaatccgttggagagcagcgctacagccaatgagaggagtcttggatgatgattcggaggtcgagagattggtggtcattggctccggaggctgcgggttccgcttgggaggatatggattgggggcttgccctcgcggctgtgggatcaacggcgggcggagatggacagggctggagccaagcatgggggaggaggccgacgacgaggaaggggggatagcgaggaggacgaggtctcggcggcggccggtggcgcggtgctgggatcggaggcggagatccgagaggcgaactcgtcggaaggtgggccgacgcgggggagcggtaggagagggcgcagctctggcgatcccggacagagatgcgaactcgtcgagggcggctgaggcggcgagtgcggcgggggcgagggagtaggaggcatcgagggcagtggagcaggcgaggtcgtcaaggcggtgatgggagccgcggggttctctccgtgtcggctccagatgcgcgattcggggggaaaggacgaaaatatccctccgtagataatttttcctgggcaaaagtaccctccacgattctactaccattaagtgtggtggtagtaaaaatagatctgaaccattggatcaaatgagatcagcggttcagattttttctactctaggtagaaggcaccgaagtgagactcttgaatcatagcagataataattaatgaccgtagtatttagagtttacaaattagaagcattgttctgcatttttaagatatgttaatgcttttgcagcttataggaacacaatatattctatcatgttggaccagccattttcattgttttttaacacaacgatatatttcaatttttagtttgactataaaaaatgaggagcaaatactaatcgtttcattctgcttacaggaagaaagtagctagaagaagtgagaaatagaaataataatcctcccgaactgactttattctgctcttttaacatgttagctctattttgagcacattgcaattaccacacaactaaatttcccattttcttactagagtggtactttagtcgtttttaaagtaaatcgtagttagtgattaaaattatggctggatgtgcgataccatttgcatattcctctttaattaactatgtgttagtagtatatcgtttactgttgaatataagaggggataaggggttcatccggtcatgcaacagccggggagatggcaacaaggtgtcaaggtcggagctcaagcagcagcgaagtgggcagttatggctgcgcctccacagataggacaaaaggaaaatgctatacgtactaactttttcttactaaattcttactaacactgatatgtcatgctatgagtgcatctagattttttataacttccatctacttaaatcaaacggttgagatgattgttagtaaatgtttagtaagaaaaattttgtacgtgtagcattgctcaggacaaaacagcggcacagaaggtgaataaaaaccataactgtagccattgcactcaatgtttcgttcaaccaaaagatgggttgggcttttcatattacaacatatttacaatatgacctcaaatgacacatttagaaattcagcagattgtggtaaatgtcacggtaatgtatgctaaattatttattgttatgattatattcttagttacaaattatgataaatttgttaatgttccttcatg

SEQ ID NO: 30441 - DNA, 1474 bp, Oryza sativa
ctgcaagtagttcatcactgatcttatttttttagtgcagcatctattataaaatttctcattataattaataaactctgctaggaatttaaaattagattcaccaaaaaaatatcatggcagaaatagtggctcagctcacataaggtcaagatataaacataatggctggcttgcagcttatggatgctaaacatgtcttgaatcttaaaactaatgatacaaatttaatattaggtcaaacaaaacagcaacctctggattttggggcttatactgtttgtgctttgcatgtgtccgaaacaaaaagaaaaggtttgcactttgcatagcattatcagcagttttaacaaacaactttcaaattgtcaatgattagcaagctgaactatttaataactacaaccccccaaccccccccccccaccaaaaaaaaaagaccacattttataagaaaagatagctcaaacacacaaaaaaaaaagttttcactttgcataacattatcagctgattttaacaaacaactttcaaatcgtccatgattagcaggctgatcaaatttattaaccagcacccccaattattccatttctgcgcacaaaaatgaattagcaagcaactcaattgtggagtactggcagtgaaccactccaccaaaacagcaaagaaagataacgcaacactccgtgcattacctcgccatcagccgcgggctccggctgggagtgccgcagcaccggcggcgcagcccgaagcgctagcgtggtctcatcgtcctcaagctcacgcgcggacttgacgatggggagcttcttgtgaatgtcgagcgggcgcggcctgaaggagagcctactcatggccgcaacttcatcagcgaggcctcaatggagagccttcccttcccgcggggggcacgggagagcgcccgcgcgggacgagccccccgcactacgccgaaccccgtgggcgagggggtgaggggtggtcgagggcacggccgcgggcggcgcggggagcgggcgggagcggaggaggcggcggagatggcggagaggggattccggggcggtggggtgccggaacgggcggattggggagctagggttagggtttcgggggtggaggacgtgccctagggtttgaaacggggagatggagggaagaagcgggggatgaagcagcgagagagaaagagtcgaggggaaggggaaggacagagaggcttggttcggttgacggcgtattccacgagtacgtttccctcgtgtggttacgtatccgtctcaacggtccatatcctatggacacataggcttcccatgtatgcgaactatcaaataaaattcgaaaataaattggacgcatactttcaatagtattacacctacatgtgaaatcttaccttcaaattcaatatattttagccgtagcaaaaacgacaaaattctgatagaaaattacccttaaaact

SEQ ID NO: 30442 - DNA, 1178 bp, Oryza sativa
tttgaggcacctccttctggagctttccctcaatctctttctatattctaactctaccatagagtagcctaaatatgaaaatgagttgtactctactaaagttgtgttatgttttgagagaagaatgaaaagatccttttataggtagcaatgatggttactatggcggttgtgaggtcagttcacccacagccgctatagggaaccaatctctatcctccacatggaaggtggggatagtggtgaatctaggatgaaaatagagggggtgctcctaatatcctatgttcaacccataatgcaatgaaaacatactaaaaatatatatttcttggtctcatgcaaatataatttatattttgttcataaaaaaagaaaaataaactaaggaatcaagtatcggtaccttgttaatcaaatacgatgccataaacacataaaaatccatcaatggcctgcatatcaaattaaattaaatggcctcacttgatctctaatttccttaggataatcttcattttgtttgcgacacgctggatcagcaacaatttcactaggatctaaaacatgcctcaacatgttgttctcatttgttgtattccttcgtgggtaaaaattatgcaatgtttgattctccatccttgcaaattaagttacctatgtgtgcctaaaataaagaattgatttactgaaaattgctgcagtgataatcaaataaaactgaaactgaacatactattagagagcaaagagattgatttacctgtactggttggatgtggcattgtgctgacgagtggacgtcgtgctggccggccgggcagcagatgagatcgctgaaggctgcaagcaactcgtcgtaccgtcctgcaggacctccgcggctctgacgtcgttgctgccgccgccgctctcgcctcgactctttctgtatcgcgccttaatgatcacggtctagcgctgtgatggttcagattcccggtcgccgacccaatgggctaagcccaacgtgcgcgtggtggtgagggggagggttctgtcaggtggaggtggggctctagccccaacgatacatccgccactgggcggggatgagtggccgcaagggtaattcagccaaaccttgttcggccgaccccctagcaccgccattccccctctcttttggcgtggtcatt

SEQ ID NO: 30443 - DNA, 1614 bp, Oryza sativa
aatttgtttgcaaatttcgcacaaatacaacagtgatcttttttctctaaaaattgtcaacagcacaagaacgtacagatgaaatatatcttagcaatcttatactcacaaattaatttgtaattttgcctactttttcaacgcagctggagattcatttgtttgtaccaaccaataccttgcaggggtttgggggttttggcagaatcttgtcacgcccggaaattcacaagtaatttccaaacttatttgtgcataaaatcctcgtccaggaatcagccgaggtacacaaactgacaatttaatatacagattcatcaaagaaactaaaacgataaatacttacttatgaggcacttagtcctcatcatgaagaaaactgcagcggaaaataaaatctagcgaagctccggctccactcccacaggcagctcaactggggtataagccaaacgtcttctccttctggggtataagctcaactgggccgactgggccggggagggagagagaaagagaggttttgggccggctttcggcccaaagccaaaagaaggatttaaaaacatttttcaatttaaattatttcttaaatgcaattctatttattaaaaatacttccttagctcaaataaatcccagaaaaatctaggaattatagaattaagcaaagtatttaataaaattttatctagcccaattttatattgagatttaacaaattaaaattagatcttctcttttaggcttttaaaatcatttctaataattccttttaaacaacaatttataatttaaggatttttaaacaagaaaagctcttaacaattataattgatcaaataattactgaactgttctttgtatcatttaggaattgagctctgaaaaatccgagaaaatttcagagagttgacttaatcatggagaatttaataaaaattaaatccatccatgctttagatttaagaaattttatttcccacatttcacttcacttgtaattaaagaacatttcatataaactctattattgatttattagaaaatttttaaatcctgaaacgcaaatcaggatgtgacaaatcggttctgaatattcgcagcttacaagtacccaaggggactagtcccaaccaaacctttctatagcgagcaatcacgaactctcttccttgagaagcctgctttcccaaccagatgaatgtgttcagctagcaacatgatgcgggctatggccgaccaccatgcagaataatttcacatatatcatgcgttagcacaatcggttaggaacatacatgaatttcactgtctaaagtcaagtcaggttgttaggttgttcttgcattgatatggaagagcaaaatcgagtggaagaggggcgaatttgtagggtttgggggaaataccgtaccaaataagcccttcaaaaatctagaaccataaacatacatatctatcatacatgctaacatgcagtatcaatcttggtattcaggtagggctagttcttggtgaatcaaagacaaggaaatcaaatcaagggtacattatatattatatgacttgcacctattgttggttgttgctaggatgaagtacataagtttt

SEQ ID NO: 30444 - DNA, 1232 bp, Oryza sativa
tatgagaatgagtagttaatgcttgtgtgtcactctacccttggattatcttaacccctgcttagaatatgattatcacaagtaatatataaattattagttgagttctctctacatgatcttttcacgggataaaataaatatgatacccttggaatactctcgggtgaaatgctacaatggtatatccgtgcgcttgcggatgaactctctaaccataatataccagaagtatttctgcggcattgctggaaattatatttctagtaatgtcgttaagaaataccaacagcctccactaccaccgccgctaccaccgcccgcaatgacagcatcctccccacccacaccatcatcgccatggtcccacccttcataacccacaaagacgtcgaactggaggcctccaggaggacgcgccagcaatgctgcctatgctgctgttgatggtcattagcgatcagtttcttccgtcaatattaccgaaatagaggagaactagttttgcttgtaatgcatatccatgttagaataataatattccactagtattaggttcactaaccttttgtagagaataatcattaaatggaggagaatcgacatcaattcaaacgataaatcaatcggacgatgtcgagaaccagacttatgtatgaatgggccaagaactcagaattgacacgacaaactaggccaaaattcaaaagtctggagaagaataacagaggaggccgccagccaaaccatgggctggttgggccggccccaggttcggcccaaccagggggttcgaccgaacctccctcatcgccgctggatgcagggtttcttctggacgatgtggattagctcccaatgatggttggagggtatttccgaccattccaaccatcacaatcgtcattgggaggctatataaaccccttaccttctcacttcactcacacacctcaagcaatagctctctcatttctctcaatttagtttggtagtatctagctggtggaataggaatagagtagaaatcaggagtccggaagccttcggaagagttcgggtatggctctagtagcttttctcttctcttttgtaagctttgtacttttattagaatactcttctatatacatttatggtattgaaatattttccgagtatatgagtacctattttacattatgttcatgttatagtgaatatacggcgagcctatctggaaaatgggggat

SEQ ID NO: 30445 - DNA, 906 bp, Oryza sativa
  unsure (1)..(906): unsure at all n locations
ctggcatgatgaccatctgntcggacacnnccttcatcaaaataaatcccagaaaaatctaggaattatagaattaagcaaagtatttaatgaaattttatctggccccattttatattggaatttattaattaaaattagatcttctcttctaggcttttaaaataaattctaataattccaattaaacaacaatttataatttggagatttttagggtgtgacaactagttaagttataataacccaaggtatcaaggaatagagtaatcaagaacaaaagggctataacaaggcaataggttaattccacccaatgacattcgaaaataaatgcaatagttgaatagaaacaatagctttaaacgggatcaacatgctcaaagggttgtttgggatctgtgtgacttgccttgctagccttggaactcttcaaagtcttctcctgcaaattcggactctccaggaacgtcggactctaaagagaaaagagcaaaatcaccaaaacaacacataaacaagcctgaacagtacatgtggatatttttaacatgtagatctcaattttagaaaaatttagagacttgaaccaactaaatccgagctaagatgaattagttatgaattttcatagattaaatcggattaaatcatttatatagattttaattgaattatgacgcaataatgaattatttttgaaaaggaaaaagggattattgcgtcagcggactcggctcatggtggaccgggtgcacggcggcggttcacggaaacgaacggccgagatcgatctatccaaaacggacagccaagatctaacggtctacgaccggtctacgaccggtctacggtggacgtgatgagctacttgcagtagaagccgagatcaatcaaangccctcg

SEQ ID NO: 30446 - DNA, 730 bp, Oryza sativa
cagtctaaaagaaaatttaatgtaatccctataataatattaaatgcaattatgaagtgggaatacatatacaaacaaaggtcatcctaattctctaaaatattttgtgcaagataaaatcatggaaaaatttatgtggatagtgattagcacaaacttatcctccgtaatttggtaacgtgttaacactcaagttgatacctcaaattaaacggtcaaagcagacaactaaaagaaatcaaattaaattttaatcggctaaaaccatgtttcatccaaaagtacatttaactgcacataagtgaacatgggaaataatgtattcaaatactagactagttatcatgcctaaatataatttttctagaattttcctcctctctttaagcctcctaaaaattcaatctagctttctaatagcccatctttgtttaatttctgtgagcagtccacccattatttttttagtgcaaccaaagaaaatggaatctaggtgtaatcatctaccaccagtaaaatctacactaattcttctggtctacacattgaattatgtagttacaaagttagaggagaaaataattccgaaaaaaatgatctaaaaatcaagtttacccagaatcttacccaaacctctcaccctagcctagtttgccatgacctggacccacctggcagcctctccagctcgcccttcctctgtccctcatcctcagccgaccaagaaaca

SEQ ID NO: 30447 - DNA, 2594 bp, Oryza sativa
aaccacaatgaactatttaggcctggttttttaccggtttggtgattttggttaattgctttagtttccgaaaatccggaggagaagcgtttacgttgagaaaggttcagaagtgtttgaattagctcaaggcaagtcacacagatctgaaacaaccctttgagcatgttgaacctggttaaagctaatgttttatttcaacttatgcatattttcgaatgtcgtgggtggtgagctttcccagttaataatgccgacaatgactttattttctatgggtaataattgaatagcttggaccttatatattggttgggttaagctaggtgctatataggtataattgcttagccatgcttagaaacattagctcattaatggggttaatcatataaggatattacttatggttatatttagtggtagctcacgatggttaatcgtgttatgataattaattgatacataaacctgattaaagtgggttgtgagtacatggttttgatggtcgtgctcataacaattaaggaccgtttcacgagctactgttgtgaaacatttaccgtgccaaccacaagccagcgtgggcaacggctttaccttttgtatagcatgattcattacggggtgccagactgtgaagcggcgagaagtccgtgggggtcgcgagggagtccattgcccctggttatgagggggagattatgatcaggaacggtgcaatgtggtgagttgtgttgtgtgagaggtattgtcatagttcctttccaaggtaccgtggtggtactgaggcgcatgctgacatgttgtggagttgtgtcttgtgggtacagtggtacatatctgatcagagtaaaactattcgaatagccgtgcccgcggttatgggtgggtctaacaatgtttttcgtgattagtctcacattactcagtattaatgaaaatactgtgataactaaattgactcttggtttggaatggtatatttcctagtttggaggtttgatttgtacacctaggggttggttgttcagataaggttgggcctatgcaacatgggtgtgttgtatagtgtttatttaatattgcttaattacataactgttttactattctctcaaatgtttattaaatgctgtttatgcgaatgagcttaattatgccatcctttgttatcctgtgcatttgcatatttgctgtgtggcttgtcgagtatatcatatgctcattcttgcaattttcattcttcagaggaggagtgcttcagtgaaggtgatgatcaggaggattaggctttgttcgggtcgagttgcttgtggagtggagtcgccaaagatgtttagtcttttgttttttttccgctgcgtagaactttattctttgagaggaactatccacctctgtaataatttattttgcacacattaattagatatttgatagtactctattatcatttgttattgtgtgcctcggctgattcctggatgagggtttaacgcacatgtaagcgtttggaattttggatagaaattccgggcgtgacaatcaacccctggatcagtagattgatacaggttcaacaatctgaatcttcatcgcatacatttgattaaggctccaatggaaatttctttacataaaataattgggtatttacaagattgtggctaactattactatagaagctataggatgagccaactctaatgttttgctatagaattaaaccatctatctaatctagagttgggaactaagttggaatgaaactaatttatatgattaaactcctggcttcggcaaaatctcaagtaatgagtgcatgaaatagtaatttcatgttttagggtaagccctaaaccctatacaaaaaggtccctgggcattaggtgaattgcatttaggtccataaacccacatggcaaacaaagcaattttacaaaaagaaccttacaagatttaaatttctactaattaaagtccttagcacctaatgaagtggctaaacagccgggcccacatgtcagtgactcggcggcaagagaagcagaggcagcaggagagcaacggcgaccaacagcgttcgtggcggcgtattggcttcatcatatgtgggcgtcgttctgctgggacctaggcgatgtcagtggcgcaatggtacagccggagatgattcgagttgacgggaatgacaaagtgggacgatggtggcgctctggacaccgggaacgccgacgagcgcaccaccaagtgttcgatctatgccaaaaaagaaacaaagaaaatggatcgatcaagtagagaaggaacttcatgaatcactactatagaaacgattttcctggatagggaccttttagattccgtgagggcggtatctcgttgcttctgggaaaatcgcctcatcggctctgttgtcaaacgcgttttgcactgtagttaaacaaaaataacttcgccgaacttcttccctcataaaattattttcaccatatttcccccctcttttctagaaatatggcccgcattttctctaagaatcatttttgtccagaacaagtcttcaataccaagaattttttccgaaacc

SEQ ID NO: 30448 - DNA, 920 bp, Oryza sativa
atttttatttttctgtgcgagcgacataagcaaccgcccggaaaaatccgattttcgcgtgtgggagggccacccgcacgcaaaaatcatgactttcgcagacgaagtgttgcgtgcgggccattcatccgcacgtggatatttttttttgaccgcacggaaaaacccatcccgtagcagtgaatgtcatatcatagtgtcaatgataatatttttaacatatcataaagaaaactggaacatctttaatcaatggcccaacctcggtgctggcaaccttaccaatgttttgctttacccaaaagaattggattgttcatctaacaacatgcataaaaatctaaaattaatacttttcagtcttattattgcaatcaaaattaggatcaatcaaatcctatattgcctcgcatgattaagtctacacaaaatagagccacgtgcactcttctctaaatatcaattaaaaacatatttatttttaatattatttccatataatatgttataaagaatagtagctatggtagtatgataattgcctacacagacatgcagggctatcaatacaagagaatagatgaggaaagagaagccgtgtagatggaaaaaatcgatggatcctatctaacccaaacgtccattaatttgatctcgttctcagaaaaaaaaaaccgaagcaagacttgtcttagttccagatgtcagaattcgacttacgctttaaaaaaaccaaaccgacgtggtagacgatgaacaatacaaatgttaagaatccttttcacggaattggatgttttttctttctaaatttagacagttttttcgcattgcatggtgccaaaccagattcttttataaaaggtggcgtttttctcacgttgagtcagacagttttttcaaatcggttattttataaa

SEQ ID NO: 30449 - DNA, 827 bp, Oryza sativa
caaacatgatcttactacattttagtagtagctttcttgatgaacttgtactgctattaatactgccgtccagtcaattaaacaggctgggacagaggatttattattggccacgcatccggcgtgtaaggccaggccagtagtactactcgagtactacagtaccgagtacactcactggtgatgttgcgatctatcgatcggtgatgatcacttgatcgggattcaggagtggttggcagctcgtgtcattctccctagagccaacgccatttcttccacattccagttccaagtcagaatttttttttatgtttgacaaagtttataaaaaaaatatattttcaacacaaaataagcatattatcaaaatatattcaatgttagatttaataaaactaatttgatgttttaggtgttgctaaatttttctatgaacttgatcaaacttgatacttcctccgtttctaaatatttgacaccgttgactttttagcaaatgtttgacctttcgtcttattcaaaaaaatttataaaatacgtaaaactatatatatatatatatatatatatatatatatatatatatatatatatatatatatacatagaagtatatttaataatgaatcaaatgataggaaaaaaaataataattacttaaattttttaaaataagacgaacgatcaaacatatttaaaaaaatcaacggcgtcaaatatttagaaacaaagggggtaaaatttgactaggaaaaaagtttatttgtcaaccatggaacagcataattataatgattaaacagtgatcctgatctgtaatctgg

SEQ ID NO: 30450 - DNA, 703 bp, Oryza sativa
cgctaaacagactcaagagtccgaggtagggtccacattttgtccctaatattcgggattttgtagctcttctgaaccagaattttcaataatatcccacccaatatgcactgctttcaatctgcccgctagcaagctcatcctcccccacgcgggcaagctcctcctcccccacgcgccgtttgcccgcacgcatctggcgagctcgctcgtgtcgtccccgagctcagccgtcgccgctccggctgccgccatggcgccccgagccatcgccagtccaacctccggcaccgcagcctcgagccgccagagctcgacgccctccgccctcccccgctgctcccctctcctccggcccttcaccgcgtgcgccgatggtggcgacgaatggtcgacggcgcggctaacgcgggcagcgacggacgggcgatggtggggctgacgccagcggcaatggataagcgacggcgcagctgatgcgggcgcgagcggcggcggactgacgacggtggcgccgggaggacggaggacgacgacacgactgacgccaggggacggagtggtacagaacgaagaaaattcacactctagtgatgtatattccgaaagtaatgtgaattgggtgataaattctggaagcagtgcgtattgggtggtatattctgaaaattctccctctaaaccgctcaaatttcacgaaatt

SEQ ID NO: 30451 - DNA, 768 bp, Oryza sativa
ataaatgacactaatattcatgatattagttacgtgccactgaaatttgaagaaattggaaccgtgccactccatcacgttttccgttagacccctagacgcgggacccacatgtttgttccatcttcctccatcctccctcttctgtcttccctatctcttccttcatgccgcgactgctacaaggacagtgacaacgacagcggcggctctcgatccctcccgccacggatggtgtcgaggacggtagtggctcctaagccctcccgttccagatggtgtcaaggatagtgacgacggcggcagtggctcccgaaccctcccgcgcggatggtgtcgagggaggcggcggcggctcccgagccctctctcgcggatggcgtcgaggagacgaaggtggcgatgcgggcggcggcccccgagccctcccgtcgcaaatggcgtcgaggatagcgacgacagtggcggcggcggctccggagccctcccgtcacggatggggtcgaggacagcgatggcggtggctcccgagccctctcctgcagatggcgtcgaggatggtggctcccgaacctcctgtcgtgaatagcgttcaggacggtgttggctcccgagccctcccgcgtcggatggctcggcggcggtggctcccgaaccctcccgcgcggatggtgtcgagggaggcggcggcggttcccgagccctctctcgcggatggcgtcgaggacgaaggtggcgatgctggcggcgtcccccgagccctcccgt

SEQ ID NO: 30452 - DNA, 2501 bp, Oryza sativa
tgacaatgaatcaataaaaaaagtatattttatttttttatggcaggcatcctattttaatgttttgtaaaaagatatgagagtaaagttaatattcaattttgaatgggttatagttgagataatattttttattctattttaaacttcagagatctctcaaaaaattatttgagattgctttcaacattggttatgatttcattgcaattaccgtaggaacacatagattgtaaactaaaattactatgaaactgtgaaatctttaccactattttacatgttgtgaacttatgggtacgtatagcacatatcttaccaccattaccacaaccacttctaggacatttgggtgagcaagtccctcattctccattgctccacttcctaaactattaaacaatgcatttcgtgtaaaaatatttgtgtatagaagtttcttttaaaaaataaaacaaatatgcaatggttaatagttacgtaatcacttcctaatgacttttgtagtttttgtgccgtggaaaatctcacccgagttgctgaacaaaagtgttcttaaacaatgtgccatactatgctgcaaatggggctaaggtgttacgcataagctatttctatgataccaaaggctagacatgctttgtacgacacgatatgatgctcggatcatctaccctttatccgttatttgactaaagactacagtgaatttaaggatggatgagggaacgcagtcaggtccctaaaaataatggcaccagcaattggtgcatagggcatctcaatattaaagttcactgatcatgtgtaatttcatagcaaaagagagaacttaattaagtttttttaaaaggcattagatatataaccatgtataataattgttctatcccgatttatgggaaaaaaagaaacagttatagcaaaagagagaacttaattaagtttttttaaaaggcattagatatataaccatgtataataattgttctatcccgatttatgggaaaaaaaaagaaagccaactgtttttctactcttacttcgaatttataggatttctaattttgttgaaataccaagagaagttctagatgtcttaggagggattagagtgtgtttaatggactttgagtagattttctcaaaattctagggagttggccgcgtactttgatgaccatccttttgaatgttattgcaaattattttaaaaattggacatgcaaattaaggataaattgaagatcggatgattaccctattaaataaactaggaaggaagcccgcgcagatgcgtgggcaatttattattattattttatgaaaaaaagtcatatatcaacataaaaaccatatattgtcttataaccttactgtaaaagaataaaatatttataccgtgaaatagaccatagattgtttcagttatatgtaaacttacctattatcatcctttgtaaacataatatgagtgatgatttttttattatattatacatctaacttccctatacatgttcatgggtaatatacaaaggaatactctatattgtcaaaaatatttgtactaattgttagcataatttatatgagaacaacataattaaaaaagataaaatatggttccatatgacattttggattgtacatatgtatgtaaggtttttcttgcgaatggcagtctctcatatctacatactttttcatgtttttttttacaattatttttctctcataggaggtaggatctgtgtatgtgcattcatagggtgggtgtgcacatgtttatatggccgtctatgattgacttttacattgttagttaaaaaaaatactttcaagaaaattggccagagggcatgaagcagcgctatggcagcgcggcttcttcgtcaacctcgcatagagtggtcactacatatatgcataatttgaggaaaaccttagggctacaaagaaaaaaacagaaaattaacagacggggtggaccatatatgcattcttcttttttgtttttgacatctcttgtgtatgcacgtgcatatagagggattagctggttcttaggagcgagggcttacctgaatcaatctaatttaatggttgaaaataatggattcaccggtttaagtgcaaatcgatggctatatgttttgttttcccctatattttttcttaaattttcttctatttattagagcatctcatggcatcttcaagtgtttgtaggagtataggacactattactcatactcacaatctacttgtagtcaactattgtttattgtgattttgtggcaatctctatttacctatgatttattgttaatggtttcccacttagtatcatcttttatctttgttgctttgatgacacacgtgtttactgcatgtaaactaattattaggtgcattgtgcagcccaagcagttgaaaacatatatttttaaatcatatatttttattgtatgttttttaccatatttgtggagtaata

SEQ ID NO: 30453 - DNA, 2073 bp, Oryza sativa
atgaactcggtatataagttgacccaaatctatctagactctccatgtggagctcttcccaccaaacgaacacttgggtctaaaccggaacaagaagagtcgcgcaacgaaacagactaaatgggctggattttacactctcactccttcatgggttgatgccctagctgcctagcagctcaccgctactcaacagccaaatgcccagggtatcccctcggtgctacggcgttgtgcctgtgcgtcgtgtccccctccatgggccaacacgcacgcacacttgtgtaacacgggttgaagttctaatatcacatgtaacacccgagacacaaaatcaacaatagtccactctacccgctaaatggacccacattcacattacacccaacttacacttttcatcatcactttatgtaaaaaagtaaaccaggaggtactatggttatatacacatgtgtatatattacttccaatatagatgttgattaaatgtgctagtatcaatttatgatttaggtgtatatcatgtgtctgagctataatgtgcctgtttaattgcaaggtagttatatgcatttgtttttttaaaaaaaaatcttgcatatgctaattatgtttgtttgattaatgatgtaggagtatacatttttattacgtgcttaaagtgcttgttttggtttaagggtagctatatttataatttgttcctttttgtgaatcttagatatgtcaattgtgtttggttcactattcagtagaatttaatttttgatatgtgtttaagcactaaagtgactatttccttgtagcgtagacatatcccttagtttgtttgtgtgaattccataattgttgattgtgctcaattcacaacttagtaggatttattttggtgatgtgtttaagccccaacgtggatgtttgattccatactgaaatcttgttatggactgttgaacgattctaatgaaaccgattcttttttttttgtaataaatataccaacttgatccactatctcttgatacagaataatttctacccaacctaaaaaatgtggtgtatttaattacataaaaaaagtgggatatacatttcaaaaatagatgtgtgagattatgttgtgggttatatatattcttgagtatcagtgcctcgcgtagccttatacactacgattgttctcaagagtaaggaattgaggattgaagaattcgttttgatatgtagctcatgatttgcaccgcatcgtctgaatttcatgaccaacaaaaacatcttgatttcaccttgtttagtgaaggtatgttctaatagcatttcttaaacaacatggcccaccttcgaagggtttgactattagttttattaatcatgaaaaggatgaatttcattaatcagaggaaggtttttcacctttgttggtttctacacatctagtgtttttagtcatgtatcatataagatctatattttgcatcattgaggctatgatgccaggactactttattggttttagataagttttatactttggcacaatgtagaaaattccatcatcattcaaccagttactttagagtcaacctactagaatggtttccctggctgatcaaattagtaatacatggattgtggagctgacactttgtaattttgagggattactttttttttgcattggtggaaataatttgttagagataactccattcattgtggtcaatttttagtcttcacttatgataaacgctcacaattcttagtgacaaagttcgagccgttaggcattgacaagatgtcaacccactctactcacccttcaaaaaagatgatcattagaactaaaagtgatgaaagggaatgcaactatcacatcagaaaaaatggctcccgccattaaggagaataatggaaccgtaggaaagagaactagaaatgtagattgtcttgtgccttgtggaatatagggtccatgaagaagttgtttgaggctaatgttttgaaaagtgctaagagaaaatgtgcaggagctcctgttggtaagtctaaggcaacgtcaacaagccata

SEQ ID NO: 30454 - DNA, 819 bp, Oryza sativa
ctaatatcacatgtaacacccgagacacaaaatcaacaatagtccactctacccgctaaatggacccacattcacattacacccaacttacacttttcatcatcactttatgtaaaaaagtaaaccaggaggtactatggttatatacacatgtgtatatattacttccaatatagatgttgattaaatgtgctagtatcaatttatgatttaggtgtatatcatgtgtctgagctataatgtgcctgtttaattgcaaggtagttatatgcatttgtttttttaaaaaaaaatcttgcatatgctaattatgtttgtttgattaatgatgtaggagtatacatttttattacgtgcttaaagtgcttgttttggtttaagggtagctatatttataatttgttcctttttgtgaatcttagatatgtcaattgtgtttggttcactattcagtagaatttaatttttgatatgtgtttaagcactaaagtgactatttccttgtagcgtagacatatcccttagtttgtttgtgtgaattccataattgttgattgtgctcaattcacaacttagtaggatttattttggtgatgtgtttaagccccaacgtggatgtttgattccatactgaaatcttgttatggactgttgaacgattctaatgaaaccgattcttttttttttgtaataaatataccaacttgatccactatctcttgatacagaataatttctacccaacctaaaaaatgtggtgtatttaattacataaaaaaagtgggatatacatttcaaaaatagatgtgtgagattatg

SEQ ID NO: 30455 - DNA, 1005 bp, Oryza sativa
ccatcccgctgttcacggacgaggcttcacgtaaagtcagagggacatggctattgacgtgtgggcctatgaaagtgggcctcgcctatcatcagggacccacgtccctcggactttacgtcaaaggagctcgctccgctgttcattgccatcacgcatcaccagacatcatcgttgccatagtccactctcttcattttttaagataaccccctctctcaacttatagatgccaaattttaatttatatatttatgaaatggtataacatatattgatttatcgtgtcaatttgttttaaaatttttcataataatttagacaacatgctagagagagacatatcctcttagagtttaaaagcaatcccccccaaaaaaaaacacccacatgcctcctaattgagatcctctgcagtaataccagggtttaaaataaaaaaaacgtacggttatcgtgattatcacgtacggtaacattctcagcttttgaaactctagtataccttgcggtaactgtgtggttatcacggtaaccgttaaaacgtggggtgacaataacccaccctaacggtttagtaaaccctaaatacacactgacatgtgggctcaaggatctattgggcctacatatcagtgagcagcattgtacatacagacgctctctccacgactccacgcctccacgcggacatggacccacccgcccgctacgtacgtcccacgactggcacgctctctcacacacatctgctcacacgtctgctcactcgaccacacatgcgccgcgccagcccgctcctcttctccgctcatgtcacacgcgtcgtgccgtttgcgttgcacgacagggcttatttttggaatgttttttaaaagggcttcttgtaaaaatgttctgaagaaaaataggctgtgttctacccttcattttcccaacccacctctctcgtttccacgcacacgcttttcaaactgctaaatgtaatgatttatgtaaaaactt

SEQ ID NO: 30456 - DNA, 820 bp, Oryza sativa
tttatggtattgaaatactttccgagtatatgaatgcctactttatattatgttcatgttatactgaatatactgctagcttatctgggagatgctttggtgcaggtataatgtttgtgtatgcaattactctatgtcatgacgatgatattagagtagtatctggtagtttagacgtggtgtctagattacaggatatcattatttggggttatatgctgcggatgagaggtgggccgctgatggcaatagctcagtacgggtattcctccgcgtgtgtatataatcctatgttaattcactggggagggtattcctccttatttagccccggttgtatggtcataatgggctgtcgtaaggaactcgacagtcaggggtggcttctcagagtaccaggagagcatcggatagagggtactagctagtatatcagataacaagaatgtatgtatactatatatattagaagtataggaatagattatctttctcttttctttccacttagcttagataatatattatgagaataagtagctaatgcttgtgtgtcactctacccttggattattctaacccctgcttagaatatgattatcacaagtaatatataaattattagtcaagttctctctacatgatcttcccacgggataaaataaatatgatacccttggaatactctcgggtgaattgctacaatggtatatccgtgcgcttgcggataaactctataaccataatataccataagtatttttgcgccattgctgggaattatatttctaataatgttgttaagaaataccaacaagca

SEQ ID NO: 30457 - DNA, 1237 bp, Oryza sativa
ggacggatggagtagtaaaaattgagcgctatttgaattttgaaaagcaaaagtttcaccccaagctgtttgatttacgtactattgcaaactaggaaacccgtactctaaattggccctacttttgtcgctaaattaggctgtgtttagttcacgataaaattagaagtttggttgaattggaacgatgtgatggaaaagttaaaagtttatgtgtgtagaaaaattttgatgtgatggaaaagttggaagtttgaagaaatatttttgaaactaaacacggcgttaatgtatggccactagtgcaaaaacccctgtaggcaatagataccggttttccagccggcaccaatgactaggtcatagaaccgacactttgtgctctctcggatttacaaaaaaatgaagccgtgtgctctctcggatttaaaaaaaaaaaagaagccggctccaagcatggagccgagccgatgcgcattaataatccccattcaagcatgctttcacagatcacaaatcaagcagatgaacattaataatcccaattcaagccatctctaatccaatccatcaccaatcacagatatgaacaacagtaatttccatcacaaattatcaacaaacaacaatagatcccaggccagccatcacagatgaagaacacaagcaagatgcacaaactcactcgtcaatccacgaaggtcaccgtcggggtccatctccacgcgaggtcaccgccgaggtccctatctgcacgaggtcgccgccaaccgccaggtccctctccgcgcgaggtcgccgcgggccgtgggccgctgggtccctcttcatgccgaggtcgccgcacccatccatctccgtgctgaagtcccgcgggaggctggctgtcgctgctcaccggctgggggagggtcgcggagggggagggggaggagagggtggcggatcggaggaggaggagagggggaagggggctagaccgtcaaaggggaggggagggggagggcagggcacggcggagcagggggccagaggggagggagcggcggaagaggcgaagagcccaagggggcgagggagagggcgcggtggagtaggaaaacgcggataaggatagagaaaattcgacccatagcacaagaaaaaaagcggtaccaaaaaatagcacaaaaagttttcactttcgatctatagcataggccaccgttttttttcaccccgaagcacttccgtcgta

SEQ ID NO: 30458 - DNA, 1075 bp, Oryza sativa
aaataaatgaggagacagaagggcagcgggttacagatttgtagccagctgtagcacggactccaagacgcagcgtgtgtatgacaggtgggaccagatattaatagtgtagtatgtaactattgtatgaataagctactagattgactataaataaattggagtcaataatgggctatattattaaacttgctcttatagtgattggattcggttctaagcacgatagatcctatacatgcatcgatccatttccatgcatatattccatccccataccggtggggggacaaacctccgcgccgttgttccaaaccaaaaccaagcaaccaaaaccgccaaagcttaacccgctccggatcttctctaccgcctcctccaccttctacttcactcttcccgatctcaataaatacaaatcatctaacaatgctgctcactaacacataaacctgagaaacgtaaggagatttttcggttagctccacagggtggttagtcagggtttatttggtttggagcctacttttacaaccaaaatcttggtattaccaaaatattggtaaattttagcactaccaaattgagtagtattcaatttaaattattgtggatagaatttgatagcaaactaaacatacacatgctattattgaagttatcaaaattttggtagggtaataaattggaatcaaatcaaaccggccctcagtctgaattcgaaatattaccccttctttttattgatattatgtttttttcatgatattcttttttttactaacacgtactattctcgagtccacatatatctacatgtagtacatgtatggcagaggatctcgacgtacgcgacgcggacggccacacggacgcccacgcgggatcctcgcgatgccgacgctgctgcaagttggctgcagcagcactgttgcattttgtacctccaacgtcacggcctttgctgcagcaggaaattccccaagtgtcgctgcctgtgtatccaagcaagcggcggggccggggacgatcctccagctagtggcctggtggatggtgagatggtgactatact

SEQ ID NO: 30459 - DNA, 1731 bp, Oryza sativa
ctggcgacgtcccattggatgacggcgccagccactctggcgccccaaaaaggaccatttctgggataagttttttcaggggtctatttgcgaaataagtttttcaaaaggaccaaaatgtgaaaaatccagccaaagatgccctcgtttttcaagtgggattgaactgtcgtgatcgcaagggaatattggtattatattccaggggtcttattcatgtgattttgcatcttttgcattagcagtgtaataacttagtactaaacaacctatgatatccataggtccagaacacagatgagcaaaatgataatgtaaacctaattaacaagcttacgcatgcaattacatggatcaacaccgatcatgcagccacaataatagagttcttacttagcagtgacgatcaaatattgactaagtaggtatctgcccaagcatggtttaattagtagcagtagaataaaattttcacctctggtttttataatccaccagagcaggacatggttttgagtcccacagtatcacaaccccctctcgttgatactaactaacatggtgatgacgcactcatatctgatgaagccacctacaccatttgtcctattctgcaccgtctaaaaagaacgcacaaacttttttttttcagatagcaggtaattcagagaaacttgctgattattccacgtcatacaacaacccattttccaagtagtacaagtctccatgtcataggagtgtacataaagggtgatgcaagcccaggatgaagtgtgtgcctccttttctcttcttcagttttcaactcaaataattaaatgctgaagagagctatcatcaataggaagcaaggaagaagtattcaagaattcaagagttggaggctcaaagagacattggcctctgccttttcttgccccttttagtggcctttgtggggctctctctttgatgctttcttctctttagctatcacccatccatctatctaggaacataatctttaaaatcctcaatttccttcttgcatcaattctctgtattttactcttttttttaaaagaaaaataaaactagttttccttcttgcaccaattcctcttgtttcttttcaaaaaagtttttttttgcttgttgaaccaattctttgtttctttcaagaaaaaaaacaattttccttgttgaaccaaatctcctcttttttttttctttgtttgaccaaaaattggtatatttggcatatataccccatggggccatccccagtgccacaagggccctggtggtcatggggaattggggagcagtgcaaatggtggcttgagaggatggaagacggcgagaagagcaatggaggagaagacggcggcctgagattctccctccagtttgatcccggcaagctcggccttgaccgtgccctgctcggcctccctgtctccgctctgctcggccatctcctcggttggagcagccagggggcgtccatggcggtggcggagggtgccggcgagggcgagacggcggcgggcgtcgccgccctcgcctcagctttcgccgtctacctcgtcgcgacgtacgcgtccgatcaccggcggcagccgcagcagcctcgccgtcctctccggctgcggaagcgtgacctgtcgccgctgaattcttgtaaggtttcgtttcttggatttttcttttctagcttgctcttgtggtgtttggtttgttttgtga

SEQ ID NO: 30460 - DNA, 1687 bp, Oryza sativa
tcgggggagcccgacccctagtcacgggaggggcgggctgccgcccgacctcgggcccgatccccctccgagggagggccacgaggcattggggccagtctcctccgactagtctttgggaaagagtagccgccacctcacgtcgggcctgactccccttgggggagggccacgtggcattggggggcagcctcctccctctaaatatgataccctcagacccatatcaccgacaagtcttatttaaaaggaaatgttcaaatataggtgagacttgaagtacctttaacgataaaacaagtcacggcaaaacaaataatacttatataacttttaaaataagatgaatggttaaacgtaggttaaaaaactaacagtattatacatttcaaaacgaagggagtatcgtattagaaaagatccttctatcattcacctcatttattcgtgacaatataaaatacgcatggctttacaatacaagtatgcaattggctgagcttcttccaggcactggaattgtcatctgccatggaaaatgtgtctttgaaggtcatggttcattttaaacggtacgttttacatagagaaaaaataggaccaaaccttacaacacacaattaattagaaaagaactagaaaaaaaatgctactacagcaacacaccaccaattaaactaaactacgaaggcagtgataacaaaaaagcgtagcacaacactcatcaaacgttgtgcactgtacgaacaagcaataaactataagaaaacaagactcctgcacactggcaaagacgcgacgttatcatcatcacaccatcaccctcgcgatctggtgactccgacttcaccaggaaacactaacacaaaggcaacaacctagtccgcgccaaagcataacttaaaagggttcatgtcatcgttgccaaatatcatgccctgtcgatgccgcagctccgacttcactaccaccaatcttgttgatgcacagtcgagctagattgacgagccttgcagacaaaaagcttaaagccccacactagagcgagacacggctaatgaagtctgacttggatcatcattgtcaatccaactgttggtttaagagaaattgagttttcacataagcgtttgtcgtactgtttttttaggctgacggtcagaccaccaagtgacctatggtcagaccgacgctagtaggtcggatagaccgctagacgtgtgttccattggttttttttaggttggtatgtgttttgatctatcaagattcgattatttgacttccattgatgtaatctatcatcacccaccccaaatttgttaggcttggttatttatgttcgatcctataaaagggctataaaggttaataggtactgttatcgcttttctccgcaaacacgaaatcacttaaagatttacggaggggtgaccgtcctatgttgcatttgcactgaattgcagtcgtgggcgccttagcattaggccggagtacgtgctgcagccgcgccgtgcgtacaggccgggaacgcaatatgtgttactcgcaagcaaaattccccgagagaccgcgaaatcaatctccaggccgttagcgccacatgatatgatatgcagctccacatattaaactagtatttgactgactcgctcgatctctgatcgatccgtccctctgccacatg

SEQ ID NO: 30461 - DNA, 2686 bp, Oryza sativa
ggactaaagatcgatctttagtaaaaggttttttcacccgggactaaagatagcgatctttagtcccggattggtagtcccggttttcaaaccgggactataggggggttacaaaccgggactaaaaagcacttctccaccagtgatggtgagaggttctcatcctcttatcccagccggagtcggtcctcccgccctggtcaaagctaggctcccgtttcccggtgtaataggagctcagaagtcttcacccattaaaagcagctgacatgggcacccctcatgtcaggcggcaagatttgacaggccccatcatcaagatgacgtgcgcttgcttcccaagtcaagagacaagacatgcatttaatgcaaaaacacttctccaccggagctagatttttgggcccatgtggtaaccccttgaggtataaaaggaggtccaggcctagtagaagggaggagggatccgggacgatccattttgacgctctaagagcaatctctagccccggatgatcaacaccacattttacttcaacaaggggatcttgtaatccttcactaaaggagcatagcacaggagtaggtattacgcttcttagcggcccgaacctgtataaatcccttgtgtctcttttgcctcgaaaacctcggatctcacccgctgcccccggccgaaccaaaaaaggggatctcacgatctcccgctagagagctcctcgacaagactaatgatcaaacgtatatctaaaaattaataatattatacatttaaaaacgaagatagtagaaagcaacaaagtcatttgacctacttactgatacttacccacaaatctttcaaagataccttatgtttgagatcggagtagggagtcgtaaagaaatggagaagttggtgagaaacccgatcaagctgggaactagtgcgtgccagcgtgtgggtctaaagccgcacaagtgacaatttttccagcgcatattggccactcctatcttggtcatctctgctacgtacagtacatccatgtctcccatgaacattcctctcagcttcagaacgtctgtgtagcctatactgcgtcttttagtttcagaacgtgctcgacgctaatcctgtcaatcggtggtttgaaacaaattgttcaccggattatcacttcgaattagctatttattactataaagataaattaagtatttaaataaaaacttaaaaatagcttagaagaaatgatctatgcaatgccgcctaatgcgatagaaaaaaaaatgcccttttaatacaaaacgtggttttagagaagttagtcaaatgatctactgcctccgatctaaaatataataatattactaaattagacacatcctagtgctattaatcacacactaaaatgtgtctaatccggtactctttccgtttctcttagttctagattataagtcattttgactttggccaaagtcaaactatttcaagtttaaataagtttgtaaacaaatatagtataatatttatgatcccatattagtttcattgaatcgataattgaatacctttttatattatatttgtcttcagttaaaaatgttactattttcttttataaacttaatcaaatttaaaatagtttaactttgatcaaaatcaaaacgatttgtaatctaaaatagagggagtactttataatactatattttgaccaagggcggatctacagtgttatcaccggcgtcaggtgacaccgacgattttcgataaaagttatgcttaaaatacttatccatatattataacactatattctataatataattaacatggtacgacaccgatagatacgttattacaccaacaaatcaaatttctctggatccgccactgattttgatatggacagatataacgaaagagcatgaagatttctcgtttcgattgcgacgcggcgacccccatgcatgaaccagcgacatggaaaacatcaccgcatttcttcgcaccgagcacaaggcggcggcgctggattcgccggccggccggccggtcgccacctaccgctgatgagcccctgggttagccgcagaaaccgcgagcgccagcacatgcgtgcgtgcggccccggcgcggccaaaagcctctgtcggtaaaaatcgtcgatatgcagtgcaggtggcagagaacgatggtatgcagaaaaagccgatgcaattgctgcagaattttcgtagaaatttcacacgaaacagcttgctttagttttcataggagatggatttttcttttttttttctctcccacgttctaaatagtagtgcctaggtgcagcgggcccagctttttgaacttgcgtatttgaaatgggaggaggaaaaaaaatgttcatacacctaaaagcctaaaaattagcttgtggcataagatactaataagtataatatatagcgtatataatataaaattggtaaatatatcaaagtgtcaacatatggaataaaaaatgataggaaatgataaattgggaaaaaaatatagattaatttttcgacgcttgatattttgaaaataagcgatgatgtccttgtccttagcttgaaaaagaattccctttcaatgaatataactagacaatcattcaaatatttttgccccatcttgctttctcaacttttttttatgtagttcat

SEQ ID NO: 30462 - DNA, 1740 bp, Oryza sativa
taaccccccccccacgcccccctttgcccttttccccatgggcttgatgggccggctgcactgtagtggtggtgggccaaatcctattgatttcggcaccacccatttacccctttattttagtttttaattttattttagcagcaattttatattagtccctgtatttttatgtaatttagtgaaaacagttcattagttctacaaattttgtaatggtcctataggttagtcctcttgctaatattgtaaatttcagagaaggggattttcccacttcgattcgctgattcagctgcgaagctgcatttggtggtcgtggcttatatctctataatctttccccaccattgaagtttcccatgtaaaaaaaccggttccctataaaacccaccccacccaaaaagaaaatcagtgttttcacacaaaaaatcaagacaacaaaccggatagaaaagattaaaccgtataattctaattctgttgcaacgtacggacatgacattagttttctgagagcgagaatatacagtatagttggtagcgactaggtcgagcacaatagagtcgagggaggtaatggggagaggctttattcctgtgtattcctcttatgggtaccatgtggcatgtgggtatattaattgatccacaatatggaagttcagaaaaggcagaccaaagtaaaatcaaagggatacgatgagataagtggcaaattaaatgtacatactgctcaattatctgctaaatttataattgcagttaactttgtggtaaaacagagttgagcccttgcaattatatagccaaggagtaattttccgaaataatcaacggaacaaaagtcaaactgttatgaaatatttgggtgatctcatctatatatatggatagagtaacaaccaactcagggacacaacggttggtcgtgccccacacatgttctcgcctcacggcgattctagcgacggccgcgcctacagttgtgggctgtctccccctgtatatcgctacactgctatcaataaaggatccgctcattcattccctacattcttgtgttaaattctctctcaatctctctagatcaatcaattctatccacattcaacacgttatcagcactttcgcgatacaaccctgggttaaattctctctctcaatctctctcgctcaatcaattctatccacattcaacacgttatcagcactttcgctctcgcgaaggagatcgcgaagtgaaagaaggaaacatcgcttttgatttcaagaaaagcgaaagaaacagaagaaactaaggaaatcgcctaagtacgtctaccttgatttcatcctcgatgccgttctcggcctccatcgctgagaccgctttcatcaccttcttcacctcctccctcgattcgatggagtcaccaccatcgccatgtcgggcgccattctagggttggtggccaccgccaccatcctcggcgccgcatttgccgtcgctgacgcacctccgactccaccaccacaagcgcacaccacgagtgcaccggcgccccgctgcgtccaggtccaagctccatggatggactacggtgggacgcccgccggcgagcagtgctccctcccactggagatgcagtcgccgccggcaccgtttcccgttcgccgctcggcctccccactactttccgcaccattcatgtggctccccgagctacacgctcccgaacggagtgggggggagggggg

SEQ ID NO: 30463 - DNA, 1393 bp, Oryza sativa
cgacggcaaatgcggcgccgggaatggtggcggtggccaccaaccctagaatggcgcccggcatggcgatggtggtgactccatcgaatcgacggaggaggtggcgaaggcgatgaatgcggtctcggcgatggaggccgagaacggcatcgaggatgaaatcaaggtagacgtacttacgcgatttccttagtttcttctgtttctttcgcttttcttgaaatcaaaagcgatgtttccttctttcacttcgtgatctccttcgcgagagcgaaagtgctaataacgtgttgaatgtggatagaattgattgaacgagagagattgagagagagaatttaacacaagaatgtatcgcgaaagtgctgataacgtgttgaatgtggatagaattgattgaacgagagagattgagagagaatttaacacaagaatgtagggaatgaatgagcggatcctttattgataacagtgttacaatatacagggggagagaggcgacaactggaggcgcgaccgttgctagaatcgccgtgaggcgagaacatgtgtggggcacgaccaaccgttgtgtccctgagttggttgttactctatccatatatatagatgagatcacccaaatatttcataacagtttgacttttgttccgttgattatttcggaaaattactccttggctatataattgcaagggctcaactctgttttaccacaaagttaactgcaattataaatttagaagataattgagcagtatgtacatttaatttgccacttatctcatcgtatccctttgattttactttggtctgccttttctgaacttccatattgtggatcaattaatatacccacatgccacatggtacccataagaggaatacacaggaataaagcctctccccattacctccctcgactctattgtgctcgacctagtcgctaccaactatactgtatattctcgctctcagaaaactaatgtcatgtccgtacgttgcaacagaattagaattatacggtttaatcttttctatccggtttgttgtcttgattttttgtgtgaaaacactgattttctttttgggtggggtgggttttatagggaaccggtttttttacatgggaaacttcaatggtgcggaaggattatagagatataagccacgaccaccaaatgcagcttcgcagctgaatcagcgaattgaagtgggaaaatctccttctctgaaatttacaatattagcaagagcactaatctataggaccattacataatttgtagaactaatgaactgttttcactaaattacataaaaattcagggactaatataaaattgctgctaaaataaaattaaaaactaaaataaaggggtaaatgggtggt

SEQ ID NO: 30464 - DNA, 6510 bp, Oryza sativa
ctgcagctagctggtgactgatcacgacagccaaatgcaaattgagaataaagcgaaaattaacgcattatcactttaatgatttcagggtggcacgcattagagggtactcaataaaaacatatttttctaaaacaaatgaataacatatgtgcgatattttatcacatatagcaagaaaaaaaaattatggcattataaccatgaaaagctatggaaaaagaaaacaccaccactacaatccgactagctgtcactaagcattatcgaccaccgctagactaacaaaagagctatagctataccgctcaacaacttcctacaaaccgtttaacgcctagctagcacctataaaatgtgaactcaaactgtgtagcaaaactagaaagttcgcgtctataggtcattaattattctgcatctcaaacttgcacaatcaaacctttcatatattcacattccgtttcctctaaagcatgattctaccaaattaactttttgcctctccggtcatatatatcccaacagctgatggaactgaacacccagataaagaaagaactgacgcgtaaaaaatgcgacgagatcgaagaaatgaattaactaaaacgaagtcgtcgcgtctcttaagatcccggaggatacaatcgatcgccactaagctagtagcaaagaggatccctccagaataacctcgtcgatttccacggtcccctttgcattatttatcctcttccaattcgcagcctgatggaaactaccatggccacacaaaacagcccccatggatatgcagaattagctgggttgatgatgattcagctagctaggagggccatgaatgacatgcaaagtgtacatgtcgctcagaggagatgaggtttccatccaaaggccgggtgcacgcatcgaccaaccaaatgagtcccaagcatgcgtgccggccagggtagtccatgtcaacatgaagcactgaaatgtgcagaccaaatagtaaagccactaagttactatataaaaaaataattcaacccctcttatcacggtcaattctttacctatcactactattttatgaaaaccatttttgcacacggcaaaactaaaataatttttccgcagacggctggacacatggcttcatgtgaaaatgaagctttattttcacatacgggcacttagtcttatatcgccagatatgacgggtagatacggtgtgacggtaggcaacaagcgtggaaggaagacactcaggataagcgctccctacccctgccctcccaccaatccatggctggcccctttcgtctccctctctattcacaactagagtcaccactcaccccctcacctagcagctcggatcacagctacagagttataccgacccaacggctgtcagatttataccacccagggttttcaatatcgaaattgctttttctgcgcggggggggggggcgaaatttcccagaaattttgaattggcctaaattgtttgaaattttgtatgaatttaaataaaatttgaccaaattcacaaaaaaaaatataaaagagatatgagcttgccggtgggggaggggtgcaaatatcggaaatttcaaaacaaaatttgaaacgttgataccaccctaccactgcttcaccggatccaccatggcttcactctgttcttgacctagagggaggagagggagggagatgaagagggagtgggaagtttggatgagggagaaaggagagaggaaggaggataggcgatgttgttagggccctagggtgcatacatttgacgtaaaattattcatatcaagatcacctgatgttttcataggtgatctgcttagacaccagtcctaggagtacccatttttagaggtggtcatctaagtgggctacctacgaaaattgacccaagcggccgcctctgggcatcaatttttagaagtggtccataaccttacacctccttcactatttgtaccaacatgttcctatttaactgcttttatagggaaatggggtgttgtggaaaattattgtacagagggtagcgatagaggagtttagggataaaaaggaaatcgtgatgcgacagtgatcaagtattgttcgttacactgttcatgctatcactgttgtttcttattataaactgcatgataatagtagaatatctaatattttgatattcataattttatacaatgggttgtatatatggagctaaacttctatgaaagttaaaagttaatgtctcaacaacatatatctgttactacttggtgttgtcacatatatttgttaaattactacttgatatagttgatactttttcttttgagaccatataattataagtattcatcaaaagattaaaaaaatggaccaaaggaagaaacatttatactccaatggtattactaataaatagatgagaaggtacttgggtgtttgtggtgtaattcgtcttctatttagtttatcttgctattgttaggtgatattgtgttggtaacaaaaagcgttaacaatgagcttcacgtacatggaggacaaatcctgatgtttgaatcatgtctactgcacacatccctattttgcatgatgttagttaatcataaccaataaatatagagtactctatggtagcgatacgtacgtacgtacggtgcagatagcaaacaaagtcgtcgtgttcaatcaattgtgcatcaacattaacaagctagtcgtcgtacacgtactcgtactggctagactagtgcaggttacaaccctgatacgtacgtaaaattaaccgcttaattatatactgccctaccctcatcggcacaccgcacaaataatggagaaacggtaatactgcaaattgtgcgtcacactcttgatcgtgctatcagttcgtcagttacgcccgatatatgagtgcagggcccaatcacttatcttcaagcgcaaaggaaatggaagagagaaaaacacgtgatcatttggaaaagtgtaagacaaccccccatgcattaagtcaacaaggatatatatatactttatttttcgcaactaattaacaaggatatgcatgcatgcgtgatcatgtcaacagcgggaaattactcctcacttaagtataactagctgggttgcccgcgcaattgcgcggctagcataaaaaaatcatatatttttttaagtataattttacttaaaatttattaaatagctatctcattgttaagactttgaaagatcaaaccttatcatccttgtgtttctaattatatagttttaaaaatcacaccaattgctaccccttatgtcatcttctttatttgcttactcgatctatcactgtttctattcattcatcttggaacctttaaaaattggattttatagtttttagagttaattgtcacgttgggtttcgtttttataatttctagatgtcccgtcaaacgttgccattatactcctctacagcccgtccactatctcttctcttttattgtcattgagattttaaaaatcgaacataattatagtttgggtttatttttactttccagaagtcccgccaaaccatcagcggttttgccattgtattcctctacggctcgctcgctgcctcccttttttattgtcattgagatttaaaatagaacatgattatcattggttttttttttacttttagaagttctgaatctttaaaaattggacttgtagttttattttttataatttttagaagtctcatcaaacgatgccactatgcccctctgcagcccgtccgctgcctactctttattgtcattgtgattctaaaaatcgaacataactatcgttgcaattcattttttattttctagaagtcccgtcaaccgtcggaggctctgcaactatactcttatacaccccgctcgctgcttctccttttattgtcattgagattttaaaaatcgaaaatgattatcaatgtggttttttttctttatactttctagaagtcccggcaaccgctttacttgtttactttacggcctgcctgatatccctccttttaatcgtcattaggattctatttgttgttttattaacaatttttatatgctgtattaactgccaccaactctactactttataggtatgttacttaatttatctcgtcatgtgttttagatggtcttttctttcaatagtctttatttttatcataaattttagttatttataaattttattcctaattgaaatccttttttctaatttcagaatttatttttttctaaaaaaattagttaataccatattgtgttcttttaatgtttttattttttattctgaatttcagttgtttcaaaattgtattcctacttgaactctgttttagtttttctaattttggatattattatatttttattctaaattttaattaatctcgtattggattcttatatggattcttctttcaatattgctatttctaattccgaatttaagctaattttaaatcgatttcctacttgaacacttctttattttctttcgctaatctcagatttatttttatttttattccgaattttaattaatctcgtaataggttcttatatgggaacttctttcaatattgcttatttttaattccgaatttcagctatttttagattgtatttctacttggactctcgtttccttttctaatttggattttattttatttttatttcaatttttgattaatctcgcattgggttcttatatggaaacttcttccaatatttcttatttttaattccgaatttcagctatttttaaattgtatttcaacttggactctcctttccttttctaattttggattttattttatttttatttctaattttgattaatctcgtattaggttcttatatgggaacttctttcaatattgcttatttttaattccgaatttcagctatttttagattgtatttctacttggactctccttttcttttttttttctttttctccgattaatgtgggaatttctagcccccacagcgaacgtggtgactcatttcaaagctgttttaataatataatagattagctcatatgcatgttaatattattctgatcttaaaccaaagggaaagaagaggagagagatagatgagctcatttggttgttccattttaccattaatatagattctccatgatgatccacaggatctaacatttcaggcatttgtaaaaatgatttagacagtaatgatcagataacactctccaatgattcatcttaatctagtcttttttccgcacaaaggggggaaagattaatagcattcgagttttacattaaaaatgattgaattaatttccatcaaacattttttacgcttccatcgtagtgacaatttttaatccgttttattagacagtaacaatataacttcaaaagtgtgagtggccttataaggttgcgttctatgttgttgtttggcttacctactccaagcacgagaaacgttacagattattaattaagtattaaccgttacaaacttaaaaaataaatttatttagtttttctaaataactttaatatagaattttttttttaaaaaaagaaaaacgtaccatttagctgttcgataaatatactcatgataaataaggcagtggccccttttagccacgtaaaagagcgcaacttaagatagatccttcacgcataacctcatctaattaaatggtaattgtggaaagataaaacaatataagcccttaggacaagtagaatagtttagccttctacacagagatagtatcctcttctatagttgagacaataaatgctctttccactaatgctatatccttatctagcaaagttttctcttttcttgctttaagattaacaccgatttctctctcttatccacattagtagatagatataggttgcaatttggcgagccagctgtcaattgttgctatacactcagcaaattagtttagttggcagtttcataagctatctaatagttgttgttgtacaacccataggagatagggtcttattgtttaccatataaagaataagccattgttagaatataaaatttgaaacttaattatctttttttcagattgacttttaagtcacaaaagaaacacctataaaagttttactcccaaattttttccgctaataagcccttacagcttataatcaactcttggtcaaccgatcgatgggaggtaacaaataacaacagaacttctaatgaatttctctcaaatccaaaacgaaaaacaaacaagaaacactaaacctctcttttctcatcctaatttcccctctctgtttttttctcttcttttcattcacaagaggaggaaggggaagggcatcttgagatcgacgtgcctgcttgcatctcccttgtggatgcggtcacgtccatgtcgatcaccccctgtgtgctggggtttgtgtgtga

SEQ ID NO: 30465 - DNA, 651 bp, Oryza sativa
cttctcaattattatttgtgctctgaaaattccactaaaatttatttacgcattttaggcttttaggaaatatacaaaaatcctccaagccttatttgacttttatatttgcacattttaattgttggaggctttcacatgaattttaattattctcggcacaatttcgaggatgtattttagagtcgttttgggacgcgacaatcttctacctccagccgccggcacaggccgagcccaagccgtcgcccgagccgctttcttctcctctcaaatccgctccaatccggcctcttttcttccggatttttgaggggttttgatcctctcgttctcctctatcttttcccccaagttttggagcaaatcgttgtgtatcttgttcgaatcaaactcgttttcgagtttatctccaaaaccgagttttgattttctcggatcgattcctctcgtttggagtctgatctcttcaatccaaggctatataaagcatcccctcgtcgccctctttcgtttgccccctctctcgtcctcttccgtgcaccgtagcgccgccgccgcgtgcacttagccgccgccgtcgccggccggtcttcagtcgtgtcgcgtcgtcgcctccgccgttaggtgcgccgtggtgaggagaacccc

SEQ ID NO: 30466 - DNA, 1186 bp, Oryza sativa
atagataacactttattccatcattggtgatgtttaaacttcaaaataaggttattaatttcaagatttgtgagtgttaatttgtttgtacctcggacatggaggtgtgatttggagcgtgttcgtggagtgcttccaccatttgctgcttgcagtggagttggagactgaattgaagagatgttcaatgggtgagactagagagtgtgagaatggttgagattggcatggactatatatagccgattatgcagtcttgcagcatatatgtagacgttgtgattatctgcgtatatgtacatttgcacgcagaatgtatatgtacatgtttgttttcattttgtttggtggtcctgtaaattaggaaaggttgtatttttcacaatatttccaaggatcgatcaaaggtgaaagccattcaaatcggtgtgaaactaatttgaatttcatagatttgctgtgataatttgtaatatctcatgcctaggcccatgttaaatattaaaggttggtgttttctcataattttaagctttgagtcactaccatagagccacctagcattgctggttcaaaaccgatatcactatcggttatccacccggcaatcggctggggacagtgttgtttgggagcaacactgttggttttggttctggaactggcagtgatactccattctctccggtttggagtctatctatttatggggtaacgagtggacttgattggtggtgtacgagagagattgaacaccgggataatgcgcctgcccaatcttgtaacatttgaaatcgtgaatcatttgggggaaatgtgatcaggtaaatactatagggagaaaagttcaaaatatagtaaaatgtgtcttattatataaccacaatgtgtttggtgaaaaaccaaaaaagtcacacgtgcatgaatgtgtggcatgcatatttgtatacctatttagaacttccaaacactataatcatgaaggattgctgtttcatatatcttatatattacacttctaatcgggtaaacgtgataaatttttgaaattttgcttggggggtatatttaaaactcctccattttcgcctgatttccacctatatagtagttcatactcaattaatttgcagatcaatatactacctccgttttttaatagatgacgccgttgactttttcttac

SEQ ID NO: 30467 - DNA, 1602 bp, Oryza sativa
gttttctctaacttcgatgtagcagttatgttgcattcatttttgagctttgcatctagtacatttgcatatatccaaagctttttctgccctaatcaatataaaggtcgcggtataagatttttttcaagagtgatgaagtttttcatgaatttgcagtaactccgtacatctattcatgcttatttggagtctttggactaagctatgtttttatcgttgcacaatatgtcattcacttctcatagaaaatatagatttttattgaaatcttaggttagaaatgttttttttcatggatagattttatagtattagatagaggttttaaaagctgtgcttctgataccagatcagtcagatgacattataaaacattaatattgcttccaaccataaacatgtaaaattgtaaatctaatttccaagttttccttgttctttctggagaataactgtttatttacgaattttttagtacttatcatgcttcgaaactaccatttcatcatcattgactatatctcattcttttcttctgtcttaaggatctaactgtggtgtaaaacttatcactttgctgcgtaagttagtatatattatagagatatctaaaataaaatgtaaggaatattgtcttacagcatggtttgttattagtattcataacattctgttcacatgaatgcagttaattctcctggaaaacatcgagaatttggaggattggatactggtgatgatcaagcggcgctgctaaatccaggatttaaagcattgacccaaattgtccaggatgatgtgttcagagaatttgagtttagacaatacatatttgcttgccaggctaaggtataagacatgtcgtaaaaaaatgagtaactgaatgctattttttcctatgattttttttgtcaagtcagtaatattttttttcattcttacttcattgcaatctgttcttcattgctgtactgcttggttctttttttattaccagttacatgcccgtacgttgcaacgggatcattagattttttttaagggtggtttttttataaagagagggagcatttttttagaggaggaaggacaacgactgctcttttaaagtagttaagatgagttggcaatgtcacagttagagaataccattgtatgtgtcattgacatgtgtgtccaggccccacatgtcattctcacatacaattgcaatttgcaactcacatatgcctagagtgctactgtttaatggcgtagcggtgctctttattgctcaatacaaacatgcacactgttttactcaagtggaacatgttacataaaactagacatccagtgccagaactttgttctgttttagagctagttcaactgaaccttatatattgcctttatactttttccatttcaccattttgcagttattgtttaaattgcatcgcccaattgaggttgctgcaagaggatatgcttttgtggttagcttttccaagacgctagccttgcaggaggtatgtacattctctgttttattcctctacaagcaaagtttatgttctagaaagactatattgtgtgaagtgtactcaagtaattctg

SEQ ID NO: 30468 - DNA, 1406 bp, Oryza sativa
agtgttcgtagcggagatcgacgtatgcatccagcaaagctccctctcgcttcaaatggttctttttatcaaatttatcagttcaaacactagcgaatggcattgcacgcatgcaaggtctagtactctgaataaaaccaacatggttgatactatgatgatcaccaataattaatgtcacttgaagttagatttgcaatcctttggctaggaagttgattaatttagaggcgagattaattaattagccacacatggttgggagttgtaagtagtgacatatttattgggagaaggagctagctccattttgaggggacaaaggcagtggaatatattgtgactagtttgtgtgtcatatcgagtgccccagccctaaaacttggtgggtctagagctactccttgggcacgtggcctggatcaaataatgtgaatcctgatcatatcagcaacgagtaaataaattatgctctttgagatagaggtacaactttgatcaccaatttattataaaatatatttacataccttaatgaatattataaaagtatttttttagaagaatctacttacaattatgttttttcatgtatacattctaaaaatttcaagattttaatgtttgaaggttttagagtttgatttgaaagaaatacagactatactctcccgtcccatgaaaaacgaatctaggaccgtatgtgacatattctagtactatgaatctgaacatatgtatgtctagattcgtagtattaaaatgtgtcacatccggtactaggttatttttttatgggacggagggagtatatgtttccgtgacgagctgagtgagctgtagcaggatgcactactgctcaagatcgatatggatgaaaatttcagtaagataagttggtcctccaagaaaaaaatagagttggtccaccacacatgcatcttagatgtaccctagctagctctacattttggacatgctgcaccatatgcatgccaactcatggagtcgtggtggatcttgttatatatactattaattatcatcaattgatgatatgataagataatcttatgatatatatgcaaattaaagaggagcttctatgaatggtcattgagaggatacagatcattgaaaagctctcaaattcttttttaaaacacgacattccgataattttctgcagggggctttgccttgttttttagacaatcaaatttacagccagtggatttgtagattttgtagaatctgaagagtgactgtgagaaggttgagacttgaaaggcattaattaattaattaattagctgtatgaccaggtggaataaaaaacacactaataatccaacttcacttgagcatttgcaaaatatatacaacattaacctcttgtatctgca

SEQ ID NO: 30469 - DNA, 699 bp, Oryza sativa
tttagtaatgttgctaaaaaagtggctacatttagtttgctaccaaattttgataactatataagaaatcttgccaaaattttggtaaggttttttttggcaacaaagtgaacaggcccatcgtagatctctaacgtctcagaaatgtgcttgtcttcttttaagtaaacacaaatgtatttatcggtcaaaccccatctggaagaaaataaattcctactgaatacctgaaacaatttttctgatattccaaacaaaaatgtatagcgcccgatcgtctattggctttcttttttgtttgcttgcattctctgcattattgtggttgacatctgcgtcatatttgtgaagttggtttgtatggagtttttggtttgaaagccataccaaagtattggcactttacatagcatagtcaggggttgtctagattaatgctatttcaaatcatactcttttttttataaagttgtcaaagatgtgtgtacatttagttttttacccaactttggtaaatacataaggaattaggcaactatacaatagtggctattctgccaaaacttgcaatattgtcaacttactaatgtcaaaatttgataagtttattttggctataatctgaacagcccccgagtttgtatcagtctttaggtcgctgaggatatctcggatcatgagtaatgaaatttctggttt

SEQ ID NO: 30470 - DNA, 1406 bp, Oryza sativa
attaatcttctttaattgtttttctcctgactaaaacaaaacgtctcgtgcacatgggcgtgtcaaaaacaccagcttatgtctgtacttttaatggagtgtaagttttaattagtcaattatatcaaaatcgtagaactacgctgagaacactttggacgtctccatagttagatgcataacgtcaaaacatacggcatacttacaaataaattttataatcaaagaaggtacaaagaatgttaacaatagactatatgttgtgtttaagatgagaggagaagatcgagaagaatacgcaaaacaatgtaaatattactacatgattattgagtattaactattttaaatttaaaaaaaataaattaatatgattatttaaaataacttttctatataaatattttatgaaaaacgtaccatttaactgcttgggaagcatgcacgcacacaacgaaagagtttttcttctaatccacagcgccgaacccagactaaatcatcaacgtttctgggtaaaatactccctaaccctctgctccaaaggttaacacagccataaagagtccatgaagagtcattgagtgcaaatgttggacacgagatgttacaactttgataccttttcttcctagcaagaaaaatatataaatgatttttttttctgaaacaaagttttaaactctgttactaatctggacaatcaacaattgggccgtcaggaaaaaatggatgcgagaatggaagaaacggaaccgagatatttctagagaatcatatcacattgactaattcgttcaaagaaaaaaagaactctgaagccagtagctgctaatttgattaggtgaagcatggtgaagaagttgataggtgaagcgagggaagcaaacaaggacgaaggagatgaggtgaggatggtgatggaatatattggatgcatcttgcacgatttcttgtgagtgacacttgttgtgatgtgtgctttgtttccatgtgggaatctaatgcggccacagaaacggccaccggcattttggcctaccggagcagatattgcgtggcacgcttgatgatgcagtacttatttcaagaccaggaaattttgcacgtacctgcctattagtaaaaattgtgtgtattatgataaagaatattatctttacttccaaatcttctgatagaacatttccctccccaactatctgttaatgcaatatcagtcatcaaatatgtgtcactacataatatttatataggtatatcttttagttcaaagagtataattcctcctgttaaggggaatttaactatttgccacttttaggtttgccacttatctaaatgctcctcttaggcttgcgcttaataatttaccactgaagagatgatttcttaactatttgcca

SEQ ID NO: 30471 - DNA, 987 bp, Oryza sativa
agctcggtaccccattgcaacataacaatataaaatatgcaacaatgtcgaatttctatggttgaaacatatatatatatatatatatatatatatatatatatagaaaataatcctaagtataataattctagattcattactactagtttatgtcatatcctattttaatttgatttattttaggacggataaagtaggggtgctcacgggataaatgaagattgatattcctaagcataaattattcaactgcacatgccaatacttgcattttgctgcataaaaatcatgtgcccataatttgacaagcatccataataagattcagataacttccttcggtcatcccgataaaaaaataaaataaaattaacaatcacaaccatagtgcttatcaaaacaaaaacaaaggcctatttgaatagcatgaatagaaaaatagaggaaaaatagaagaatatgaaaaagacatgattcataaaatagatgattagaaaacatagaaaaaacaaatgaataaccgtttggttggaccgaaagaaatacatatgaatttgaagagggataaagacttaaagaaaactttctcaggttctacattatgttaaattttctataaaacttgcatggaatgaaatattacataggaattacataggactatatgattcattcctttaactttaagggctatatagaaaaaatcctataaaaatataaatactccaagattcatatgattttcgttcgaatcaaggggtcatcagcagttgcaacacaaattagatccaactcgatttaatagtacgagtacttgacatgtactcactcctcctctccccaccacgcccgaatttattgctactctactactcctacgcggccaaaccgcaccactaaccacagccggtatggcaaatgactactcctactcctagtagacgcatcgctttccaatcaaaatcgccgaactaaaacagaaag

SEQ ID NO: 30472 - DNA, 754 bp, Oryza sativa
ccttccccgtcgccgccgtcgccattagcggcggcggcaggacgatcaatgccgccgtccccgtcgtcgtcgtcgctgtctccgaggcgttggtaagcttctagtagcgtcactaagttgtcgaacgcggtggcggtcgccatggatgatggttcatgatcggtgccggcagaatcgctttcggtgcgtcgtgttccgtcgacgtcgtcgtcgttgtccatagtcaaaaatttaaaatccgatcagtttaattttggactatatatttatttatatctaacaactggatcatggatctgtttgttttgatttgatttgctcccgtatcgcgtgtaatctgctactgctgattaaacttatagagagatatacgacgtgaatacgtgcgtgactacgagagttcgtgtcggagggggatgcgtaccggaattggcgtacggccgtacgtgcagctcatgaaccgtaccactaccaaatacggcgtatgtgtagaaggattctgtttcggggttttcgtttttagattttttttaatatttacagaaataatctatcgaccaaaaaaattgcagaaatagcccctgccgctctaatggtgggcggcaagctgaggtggcagacggtgggtcgaccgcgccgtctgccgccgtcggccaaaattgcgattaggcccttgccgcccgtacagagggcggcaaggggctaattgcaattttggccgcccataaagagcttgcggccgtacttttttcat

SEQ ID NO: 30473 - DNA, 751 bp, Oryza sativa
tacattccaactactgttgagagaaccacgcctttcgacgtggcattgttgtccattcgacaacagctggcgccgtccgtggggaatccaggccgaaacggcgaaatgggacacctttcgccacactcacaccctttcgtcacagtacccgcgaggtacggcgacaagggctagaggcgaaagtgagttaagtccaagctggggggcttcgaagccgctcaaggctctggacacctttcgccacacgccacgcccttcgccatagtgccaataaggcacggcgtcaagggctgtgggcgaagaggtttcgccacacccacgcccttcgccatagtgccaataaggcacggcgtcaagggctgcgggcgaagaggtttcgcccacccacgcccttcgccatagtgccaataaggcacgacgtcaagggctgcgggcgaagaggtttcgccacacccacgcccttcgccacagtacccgcgaggtacggcgacaagggctgggggcgaaagtgagttaagtccaagctgggggggctatgaggccgcccaagcctctggacacctttcgccacactcacacccttcgccacagtacccgcgaggtacggcgacaagggctgggggcgaaagtatgttaagtccaagctggggggctacgaagccgcccaagcctctggacacctttcgctacacgccacgcccttcgccagagtaccaataaggtacgacgtcaagggctgcgggcgaacagg

SEQ ID NO: 30474 - DNA, 1131 bp, Oryza sativa
tgaatttggcaatacgatgcatgcattcgctaataggtgctaattaactataaatttctatgtggatattcgatctccaaatatgtatatatatagtccactcatcttaattagcctttttggaatgagttttttaatcagtaaaatttcatgttcaagcagatatgcaaccactgattatcgtggaaatgctaaatgatacatatatgggtcaggatttcttatttcataatagaaatttttattgaactcaccaatataattaggaggatgtaatggaaatatccactacaacgaaaatagttattccaagccgccaaaatgccttttgcagatggatcgccaataagcaaatacctataaaaatcataattttcacatatagatccctaagacgcccacctatgttaatttcatcatgcatctggtaccaaattatgtcaatcaatatatattaggaatctctcctttcattctgtaggtgtttatcacaaacactcaagctctctggtgtgccgcacgcttaaatgcaaaaaccacggcaacacaggtgcggttttcgtttatgcagaccacaagctactagcatcattttcttctctttatatatatagactcaaattacagaactaacagccggcgaaatcactcaaccgagactcacgccacgtgttggaaacgttcaagcagcatgcaatacatgcaactaaccacaggcgcatttgtcttaactaatcttgcatacatatctactgcttcaactgattcacctggctaacttggacctcgatcgtcttgcaccactccacatgcatgcagctctgcttggtcttctgacttgttcatgaacccttttgctccatttgcaccaccgcatctcgtccatgagctgaaaccaaatataccatgcatataaactctaacaatcaaatcctttctcttttggggtgttgatctgtgttgatcaatggttgcatgcatgtctaaaagttactctaatgagaataatttttaatcttttattctggtgggcccaagacacagatatcaagtcacagtttgattggccggccttaattaaatagggtgtcgtgctagtattttttatgatgcggcaagaaattaataaag

SEQ ID NO: 30475 - DNA, 1634 bp, Oryza sativa
tagggttgctaacggcccgagctcaggcaaacctaggtacctaggcccgagcttagcataggtttgagctgagctcaagccgaacttatcatgaccttcatgtaggttcaagctcaagttgggtaaagctcagtcaaactcgagctcggtttacgtgtaggctcatgaataggtagcagaggttttaagcatggtatcttaataaaaaaaatggtttccagctagttaatcaggctaacataaaagaaagaggggctaaggaaatatatcttatcttaactaattaaaaaattcgtaactttctgatcgtcatcttgtttttgtccatgttttcgttcgtcaacatgctaatttttcgtccgtgcatatgagcacatccgatttcgcaaaacaaaaaatcctatctggattgccccagagccccaccaacgcaaataaaaaggataaaatgcattgagaagaggtgacgaactaattcctttgtaaaatccagaagagaaagaagaaccaaaagcaaaattggatatcagcttcaatggcttcatcccaggtcagagaattaattttcgtaattgaaaggtgattgtttataggctaaagcaataagatcttgaattagaactccaacattgtggtatcaaagcttaactttaacctatttaatttcttattcagattattcatgtgattagaagccatcaatgccattttggttcgacatgaacaattttgagtcaaacgagatcaatcggtttcaattttcccaaaatccccaatttgaaagaaccctaagcccccaaatcttaatcaaatccaaatctaattaagaaaattaagtttgagttctgtcatggttatggataccacatacccaatagtaatcgattaatcttggtggggcccaccatatcttatacggaatcatacctcgtatatagaagaaattacggataagtaaggacaagtagagttctctatagaaactacaaggactactcggatcgtatcgatacttgtctctctagttctacttggacaaggggacatttataggtataaatacaagaccccctagaaggagaggggacagaacaacacacagatcgacatacaagtcagaatagacaccaacacatgccgccaaacatcgacatcagagataagcctagacaaatccaatatggtgcctacggaggccgacaagagggatctagcgccatctctaatcacgatgagttcgtactcgagaaggaagactaccctgtcgtcgactacgtgttggttatctatgccgccaagtcggcgacagctaggtatgttatcccaaatattgtacttgtgtgattctaatgaatatagagcaacaccggctttggccaataggagtagggctattacctgtcagataagggtcccgaacctgtataaaatccttgtctccatctcttttacctcaatctcgcatatacccaggtaccgacgatctccatatcatgcaataaccgtagtcgagacctcaaacgtcgacacatgtgatactccaatttctaactactactcttcttgtactgaaacatactaatttttagcgtttaaaatttactaactttccaatctcatatatatatctcgtg

SEQ ID NO: 30476 - DNA, 2382 bp, Oryza sativa
tatccacatagaaatttatagttaattagcacctattagcgaatgcatgcatcgtattgccaaattcataccggcagctaaattcatcatcaattaagcaagggaattcggaattcaaacagggtcaggaattaaacaaaaattaaaattaaaatcttgagagaaacactttgaaaaaaccacgttatcccgtcctttttccaaagtctgattctcctcgaccatacccaacacgaggcagaaagagtatatttttccaagagaccgtaatcccatcacgatcaattactgtttaatagcagtagcctatacactagttgaagttaacgtgcatagcggcatgttgcatacatttgcttttgtggacaaatcttttgcgttggttgggaatcttcccttctagcgcgaaaaaaacggagcaactcattagcacataaatagtattatttattaaaactaacttgaaaaatagattaatataattttttaaagtaactttttatagttttttttaaataatacaccgtttaacagtttgaaaaccgtgcatatcgaaaacgagacagagaagacggggacaatcggaagacagacagacgaacgcagccagtgtcaatatatgcaatacctgtctctttcgctctatcgaaaacgtaattaaaccattaagcagctacgactctttgacttttttttccttagaaaaaaatcaataagttgaacattgtattttcaacggtacgttaaattgctcattaattaattgcacgggccagtacgtatatttgaagatgtatacactatacagtgcatcgtacagtaatttgacttttacgttattagcgcatgggatttttggatttataggttgatgctaattaatccctcagtcagtctagtgcagttttgcattgttcatgttcaacgtatgaccggtttcatcctattttaaaaatttttatgattaatatttttttattattagatgataaacatgacattattttatgcgtgactaattttatatttttttttataaatttttcaaataagacggacagtcaaacattagaaatggatacccagggctgcatttattttagaatgaaggtagtaattaaattgatgggcttactaatcttgatcgtatcaaagggcgatatatcatatcgagcctgttgttggagatgaaaaatcaatatatctctaactttgctccatgtttgtttattttggccaataatgcccgcctaatagatgcaagccactaatttgaatactggagtagaactgaagacaaagaaaatttgaatttccgtggcagttgtacaagtcccggtcaaatcaaatcaaatcagtatgtacttaattacctgcaagttgaagtaaaaaatttgcatgcgttaggttatcttgcaattaacttatcaaggatattgtaattaagttgtttatcttggcaagtaaacacagcagtagctttgtctcaagtgtcaaccttttattgcacaagtcaagtgaagtgatggactgatggtaggaaacaccaaagcatgcatgatccacggaagaaacctgatgttaattataggaaaaaaaatacgaattagttttgtaatgaattttggatacagaagcttggccccatgataggacaaattgccagtacaacagttggagcgttgaaaacgttattccctagttttgtgcaacaagaaacaagaagaattacaattatgttggaagttaaatacacctatgtttccaacaacaatgttggctatgccacaagtgcgacaattttatttataatattgatgagccaattaaacgtagtaagtagggataaaaatgggtcggcgtcttcctttttaattcgtaagttgaattcgacatatatagatacagacgtattattttagtttagaaaaatggtgtcgagtcggagccaagacggattgaaaatggaattaaaaattgctggatattactggtctaaagactataggaagtgcagatccattatttgaaaaaaaaagtagttctctcctggcctctaggctccagcaacgagcagagtagcaactcaaactgcagaccaatgggtgtcatggcgatagatcaaagcccgtaaaacattctagagaagacagattttttaattgtatgccatattgatatatcacgtccaattactaaaccacccctttttagtacaatttagagcgcactcaccaccatgtgtaagcacatgcatgtcctctacatactcttgaaatagaggcatcgaaatcttatagagtatggtggacatgctaaatcacctactgagtacataatcataaaattggtggacactagtgctagatctagaatctgaat

SEQ ID NO: 30477 - DNA, 1405 bp, Oryza sativa
aaaagagcagtcaaacttgtgttgattcttattcatgtggcaaacagtaggaaccgtttattcccgatgctggccttgtgcaacccactcactttgtactcaaatttcagatttatcgtcaattttcagaaatttaagatatgcatattgatcgctaataaagtgaatgcctccatcaatctccaacaaaattggatgaaaatttggatatttgtgacacgcttttaaattgctaaacgatgtgtcccgtgcgaaaactttctatataaaagtgactctaaaatatcagataaatatatttattaaatttgtaataattaaaacttaattaatcatacgttaataccactcgttttacgaaaacactcactcttaatcttcatcttcatccacgtgagtttcaaactccacctttgtgtgcttatatggcctcattcttttcagctacacttaccactttattatcatggattatttgctccacaactttaaaattatgtcttcttagaaaacaattctactgcattgctaacgctacttgttctaagctagtagtactattatttgctaaatttgtttgtacatgaaaatatttaatttattgatataataaatagataattcgtggtaacttggcaacaacatctatttgacacaaaaaaaatctctaaatttgaaacattatattggggatggtttgtgttcagtcgtactctcggaaataaagaaaaaagaaagcacatagaaaatggtagaatttccagagaacaaatcaattccaacaggttctcattgacgcgaagtacttaggaacttcccccataaataaagtttacaaaaagcagagtaattcctggaccctcaaaatcccacatatgctttccaattatcagtagattatgatgtagctgctactgtcattatgcactaagcaataatgttcaggtatcagcaaattgcacggtccatatataaaaaaggaacagcaaaagtacacataacactgcaacatgtgtagaaattttaatccggccatgatctttgtttcagacaaattgcagtcctagtacaactagtctgcttgcagaagcagcagagaagtttcccgccaaaaaagaagtaaaaaaaaaggagaggagatgcttcatcgcttgcgtttgactgcacattctgaagattttttggagcaatcagagccgtccaaataagcccaaagcaacgaccgcaaaaccaacggtagtcgagcatgcagacaccctgcagcagcaggcaaaaaggagaaagactggattgattaattaattaattaatttgcttgagtgcgcacttagcgattgataattgagtagttaattagtttcagctttgcttggctaccagtgctgtagtgtacaatctatcagaa

SEQ ID NO: 30478 - DNA, 857 bp, Oryza sativa
acatggaaggaaaaaaaatatcatttttgtaagggatatgatggcatagtcaaaggatttcaatgatggggatctgattaggctcagacaataagaaaaatcacagtttcaatcattaaccattggtagattctctgtaacttagacaccttttgtagttcttttttcttattttggaaataaatttatttaaataaaataaaatgatgattttccctgctatttcctggtaaaaaaaacttaggttcctttggcattgctccagccactaggttcttcagagcatctggaacctcatgagatgctctggaaaagctagtggcatttgatatagctccaaaaattaaggaatccggagagacgaatgtagagctggcgttgaattctaattaattttgaaagggacgtgtgatggcatagtcaaaggatttcctttttgccagcatggatgctgaggtcaacgggattccaatgttaagaagtcacactgattgcgacaatagtaccttttaggacatggcccatggtattggatgcaagttgatgcaactggtcataatccaaaaaacaacttttttgtgaactaggtacataattttaatatcttggagggccaatttggttactcataataacaatacattggtctattacataaaacaatttatgtgttggtctttattataaaaacattgtcgtattcgtaggtggatacccctattacaataggaataaccatttgtggagggacataagtgtaaattaaatatgcatgtctcgagccaacaatgttccgagctacaaacggcaataaaaagtaatatttacagttgcgatatactatatcatgcatctca

SEQ ID NO: 30479 - DNA, 6594 bp, Oryza sativa
aattaacccacttgtaaaaaatcagaatgccagttgcctaaaattagagacaaaatcgatcaaactctgcatttctttttaagatagtacaagagtgatttgcactttgcaattgtacgtatattcgttgtaattttcaattttttgacagctgttggctatatacactacgccccctttttaactaatatttggatgatattatttaaaaaaagggacgtaatgtatatatctatcaataactgtagagttattatatggtgagttatcagttggagtggcacacacacggttactttgcaatatgggcacacaaaaaagaagcgtgccaggcacaggccagaacactctacgtgccagatcattcaagcttggccatgactgttacacgtcactgcacccttgctttcttccatggctttcttcctcagcacataaccacaaaattttttgcttgctttctccatgtatgctgctactgataattcccctagctagcttggactgctttatttgcttcaattaacagtcctgcatttagggagagagaacataattgttcttcctttttttcatgatcttttttccgggtttaaagcttggtatctaatgaacccaacgcatatgcatgttaatgaatatataattagttgataaattcagaagctatttactccatccgtttcacaatgtaagtcattctagcatttctcacattcatatagatgttaatgaatctagatagatatatatgtctagattcattaaaattaatatgaactagaaagaaagcccgcgcagatgcgcgggcatgctatttattgctcataaaagaaatgctaaaagaaagcctacctcattgtattcattattagtacgataaactaaatataatcagaaaccactaaaaaaataaatatttatattgtgaaatatattatagactttgatatctgaatgtcatattaaaaaaattcactttgtcccaattacatctacactcaccaatcacgactatttagtatctttgccttgtaagttgagtccctttttatatatgaaattacattagtatgacaaaaataagcataatacattattcatataataacaaaatcatttccactgtgtggcagtttaggagcatttgtacgagtgccatgtgatagcctaagtacgttttttcaacttcacataactaaatggcttaactaaactaaaagaagctaaattcgactatatttctcctaagtcgaaagaaaagataggaaattatcgtcccaataaaaagattatttgggtgatatatcaagtttagcggtgcatgtttttggtaacttatgatggtttaatttatgttgagtttgattttaagttttttttaactatttggataacatgtaaattaaggggtagaacatagtcccacgtgcctctttttaatcaaaacatagcgttaacctagataatttttagaaagctggtagtttttgaattccattgtccaacaatttgccttaaaatatcttggtagtaagaatcatatgaaaaaaatattttctcgagcaataatccctcaccaacaaatgagtcaatttgtgttttggtatttcatccctgtattatagatgtaatatagctaggcatgtatgtagggttaatatcgaaaatatgtgtgttaatatgggttttgatattttttctcttctattatagatctaatttagttataatttatgttgtcagttttgttttactaactataagactttggatgagaataatatgaaaatggatatagtttagttatatgcgatatttttaaataaaaatgtagttaattaatacatttgtaaaatttctacagaaaagatgagtgttcaaggttcgtaaatgaatatagtgtctgttatgaattacttaaaaacaaacaaagggagtagttagtaagaatatttggatgagcaagacataaaggactaatatgtttccatgtgatattttttaattaaagtatagttaatgtgggatgtactcgtaatatttttctcttgcgtaatagatctaatatgtgttgtggtgtgatataaatgcaatggcgatgagaccagagtgtttttctgtttgtggtagcaacaaactggaagagcactatataacctctgaactaatatgcaattaaaggtgattaactcactaaggataaaattacctttttaaaataacatttatgatgttaggccattcatcttctttaaaatccttaaaatccatgcagattttttcttaggagggtatcgaagcacatctcatattatagaaatatttttattcggtgaatagtaggagtacatatgtacacgggatttttttagctttttcactggtaaacagtactactatgtatttatatgtacacgggataattttttgggtttgggaggcattattttttttaatagatctgatctaatgatacaaaataatccaccgatttaagtgaaaatcgaaggttggatgttttgtttttttagaatttgtaggacttcctattataattacatattttttttactaatacaaatataaattttaaaccaactgcacactactccctttgtagcttatatatcgaatatatactatgtggagaaagtcatagctgctacctttcttctccaacgtgagccccttcgtatttggccatggtttgcgtgcgtttcctgcatgcttgcttctgtggtgtgctattagcaacttatctaccgtgctagggtattacaaatgaaaataaatatgaaaggaaaaaaaataggaagttaaaaaagatgggtatatatgtacgtaacctgtgaactaacagggtgagggaggcgtacgtacgtacatgcgggaagatgagagggggaactaatttttttaatctaatataatctaatggtctaaaataatggatccactagtttaaatgaaaatcgacggccagatgtttctaatatattaaaatgccacgtggcagcataggagtgtttttagaagtcccgtgtggcggcttgagagcgtttgtaggaagtttaatggacttttagtatataatagaagatagatgtggaaaataatagaatgacttacattgtgaaacagaggtagtagctagctagctagctaggatagcgcatatgcagcttgtactgcttcagtgacggtagctttgaccgtgtttgaccgttgttccaagcatgcgaatttgattaaatctactagctatagggccctgattgacattaagaaagtaattaatcggaggccactgggagatgcaaagaacggctggaggttgtgcagatgtttgcagtgatcgatcggctgccagcagtttgatatcttcctttttggaaaaagatatatagctctctctgttgcatgcatctggtggtgtactccactctgaccttagcttatgatcatcgatctctctttagtttgtaaccgtgtttgacgtcggcgaggacgtatattctccatgggaattgtatagaatttcgagtgttattttcttcaggaatatctcctttagtttattagtcaacactgttgtgcacactataatacccaactatggagttgtagtactttttaactagttgtctgacatgcatcgacttggtatatatatattgaaataggattgattgtcatgatatttttctgatactatcatttttacggtcaaagtattttaaatactgatgtatttatggcacacatccttcatatataaaagcaccaaatatgaaaagaattcatcaagtgggagtatacactacttgttttatatatagtacactgtaatttagttaagctaggaatatgttcttctcccaagttatgaattaatatatatcgactgtgtatgcaaattgaatcaacaaaacctagccaagtgtcgcaaacaagtcttaattaatctggggacatgattaatttaaaggttcttcagatgatctcccatccaagatgtgcccccacctttaattaatttcccattttccctgatgacatgcaagctagggcacatggatttcattgcctgaattcctgaaagccgtcttgtattacatcgtaccatcagcagcatgcgtgagcccttttgtttttcaggtgctttccagtgcacatctctgcttcttgcgtatacagcactactgacaatatatcattgcaaattaatcatcgataggtacgtgatcaatctggctgcaatctttgtaattaagccgggctgaacctgcctgactgacgatcgaacaatgcagccagcactagtactctactaattagtctagggctcaccacaacggcgacatgaatggatcaaatcttagagaaaaaaaaagagaaaagaaaaggagtataaccattatccatctgtatctgaacagttttaattaatttcgtccctaaatgtttttttaaggacaataattggctactgaaaattggtataaccatattatctggtttaactctttttcaccattgtgtgtatatattgaccaactgagcaatactagtagtcgccttattttgctgatgtgtcaatatatatgatgttggctgataatataagaaaaaataattcgtagtaaacataacggtacatatcgctatttgatgcttctttttggtgttcgatctacgagtaatccaatatttaacatacacacaaaaataacggggccacctgcaaatcgtgtgcctaattttttggcaaaaatcaggcgctattccaccaaatagatcagaaatgtttcactaagtagatcaaaaatgtttcaatcatttaaaaagctgaaacacaaccaaatcacctcatgaaatatttttctacaacgtatgaaacaacgtttccaaaaaatcgtacgctgtttcaccctatataaaaataatattttaacaaatagcgaagaatgtttcaattcttaaaaaaagtggaacatggtcagatcgctagatgaacaatttggttaaacgtatgcaacaaatgatttaaatccattgcaacacttaaatcccgtatacatcaacaaaccatgtgtctatcaagatgaaaaatattaaatagtataaaaaattcactgcaacatttcatccatacgtagtgaaacatcacaagtagtacacttgttgaaacattcttggtggaaaaaaaaaataaaacggattcttttaatagggtgtttccattatatccgggcgactgttgcaacggtgacgagtatggtgtgggacgcatgcagcgtggtggggaagcctggagcacgcgtgtgggcggcgggcggtgcggtgcccggtttttctctcacccatcaggtgtccgacgcgtggcattttcgaaaaataatatttgtatattgcattgttttttttattcctcagttttgttaaattatccgagtttttactttctgtcctttccaaaaacctaaagttgtatattctgaacaaccagcgcaatatccaaaataaatatctccatatcaaaaatatccaaaatataaataatccagcgcgtctgcgcgtgcatgatattttcagagtttccaaaaaaaagatggatatccgaagtaaacaaacgccatgtgccatgattctgatagattgtacactacagcactggtagccaagcaaagctgaaactaattaactactcaattatcaatcgctaagtgcgcactcaagcaaattaattaattaattaatcaatccagtctttctcctttttgcctgctgctgcagggtgtctgcatgctcgactaccgttggttttgcggtcgttgctttgggcttatttggacggctctgattgctccaaaaaatcttcagaatgtgcagtcaaacgcaagcgatgaagcatctcctctcctttttttttacttcttttttggcgggaaacttctctgctgcttctgcaagcagactagttgtactaggactgcaatttgtctgaaacaaagatcatggccggattaaaatttctacacatgttgcagtgttatgtgtacttttgctgttccttttttatatatggaccgtgcaatttgctgatacctgaacattattgcttagtgcataatgacagtagcagctacatcataatctactgataattggaaagcatatgtgggattttgagggtccaggaattactctgctttttgtaaactttatttatgggggaagttcctaagtacttcgcgtcaatgagaacctgttggaattgatttgttctctggaaattctaccattttctatgtgctttcttttttctttatttccgagagtacgactgaacacaaaccatccccaatataatgtttcaaatttagagattttttttgtgtcaaatagatgttgttgccaagttaccacgaattatctatttattatatcaataaattaaatattttcatgtacaaacaaatttagcaaataatagtactactagcttagaacaagtagcgttagcaatgcagtagaattgttttctaagaagtcataattttaaagttgtggagcaaataatccatgata

SEQ ID NO: 30480 - DNA, 617 bp, Oryza sativa
cacggcatgacatggcgtgttggtcgggccgtgccggtgctggcctgactgatcacgggccgtaccttggtcatgctcaggctgggccgtgcagggcggtccatttggccatttatagatggaagcttatattttgacttagtctatatagggtaccccttctgtgttttaattataagtcgtttctaatttttcattaagtttttaagtgtaattaaacttaagaaaaatataatggggcgatggattaaaaaccttgtaaggaaaggctatcaaagtcgttgactattaatccggttgaaaagtttgaagtcagtccaatttgcgaatcaatcgagctccccttgcaatgatgtggtggtcaacctctcattcgtcttttagtgctcaatattttcaataaaaataaatattgcccacagactgacttggacacccgattagctagtattggggggggggggagataggggttcggaggaggaaaattttagagagaaagaaggatgtgttcaaagggggcttcaataataggtatggctgcatggggtaggaagttgatcgatggccggtgatatatatggcagtgcatcatcacagcgatagtggcaccacta

SEQ ID NO: 30481 - DNA, 896 bp, Oryza sativa
cgtcgcagatgtgcgttattacaacccatcatagatcaagggttctgtcgtaggatgtgatttcaatagcaatgtaatgaaatcagagatttaccactgcttttgtctcttcgaatgtgtgaacgtgtattaggagagcacatgcgggtgtgtgattttggtacacatgcataatgatgtctgcatttcttctatgtaataggaataaaacgttatacaatgaatagatagagccttttagattgaatttatacttcgaaggtcttctacaacaattacaaggaaaacacaaaggaatccctgtgatcttttgaattgaaggatacttcctacataccaaatgtgatcaatttagcatatcacagcatgttccgtggttttgtttgtatcctttttctccacgtaaagatctctggcatccaacaagcaatccaaatctgtggctaactgcctagttagctagagagatattgggtagacaaatacttgctaaacatagcttgcctaggcataccaaagaaataactcttgtcatcaattttttttccagctccatctatattaatatctcattctgtatagataacaagcattgacaattaactgtaaggagaaaagcatgaagggttctctatgtcatcttttaaacctgcatttaacatctctatctttgaactaaggcatggtcacaagttcaaatagaacaaaatgcaataaaattattctgctataaaaacaatacaatcacatgtatttttttctccatgaaaattaagatatcgtgcattcaaactgtccgaaatcagtggctatctagagagattttgagctggcaaatacacattgaatttaacttggctaggcgtaggcataccacatactccctccgtttcaca

SEQ ID NO: 30482 - DNA, 1852 bp, Oryza sativa
atctttctccccccttcagcaaaaaaagctttggagaagaagtcttaggtggagtcttggcttataccccagttgagcgcctgtgaagatggagccgtaggcccgttagtccgctgctgtttattttgattgtcaggccttaagtgcctttgtaataatgtaaatattatcgatataataaagatgtgtcttttatatcatgtttgtatggtgtaccccggcttttcctgggacggggattaatacactagcgttcgggaaaaggcaattttctcggtcgcgacacctgacctccacatccgccatatcatttactccctcgccccccaccacgtcttcctcaatcaattcttccttcctactacacctctccgacagttcgtgacagctaatgggtgattctatgagtggactttcattaaggtctataagttctttcttccctatcctaccatctttcttccatgcaaacacctcaagagatttgaaatgtgaccccaatactatatctatatatgtttgccattcgatctctccattcaagtctaacataaatttatgtgacatgacaccgccgcccacatcgtatctcccttgcataccaaccgactcatcattccaatccaattcatgcttgatgcgagacattaactcctcaaaggtaggcttcgcaaaaaacactaattgtctaactgtcattccctcaaattggcttccatgtgtactttcatctaccacacaaccaccataatgaagccggaccaatctatccatctacaatttttaacccatgcataaacattaattacttgaaaataatatgtaattaccattgcaataccaatacttcaaaagctaacaacatgtctaatttttccaataaataagtacattactcaaatactacacattattgataaaaaaaactctactcctacaaattacctacccttcaccacacatcaacccctttcaaaccctctcaatcaccacaaatccatcccacatcctaggccatcaccacacatccatctcccatcaaaccctagtgcatcaccaaacatccatcccaaatatattttgtcaaatgtatcaataacaaccaaatggataaagatatgccacctccacacttcatccccacccatattatccatctaataatccatccttagccaactattatcaaaccacgtctacaaccaaaacaatgcaaaatatccaataaaactttggggaacttagggtttatagaggggtttaacttctcttccgatcccaaactcaatgccgcacaaatcaccttcgattagagaggattttgggggagattgggcgaggagaacgcggtggcgaccgaaccctaggcgggcggctggggaaaaaacggaggaagaactggctggggcggcctcggccgggctctaagtagccaaggtcagcgccaacttacttggcgctgaggttgggcacctcagcgccgaagcggttggcgctgaggtagctgccacgtcagctaggggatcggcccggccgccacggtggcacaatgtcagcgccagtcccgttggcgctgacacggccaacctcagcgccaatgcgcttggcgctgagccgacggcctagttttggttgaagtttttggcaggggttagtttcgaattaagtttttgaaaagggtcaatttgtcaaaaaaacgggcatttttaagtacaacctgtaataaagtatagatctttagtattaattggtgacaccaaccagtactaaagatcccttgcgccgaccgggggacctaacatggtttgaaaacagtgaaccagtaataaaaaccaattttagtactgattgg

SEQ ID NO: 30483 - DNA, 650 bp, Oryza sativa
aaaatttaaaaattcaagtacactttatgtgattaaaaaaatagtaagaaaagaagggaaacagaggcaacagagactgcagtctaaaattctggatgatactgtagcaactttttgcaaggaatataataatagcaatgctttactttgagtacattgagagtttgagatctcatataaaacaccatcatagtgcttgatagaaaacaggatcatatttatgcatgatgaacaaaataggataaggttaatggcaaagagcaagcttgttacctgttgcagaggcatgagttgaatggttttatatgtattttttctcaactactgtaacgtgatattccaaaactcagtttattattgatcaaaagctaacttccaaatctatggggcaaggagatgaaaaatactgaaaatactcgacacagtccttatctttcatgcgttttattgatggaaatttggagattactatcatatctaaaaataaacaggagtcacctaaaatacaaagattcaggactaacgtcatgcaaattgagtggctgacctgatgctacctcccatatgaggaaatgagattcatgaatagttgattaattataccctttctcaacacatgaggaagaataacatgatagatgaatcaatag

SEQ ID NO: 30484 - DNA, 1949 bp, Oryza sativa
cggcgcggatgcggtttctccggcgagcttctctgcccccctctctccggctttctcgccacggagcgatgcatgtgattcgtttttctctgacaaaagttgttacgctctaacgtggctctcggaactaaagaagaatgcgcgaaccaggtgtagtcacgggccccacctccatttctcctccacacatgcattttgctaacgtggataaagattaccacacgccaactcaccgcactgtgaaatgtcctaatgagcatttcttctcacgcaccaactcgcatcacacgagcacaccattttatgcgggtgacgagaccggagttgtgggaggctagtactagcttggaccgaaacccgaggctcggagcacatggtttccatgtttacggatgcactgtaatctaggcatacaatccagacccctttccgcccgaatctgatccaatatctcctgaataggtctcgtttagaccgagtttagttctaaacttttttttaaaacttttaacttttccatcacatcaaaacttttctacacacacaaacttttaatttttccattacatcgttccaatttcaaccaaacttttaattttagcgtgaactaaacacactagtacacaaactgtgaaagaaactgcaactttactccctccattttaaaacataagtgaaactataagagaatttatttggatttcagatttactaatactatgatatatccaattctaccaaaaactcatattttgataaggggagtaaaccgaaatctcttttattttgatgaggggaaatacatcgttttaaattggtcaagaaacagggcatcaggattggatgattcattgatgtgttgtaaagaaggaaataagaaagagtcagttttcgagctcttttcggtctcggtggttctagagtccatcctttcggatgaccggctgtggtcgttagtggacgttgcttcctttggggacttgttaggagtacagcgtggttctgcctcccttccgctgtttggagtagtgtaacccgtcgtacgagtttttctttttcttccttgttttttttgtctctgttttcttctttccttggtatagaccggtttggctgattgcgtaacaagaactctatctatctattatctatcttctatctatctattatctatcttctatcttctattatatactaaaagtccattaaacttcctaaaaacgctcgcatgccgccacatggcgctctaaaaacgctatcaagctgccacatggcgctctaataaaatagagaaaatcttagaaattctgagaaaagaaaaaaactagccctcgattttcatttaagttggtggacccattagtttacaccgttagattagatccattatttaatagtaatctatctctcctaatttaccatgtaatacttacctaaatataatggccggaataagccaagaaggcatatacgtacgtacgagttaaatagaaaaagcatactgcatgtatacgtactaggtactactggaacttcctctgtattttttaaaaaacattgccaacgttaaatatttagtgaaactaccgaaagaaaacaacgattttaaactagatttttctattatacttcctctggattttttttattttctttatgatgatcaacgtcaaatatttaatgaaggtggtagcataagaaaaatatattacttcataaaacatacacaccccaaaatagatctataatataatataaaatatcaaataaacatatcatttcacaccacaattgttgagtatagatagattttatttgcatcagtgggtctacattgatagttcaagatgaaacaatgagtaattaaaatattacttgggacatattgtcagaaactcaaataaaaaatgtattgtttaaaaatatgttgcattttttctcgccaaaca

SEQ ID NO: 30485 - DNA, 972 bp, Oryza sativa
catggctggcgccgccgcctctattcctgtttctctgtatggagttgcaacggtgtcatttttattttattttttgatgttttttcacactcaggatcacgatacaaccaaccacaaaaaaatttaaactcgaactaccacttaactaagtctgaaaatatctagcataccacttagtctactttgcaccttcactaaaattagaccataactcctttagtaaaactctttgatcaacatgttaaacataatgcactataccactatatgaaattacttaatctaattcaaaatataaccacatgaaatgacatatataagttaaacagtacatagagatgcaatttttttatttttattttatttttttgatatttttttcacacttaggagaacataggaaccaaccgtataaaaaataaactcaaacggataaaatatgtgacatgcagaattttctaaaactctaccgaaacggacaaaatatgtcatctattaaaataggcgtaactttctcatacggactcggaatcaggcaaataatatatgcacggacatctacagaaaaagttacatccgattctccccgctttgtcgggttcggcgatattaaaacctccaaattccgcttgcaagattgtgttttcgaggagagaagtttttcggtggagctttggaaaattccacgtgccacatattttgtccgtttgagtttattttttacatggttggttcctgtgagttcctaagtgtgaaaaaaatatcaaaaaaataaaataaaaataaaaaagttgcacatctctctcctctgcactagttcggagagaggagaggagaggaaaaattctacatgtcatatattacgtccatttgagttcaatttttctatggttggtttttgtgtgtccctaagcgtgaaaaaaatatcaaacaaataaaacaaaaataaaaaatttcgggggggggggcgcc

SEQ ID NO: 30486 - DNA, 3096 bp, Oryza sativa
ttcttgctatggctcatggcggggatcaaatccctggtagcggtgaaacgcttgccagtcagcttgctattgttgcatcatagtgttgaagtttgcaacctgtgcatcaacagactgttgccattcccgtgactgtaccacattatcctccaaggtgtgttgttcgttccctgcctacagttcaagtgtatccatcctccgggtgagttctcccagatcccctcgagaggagacagcgacacatccaagaggatgaaggtggaccacttgaattggaggagcgcgagtatccccagtgcagctcctacggctcatgccatcggccgtcgctggcactctgccaggacgaaccaccagcgtcccaatagtccccatacatttacactggtggtgaagaggaagacgcctcctgaggtgcttctctgtacattcgtcatgttaccctgcgtgggacatcacgatgcaactccaattggagtggaatggttagttctcggcaattacacaaatgaaactccgggttaggtaaaggaatcttatttgtatagccgggaaacaaaaatataagataatcatttggaccatgtttgagtatgtggcattgaactaaataggcctcatcaacataagagcgggtgataggaatacttgcttataaagcatagtcccaactcttcatgctgaacgagtcaccaaagaaatacactcaaaaggaccagacaacttcatattttctaaccattgcttgatcatgggttgaacaggtgaaactttgattttttttttaaccatggcatacaagaggactagttcgtcttcacaaactatctggatatcagctctaagaaacaacatgaaaccaagcaacttatgcaacagccccaaggtaggatgatggatgtcactagttctaggctttttagaggatgagaaacctgaaatactttgccaaaacatacgcttgttaaaaaccaagaaatgcgttcctgaaattaactttgcatgttttgtcaaagcctagatgcaagctaaggtctttccgagaaaggtgatattccttgcggaataaccagaaagtacaccatcgcctacctctagcaaggtacatagaaactgcatggtaagcaaacaggaacccagctcatctacacatgcaaatttatcccatccaacagcacgtcaaacagtatgaaactcagcatccatacctatccttttcaaaaggtcgagttgtatgcttaggtctgagcacacgttcggtccttcagcatatgataggcttgcatttcccggtcgcccacgaggtcgagatcggagttgtcgtacagcctcggtggaacgtacgcctcctccatggatgcatccgcagaagaaggtgtactcggcttttcgtgtcggcttgtccgtgagcttgattgtctcttgaatatgcccggaagtcgtttcttcatagctacaacaaagagcaagaatacaagactactcggacgggggttaaacaaatacccaccgattaacattgcaccgaactaaagcaaactcgtatatgtaaagtgtctaaactaaatgcagcaaattgtgtgaatttgaggcaagcttgcaaaactttgaatgaattttgagaggaaggttttgagagggagtgagaatgagttagagtggtgtgacttccctctcccagccgagctgcttatatagtgcatggataatggctagtaatggcatgtgggccccactagccgctaccctaaagaaatttgcagccagccagtgccatgcaggggttcggccgaacccctggtggacccaaccggccccacatttagccattgggttccaacgactagtgtggtggtggccatgcaaaattttgccaaaaattttattttattttgctgcgtttgaaaaattcaaacatgctttgatgcaatggaaaataaatatgaaataactaccaatttacctgttggcaagggcgacatcatttcaagtctgacgagcacgacagtacctccgatgcatttagctcgataaggcacccaattccggaggtaaaggagcaggtgttttttccttaatctgccacaccttctttgccttaggtgcgggcaacggcctcttcataactgggaacgcaggttgaccggcctatattcctggcttcttggatgccggcttaaggtattgacggttcctcgtttcttcccgctacaggaagttcatcatgaaagtgttgagactatccgtccttcggggtttcactctaacctccttgtgggttcggtccgttcttgaactagaccatggagcaatgctccatacttggtctccttgtggacgatatccgttgttgttgttcatgagcatgacgtccttacaggttttcggacgatccgtcccagagtgatcgtcattgccacagacctcacatgccatttgaaaagtcgaaggccttaacggtacccttcttggcgtccttctcattgttgtccattctcttcataaggagatccaattgggcggcgagcatttccgtctcgttgacggtgtgcataccgcgtttgactggtttggagtcgttccttgctccaacctgtatttgtgagcctcttctcaatcagatcgttgacatctctgactgtttttgagaagaattgtcacgtcccaaaacgactctaaaatatatcccttaaatgatgcctagaataattaaaatccatgtgaaagcctccaacaattaaaatgtgcaaagttaaaagtcaaataaggcttggaggatttttgtaaatttcctaaaagcctaaaatgcgtaaataaattttagtggaattttcagagcacaaataataattattaagaaataaacaaagttaaaatgattttataaaaagaaaaaccctaaaagtcccccttccctcccttgggccggcccagcccatctctcctctccccccccctctctctctcctctccccgcggcccactcggcctctcccggcgcgcgcgccgctgatgggcgggcccgcccgccaccctcgctgacgggtggggcccacccgtcatccccttcctcccgccgctaccgacgcctccccc

SEQ ID NO: 30487 - DNA, 1218 bp, Oryza sativa
tgcagcccatagttaagtaataattaaacaatattaatccaacgctagacaacataccttgttgcataggcccaaccattctgaacaaccatcccggctgcacagttctatctccaaaccaggaatatgccattccaaaccaggagctaatcaaattattaccagttatagcatcttttattatgatgagaagtgtgagactaatcacgaaagacattgttagacccgcccataaccgcgggcacggctattcgaatagttttactctggccagaggtgtaccactgtacccacaagacacagccccacaacatgtcaccatgtgccttcataccaccacggtacctcggaaaggagctgtgacagtaccccttgcacaacacaatccaccacagcgcacctttcctggatcataatcacccccttataaacaaggcatggactccccagcgacccccgtgggcttatcttcgccacttctcagtctggtgctccgcaatgaaccatgctatacaaaaggtaaagccgttgcccacgctggcttgtggttggcacggttaatgtttcacaaccgaaactcgtgaaccggtccttaattgtcatgagcacgaccatcagaaccatgtgctcacaacccaccattatcaagttttagttggcaagtaattaattaaccaatcacgattgaccatcgtgaactatcattaagccataattaaataatagtgagtcataagttatcccaatagtgtgctaatgtttctaagcatggctaagcaatcatatctaatatttagctgaaccaatatatatagcccaactagtcaagttataataacccaaggtatcaaggaataaagtaatcaagaacaaaagggctataacaaacaataggttaattccacccaatgacattcgaaaataaatgcaatagttgaatagaaacaagagctttaaacgggatcaacatgctcaaagggttgtttgggatctatgtgacttgccttgctggccttggaactcttcaaattcttctcctgcaaaaacggactctccggaaacgtcggaatctaaatagaaatgagcaaaatcaccaaaacagcacacaaacaagcatgaacaatacatgtggatatttttaacatgtagatctcaattttagaaaaatttagagactcgaaccaactaaatccgagctaagatgaattacttatgaat

SEQ ID NO: 30488 - DNA, 943 bp, Oryza sativa
tcggtttttgccacgaacgcacgcaacacacttcaatatgtccaaaaattttgttttggcgttttttgaactttttgattccggtcaaaaacatcgcaccctcgtgtgccaacattggcattaattgacaaaagttcgccgcgcgaatcacggagtgaatttttgctatgaacgcacccaatacactgcaatatgtccacaaatcatgttttggcgctttttgaacttttcaaaagttcgccgcgcgaatcacgaattgagtttttaccacgaacgcacgcaacacacttcaatatgaacaaaaactttgttttggctttttttgaacgttttgataccagtcaaaaacatcgcaccctcgtgtgccaacattggcattaattgacaaaagttcgccgcgcgaatcacgaagtgagtttttgccatgaacgcacccaatacactccaatatgtccaaaaatcatgttttggcgttttttgagcttttcaaaagttcgccgcgcgaatcacgaagtgagtttttgccacgaacgcacgcaacacacttcaatatgaacaaaaactttgttttggctttttttgaacgttttgataccggtcaaaaacatcgcaccctcgtgtgccaacattggcattaattgacaaatgttcacagcgcgaatcacgaagtgagtttttgccacgaccgcacccattacactccaatatgtccaaaaatcttgttttcgtgctttttgaactttttcattccggtcaaaaacatcgcaccctcgtatgccaacattggcattaattgacaaaagttcgccgggcaaatcaagaaatgagtttttgccacgaacggaccttttacactccaatatgtccaaatatcatgttttggcgttttttgaactttttcattccggtcaaaaacatcgcacccttgtgtgccaatgtttcc

SEQ ID NO: 30489 - DNA, 1163 bp, Oryza sativa
catatacatatatatatatatatatacctatatatatatatatacaatatatatatatatacatatatatacctatatacatatatatacatatatatatatatatatatatatatatacatatatatacctatatatatatatatacatatatatatatatacacatacatacatacatacatacatatatatatatatatacatatatatatatatatatatatatatatatatatatacacatacatacatacatacatatatatatatatacacatacatacatacatatatatatatatatatatatatacatatacatacatatatatatatatatatatatatatacatatatatatatatatatatatatatatacctatatatatatatatacatatacatatatatatatgtacatatatatacctatgtacactatatatacatatatatatatatatatatatatatgtatacatacatatatatgagttggattttttgcgcgcgagttcacatgtaccgacaatgtacaccctatatgcagcttgcacgaatcttagggcaaatatattaggtgctaacaaaatgtaacatgcatgatgtttacgttatactatattttttacaagtgtaaaatacgttgtttatgtaatttttgtatttcttgtatgcaaaacttgtttatgtaatttaccttgtttatataaattaccatgtttatgtagtttttgatggtaggatatatatcattttgtaagtatcatttttgcaagatgacaatttggtgatatagtagatatattgttttctcattttcactaaatatcatgttataaacaaaataagggttagagaaatacaatgcactagatatataaatgtcatacatatgattattattgaaaaaaattatttggtaaaaaatacaacatacatgttatacatattgtgaaccaacctaatcctaatcttttctccctatagtaatcattcatttggttaaggttaggtacattttgcagcacgaatcttggaacacatcaacggtgtagattgtaggtacatgtgaacccgagtgcaaatatgcattttcctatatatatatatatatatatatatatatatatatatatatatatatatatatatata

SEQ ID NO: 30490 - DNA, 1031 bp, Oryza sativa
tgcagcccacgcaaaacgaggtggtattaccgtatgattgattgagttttaattattataaacttgaaaaatagagtaatatgatattatagagcaacttttatatagacagttttcgtacgaaatacaccgtttagcagtttgaaaaagtgccactaaaattttaatcttaattcaactcttgttgaaaaaaaaacgagacctaagtaatataggaaacaagtgctttgtgctagcagcacgcattgaggatagatatcaactgtcaaccaaagatagtacatgactatgatttttctttgtattaagctgagttctttttaataacttgaaacggtttaattttctctttttcgttagcacttttttagaaatgctaaatggtacattgtatgtaaaagtttctatatatatatatatatatatatatatttttaaaaatcttcttaagtttaaaataatcgatacactattaagcatgaggtaatgactcttcgcattttcgtgcccggaaaatcaacgaccatccaacataatcaaaatagcccttaggctatgttcttcaatttctttcccaactcatttcattctttttaggcaaactttttatgtccacacgcttctcaaactactaaatgtgtgtttttttaaaaaaaaaattatgtaaaaaagttgcttttaatattataagactttttagcattgcccacattcatatatatatatatatgcgcgcgcgtgcgtgcttagattcattaacatttatatgaatgttggcaatgctagaaagttttataaactgaagcggaggtattacttaattaatcatgcgttaatgaggaacacccttttttcgtgcgggaaggtggagtttcgcaaactcagccttagtcgttgtttgctgtattaacgtgcactaaaatactgtaggagacattttcacgcaaaatgtagccggagttggttcttttcttgaaactggtcacatggctaggtttttttattttcaagcagaatcaacatactatttt

SEQ ID NO: 30491 - DNA, 2112 bp, Oryza sativa
tcaaacatgtgagaaaaagtcaacggcgttatctattaaaaaacggaggtaatattaaactgtggtgttattttctcctgaagatgaagatgaagttttttttacgcaaaacgaggtggtattaccgtatgattgattgagttttaattattataaacttgaaaaatagattaatatgatattatagagcaacttttatatagacagttttcgtacgaaatacaccgtttagcagtttgaaaaagtgccactaaaattttaatcttaattcaactcttgttgaaaaaaaaacgagacctaagtaatataggaaacaagtgctttgtgctagcagcacgcattgaggatagatatcaactgtcaaccaaagatagtacatgactatgatttttctttgtattaagctgagttctttttaataacttgaaacggtttaattttctctttttcgttagcacttttttagaaatgctaaatggtacattgtatgtaaaagtttctatatatatatatatatatatatatatttttaaaaatcttcttaagtttaaaataatcgatacactattaagcatgaggtaatgactcttcgcattttcgtgcccggaaaatcaacgaccatccaacataatcaaaatagcccttaggctatgttcttcaatttctttcccaactcatttcattctttttaggcaaactttttatgtccacacgcttctcaaactactaaatgtgtgtttttttaaaaaaaaaattatgtaaaaaagttgcttttaatattataagactttttagcattgcccacattcatatatatatatatatatatatatatatatatatatatatatatatatatatatatatatatatatatatatatgcgcgcgcgtgcgtgcttagattcattaacatttatatgaatgttggcaatgctagaaagttttataaactgaagcggaggtattacttaattaatcatgcgttaatgaggaacacccttttttcgtgcgggaaggtggagtttcgcaaactcagccttagtcgttgtttgctgtattaacgtgcactaaaatactgtaggagacattttcacgcaaaatgtagccggagttggttcttttcttgaaactggtcacatggctaggtttttttattttcaagcagaatcaacatactatttttcttcttttagttgacaagttcaaccagatggtttgatcggaattttcgaaaccatagatgttatatttttaatgtgacaccgcttacaagaatactatatcaatatattattaccattccaattagttccttaccatcgtatcatttccatccctataataatctaaggttgcgttcgtttgaggggttgttaaacaaaacggagctgtgaattagtatataactaattaaatattataaaaaacctaataaataaattaatataatttttaaaagcattttcctacatagatttttcaaaaaaaaacacacagtttaactgtttaggaaacgtccacgtgaaaaacgagacacatacacagtatacactaattcaaacaatatttcactcatgataataaaaattcaaatcacaaactgcacttcccctcaaataatatcgaaattgatgcttgaccagtcaacactacttaatcacacacaccacccagagccaaaccagattaaatcaaggtcgggggttgccttgcctaaaccaatacaaacaagctgctaatccaaaatcaatgtcccgtccgatcgcgagatcgcgatcgcaaactggcaaaatcgcacccgcaaaaatatctcggcacgagtcgacgcgacattccaatagcagcagcagcaagcagcattcgcattggccttcgcgcgcttttgcgtttacacccctcgcgccccctcaaaattgcagacgcccccctcccctcccctctcgtgctctcctctcctctcctcttcctcctcgcctcgcgtcgcctcctccgcggcgtaccctaaccctagcctcgccttccccccaatggcgcgtcacgcgtgaggagccgccgccggagcagcaggagcgggagcgggagggagggaggaggagatgtacaagcaggg

SEQ ID NO: 30492 - DNA, 820 bp, Oryza sativa
aaataaaccttaccaaattttgttattaccaaaattttaacaatttggcaatattgctaagttttgtcaggatttattatttattttttagagtttggtaagaaactaaatggatgcacatatttgacaactttgaaaaaaaaaatatggtttgaaatggcattaatctaaacaagtgcttaaacaagtgcttggttttgatttcgtggaatcttccagatgggaaagttgaagggaaacattaccgtttgaccctgtaaaaggcaaggagaaaaatcttgcatggtgttgcacgcatattctgctataaattattcctgaatatgcagtagtatatctctcttaaccactaatgttgatccttttatcttctctatcgatcaataaggcaaatattttgccttaatttcaattttcttaaaaaactaatgttagaaaaaagaaagttgtttgcatccgaatctctacatctatgtttacgcagacataaaggccaatgttgatttgtgtttccataaacattttttagttatttatacatgtatctagattatagataatttaaattagtagttgaatacaagtgctttgctacagataataaaacaactttatctgtctaaaaacacaactacctatgcccttgtctttaacaaaagactaaatttgggatgataaatgtttgtggttgattgagatgagaacataggtggagaaatggttgtattttttagacaaatttaaattctagaagtagttatattctaaaatagatggagtatattataatattacctaaataaattataaatatattttc

SEQ ID NO: 30493 - DNA, 1682 bp, Oryza sativa
agtcagtgttttaattcttaaaatctgctcaacaattaaaatatggaatggtgggcctgggttggcttgggacgagctgggacacaggtcgggttgccagttcggtccgaatcatcgtaggccttgggttaaggcaggttcgtgagggttcacggccttgtttataatactgtgtagctctaggatcgtcttacaaaatggctctgggccattaagtgacttttaaatgctgttttctgcaaaacttaacccctatatattattaccccttgtacccccttgcattaatcatgcatctgccggtgtggctcgctgagtactgtggttgtactcattcttgctcaatcttttcccccttcagtaagagaagctttggagaagaagtcttaggtagagtcctggcttataccccagttgagcgcctgtgaagatggagccgtaggcccgctagtccgctgctgtttatttttgattgtcaggccttaagtgcctttgtaataatgtaaatattatcgatataataaagatgtgtcttttatatcatgtttgtatggtgtaccccggcttttcctgggacggggattaatacactagcgttcgggaaaatgcaattttctcggtcgcgacaagctggtatcagagccatctcgactgtaggataagccaagtggataaaacctaaggacatattttatacataaaactatttccgaaagtccctttttcctcctttcccctgtgctatttgcaaaaggtttactcccttcttccttcttcagatttcaactagtactagttggttagttttgcgaagaagaagatgtcgccaattgttcgccgaaggtccggaagaccgcagggtccgctagcgaagtggaggaagcagtgaagccagctgtgaaggagtgaagatcttgggaactcgtcgcagaacctaagccaccctctagtgtttcgtttgtcgtgtgtttccttgcttgtgtgtgtagtgtgcggtttgcatcggtgggctgtgatgtgaccatgctaggttgtttgcttaatcaacttgcagaataagtgaaacaaacaacacatcagcaagaagagttagttcctttaaggtcctgtctctagttctggtctattctttcctggcttgtttcctctctcacctcaatccctgtaacagatgtttaacagagaaaaaggaaagaatgtcagcgggtatgcctcaagtaactccagttttcaactcaatccaccactggcctcaagagagttaaccagggcacacccttggtccattccaagcatgcggcttagttcacagctaccattggttggaagtcaagaccaaaataagtatgtgtttgatcgagcatttgccacccaggccaatgagcttcccatgccagaagagcatgtccccttttgtcatgattgtagagaacaaggacactatgccctgaattgtccatgggtatatgctaaagaagccccttcctttggtttagcagggcagacatcgctaagccagcctcctcgcaccaagtcaagcttgcagcctagtgtgcaaagcagagagcccaatgaagagaatccattgaatcccgggaattgctttcttcctagcctttcgtaccacgtggggtcacacactaagcaagccaaaggcaagaagagtaagaatcagaagagaa

SEQ ID NO: 30494 - DNA, 3753 bp, Oryza sativa
atatagttcatccccactaagtgtagttaatattatttatctcttctctcgttaagccacatcaccctaattatttctaacctttggatgatagatctatggctcaaattatctcttcttaatttcttctctcgtaaaatcatgcaatctcaatttttttaggctcaaaattgtatcaatttgttttccttttgataatcttactacatcttatttgtacatattatgtaacataattttccatagcaacgcggcagagtatttactagttatataggattttagcatatcatccgccaatgagcccagaacaatcgtgcaaggttacgggatgtggatctgccatcgtcatgaatctattgattggcacactaaccagatagttgctttggtttaacatttgttattcggtgagcattggtagagaaaccatctttggtcggtcgacccaaatctacaatagtcccggttcgattaaaaactgagactaaaaagtcccggttgttgttaccaaccgggactaaacattatctttagtctctgttggtaactccaaccgagactaaagttcatctttagtcccagttaattccatgtcaggccgtgtcagggccctaggatttttagtcccggttagtaacacctaacgggactaaaaacttatttttagttccggttgatgttactaaccaggaataaaaatcaaaaagcactatataatccctagtacctatactctttttccgtccacacaacaaactcctccctctatctcttttttcctgtctaatttcttatgtctttccttatctctaactctggcttttctttcctttttttccttcaattcacagcgaagaagacgactggcacgaggagaacgggccggccgggcggcggcctgcgtggcggcgccagggtggcgtggcggcagccggcgcggcggcgcggggggccgcgcggaggcggcctgcgcgcgcggcggcgtggggggccgctcggcgacggccggccggcaaactgcaccagctagaacgcccgccctgtcctccgatcctccttctgcatatgtaaatcaacacatctctatatagtattgtgtggcctctgttgtatgcctgcccaccaaacgaattgtgtctctaactcgtgagattgctgtcctcgtttggtcgtattacatttgaattaagctttaaacttgtgatgtaatttttttaagagtttgtgatgtatttggagatgatctatttgaggatttggagatgttatgtgatatgtgatgatttagatttgggatttcttggtatgatttgaggatggtgtgaaatcaatattgaatgttaaaaacaatgaaaaagaaataaagaaaaaagatctttagtgccggctgataacaccaaccggaactaaagatggatgtttagtcccggttatttgaaccaggactaaagatagcgatctttagtcccagattcgtagtcccggtacagggggttacgaaccgggactaaaaagcacttctccaccagtggagattatgctctattggaacctagaaattttggaaatcttgtttattataggattaagggactactccgtagttgtgctactttgttttcgatattaaggtaaccaaaaacaataaatagtgtagactgtgaaagttgttcgatatttggggcttgtttagattgtagccaaaataaaccttaccaaattttgttattaccaaaattttaacaatttggcaatattgctaagttttgtcaggatttattatttattttttagagtttggtaagaaactaaatggatgcacatatttgacaactttgaaaaaaaaaatatggtttgaaatggcattaatctaaacaagtgcttaaacaagtgcttggttttgatttcgtggaatcttccagatgggaaagttgaagggaaacattaccgtttgaccctgtaaaaggcaaggagaaaaatcttgcatggtgttgcacgcatattctgctataaattattcctgaatatgcagtagtatatctctcttaaccactaatgttgatccttttatcttctctatcgatcaataaggcaaatattttgccttaatttcaattttcttaaaaaactaatgttagaaaaaagaaagttgtttgcatccgaatctctacatctatgtttacgcagacataaaggccaatgttgatttgtgtttccataaacattttttagttatttatacatgtatctagattatagataatttaaattagtagttgaatacaagtgctttgctacagataataaaacaactttatctgtctaaaaacacaactacctatgcccttgtctttaacaaaagactaaatttgggatgataaatgtttgtggttgattgagatgagaacataggtggagaaatggttgtattttttagacaaatttaaattctagaagtagttatattctaaaatagatggagtatattataatattacctaaataaattataaatatattttctataaaatatattatctatcatgcttgtcagtgtcaagcgtaatgcataccatacatggattcatggaatatgacaataccatatacccgattgtatacgagaaggtgtctttgattaatgaaatatggcggataaataataaattagctactcggaatagaaggtgttagagtctaagtcggagaagataagatctccttgcccgtattctgttttatctctccgattctctgagttctacttgaagaagaagaggatctacactatatatacctatgttttaaatagcgggttaaggcatttagcggttagcgcttctcaaacagctataacagcagttatggcggtctaaatggagttatagtgcctaaattgtacatgagatcaaatagttagaacccttatcaaaccactatagccggagatagcggcagctatagtgggagatttaaaactatgatatatacaaggcccccgtgtgttcagggaggggcatcgagttacaagtcatagccaaagccatattaagaaacaatttggaggaagccagaaactgtattcgctgaatagaactcgtcggaccattctcgacagcttctaattggtgaattagactagttttcctatttcccattgtaatctttgtgacatcctatccataaatccagataaactagactagggttattactctccttttgggcccgaaccagtataaacctttgtctcttgcctgcttgatctgatcttgtgtataccatggttccaataatctttatactttacaaattaatctcgtcttcgggtatagcccgtcgacaatgctgctatagggaatgttcatcttaatttaactttagatgtgactatccatttagatttaatttattttttatactaaggagtttgagggataatttataaaagtacaacggagataggtgggatgacagatttactgtccgcttcactacttttttataagtaatatagaaagctagaagaccactctaagctggtccactttgcatcaagttgcattattattcaacaatgactatgaattttaaagtttttctgagaatagtagttttagggatactctctaaaaatctattgagtaatcatgaaaatagagctagataacaaaattgaaaaaaaaacttttaaaattaggtgtaaacacatgctaaaatgtggataattatttactcgtttggttcagg

SEQ ID NO: 30495 - DNA, 1865 bp, Oryza sativa
ttcaaagttcccctgtgcaaagaaacatggtaacatctgtaagccaatacattcacatatctttattggcaaatgtaacaacaaatatttagcataagtaaataaaaaggtggcagagaaatcaaaattgagcttaattgccatggcttcaaacatttactaacaagaaataatcgctcattgttataacaatagaagggaagataacttcagtatcactaggtgagttggcattcaggacagcacaaacacatttacaggctaattggaagaatttcatcccacttactacaggttatactgcactaaaaaaattattttttacatgcaaaataactagggatcaggaaatatttgaaaatattctttgccaggtacgtgagattggctgtacattgggaatcagcagtaatgtgctataaatttcaaacgttacctgaatcaaatagtatcagtgacaactcaaacttggaatctgtcacgacctcacaactttatgctaaagaccactcaaaggctcactgatctcagagacttttcatattgatatttagctggttacttttcaaggtgttatggtctaaaggatggagttccagaaacaagacttatggaaaaaagcagcagcttacactaaccatagcagatattgctcatattcctaggattgggatcatctcaattaccctgataaaattggcaaaactaccaaaaggatttctctcacatttgcaggattagactactcaaaacaaacatttgcctgagatatactccatgttgatgcctgaggcttgatggagggcattggcaatgctgttcaacatcccttaccacctaggttcaagtcataggacccatgcgagtgatcaccacttttttaataaatttttgctagtctacagttcctgccatgtttaagatattccctttttagatctatagcaccaaaagatttcagttcacttcaatagtactgaaagttgccattctgatttgtaggaatccattcaatttagttagctgtcacccctcaccatattactcttcccttcagtgaaaagcagagcagagcatggtagaggctacaaaaccaactttggatggtatagaaccaattctgcggacaaggcaaaaatactttgagctagttgatcatgttaattagaatgcaatactgggatatctagagtagatatggttaaaaggcagtcccattagggcatcttcgatgcagaatgcctgacgaggtgctttggaagagaaaataatcaagtcccttgtgaattgtgccctgcaatgcaaggtgctcagaactgcttccaatctgattcatgcagggagttgtcctcctaaatcggcagccatgcagattggtagaatcaaaaagttgttggttccgttaattaagcacttgaggtagcatcaactcctgaagaagcatcgagcgcctaggcttaacctgactatggaaaaaatccggatttatttttgtaagagcctccctagcctacagaaattgcttaaaatcatagccaaaatctaaaaaaggaaatgttttagagcaccgacactggtagcaagtgaggactattgtgtatcttttcttaaagaaagatgtgctggaataactatggcctggtttagttcccaactttttcttcaaacttccaactttttcatcacatcaaaactttcctacacacacaaacttccaacttttccgtcacatcgttccaatttcaaccaaacttccaattttagtatgaactaaacacactatatatcatttagtaaggaatgcgatggagcccatactcatgagtcaaacaaatgatatcataccgagtaaggctgtgttcgtt

SEQ ID NO: 30496 - DNA, 1448 bp, Oryza sativa
agtttcagatgtgtcttttttggatcaaaggcaacaaccgccagtctagtttttgacaaaccacatcaaggtttcactgaaaggcagcaagccaaaggacctcatcgtccccagaagcgtccgcaatccacattaaagaataccagctgttagagataagccgaaagaagattgataaaagagattggcaaagatgttctctagcatgaaagaagtaggccgaaaggtgattgataaacagaaacatgctctgcatcgctcaaggaagacccctgattgtaattgccccgcaacagtcaccttgtcattaagtaagcaagatgacctaggtaaaagtgtttctatgaaggcaaagagtgaaatcttcaactcggtatcagatgctacacggagtgaaaagtgcaagcaccggttaccaggcaatgccatgtcttgggagatgatccaatgggaaagaacacatcaaggttaaaggtgtaaaggaatacgttgaatgctaactgaggacaacctgaagataataatgggaagtaaactgaatgtaaagaaagtgaatccgagttgcttgttcgtgggagctattcccagttatgaaccaagtgatatgttcgaagatagtctacagaggtcagattaaaatcacatctaacaacgaagcttcaaatttggcaggataatgattagacaataacaaatccagcaataaagccatttgggaagacgtcaaagtatgtcaagtgggataagttggttctcttgagaaacataattcaaaggcaaagttatcgacccttgcatcgaatagcagaagtggctagcacccggagagcaggaaagttaatatgaggcagttggtggcaagttagaagtaaatgacaagcatggtattctcatgatgacaagcatggtatcttagtaatgacaagctagtgttgacgcatgacatgaagtggtaacttgtatgagggtgactccaaagatatgagttataagaagttctagaactgaagccccatcttccaatgccgcagcccagtcgaagtcagctagaggtgcaaccagggaaaagtcaggtgaagagaagattccatctataaccggagatcgagctaagcagtccagagtggagaagttttgctaggcaagtttgttataaaagacgcgacggaagaagtcagacaagaagagaagaccgcccaacctatcttcttgctagcctcctcgaatctcggggacgagattcttgtaaggggggtggatttgtcacgtcctgataaattcatcccgaaataaaaatcattctctaaaaggaataatagaattaattaaaattcgaaaagaaattggcaaacactaaaatacgtacaagaaaaattcaaatgtggcccggagaatttttgttaaattctccttggtctaaaaggagccctcaaattttagtggaattt

SEQ ID NO: 30497 - DNA, 1807 bp, Oryza sativa
gtatagctctggaatcgtgtttacaaaatagctttgaacaactaagtgtcttttaatgctgtttactgcaaaccctaaccctttatattataacccccttgtactcccttgcatttatcctgcacttgggggtgtgtcttggtgaataccggtggttgtactcaatcttgctcaatttttcccaaacccagaagaagagcccctggaagataaaggctttggtgtctaactcgggcctgccgtcaagcgcctgtggtcgtcgccctagtcttccgctgtttcccgtttgtctttgtgtgtgctgggccttcgccgcccatgtaataaattaactatttacgcttccacttgataaactctgaaatgtatcaacttttggtgtaccttgcctcctgggacaaggaataatacacgcacgtaagaaacgcccgttgggttaattccggtcgtgacaggatttataacaatagagtggctcttaataaaatttgaaatttataagtagtttttgtcagccaacccgaggataaatcttaccgagtctagtacaatcactataacgggatcgcttatctctaacgggctgaaagcctcatcactatcgggtaaggcccccgttagtgggcaaaggtcactgatgtgagaaaatatctcaatcgggctaaagcccgccacggatggatgctatctcaatcgggccgacaaccaagcccgtcacagatgagtacgaccaatcaaaccaccgtagttaggagcccgtgacggatgactaatctcaatcgggcacaccactaagcccgtcacggatgagtagtcatctccatcgggcatttagccagagcccgtcaccgataggtttgaccccacgtgttaagtcaaactagtcccggttcggatgacttatctctatcaggtgtattacaaaagcccgtcacggatgactaatcactaacgggcttgactctatagcccatcacgaatgagttatctctttcgggcattagctaaatgcccgtcagggatgagtttagagccaaaaaaataaaatttgtctttttggctagcctcaggcctttgctagccacgcccgctgcaaaaatgacagaagcatatatatatatacatagtcccattcccagcaaccccattcccagcatcaattcacatataccatcacagccaatttatatagacccattcccagcatcacatcagaaaattcacattcatattccatcacagcacagtcaattcacaaaatcaaacacatatacattcacatccacaacccattcacatatatatgtcattcacatccatttttctctccaaaccgccgacatgcatcaaaacctgcaaaactaagttataaattggaacaattttatatgtaactagaaatgcaagtatatacagagacgatctacctaggactttactgtaaagaatttaattgtattacaaagaatatttacaaaaatcaaatgtttgtcgcatatgcattgcaaatgttctgccatttcgagacgagctaactaggacttcactctaaacatccctttcggtgacaagatatcatctagtatgaattgtgctatctcctctctaatgatttcgaagttgatttccggaatacttgaaataaattcctgcatgttcggtgccaagttagtctacatacttgtaaatttgttgtcctatgtgtgtataaacaattgaaatacacacctcagggtcgagcaatgtcaccttttctgcgaagctcctcatgttatggcagacatggaacccgcactggtcgccaact

SEQ ID NO: 30498 - DNA, 1929 bp, Oryza sativa
aatcgatcgatcgagctcccaaagcaaagctaggtcgctctcaattctccagccactcacattaactctgaattgaaatctcaagaactgtcaggcattcaggcaatggctaaactttggggttaggaccacctgacctcaggatcatttagttattcagagagtgacctcacagctgtaaccattttcgctgggaatgtttcaaagcattgttcaggccaagcaaagcacacatgtataatttgaattgccagtgatcgattaagtagagcagtacttacttcgctgcatcagtagtgagattctcatgcactggtgtgctctaaattggctgcccaaatcttcattagaattgaaagcttcagtggacctcatttgctactacaggttttgcagggcagaggcacgaggcagacaatccttcagaaaatcagaatgaatcactgcttcttgttcagagatcagaaatgccaaggatacagtgctctgattcagtgcaaagtatggcaagtgaggaatttcctcgctgttagtgaaggagtaaatcaaatccatcacattcacaagccacaagtggcactgaagaatgtcagagtgcatggtttgcctcaattctactgtaccactagtactaatagtagtatatttttcccctctcaggacaggaattgatcccaaatcaaggacaggttgggtctttctctccaggcacataattttgcaccattttcgaatcgaaaacgtaagaggtgggttacaatgcttagtacaaccaattttagtctgtttatttcatctaatccaatggatcaaatctatatatactaccacatcaactactggtagtaaaaaaagaattctattgataatataattcatgaatcagtggttactaatttatgaattcataaatcacttctactaataataatactggtaacagaatattaccaacaaagagcaccgtaaagttacttaagacgtaaacgctggtaacagaatattaccaacaaagagcaccgtaaagttacttaagacgtaaacgctggctacccaaataaaggaatggtcagtagttcatcagaaggtcactcaagattgtgaggtgattcatgtgagtctgcctagagaggacgaaattcgtttaggttgctgaatttaagagggacggcgcagccagactgcaggagaaactgacagcaacatatcgtcatttcctcattggattggagtgtgcaataaataggagcctgcgcttctcattcttgtgaaaaatgaaaaaaaaaaaagctcatgaaaaaaaaagaacgaggttttattgcatgaatatggctgaaaaagaattatggtggcatttcctcccctctccatttggcaacaaaatagtgcagtgtatatattatgtaccctttcatagagatgctttttaggatttgtttattttagttgcaaaaagatctcttctttcaagatttaataaccttgtgggaccgcctatacatttgtcaacaaattttcttctaaaaatttgaaaatttgacagatgtaattatagtacaatcgtagtgtaattacactgtaacttgcatgtaactacagtgtaacttgtatataagtttcacgtaattttgaatcgttagatctattataaaatttgttccggtgaggaagaaaaaaaatcacatcacacacatatgtgaaagaattttttctcacaacctccattttaccgaaataaatgttagagtaaatttcacaaaactacatgttttatggttcaagttgcagaaaaccacacatattttgacacttggtacttaaatacatatattttggtagtttagtttcacaaaatcatactatcaatgaatgaattcacccatgatatgacgtggttgtttcatctaggatatggacgtggcatcctat

SEQ ID NO: 30499 - DNA, 2387 bp, Oryza sativa
  unsure (1)..(2387): unsure at all n locations
cgtgggtnnnnnttgattaagatgcacatcctgcnnnnnnnnnnnnnnnnnnnnnnnnnnnnnnnnnnnnnnnnnnnnnnnnnnnnnncgatcaatcgatagccaataacgcgcgattggtatgcgcggcgcccggccggcgtggcgccagcgctcgcgaccggccatgtcgtcacggcggcgggagcgggacgagcagcgagaggcagccgacgagccaggccacgagcgccgcgaacagccgtggcagcggggtcacgggcgccccgacgcccgcggcgccaacgatcacggtcgccccgaacagcatgaggtacagcgcggagaggcgcatcggcggttcagcacgccgccgtccgcgggcaacggcgagctgctgcggcggcggcggcgcatggtcgtcgttgctgctgctgccattgccgctgccgctgcaagtgatgttatcctcggcagccatcgcgcggtggatcagaacgcaccggccacggcggctgtggttgtctagctacttaattaattttgtggttaattaatttttggaagcgagcgcgaggcaagctagctagctagcggagccgtatagaatttataccaccctgatcggcggttgctatcgatcgatcgaccgggatgatgatcgataattcgatattactgaccaggtgcggatgaatccgggacatcaagatggaagggaagaagcttcatcggaatttcgatcgatcgaggcgtatgtgggtcatggccgggtgaggtggccagggacgaattttctttgttttggtttacttatatctatctatcttctatctattatatatatatactaaataaaagtccattaaacttcctataaacgctctcaagccgccacgtggcactcctacaaacgctcctagaccgccacgtggcaatgtctaattacatcgtcgattttcacttaatcggtggacccaataatttggaccattcgattagattagatgtattttatttaaaaataaactaataccttactgttcaccagaaaaagaaaacaaaaacaaaagtatatactccatataggtacgtacatacataagactaaaaaacaatcaatcttacctactgtttataaaaaaaaaaactatgcacagacttactatagaaaacaataaagctaaaaaaatatacatacatagtaccattgaaaaaatcaattatctttaaaaatggagtattctactatttaaatataaaagctattactctgtaaatttaagcaaatatcaccgtcgatttttaacccaatattttagaccattagattatatttattttattttgaaaacaccatattactctatgtatgtatgtatacgggaaatataagcagtcagtacgtgcaaatgacctgggaaaagaaacgaggtttacctactgtccttcggaaccaagaaaaatctactcacggtggttttctgaaatagtattttcaaaatcacttactataaaaacaataaaaaaatatgtatcattggaaaaagatcgatggtctttttgaattagtattatctactatttgaagataaatatattgctctacaaatttatgcaaatatacgtagttaaactaaatttatattataaatataaaatattccatcaatgatctttattcgttctatcttaacatacaagactaatatatataataattaatgctatgatattttttatttcatatcatattttaaggtgtcaaatatcacttgatgaatatacaacgctaatttaaatgaaaacaatttagttgtttcattttacaccattagattagatttattattgacaaataatacaactctcctatatacggatacatgaaaaatatataactgttgatcggaaaaagtactctgtacgtagttatgattgaaaaaaaacaataatgcttacatatcgtctgacggaaggaaaaaaaatacttatgataaagtaaaacaatcggaggtctttaaaaaatatttttctacaatttaaggataatacctaaaaaacaatttaaggataaaatataataatcttcaaatttacacaaatgtaaatataaaatatccaatcaatgattttaagcgttctatcttttaaattattttaaaattatatatctaatttgtgattcagttgtattcctttaaataaataaactattaatatctataaccctaaatacatcacaaatatggagccggcatgtaataattaatgttatgataataattccacatcacattttagtgtaagaaaccacttgnnnnnnnnnnnnnnnnnnnnnnnnnnnnnnnnnnnnnnnnnnnnnnnnnnnnnnnnnnnnnngatatatcaattcacaatggggagcg

SEQ ID NO: 30500 - DNA, 1520 bp, Oryza sativa
cggtttattgtaacaaccaatctacaatcaatcaatcgaatcatttttcatattgcttttagttttctcttagtttgtccatctttgtcgatttgcgccgtaaatcgtccgccgccactgcgagagtgtgacacctctttttaggtttgtcctgaaaaccttccgttttgcccacgagacgggtagttatctataataggctccgctagccggtttagttataaaaaccaatcttagtttagcttttgctagatcgaggtggttggcgactctaggatcaccgcaaggtgtttatgtgctgcgattgtgcttgtcaacttgtcacaaaaagtttccaacacacggttgcaccggagccatgtgtacacgtgtcaacaagcggattgaggtgcatatgaaccacaatccatatatttatatatatatatatatatatatatatatatatatagggtacccatatgggactccatggtgcccggcaccatgattgaaattgagtatatatccaattcaaatgagtatgaaactttttcaaatatttaggtattaacattaactactttattagattttgaacttgtttgaattgaatttgaacttgtttttgttagattttggttctaggtatatagcatccaaacatataattagttaggtatgtaatcatggattgttaaataaagttaaatttgagttgtttttttttgataggtataggtatgaatcgaattcttataactaggtatatactcacaatttgaaaattttgaaaattttgagtgaatttgtgtatttgataccatggtgcccgggcactatggtgtctcttatggatatatatatatatgagttggatttttttgcacgcgagttcacatgtacccacaatatacaccctatatatagcttgcacgaatcttagggtgagtatattaggtgctaataaaatgtaccatgcatgatgtttacgttatactatattttttacaagtgtaaaataccttgtttattgtaatttttgtatttctagtatgcaaaacttgtttatttagtttaccttgtttatataaattaccttgtttatgtagtttttgatggtaggatatatatcattttggaagtatcatttttgcaagatgacaatttggtgatataatagatatattgttttctcattttgactaaacaaaataagggttagagaaatacaatgcactagatatataaatgtcatatatgattgttattgaaaaaatttatttggtaaaaaatgcaacacacatgttatatatattgtgaaccaacccaatcctaatcttttctccctatagtaagcattcatttggttaaggttaggtatattttgcagcacgaatcttggaacacatcaacggtgtagattgtgtgtgtattatagggtgagactattctacacccagggtatagaataactattctacacccccttaccctttttatcccgtatccctcccgccctcccgatccccccttcccgt

SEQ ID NO: 30501 - DNA, 4725 bp, Oryza sativa
gcggccgttgatcgttcgatctgcaagtatgttatcagtataatattataagataattttaggattccgtccgatatttagctcgcgatagaaatttctaacctattatatggatataatgcttgggtagattaaattaaaaacttatgataacaaaatatttataccagcaaaaatagtttaggatgtataaatcgaaattgggtttgccctagttcgtgaatagtaaagttaatataaaagaatcgactttcgcattcgacttccatttggatttatttggatttttatttgaattctaaccgaattcaaatcaattttcgcacgtactatagagcccgaggaagttgcggatccaagtgaagtccaagactcgcaagactttgagcaagacaagtcatcactgtcccttgaacatgttaatcccaattgcgaaattatttttatttacaaataagaataaatgcaatgatgaacatcctatttgtgaatatgccataccttgattattgtttacccttatttccttgtaaccatgattacgtatgagtccctagtcaactatgacaaatgcttagagatgctactctagaatcatgcatactcatatttatcaaatgctatatgcttgggcaattacctttgggaaggtaattgagatgcggcatgtggagacatgagcgccacattgccatgatgttgatgacatgatttgtgaaaggagaaataaaattaaacaactgttttcgactggggcggacggatgatttgggtggtatccggaaaaggctagtaccgtccccggtcaattaaggaccgagccatgaagttaagcttgaaacgacccccgtacaaccgcacttctcgtatgggtatagacctagcggaatagatggctgagcggaggcagtatccatgcatagtggtttcttgatgggtgaggcaggggctctacggtggggcagccattggtagaaccgcgaggcgggtgtctacagtggtgtcgccatcggtaagccatgagaaaatttaaacataattataacataatgcatgtgtgagtctttccttcccgtgtgcgccagaactcctctcgctgctagaaaccgtgtacgcctagagtgcatgaggatgtaaagttcatggagcgggtactgccaatgcgaggttatcgaaaagctttgccgtgacgcgtctcatgtgttgggacgaggctcatatgttggacagtcgtggagtgcgggtaaagtgtacatccactgcagtgtgagtaaaccaaatctattcgaatagccgtgctcgcggttattgagcactgggacatgtattacacttggctagactctaaattcttaacttgtgtgggatgggatattgcatgatgatttctatactgatggagccacttcctgagaggcgggaatgtggacgttctcataaaaacatgatgacttgggcgatggggggaagctatccttgggatcacaattgatggtggacagaaccgtattgtttaatatgaacactggtactaaaatttgatcagtctgtgctaggtcttaggtttgtgaaaagaattacaaaacttgctttgtgcaaaagaaccatagctatcttttgaatacccctgtcatatgcattgttgttgtggtggcttgttgagtacggttggtactcacccttgcaaacataaacttaatcagaggccggagatgaagcttcggaggatccctatgcctattaccaggagggtgatgaagacgatggcgctcagtaggtcttagttacggtcgttgcctgtggcaatggcgtgctcctgccttaactccgctgccttacctacttctgtttttggaatgtattccggaccgctcggtccgatgatttaagactgtgcctgcgggcctatgatgtaataattcgtacgagactctcgtgtatgtgtacttggtatttcatctatgaatttgtgtgtaccagactacttgatccagggaaatggtactgtttacacgattgattcctgttataaaaataagggtccacatatttccttataagtttgcatgtaggtactttcctaagaattagtatgaatgtgattgagtttcgaattttgagatcgtacaaaaatcaagcccactaatttcggtgtaattgctttatttccatcaataccgatttgtttccattttctatgtcattatatacttggcaacggtatcttctttgtcgctgccgccggtcgtctgtgatctgttgccttcgacgttcctctgcgagtttcttcgtcgccataactagtcctccacgctgttgtgcgccgctggacatccgtgagcgtgttcgtcatcgctgccgctagtccgtgagcttcttccagcctgctgtctcatccacagaggtcgactgcttctggcctggcagcatggttccaactgcatgccccccttccatgattggaggtcgaaggcttccggcctgcctgccatccaatcgtaatattcttttatagcaaaatacgcatggcttgagaattgttctcgctatggatacccttttttgaaggacgaagaatctcattcaattatttttcatgcttttggtcttttatggatacccccctccactcttcttcccgattcccccaccttctcgcgcggcctatccctcccaacccgagcgcgcgcccctccccttttttcttctgatcccccctccacccctcccctttcttgagaaggaaaaaaataaagggaaaaattgcatttaatgggaatatagaactcaagacctacaacttaaattaccacatggcactaaccagtaggctatgtctcaattgtgataaagttttcttagtaaaattttatcttctcatatgtgctaatccttgtagtatttggcacaaaacacgtagtaacgatactaggaaggttgttagtatacacttcaaaccatcttaatgcactatcacaaatcttttactacacaactacaatagcattaccatgagaattatagattactattgttaccatcatttaatttttatgagtaggggtcaccacgctattgattattgttcgtagaactaacgattcctaaattttagtatttactcttgctcgttactgctttgtactatgtgttactgcaaccccatagtaatattgttaaataaatatagtaacagtgtaactagtgtgtagtaacagaatagatataatcctagtctctctctccctctcatgatccctctgctttctcctctcccgatctctctctcttcccaaaaactaggccttcctctctcttctcaagaaaaccggtatccttccttcatgtatgtacttccacccttgtcatagtaacgccatcatgagatatagtaacgcgtccagttactacaaaatatataggttgttattacatttaactgactagtattactaggttaaagtctcacatgctaaccaaatacttgttaccgcacaaaagtagaagtgttactatataataggtgcatcttaccacttccaagtagctatgttactacacgataattgtagttttactatgtcatttttacaagatgaagatcgaattggtgggctataggtaaaatctatagggggctttgagcaaggtctgattgacgtaggagtgttttgaacaattttatacatttagtaaaaccatgttactgtatgtatatgtccttgttactgcaaattacacattctgttactgcatgtggagggttaaagttcaaaatgccaatctttgaaaagcaatatctcataagatatgcattattttttaaaaccgtttgcacagtgatgctatagtgttactgcatgtggagggttaaaacttcaaaatgcatctacgtactcccctcctcaagaaactgtttttcctctttctcaaaaaatcggtctgctccctccaatacagtgttactgcatgcctgtatatgacattactgtacttttgacaataatattgtggtgaattgcagtaaatcaggaattgaaacaaaaaatatatgggttcaaagtctcagatgctaaccatatacttgttactgcacaaaagtaaaagtgttactgcacgacagatacacgttaccacctgacagttacacattaccgcatgtttatgcagtaacactatccaagagctgcagtaaaacactttgttactgtaggacatatagaacgttactgcacctatggcagtaacatcgtggtgaaattatagtaaactaggaaccaaaagaaatatatggattaaaagtctcacatgctaaaaatacttgttgctgcacaaagtagaagtgttactacatagcaggtacattttaccacatgtttatgcagtaacactattcaagaattgtagtaagacacattattactacaaaacttatggtctttactgcacacttacagtaacgtcgcgctgagattgtagtaacgtataagatagtagtaacgagcagtaatgctatagtattactacttgtagagagtcaagatccaaaaaccccaagcttcgaagaacaatatctctgatgtgatgtatgatttttttaaaaccgtttgcaccatgatgttaggaaaaaaagtgcttatcaaaactagatccgtcatgactatatttcaactaaatttgaattgatgagcgactgtacaatctgtaaggcgaatgggagcggcg

SEQ ID NO: 30502 - DNA, 1633 bp, Oryza sativa
caaataaaatggttttcctacaagtaatttgtttataatatatctgagatttcatatttatgctgtcattaattttcatgactatctagtgtttctgatgactgttttgattgaagcaatagatgaatgtagagcttgccttgctggactaatgtaacattaatccttatttgtctactttataatgtataaagggctttttcatgacctgaattttgaatttggtgcatatgttagtggcaagatattttagtgtacaactaacatacttctaaatgatcagtgtagttaaagccttaggtgcaaagagaaaaaaagcctgtgccttagactcttgaagtgcaattataaaaacatgaatgtttacccctagcaacgaagcttcttgaagctattatgacaaacaaatagttaagaaatatataatgtgtcgtaatgtgagattagcaaactgcaattgaacaagtcttaggctgctctattatacatagtatacttctttctaagatagatagaacaagtgagtgtgttgttgggccatattttgggcccataggccaatatcccttctctagtttctattctttctacctggcaactagaggaggctggagcgagcttaagccctcaaggcacgcaattcgctaatggtgctgcacctgacactattcaaggcgattcagctgcactgccccttgcttttgggcctgtttgtggggagctttagatcctatgaagcagctggtaggaatctagttggcttctggcttctcgttcattttctagattctgcaactacagcttcttagaatctggacaaaaagctggattgtttaggggagtttataattatgggagaagctgcagctaccaaaagctcttccaaacaggccctttatacctaggcgaccgctttttgtgcttttggctgcgctcaattactactgcttctagtccaaatactaggtagttggtttgacttcgcacattgtccaacacaccggtttgactactcattctcattataacatgctagtaaaacaaaaggttatgtgctagtaaaagaaaaaaggtcttgattctacaaactaaaatatttttttatgagtgatttattttatgtgtccaaatctaaatatggaaaatatgttagtggccaaaatcgaagaatgtttgctcacgtgagtcataaatacattgatttttggactggatgtagacatgtatgtgaactgactaatttatcaaaattaattctaagtggtcatttatgtagtgttcaaggtgaatgctccgatgctaagacttcatatgcaaatctctatgttaacacttgtcactgatgtttcagtgctgggaagaagctcacgatatcctatccctgtgtgatgcttaatgttgatgttgcgagaaacaacactaatgatcaatatcaagtaaggaatacaagtgttattcataaagttattacatatttagaatgtgttattttgcttactgactattggaaagttgttcactgattgatttgtttattatcctaccagacattgaatgacccagtaaataagctatatacaacacacagtgaatgttccattgaatttgaggtagatggaccttacaaggtaaa

SEQ ID NO: 30503 - DNA, 714 bp, Oryza sativa
agaaccccagagtccgcacatcctcaaatacaaagcacttccctagttagatgtaggttagacttcccgttcgagaaaactctaccttctacctgccctcaatttatgcacgattaatgaatgccacctgggtggaagcgagaggtggaaatggaaggtcttagttcggaggtgggatctctacctgatagttgcattgccattcatgatgatcccctggcattcgtccattcagccattcaccattcacccattcaactggaattttggttgaatgccggaattgtgtccacaaattgtggatggatagttggttggctggctggatggctggctggatggctggctggatggatggtgaatggctggcggcggttcggttgctttgaagcatttgttgctatctaaattccatttaaggtcgtaccttatcgcccagcatcatcttattctctatttgtattccctccatctttcagatacggatgtagccttggatgtgcccgtgcccaatgaagaggaagagcgcaacatgaaacgtaagtacaaaagtaccggacacccacccagatcccaatagaatccgccaaatcctgcgggaaattgtaatcccattcaccagctcctacatttaattaacaagagaactattgtatttatctaacacctggattatctccacctttcatttgatccctatttatagattacgct

SEQ ID NO: 30504 - DNA, 723 bp, Oryza sativa
caaatgcatgcatacaaacgctaatagatttttcatgcatatgcactgtgccatcttaaaccatataggattttcttttgccgggtaaccatataggattttgatgtggatagagctggattaactctctatacaaataggagtagatcattaaaaagctcagtagtactagcagtttgatagcggtaataactaacaccgtatagtaatttaataaggtccaagaaattgagagaactactactagtactgtatgttagctacctgcatgcccattatttgatacgaagacgactgacgacatgtgtggctgtcatcaatgtgtgaggtcgcaaagccaccaaattacagtactttgacaatgaagctcataggtcgtcaatcactcatgtgaactaattaaataagtgtatatagcgcttacatgtacgtgacatcacggtcacgtaggtacgtaaaccttcatcactactactactgctgtcatacgcaagctagcagacttgtctccatgtgtactacgtcgccaagaaagtatcttacccagtatacgatgaagtaattaatcccatggattagcgcgtaggtacgttccttgtcaacacacaggatcaaacgtacgaattactgtccactggttggtaaaaccatggaagaaaactccctaatgtaaccatcacaggttagcagccaaattaaggggtaccgagctcgaattcgccc

SEQ ID NO: 30505 - DNA, 1698 bp, Oryza sativa
taataatactgtgtagctctaggatcgtctttacaaaatggctttgggcaactaagtgacttttaaatgctgtttactgcaaaacctaacccctattattatccccttgtaccccccccttgcattaatcatgcatctgccggtgtggcttgctgagtactgtggttgtactcattcttgctcaatccttcccctcttcagtaagagaagctttggagaagatgtcttaggtggagtcctggcttataccccagttgagcgcctgtgaagatggagccgtaggcccgctagtccgctgctgtttatttttgattgtcaggccttaagtgcctttgtaataatgtaaatattatcgatataataaagatgtgtcttttatatcatgtttgtgtggtgtaccccggcttttcctgggacggggattaatacactagcgttcgggaaaaggcaattttcccggtcgcgacaaatctaaaagtaacttatatatatatatgataaaagtaacttatgtatataataaaagtaatttacaaatataatttttttttcatcgtaagtgaagatttaattgtaacgaacataatagcgtaatcggattgtagatcagataagtaatttgagaggaaactttatttgaacaagaaaaaggcacccacgtgaactttatttgaaaggaaaaagacatccccgtggatggacatcatgacgacgtgcacagttagacggctctcagatgcgtcgtgctatagagctaaaccgagaacgctctcgaaatagatttcgcgatcttaatagtatacttcctccgtttcataatataagccattttaacattgtccatattcatatagatattaataaatctaaatatatatatgaatgtaaacaatgctagaaagttttacattattaaatggaaggaataataaatgatgtatactgcttatgcacgttcctataaaaaggcatcgccatgcatggtttggtgcctgagcgagagaaatggttaatccacatatagtaaattagttgtcagtgagctgaagcatgcacatatagtgtttgattattaaactaaactgggcaactgggtttgtgatatatcaacatgtactcatgtaattctggtagctagcaacatatctcaaattctcaatgtatttaatttgcaatataataatagctggaagatgacaactaaattaccttattccatcgttgctgctactccactaatcatccttgctgaagaccacgataaggtgtggtattagctctcctatcccttcagctcaagagatcaatcccagtactgcattttcttttagaaaaaaaaaacgtgctgcatcatccagaagagaaaaaaaacaaaggttattagagcaagtttaatactatagtcaactaatagctctaaatcatttatagccaatgtaatagccaattcatacaatagttacatactatactattaattcttggtcctacctgtctgtcggtgatatgggaccgggagtattgcgcccggaggcttgaggcagatggaatcgcccacgtggcctggcaccttcggggacgtcgggcccgagggtgaggtgtccgccctcctcctgatttccccgagggggggtcgggttgctcctgccccggccccgaaggccgaggtgccccgaccccttgtggggtttgcactat

SEQ ID NO: 30506 - DNA, 3448 bp, Oryza sativa
gaagaagaagcatgtgtagtaagtgattagttatttttgtttttgacttatctagaaggcattctactcccgccgtttctaaatatttgataccgttaactttttagcacatgtttgactgttcgtcttattcaaaaaaacttctgtgaaatatgtaaaactaagtatatttaacaatgaatcaaatgatagaaaaataattaataattatttaaatttttttgaataagatgaacggttaaacatatttaaaaaagtcagcgtcaaatatttagaaacggagggagtactatctaagaagtataacaggcaaacatgtataatctgaaagcttatggcctctgcaaagttcagaacgttaatttgtttgtaggtgattttgatactgaaatgagtatttgttctgaaaatttcttttccacagtttacatctgttcgatgatattctgctatccacttcttcttccttaattaatgtgttccttttctttcaaaaatcacatgcatgtaaatattttgtttgttgctttctccttctctctaatataatggcagaaaaacctacctttggttaaaaaaaggagtcctcaatgaggaaacaattaatagccagggaattggatgaactcaaaagcagacaaaacctttttttaataaagaaatttatttcggcattttctttgaagaaattaactatagtcaactattaccataacgaagtttgtagttcaaactactgcatattaaaaaacgcagtttgatagaaaacaagacaactatatagaacacctgcctaaaaacagatgtgttagtctattgttaaaacttcatttgcagttagcgaaaatctacataatcgacaaagtcaaaaccagtagagaggatacatagtcacccatgttctgaattcaaattcaaagtcacaaatagactcatcaaattccatgaccaatcatccatccgaatacatctcgctcacatcacagctgacgattacaatctaaccaaagcgaaagataagtttagaaccaaatgaactacaatcagagcctacgttttcattagggatggagaactggacactgtcgccaacggagaagaacaaaaccttataagtagaaggaacaaattcattatcaacattctttagaaaactttttaaattatcttttcaactttccaaatacttaatttatttgttcgtgcctccaaataattatcacaaactttagttttatgaaccatccatcattcattgattgaacgcaccgggacttgagattaggattaaactagtcaaaagctcgcgcgttgcagtgaaaatttataaaagtgaagttgtgatgaaattttaggggacgaaaaaattgatagagtggtataacatatttataagacatgtgtgtgaattgaagcaaaatttgcaataatgatgatcaactatgagaaagttgttgaggcatacttagtgagatcagcattagaaagataaaaattgtcatcgatagagcttacctcaatctcgaaagtactcttaaattatgcctcaacaaatatcattttaaatataaaaaacttaccatgtgtcactaattatgtttaaagtacagcctggtagcaggagccatgaaggtagatttcgtgcttaaattgttgagattattgaagagaaagagcgagtgattacttgacggtttatttgagcattaagataagtaccactatttaatcatgcaatgagcaacaatcaacatcatgaatagaggagggattcatttgcagttaatgtgaggaatggagcacatgttattagcttctctattgtatcggatggttaatatctgagatgcacaatatgatctaacggctataacattcttgatgatgtggttttacgaattcacaactaattggagtggttatatagaaatagtagatagttgggatgtactcccttcgtcccaaaaaaaaaaatccactcatagcatgtcaaggtggaattagtggagatgaagagtgactaaaatgcccttaatcattttaggtaaagaatagtgaagggataaaacttctctttttacgtgctgagagtagatagtatgggataaaacttaaactcttaaagttgaatttttttttgatggaggcagtactgattacgatgactccttcctagtgagtagggaactatattatatttatatttatagggtatacatagtatgggttgcgcaagcgtgtgctctaagttaagtgaagtgatctttattaggagatcgaggacccattcccctgccacattctcctcttaatgacttgcatactcaattagtggattagtcgtcgtactactactaattaatttggtttggctgctcacatgacccaatatatatgcatatatatgcatcatggtcccatgtggacagagagtgccatgccacgctacctcacaactacccatcatcatcatcatcgatcatcgtcaccatctcaccattgcatccatgcaaagcatggtcccaaaccaaccaacggtagatagatagcgatgctgcgctgctactgtccaatactgtacagctacgcctagctgtactatatatgaattttctcagtgctttttgcgagtgaaagagagagagagagagatatgagaaattgagaaggaattagcataaactagtacgtactataggagtattatagcatacatataccaacttcggtactttttgtacttgatttctgatcaatgtaattagaaagtcttcggtcatactcttttgggggttcggcaatgggcaagctcaatccctatgaaatgaaatgcaaattcaatctgcagctaatagtgaattatttttagccgtcatgcccttccagtgagtatgcttcgttattacatttttaacaatcaactatgaaaaccatttttcgtgacggccattatggatttttgctggcggaatttacagccgccacaaagcaaaggccagtgaaaatcaagatcttcgctagcggttattgaccaccagcaaaaatccattttcgctggcggtcgtcttaagccagccgccagcaaaaattcattttcgatggcggctgtgttatatcggccgccagcgaaaatctatttggggaacaaaaaaaacacgcatgcaactgcccagccgccagcgaagatttggagaaaagacaatagattcattttcaaaattcaaatccaattcatatacatatggctgctcatttccaaattcaaacacaatataaaatcatcattagcacacatgtacacatatcaaacatcacaacatgcacaaaacatctacatcatcaggaaacatgcaaaaaaaaaaaaaaaaaatcgtgccgccgccggtctcttgtcgtcaccacctcatcgctgccagtggggagggaggaggcgccggatctgctcccc

SEQ ID NO: 30507 - DNA, 1637 bp, Oryza sativa
gtggtggaatttggaaacgggcaaacttttgtaggttcactgctgcataattttttattttcttgattgtgtagggcctataccttctttcatttgtttatctacactttatcatatcatttgtttattataggccctgtatctttaggatttgtaactggctctaaactaaaggcgagatgggtcattcaagctgcatattcttatgcgggagcttttagaacagttacatggatccattgcatcgttgagtagctaatgtgatgttgatgatgtgatatgcttgattgtttcgcccggcgatgttgattacatgttacatggcttgattttgctgtctggtgcttgtttgggtaaccttttagtgcgcccacactgtgttgttgatttaatgcgtacatcacctatagttggtatataccttgtccatataactgtgtctatgctgtaaattttaataaaagttaaacagcatagagggcattaaaatggcggcatatcattcaagaattaggtggaggtgtcatcttttactgtctgttatttacacacctaatcactgcttattattcatttccttttatttctgtagctgatggtatttatttatccatgtgtggcaagcaatagaactttagttgctctagtttattggtggctccgtacagaatttagtgccaactttgtcaaactaggacctgtgcctcagtgctaatttgaagggtttcattctgaatatcatacaaagtataatgtttgtttagatttgttcatatattctagcattgtgtctaaaatattaatttatatgtttttgctaaaacagagttattctgataggttatggatttaggtattaggtttttgtgttggttataggatttggtcatttggaggatcaagttataggatgatgttccatgtatattggaagttgtaactgaaaagagttccatgtgcatcttgattaagaggatcggatcgttaggtacaactctattgtggttcttctactaggaatttgtgttgtagctaggataaatgtttgcagcatggaaagcaggtcacaacctcattatgctcatctctatagttcagttcactattcctgttccattctgtccatgttagagtattcaaattgttggtcttctgttgtgaagatataacaatgccatagcctggacaagtgttttcatgtatcagaacatggtagtaattattttattggtggcctggatggttagaaatatgataattgataaggattgcagtaaaaatgtcccagctatattctgcttctcatcccatataagtggtgccacctagccatcctcccagtagtatttaactatgatctagtgaatagtgataattacaaaaaggaatagctacataaagccaacattatgtttgaatgttggaatctttagtaccatgatgtgaaccaggctactggaattttggagtgtatcttcatatcttgaggtctagtcctatttttcattttatgtttgttatacagagtgcaagaacaagcgtcctcgaagaaccatcaagccagcagcgaggaatgtttcgaaaagtgcattgccttccggtcttgatgccctaaacccaaatagaagaacgcttcg

SEQ ID NO: 30508 - DNA, 1044 bp, Oryza sativa
cggtggagaccatcacgaagaccctcaatggccccagcgccacgccgtcccggacacggcgaacgcgagcgcggcgaccgcgaggagcacgctggggaggcggcgcgcgcgccgctacggtggcgacggcccggaccacgacgagcagcgtgacgacctggacgagctgcaggcgcgcctcagggcgcccacgacggcctctcgagctggtccatcagctcggccgcctcggcgtcgacgcccgccggcgccaggcgcctggctcgcgcgagcaggggcaccagcatggcgaggcgggcggcgttgtcgcgcatcctggcgtgggcgacgtcgagggcgaactgcacggtgtcgacgtcgcggaggagcgggaggaggttcggagcaccaacgggaccatgggatgcgcgttcgccattggggctgggtgggagggggcgatccggcgatgcagctgtgggttttgcggtttggagctaagaccaaaagggggttttggtcttggggtttttggcattttgcagtggaaagggagaaagaagatgaggcgagtccgcgagtggtgcagggatgtcagattgtcagagtactttgtgtgccaggcttaacttgcgtggaacgttagcttaaatcagcaagtgcttcgtttaagagctgagaatcacaactagctctaccgtcacatggtttcgattccgtttagtcatgccattttagagtggtgttaacataccctaaaatgtgtttagatgccaatttacttatccaataaagggtgtgtgtagttcacgttaaaattaaaagtttggatcaaattgaaacgatgtgacggaaaagttagaagtttgtgtgtgtaggaaagttttgatgtgatgaaaaagttaaaagtttgaagaaaaagtttggaactgaacaaggcctaaacacggcgaaagacaagtaattctttcaaaatttgttctcctttccctcgagtccaccggaggtccggactagtatactaaagagttcattcatccattgcaatggccaatggcaatatgg

SEQ ID NO: 30509 - DNA, 1406 bp, Oryza sativa
accccccctcggggaaatcaggaggagggcggacacctcaccctcgggcccgacgtccccgaaggtgccaggccacgtgggcgattgtgtctgcctcaagcctctggtcacgatactcccggtcccatatcaccgacagggctcgtaagtcgtaatgcctacctttgtcagccctgctcagcccctgcacctaattacgatcggcccatatatgttgggtcagaacgggagcgtggtgtatgttaggcttatttatactcggaataggttcactttagatttctcatttgacatggagtttccgtttctaaattgaaatactagatataacctattccttaactaacaaaaccggattactgaaggtcccatgaaagcagtattccttattttgtctaacgtggcgagttgatcgtagtcaacaacgctaagtcgacgtgggacctacatggaactcgcgtgttatggcccttatctccccccctccgctctgttcccatctcaccagggcggtaggcggtgaggaggatggcggcgagcggtgagaaggtcggtggctggcggctggcggtgaggacaacggccggcgggaagaagctagctcagccatttcatcccccaacccgcgccaaagccagtgctgactcgacggccggatccactcggctgcaagctgctgctgcttcgggctctaggaacggctgctggtgcagggttagtcacacaacgtccgtcacgagcaggtacgacacgcgacgatgagatcgctgtggaggaactagctcgacggcgagaccattttactccctcacgacaacggctcgccctttttacccatcatttccttctcattggcatcaggtggggattagggagcagctcggcgtcggcaacgaattcctatgatgccaccaccccctcaagctcggctgcaaccggcaatatccttccagagaaatactctacccctcaccgcctgttcgcatcagcgcctcctcctcgcgccccttgccacccaaacgcctccctccttgctgatgcgctctactcggtgggccgtcggttgagcttggcccagcacttgagtgggaggataatgcgttggggtcgacttcgatatccctcgttggcaccctccacctcctgttgtcgtcccctgaccgcctcttgcatctacgcctctaggtgttgggcaacgctgtgctcgctgggaagcaccatcgcaccgttgtctaggaagcgtagggccacagcggagaggaaggagacacgaggaagcggtcgtcgcgagagcgtgctgctacgggcggagcacgacgcagaggaaggccgtggaaagcggctgcatggcgccacacgagctgaaaattttacattttggtcctttttgaaaacttattttacaa

SEQ ID NO: 30510 - DNA, 6851 bp, Oryza sativa
tccctccctccacccctccacctggtttacttttttggcaccgcattacttttctattttagtaaatttatacacctaaagtttatacacctcaagtttacacatctaaagtttagagaccaaaagtttataagtcaaaagtttatatatccgatttaaatttgaattcaaatatttttttatatatagtatttctatacatctaaagtttatacacctaaagtttataagtcaaaagtttatatacccatttcaaatttgaatttgaattatatctgattcaaatttgaattttgaatttgaattcaaatattttctatatatagtatttctatacatctaaagtttatacacctaaagttttaaagtttatagatccaaagtttataagtcaaaagtttacatacccgattcaaatttgaatttgaattatatctgattcaaatttgaatttgaattcaaatattttccatatatagtattcctatacatctaaagtttataagtcaaaagtttacatacccgattcaaatttgaattcaaattttttatatatagtatttctatacataaaattttctaacttttatttttttaaaaaaaattgtgtgtactgtggtagaaagagaagaagggggaagaggaagggggagaagagggaggagtatagggggaggggggcaaaccgattgctggcgatcgcccatgagcctccccaacgtaattggggttatttaggttttatatccgtcgtcttcctgaccccgcggataaaaggggccaggggttcgtactattagccgtgctcctttcatattaccagcaacatctcgtggcagcctatcaggttaattagctgcacacgacgtcaggggtgacgtacgcgtccgttggagaaagtccagtcaatcgcgccgatcgggaagggaacctctcgcgatcgagttgtatatgtacgtgatgtcaacgaggagagttgttaatgtcagcgaggagatttgttaactactgcaaaaagttttcgcggacgatgttttacgcacgttggtggccagccgcttttctggtctacgcgggtctccctagctgctccctcgctaggacacttttcgtgctaaaataaatatattttttaccatctcgctaatatgaaaccggaaaaacaaaaatacctttattttattaataataaatcataatataactattttaatttatttacttccaatataattattctctacttttataaactctaatttaaaagaacactttaaaaataaacttattacagcgcggaggggtgcatagggagtatgacctcagatggtgggacagcgggtcgcgaatagccggtagacaagacaagagaaaacctgtgatgatacacaccacgacgtgtgtggtgtcgtgtcgatggaccgtagttagattcgacccgctaccgtggaggggtaaccggatgagtgctattaacttgaaaagttagctacttcatccgtgttataatatagtaatttagaatttaataggatacattctaattataagactataaatcggatagaacttctgtctaaatttatagtttaggatgtgttatattcgattctaggttgctatatccacatcagattaattagaatacacgattcggttactatagatggtttgatcggtaaccattgtggtatttatattgtctgccttttttgttacagcacatgacgacctaccagtaattaacagagagctatgtacaaacacgctacgcgcgcgaccgagactgctgacactgtatttaattattaatctggacgctcgggagagttatggacatttcgaatcctattttagttgatgcacactaatttctaaaactcagtatgtaagtatactacactatcatacactagtaattattatataaagtattttaaatcacatgcaagtgtgccacatcattacctaatagcaattattatctaaagtattttaaatatcatgcaaatataatatatcatttacaaatttgttgtatttttaaaactcaatatgtaatcaatgtcaaataattatctccatattattttcatgttatttaagtatgtacatatatcattaatataatgtataatatatattcatccacgtatctcgtaggaaagcacgatgtatcatctagtcagtgagaagccaatcgccagctattatcgatcgatgtcaagctgtgaacccgcgtctacagaggcaagcagagatagcggccgcacaccattaattctgtatattcgcacgttcgtaggcccacgatctcaatcagagtaggacggcttacccgtacttacctaattgccgatatggtgatatatatggtccgtccattctacttaatcaaatccacgtcattatatgcattaggctgtgtttagtttcacgctaaaattagatatttaaataaattagaacgatgtaacgaaaaagttaaaagtttgtataggtagaaaagttcgatgtgaaaaaaaaattgaaagtttgaagaaaaaaattggaatctaaatatagccttaaacttttgtgtttccatgcctggccatggcttagcatggatgtagtatatatcaacctaattaataatcaatagttccacattcccacgcacttaatcagtactatagtagaaacgctcgtcaaatttaacagaaaacatgattgcacgtaagcggtattttcaatttttctttaaaaaaacttagcgagtttgtataatctctaccatctaccgtcaatttcttggacacttatccagttgtatatatgcatgtgcaaatcagtcgcacttctgtcaaaaaaaaaaaacctaaaagggatgtgatcttttttagaacaacgaatttaaacaaaaggctatctaaattcattgtactaagagatatcacatcctcggctaggttatgtttttttaacggagggagtatggtcttgtggacagaagcgcctttattatgataatgaaattatgggtgtataacttaatataaatatactactaggatttgaattctattgtacacaattaaactattttacgcttatgagcatatccctatgattaagacaaattgggaagttgcttctattatcttaaaacattaagattacatgatctagaaatataaaatgagggtaagagcgatgcagcttggcgccgcgcactcgtgaacctactaaccgcacatgcttcagtttacaggggtggtcattctcatttggtaaactaacctcttgtcatttagtcatcaggctgtacctgcagaggagtggaaatgaacatatactcgcaatgcatctaataagtgaagctagctagctagcacagctgtacaaggggctggatggctagctctaaaagtcctatgacgaatttagagcacgaaacaggccggattaatcatgccccgaattattgtcgtggattatctctataaattatgaaaaattaaatatttttttaaaaaacttaatactagtagtttataaaagcaagttgtataataccctctttgtttaggcttaggcttattggcctaaacttttaagtcagcttattggcttatatgatttataagccagtggatttaatgtcctaagtttaatggtagagtcatatatctatctcatataagccaaaaaaagcttctccaatctagcttttggcttaatagtgttagagtggcttatggcttaaaaaaaccaaatgaaaaagctgcttgtttattttggcttaaacttttcgacttataagttggcttataaacctaaacaaagagggcctaagtaatacggtagaagaaagtctttggagaaatatattttaaagatgtgaatcaaataatctgcagtaataattaatttgatgacgtagcaaggagctgaaaccaacgggcttaatttgttcaaaataatttgatgctcgtactcccagaacaagtatacgtccctcacaattggatccccgatcgaagtcataaactccatctgtactaaaatatgagattttcagcatagtgtcaagttaggtatttaatttttactttaactactaatagcaaaacaaaaataaaaagggtcaattgtgtaaaattgatatgactagatttatcataaacaaactattataatatgcaactctttttatttacaacattttatttttatatatattgttggtcaaaatagaatctcgaagactatatcaaagtcgaaaaatacttatattttaaggcggagggagtatacaatacccctgtgcagctacagtattagagtagaacactagtatacatacgtgcaattaagaaacttgtgtgtagtacatactctctctgtccctaaatataagagattttggttagatgtgatttatcctagtgcaatgaatctggactatataaggtattttggttagatgtgatttatcctagtacaataaatctggacatattttatatataaattcgttgtactcgcatccaaccaaaatgggagtagattttatacgactggtcaatagtcaaacccagagcttgcaccgcaaggaaaagaaagtgtctttctgatccagatgattacgtgagtacacatgccgcttgacaggtacgtatagctagcaatatagctaattaggtgtcaacagataaatgtgcgctttgaccacccaatccttgcacgtatattttctgaagggcatgcatatgatcgagcattctgcagtacatacgtgatgctcttgtatatattaagatagtggagaagatatactacctccatcctaaaatgttgacgccgttgactttttaaaaaatatttgaccgttcgttttatttaaaaaatttaagtaattgttaattctttttctatcatttgatttattgttaaatatatttttatgtatacatatagttttacacatatcacaaaagtttttgaataaaacgaatggccaaacatgtttaaaaaagtcaacggtgtcaaacatttagggaaggagggagtatatgatagcatgacagtgagaggaactttccgttcaaaaaaaaagacagtgagaggaactatattaccgtacaacagcacaattcttgtccggacaactaacgcagctaaaatagtttcaatgctgcacgcataccttgtctcactgattggttgcctttcactacagggcatgcaacttttcccgacggcgaaatcaccgttggtgatccaaaaaactgtagggaatgctgcagtcgaaagtttacgatcgggaattgttggtcgagaatgagtgtgtcggggatttgtaatcgacagtgatcgattctatgtatcatcgacaatttacatttccaatcgaatattgtggaccataagcccgtcggggttttttggacctccgttatatcctccgtaacggattttaggattcccaacaaattataaactcgtgacaatatttgttaaactaatggaattgataacactattagcagtttatatcacattatcacatcaacccaatattaaccacaaatgattgtaaccttgtcttatgggaagcattttttttggcagttcttggtaacatagtttaacagtaaatatcaacaagattcatgaccaaacaagtaccctaagttttccactacttcatcagtataataaaattgaccaaacatttggcttaatacaaatagttttcttaatgaatctcaagctaattaaccagttcgaatgaacgccaagaatatgacttcaactatgcataggatcatcaccatagttctcctatatcatcatcatgatcagcaccagtctttaacatcatcatgagcagaaccaccatcttcatgatttgattcacatgcttttcttttttaggaactttgatgcaccatacattaagcttgatgacggctgcccattggtagacaaacttgtcaatttcgacatgtgtgaacagcaagaaatatgttttccttacataattcatgattgtttttacataatctctattttataagatatttttttaacttcttttgtggtactcctacctaatactctcattactccctgctccccccccgggcggaggagagtaagtgcaggtttaagagtgtgctgtagacaaagtacaagcacatgtggaggaaagagataataaaaagtggaaaataatattggctcttatgcaagaggtagctatacccatgctgcaagataaatgcattagttatatactctcttaatttgtttcatattataagtcgttttattttttctaagacaaactttaaaatattttgataaaatgtttattttgtgttttattatatttttctataaaattagttaaacttaaaaaaattgagtagaaaaaaaatgaagtgacttataatattaaatggaagaagcgagagaaagagagagaatagaaaaaaaaagaataaatctctgtagctaatctattatacatgttaggtataatttataactagtagtgttaactttattattaaatttactcgagggcagatgctctctgataaacggtgacggtaaagcatcatctttctcatcattacatgctgtctttaattgctgattttaaggttacaacgcagagataagtttttttatcctccttcaactagttagctacagctctgtcttacgataaacttatctacttagtactccctcctggatttttcacattttggtccttttgaaaaacttatttcgtaaatagacccctgaaaaaatttatcctagaaatggtcctttttggggcgccagagtggctg

SEQ ID NO: 30511 - DNA, 1690 bp, Oryza sativa
tcataaaaccaaatagcatgtcaaaaacattaatacaatagaactttcgaaaataaagaaatccaacaaaaataatatggtttaaacgaaaggatggaaaatgaagcatcaagggagaaaactagaaatgtttgataaaatgaaaccatgattttcataaaggcatagatatgcaacaaaatgcaagggtgcagctcacgaaaagttatggattaaaaatgaagcgtcaacggagaaaccaataaatcgttccgaacaagcaaattatggttctcataaaatcaataggatgcaaccaaatgtagatgtctagcatgtaaccaatatattattttcgataaatagggacacgaaactcttgaacttagttctaagtctacgattaaaacgccagagcacaaaaaagccgcaaggtttaaatgcatgcaactatttccttttcgaatatgggtcagcctacttaggaattcatattatttatgtggctcttacgatgattttgtctttggtgggggtggtatgagaacctatccttgtttggttggtggaatacgatctaaggtgtaatggctatgttgttttccaataacaatacgatattattgattttaaatgtttataaaacttttcaagaatacttgatttagaatctctaaccattaggatgtaacaaggttcaagtcttcatggtctacagtcatgatctaaccttgttgatctcacattcgataaatttaagttttaggacagcaagtaagacggttgggaaaataaggataaattgaacaaaactttgggttacatcttaggggttggcaatatttgttctccgggtgctaattagtcatatgcaatctaatccaaggtgttctaggaatatttgtcgagtcatattggatgcatcaggacggtctcattatgtgcatccataaacttgggtcgtggtagaaaacgggatgctatatggcatgtatagcaataacttttctttttctcaaaaaggcaaggatggatggtatgatgtcatgatgaatgaaatgatgcgatgcatgtatgaaatgatacaatgcttatgaagatattttgtattgcatacatgccatagaacaatcctttcgggaaaattgttcatgagactactgagcctactcaaggtttttcatgggcatgggaatagttgcaactctttataggctttaggctaggataaggtgacaaaactacaaaaaatttactcagactcgtaacaaagttctccttatctaggaaagagatggtagaagtttttaaaacctaaaagtcaagttcccaaaccatgtttgtgagttgctacgatgtgcaaatcttgcatccgaccgtaaaggggcacaaaatttgcacactgagccatctcaacttaaattacatagtttgcttacgacttgttcctagtatgatatttccatttaggcttgtgggggcttgcaaaggttacatgttgtctctggtttgtaaggtcatggcactctatcccccttaaaataaaataaaataaaattttgcaatggggtttatcaagaaattttaatggaagagcaaaataggtgtatgtgcccatatgctgtactatccagtcccgaggcgcaaactgaagcaaaagactatgctagatgggtgataaattagaaaaaaaaaagtatattcatgatcc

SEQ ID NO: 30512 - DNA, 3052 bp, Oryza sativa
tttttttaatgactcattcattagaggacgtaagtagcttttggtctccccgcgaaaaaaaaaagtagcttttggtcagttctacgaactaattaaagctctaatttttttattaagaaccaggtttgcctcggtctccattaacatgttattcaaactttttaacggtatatttcgtgcgaaaactttatacatagaagttactttataataacaaataaattcatttttcaagtttaaaataattaaaactcaatcaatcatgcactaatgactttttttttcactgtatacgtactaaatgttcatatatatttttagtgaacttaaatggggcctaattccattcgtgtagtagctcgggaagacatgttgactgttgagacatcagtaattcgctactcctgtaatcctgttctatgagctagctcgaagcccagccggacggtgttgccatacatgcaatcgaaaccgcacacgcgcagttggttggcgagacggttgctcccaacatggaactcgatccagcttagctggggaccgcgcttaatttggttggtttctagccatggccatataggttgtgtttagttcagcgcaaagtttagattttggttgaaattaaagatgatgtgactgaaaagttgtgtgtgtatgacaggttgatgtgatggaaaataactgaagtttggatccaaactttagatatatataaacacagtcatagcttaattagatcgaatgctcatgcatgaacacacatatgttggatcctactcctgcatacgcgaacagtcaatctctctgtagtacacagtggcatatactctacggatgcacgaacggttttatcatcgtatgtgcgcgcaaacagcactcattataagttcataacagtgacggatgcaggtgatcaatcgatggctgatgtcgttgtactatatggtatagtagcaagtacagtaatgtgtatacgtgcttgcatgtgatatgatggagagatcgatcgacgtacgtgccacggtgcagatcgacagtgttgacgaccaaagtttcagaccagcctcagcatgcatgatttggtgtttaattatcccttctttgttgtgtttgtgtagctgttctatcttctctatcaatgaaatgaggcaaacctttatttttgtcccattttatcagatgagaaaaatgtacttgcattgcatgtgtgtgcccttgatgcgtgtgaaagaaaaaggaataaagggtagtactgtagtaaaactactgcggagaaaaggaaagaattgttgctgcttgctgctgctgtgacttgtgactcttcaggttcagggggttgatgcgttacagcaccctgtaaggccctgcagtcatatggatggtcacccatcaggaggagggatgtgtacatgtactcctacgagatcgagagccatgcatccatatatgcatggtagtactggctatctactgccaacctagtgcatcacatctctttgctacaagctcacgcaacgagagagagagaaagaaaaaggagagagagatctttgtgatcttgtagatgtcagtgtggtgatgggaaagaactaaaggaggcccccaagtttggggagagggggtactagatgtgagggtgggttgcctgcattttgacttgcacctttttggcaacttaggtttacaaaagttacaaacgtacagcgccaacagcaagctactccagctgcaaactgcaagtaaatgcgagttgctgcgatcgtcgatctcttttccctcctccttggctactacgctgccctctgctagctatcatgagagccactgagccccctcttcaatgcccctgtaaccgcttagcatttacacactctctcgcacacatattcatacagtctcagactctctctctctctctctctctcattctctctctctctcacacactcacacacaccacacatacagaaatgcagacacagtgccagccatatgtatggcaagttgaagcttaactctctcattgtctgcctgccaatatgttgaattttcagaggtgcatgagacttcctcttcagtgcacggggacctatagtgttgtgagagtcatgtactccctccataacagaatataatatattttgagttgttgcttgcaacgtttgatcactcgtcttattcaatttttttttgcaaatataaaaaacgaaaagttgagcttaaagtactgtggataataaactaagtcacgaacaaaataaataataatttcaattttttttaataaaacgagtggtcaaacgttgcaagaaaaactcaaaatcccttataataatattatgggacggagggagtagcactgaaaatgtactaaacacggcaattgaatgctgaatgtccaaaacatgcattagctagcttagagggagaggcactatggataccaacttgttcatattaatgtgtggccccatctattaattcgatctgtaaatcctatatacttatataccattaagtatagttaatgccatttctcttttatctcattaagccacattaccccaattatttttagcctttgtatgatagatctatggttcaaattatctcttctttcttctccgataacaccatgcattatttttaggctcaaaattcacaagtatcaatttgttagttttaataatcatattacatcttatttgtacatactatacaacttaatttcccacattaatgcggcggggtatttatctagttaactatattgtgaagctccactactagttgaactcagtgcacaaaaagcttctatattgttcacttccataaattaaatccgtaatgatatacagtacttatccccactaattagcaccaagaaaaggtactactggagaaactatttttgatcggtcggccaaatttcacaatagtcctggttctaataaaaacctgagtcccggtttaaaagctcaggggtactttttgatctttagtctcgattggtaacatcaaccgggactaaagatcatttttagtcccggtt

SEQ ID NO: 30513 - DNA, 4292 bp, Oryza sativa
aagacatctcggctggtgggttgtaagtgtaactaatgcataacatgtttccttgcaaaagttgagttcttctactggcaaaatatgacatccagatttcacatcgatcaatccaactaattaaagctaatttagatatactgtattccaggtagctatatttctatataccactacatggagaccaaatttagatgtaaagttatgaatgtataaaatagatgggcgctatttctgcaagtgttgcaattttatttggaattttctatggctaattttcatcatgtataaatgtttggaggttcactatatatccagacttatgatatatatatgcgcccttgtttgtttaaacaactaaattggtttcttattttctcgaaattcatcatgtatgtgatacattgtggcaactaatcaaactattacagtatcattttttgtatctccatgtaagcttattttgaatgagtatcaatagttccaaacttatatatgcagtatttttttggacaccaaaagtgtctatatatggatatgtaatgttagattgaattgtgtgttgtgtccaaaaagatatcttagaatatcatgcttactctagttaaagtgatgatatagccaatttttgttcaaccaagtttggatatatagtttatgactagcgctagctagttcgtagtaccttcattcaaaagttgcgtacacatttttctgctcgagttccctcacactgatatgtctgccgctatatgcatgtttgaaccaattgttgtactatggtttctcactttcttgtatatatgctataccatctataggaaggaaatttcaattaaaaaaattacttctatggtccctcgcttcaatcgtatttttcttgcaagaaagtagatgattttttggtatatgattttgtatgttcatcattctttttgtcccctcttggagaaaacttgttgtttatcagaaaataaaacaattttatgcaaatatgaaacaaaatatgattctccaaaaaatgtatacatatgctgctatagaacaaacaaaaaaagaaatatggagtaccttacatgcatactgattcgatattgtataacatttgttatatttggatcactagctaacaaaacataacctataaaattggagatgtgtaaatataactaattttgcaaccactatataatagtatatcagtctcagtatgtactgaaataaaaaaaggacgcgtctacaacgagatcgctctctgtatggtcataactagctacctcaatctcatatctagttgctactagtatactcaaaagtgcatgtatttttttcttatggaattttctcttagattactcatccgatttacgaccccattacaccattgtgtttataacaattaaatctttataacaagatctcacatgactatattttcatgaaaaaaatacaaattaattttataatatatctaaattacttttagatttcattaaattacttcttagtcataaaagtaatttagtaaagcctgaaagtaatttagatatattatagaagtaacttaaaacaaaagtaaagtaacttgttacgacattaaaagaaatctatacattcataatgttattcataatattgtgagttgtttattttataatcatttctagtcagtgatgtaatttgtgttgattaaatgtaatttctatatagactcatgtttttacctctataatggatttacttttgatgttgtaataaagttactttcttttttttaagttactttactaatctatgtaaattacttttagactttactaaatttacttttatatgtctaagaagtaatttagtgaaatctaaaagtaatttagatatattataaaattaatttataatttttcatcaaaatataatcatgtgagatcttgttataaagatttaattgttaagagcacaacggcgcaatcggatcatagatcagataagtagtttaagagaaaatttagtttgaagtataggtggtttctatttgcttgaaacatagggataaactactctctctctctagcgtaacagagtgcgtcacgtggcttccgattcggtctgttctggccttctcggacagcacgtgttcaaattatgaattttactggagtattccaatctataccttttatatagttgatacccattagcaattattacaagccaaaactcaacatacaaatataagcatgtaagtattatgatagagtaagacccatcatctagaatgttatatcatagagttcaattacatacaagtatatgatcttcctagcatcattattatatattttaatatttattgttcctataatatttaacgtatagtcagccataaatatctcgtcacaaaacactgggtatcaccaagttgatattaaagttatgttcaaatggcacatgcctacggtttttcgctttgctgttaattacacgataatgtgaacgtcgtaatcttgattttttacataacactgcaaatatttggatccacttcattatgcaacaaaaggaaatttctgtatgatttcttattctataatgacctttgagtatacactgttcgatagaagcgtatgcatctaaaaaagaaaagggttaatagtaagtaatcaaggcgaatattacaattgtgtatctagtttgatgatatatatattggtcctatatatatatccatatcgtcacctacttgttctcctattcagatcatcatgaatttgttatactattcagatcatcacctacttgttcttatctctttgcagattaatgaatatggatcagatcatatcagattaatgtggcatatttattctttgttggtcttgaagtgcatcattaaattataaatataaatatacacagtatgttcattagcttagtttgctttaaggttctcccaatacccgtttgctttgagattcataaagcaagaaactagaagaaaatggacgatggaacattttattttatttcaccgactttgtataccacactaaaatcattttttttctattaataatatgaagttcgattaggggtgaaaaaacgaagctcgtgactcggattgagtcaaactcgtagtattaacgagtcgagccaaactgatgagcaactagagataaaaatggagcctctgagttgccatgggtttggatggactggtttcatcagttgttaagtgtgcgcgctacacgaaatcggtggatttctcaggacagtagatatgtgatgactgcactatcgtcatatttgaaaacggaagtagtaatcggcccttgcttctgtgcatttatataaatacaaatatatatctttttatgcatagcaaatatagttatcaaagtggtattataatctgactaacatgattaaatagttcaaatctcttttttcttctttaattaacgtgttaatttcattctctaccttatgagagtggtattacgttccttttctacgtctcctaaaccttgcaggcttgcagcctgatcatttctagctcaagtaataagtgatggatatcaaattaatgtgacattttcgtgagttggtttgaatggcaaatactccgtcagaaaataaacccaacctggctgacaactctatcggcacatcacggcgatacaatgatcgaatttggaattttttttcggttttagattttttttaaatatttacagaaataatctatcggcaaaaaaattacaaaaataggccctgccgcccacctctggggcggcaagctgacgtggcaaacgggggaggaacgggcggtgacggagggagggttttttgcaggaaaacccttgccgccctctggtggggcggcaaggggcccgaatgcaaaaaagccagtcggggccggccattttgcaggcggccccttgccgccctctggccgggcggcaggcctcgctgcctataaaaggcctgccgcccagcccctagccctcattcctccctcctcaattccagtgaaaaaaaaagagaggggaggagaagagaagaaggggcgaagccctgccggattcagacgccgatttcaggtaatattcatagatcctatatgtgactattgagttaaatagtgtgtattttttaaaattttgtttgaataaatgcattatatttttagggttttagttgtactaatctagaagtgcgtattgtagatatcggtaactacgtagatctgctagtttgaaatcaatacattaccgttgcatgggctgcaggaa

SEQ ID NO: 30514 - DNA, 5273 bp, Oryza sativa
  unsure (1)..(5273): unsure at all n locations
attcccacaatcaggaaaagaatgtagtggctcagggtctcatgagcagatttggtgtgtgtgtgtactactctttgttctatggctttatgcactacctcacattctcacaacccggtctttttgtgttttcttgatacatatatatttggtactggcgttttaaataaaagcaaagtaggtagactctctaccaatcgagggatcgaagtatcacatcaatgaagatgtatttgtggcaattgctagttataagtaacttgctccgcttaactcagaagtatatgcatgccccatgtaagttctaatggagagtaccaccaatgtgtatgttccatacaaaatttaaaaatgtaaagtgtacataccaatgtgaaaatcgtttaagtatccatggcccaacttttcctttcattttttttccacgaaaacagtccctgaggcactgttttgttaatccccaagaggagggtattgaagggatttatctgacacctattgtggtgtggaataattctccttaatctccataaatcccctccaaactgaacaaggcccgatgtggagaaacctaatctaaattgaaaatcataaaagtcccacctgttcttgatgtcatacaagtgtacaaaccgaaaccatgttcattgttccacctggtcagcgtgctcgaatgcagccttttcttgccactgctcatcctggagccaaccaattcctagtaaaaatctaacggacatatgcaaccatgctatagcattactgttcttctagtccccaatatttttcatggtggtagaattcacaggcatgcatggcgatgcccaaggctgagccgatcaaagcataaagcagccattcagagatgcctatatggtgttctgcaaacagtgagaacagcagcagaacaccatagaggaatgggaaaaaacatctctattgccgtgaataggtcacacgaggaggagctttcatccccggtgcctttcatgcccatgtttggctgagcatggactaattaaaattaaaaaaggaacttatcatttgccaggcatgtgtgcatatgcatgtgtggtagctgctgataatttgcgcactctacctgagcaatagtgtgacgtttgctatgttggagatttgtcaatgtaggattagagggttgcatagagatttgtcactcatgatatttttttagcgttatatttagattttagggtgacatggagaacagaggaagattttctatgtaaaataatgtacttcatgaatgatactccctccgtttcacaatgtaaggcattctnncnttnctcatattcatattaatgttaatgaatctagacatatatatctatctagattcattaacatcaatatgaatgtgggaaatgctagaatgccttacattgtgaaacggaggaagtagttataaaatggccaatcaatttaggaccattgggagtagtatgagaggtacatgaattgagatggtcatggctagatagctgcctcttgataccacagttgcagtaaaaagactctgcctccagataaagttttaatatgctgatcattaactggcgaatttgtaatttggcttatggagagaaagacatatcctatttgttacggccttaaattccaatcagctttcccatatctatgttttctttttcatacgaaagcatcaagtcatcccaaccattatgttctctaatacacagaaagaggaacccgctcaatgtagaaaaactttgctagaaaagggtgaaccaaatttatcggagtaatcagagtggtagaaagtccaaataggccatatcaagaggccttttatagtaccttccactaggaggtggtagtagtgtagtaggaataaatatcgccgctgatttcgatggtcaatttagtcatttgtttaaattaggtgaaagggcaattaagtaatcattggcaggccctaagagcctgtttggttggagggagttagtgatgggaatgggagtttatgatatctgggagtttaagtctataatttggttggaagacttggaaattcgagggggtttgggatagggaattaagaggtccaattcccaccacggcttgtttggtaactcgagggaaggggattgagagtttacacgagggaattgatgatgagattaagatgggaatttgatttttaatcccaatatcttgtttggtagaggtgatggaaattcatagggagtttatttggagattaggtcattaataaaaacggatggctgagatttgcttagaaaaagtaaaggaggaattccctcccaattacctgcccctacctagatattgaaaaggagggagttccttcctcaattccccatccccgtcccaccaaaattcccatgtctcccaaccaaacagaacaattaatagcctcgtccctctaaactcctagtccctcccaaaaactcactccaactaaacgggccactaatctcttacctgggggaggcctgttaattcgtgagacttgtagggaattcgatgtgaaaccaaacaatggaagaggactaaaaatataactcctatgaccaatcccaccatcaactccctcttgaaactcccattcctctccccttctcttgccaaacaggccgtaaggaggacggctcaaacatcagtcaatcgttcccatggccaattcgtcgggcacggcgcacggcgagcacgggcacgcgccgccgcctgttcgccgttcacccctttcacttccaaccccgatgtgcgccgtcctttcactgccaacagccggtgcgcatccttgcgcaagccaacactcgacaccactcgccccgtccgcctcctgacgccgcgctgccacccgtcgacctaatgcgcccgcgcgccggcgccccctctcgctctccttgcgcccggcatgaagtgttgattttaatatatccagaattgcggcatcaagtgctgatcttgaacatacatgttttgctcgcagcttcatgatggataatcctcaaaagctatgaaattcagtcttcataatataccaattgattatcttgactagtcgcaaacaaaacctgaagattctgaaacttatttgtttcctgcgattctgctaactaatcacaagggatctaaaccttaattattttctgcaactgtgctttcagtttaattaactctttcattaacgaaagtattaatgatcccgcaaaataattaaatctgaatctttaatgtgccctcatggttgacggtagtagaatttgtgtaagccaggcgtcaaccatgcctcaaatcagaagtctgaatttctgaactctggcatgacctgaagaaagtttcatagaaaaaacaacctcaagaaaaagcagtacggccggaagggaaaagaatccgacgagcgtgctgcctccggaggtggcacagcagtgatggcctgatgggagcagcggcggtgccagtgatgggtgtagggttcaaaaatcacgatctaaagctattgattaattatttttctttttatttcataagtggactgcatttttatagacccaagaacaaatcacaccctctgccaaacctaaattttcaaaaatgtcacaacaattttttcttccagaattaccattctactacactcctgcaccctgttacactaggtgcagtagcaacgtacatcctccgttggatcccatccttgaacggcccacattgatccatgggtactttaaaaaaaaatcccaaattaagcgctgaacaagaacggtagaatagtagcctcattcttacacaagtataccatgccaacttctgccgtacatcttgtgcagtagatccaccttgttgactgatctagattcatgatatcaacagctcatgtggcatgggtaactagttttacacagatcgagtcaacaggatttctagtgccacccatgcctacaattgaattggaaatggaacattcctttgttttcttcattgcagcacacaagaatatggattatttcaacatagagcgcatgcggaattttgccttatagtagagggggctggactgtgcgtgctctagtgctcgggcaagctatatatatatatacccgataaggttgtagtatatagttgttggtatattattctttgcaaccagccaaccacacacagctactcagctcccctgctcttttctcctttgtgcaactagcatatactccgcacatgtcattaactaaagacgtactcaaaactccatcaaaggtagttatacgtacttcatgtgtttgtggaaagtggggagcttagttcagatcatcagagagttctttaattttcccgttttgtgcagttattgccaattatgagctgtctctggtaataggctatcacagtttcagcaaatcccacgcactgtaccgggagattgttttatgtcttgaggtgatatccacttattttgttatgttacctaaatagttattaaagctttttgaaaaaattgataagataggttaatatgagatatatcactatgcaaacatgtaagcttaaattcgacttctacaagttctaacaaatataactgtgaatttacatcaactaattttaattaattttcttttattataacttgtaggttctaaatttgaccttgtatgtttttttagtgatatatctaatattccactatcttgttattttttcttaatttttataactatttaaacgcatgtaagatatgaggggatgttgaatagtataggatattccttcgagggatgaaaaaaccatctcccccaatgaaaaatagttttggtctatattttttaataagcgcaattgattttactaaatcttaaatttttagatgctttcaaatcccctccaaattgggtaagaccttgttaaatttttcatgactttgataaccacaaattttgttatgcttttgatcccagcaaaatttgctaggagtattaaatttgctttgacttggatgtccaaaattttgtcattgttagagagaaaacagggatgcattagtgtgcacctcattgctcaaaaagaattttccagcacgcaacttaattgtaataggatatatatatatatatatatatatatatatatatatatatatatatatatatatatatatatatatatatatatatgcactacacaagcagtacaaattccatccgatcgatcgagccatccaattttacatggatgtatgctagattctacagcagatcacaatt

SEQ ID NO: 30515 - DNA, 806 bp, Oryza sativa
aagatccttcttcgatcagcttcccacttatcaaatgcaaatcttctccatgatagtagttgactactttcttaattagcgtgtttacatatccgtcactaagatgttttgcacaactagccaacatatacttacatgtgcataatgcacacacatgtactagtataatatcatagaagatagactcattttacgtccttcgttataagttattatatatatatatatatatatatatatatatatatatatatatatatatccttcagtattggtagtaataatgatcgagtagcgagcattgtaaagagagtctattaactaacacaacattatctttttacgagttactcatatgtggatccattatgttatagcctctcaaagtttctcaagcattggaacagctaatcatagtttgtcgcgacttgggcatagtatagggagggcagccagctgcaggaaggatcaagagagaaggcaggccaactggaactgtgggcgattccttggtgccgctagccgccgcgccgcctgctttattttgtcgattgtcgatcagtctgcccacaaacgtcacccatgtactgtccatctactgtacgtactgtactgctacaatcaccgttactcagtggttctacgtactactagtactatacacacgcgtgacacgttcctttgcatataggagtactactgtacacaaattcttactgaaattaatagtacagtgtgtgttcctttgcatatattccctccctcccccataaaaaacatatttttgagtttatatgttcaacatt

SEQ ID NO: 30516 - DNA, 1557 bp, Oryza sativa
ctctctcacagattcagaaaaaaggaggaagagagcctctcgatgggattgattcccctctgtccagtttcagaacatgagtggacttcaactatctttgttggacagtctaaaaaatatcagtacatgttacactggcttgtatagaaataaaaatgtttcatcactgcacaaatgcattagttttatatatatatatatatatatatatatatatgccaacatcacagaaatgtgtgtgctatgagtaaagttatgatcattagattgatagttggacacattttatcaagaaaaaggggggacaggcaagaatattgacaagaccataacaaaatatcctatgtatgtaaccatttgatgttgcaacttgtaggactcaacatctgtacccaatctttgagagagtatttatcttttggctcttgtcaatggaatctatccagccagtgatattggggcattgataagctgaatcgcaactaaatgcagttgccctcttacacacaatggtcctactatagctatatactaactgctctttctctcctggcttgacaaacctgtctgcagaaatggaaatatcatctacctatagatgggataactaccagactatcattgcaatcttggaaggttcttcatctcttgagagattgaaaatgaaaatatgaacactaaaagtaacaacctcaggacatgtgtagtttatatttcactaaaaaaaattctaatgagacagcatacagtttccacaaattgtgttgttttgaaacttgatgatgacgtgctggtacattagtagaatagggaaaccctctttcacctatctgagatttctcatttttctatgtactgtttgaatgtttcaaacatttttttccaatcttaataaatgcagatcccttagcttttctatacaaagtgcattttcaacatagcaacaaagaaagttttgaagtgaatgggaatgaatgtgcaacttacaaaggttatcatacacaattgacttcttccgatccttcaaagcatttcgataagcatcgtctgcaaacctcttcaagaatatctcctgcagttacagatttacaggttcaagtgagcgatataacattaaccaaatcagctttggacgaggaatggaaaaaataatgaaacactggtccgtaatgaatatcacagtaatctgacagaataactaggtaaatcatgaaaatatattcttcagattctatcttaatatgccctctataatattctcattgccagtatgccataaaccagtaacatatgcctaatgcatcagagaacagcaacattttagcgagttaccaacaaatacaaacataaaacaatcgtgcataaaccctcctgccaaaagtttgatggcagcagaagcagagaaatcaagctttggacttctgagacaacctgtaacatctaccatttggaggtagaaaacaccattcgtgatctgtgatcatatcagacaattcatcaaacaccttgtgggcgatcacagcaacgccgacctaaatctcattagcttaactagat

SEQ ID NO: 30517 - DNA, 1538 bp, Oryza sativa
ctgccggcacgccgccggccaccaggccctccactcgccggcgctcatagaggagaaagaggaaaaggagaagaggagttagaggagagaagttaaaaggagaggaggaggaagaggaagagatatggaggaagagatatggaggaagagataaggccagtgaggagatagaatatattaactgctcctcctcctcctcgatctggcctcgtactctccgccgcccatgttgcgcatgccgatcttttattccggttggtaacaccaaccgggactgtaaatagatctttagtcccggttggtgttggtgactaaagataatagggatcttttgttccggttggtgttaccaaccgggactaaaaatagatcttttgttccggttggtaataccaaccgggactaaagataaaaaaaaaactctaaccttttgaaccgggactaaagatatctttagtcccggtttttattgcaaccgggaatattgtgtattttggccgaccgaccaaaaatggtttttccaccagtattatgtgctgatagagttgggtttttatttgccgatttttcatcaattaatcgtatggttgtttggttttttggcccatgataaactaggccaactcctttttcttcctaatataaaacatgaactccctgtcctccttctcgaggtttaccccaaaaagaaaatgctttaatgctttaatatgctcatatagacatatatatagatattgtacagccccccatctttgagaatatatatatatatatatatacatggattgggtagataattcatgtatgtaatatttttttctgaaaaaaaaactttcaaccctcaaccctcttattgttttgttggttggtccaagcaagataatttaagtaagtgtggttatgcttctatatatgcaagctgaattaagctagcatttcatcgagacctagctataactaatttatcgatataaaaatgttctcgagggcaattacacatcattcaaaagttggacttgggggctgttatttttctttagttaaatgtgtcaattaattatgtaccagaatcttttgttgattgaattgcaagttaataattacttgtttggtatacaagaacgaatgccactatatatatgccggtactggaatttcttagggacgatcgagaataatcaattcatcccaaatcggattaattcttccatattcccagtgtggcatgcgttagccattctatatgctcctttcgttaaaaaatatattgtgtattattttgttttgttagggcaagactttgacaataattactctagcaagatatatatatttaacacaaaattaaagatacatgttaaaattgcttacttacaataattgtttttatataaaaaaacaatggaattttttttaaggtgctccaaatgttttcactgtccattagactagaatccaatggtatattaccttgttctgggtaggatctcataataaggaaagaattaatattctttaaagtggggccgcaggaa

SEQ ID NO: 30518 - DNA, 2778 bp, Oryza sativa
gcatgcagcagtgttggtcgtggttccatatatttcttggcatgcaacgatcgaatccgatccgagaaaaagctactactgtcctgtgctgtctgcagctttgttcacttgtcacatcgattgatcgtcccagctgccgacctcgcgatctgcaatttacacagtacagcgagggatcgatgcattcatcgatcgatcaaaccgttaattacctacagaaccaacgtaccagaaggcttgctagctagctgcagcttaattaattcactgtattactacatgtgtgttactttctcgatcagcttcttgcttcgtacgtgcttccatctccaccacaaatttctctgctatatatagcttgctttctgcggctgcatccaccggagaaaacgacgtatatatacagccagccgacttaattagttttcggtcaatagttctataagctagtaatatataatatctcatttaatcctaatactatacatatgttgatgtactacatatatactgcctccatctcgtataatagctacttctaacatttaaattttgcctcaaaatatatacattacctagctacttctccaactatattatctcaaccaataatcacagcatctctcatcatctaattattccacctactttctttattatctcaaccgatcatgatcattaatttcacggtgttccttaacctctctaaaaaaaattcaaaagtattactgtagtgctatactctctttttttttagtaatataattgtttttgttacatcaaggcttgactaataactattttgcagtttctaaaaacaacaatcgttttacatttatttcacgttttcatatccattggttatttgtaaaattttcttaataggaataaaattcatcctttcatttaatatatcacttgccctttcaaactcagtcacattagatagaaattacgaataataaatttggcaccctaccttatttattgatatgaatatgagcacaccaaccttattcttaaatttgtaccatgtgtgaaatcaaacttaaacatattttaaacattggtacttcacaaaaaaaaatgtgctgtagatttaaataaaagattgcacatttacttttcggggtgtgcgtgtgtgcgcgatcagatttgaacctctgtatttatggcttggtatgtgatttgacaatttgaatttagagtattaaatataattggcatgttatattttaaatttgtatggcataaatatgtgatatcattttaggaattacgacgcttaccttattaaacgttatgaattttaatgacactttaaagaatattaattctttccttattatgagatcctacccagaacaaggtaatataccattggattctagtctaatggacagtgaaaacatttggagcaccttaaaaaaaattccattgtttttttatataaaaacaattattgtaagtaagcaattttaacatgtatctttaattttgtgttaaatatatatatcttgctagagtaattattgtcaaagtcttgccctaacaaaacaaaataatacacaatatattttttaacgaaaggagcatatagaatggctaacgcatgccacactgggaatatggaagaattaatccgatttgggatgaattgattattctcgatcgtccctaagaaattccagtaccggcatatatatagtggcattcgttcttgtataccaaacaagtaattattaacttgcaattcaatcaacaaaagattctggtacataattaattgacacatttaactaaagaaaaataacagcccccaagtccaacttttgaatgatgtgtaattgccctcgagaacatttttatatcgataaattagttatagctaggtctcgatgaaatgctagcttaattcagcttgcatatatagaagcataaccacacttacttaaattatcttgcttggaccaaccaacaaaacaataagagggttgagggttgaaagtttttttttcagaaaaaaatattacatacatgaattatctacccaatccatgtatatatatatatatatatatatatatatatatatatatatatatatattctcaaagatggggggctgtacaatatctatatatatgtctatatgagcatattaaagcattaaagcattttctttttggggtaaacctcgagaaggaggacagggagttcatgttttatattaggaagaaaaaggagttggcctagtttatcatgggccaaaaaaccaaacaaccatacgattaattgatgaaaaatcggcaaataaaaacccaactctatcagcacataatactggtggaaaaaccatttttggtcggtcggccaaaatacacaatattcccggttgcaataaaaaccgggactaaagatatctttagtcccggttcaaaaggttagagttttttttttatctttagtcccggttggtattaccaaccggaacaaaagatctatttttagtcccggttggtaacaccaaccggaacaaaagatccctattatctttagtcaccaacaccaaccgggactaaagatctatttacagtcccggttggtgttaccaaccggaataaaagatcggcatgcgcaacatgggcggcggagagtacgaggccagatcgaggaggaggaggagcagttaatatattctatctcctcactggccttatctcttcctccatatctcttcctccatatctcttcctcttcctcctcctctccttttaa

SEQ ID NO: 30519 - DNA, 1525 bp, Oryza sativa
  unsure (1)..(1525): unsure at all n locations
gcgatctaaagtatctaactgctcgatacatccatgtcttcacgcgataatgtcgacggcgtctgagataagatactgctatattacgctggctcgccgcaatcatcgcgggcattgcgggcgatctctgccgctatatatntgcaagaaatatttgcattcctccgncgatatatatttccattccgcgatctccggtgatatacattgcaagaaatatttgcactcccccaacgatctcacggtgacacaagaaatatttgcaatcgctaataataaacgaataaatcaaacacacactacacactaccatcatcgtcgcgtcgtcggtcgtcacagcctccgtcgccgccattgtggccactacgaagaagcgtggtgaatttaatcaaccaccaatcatcaattaataacttgcaaaattcgtcgacccattcattcgttcatgtgcatttgtaaggcgtaatacttttaaattacgatgaccgcaaaaaaaggggcaaaacttgaggaaaacaagggaaaatttgtaaattacatgccaattaatacgagcttaattacgtatgtgcttgcaattgctgattttttttcaagtataagcctgctaatatattaaaacgattgttgcgtccgtaatattcgagccgattaaccaaagttgtcccaaagttattaggccgtgatggcaaaaggtagaaaaaaatactgaagagcatcgatgttttaatctccgaaccctcctaatttgaaaaccaagaaaaataattcgaaagggttcgattccaccttagtcatcaacatgggccaaaacttccgtgtctgtgtaaactatgggcttttaatctagcccaatttctaggcttggttggttccactatggatacggcctaatagcaccaagtggattttggacgttgcacactgggtctaaaatcaccgcactgccaatccaacatgatgagaaaaaggaaattaaaagaaaaagaaaaaggtccaaatgggggtcgaagtttttatctccgaaccccgcagatgttttttttatgcgatccagcgatctaagtatctaactgctcgatacttccatgtcttcacgcgataatgtcggcggcgtctgagataagatactgctctattacgccggctcgccgcaatcatcggcggcattgccggcgatctctgccgctatatatttgcaagaaatatttgcattcccctggcgatatatatttgcattcccggcgatctccgatgatatacatttgcaagaactatttgctttcccccagcgatctcacggtgacacaagaatatttgcaatcgctaataataaatgaataaatcaaacacacactacacactaaacactgccatcatcgtcgcgtcgtcggtcgtcacagcctccgtcgccgctattgtcgccactaggaagaagcgtggtgaatttaatcaaacaacaatcatcaattaataacttgtaaaattcgtcgacccattcattcgttcatgtgcatttgcaagg

SEQ ID NO: 30520 - DNA, 2215 bp, Oryza sativa
ttttgaatctttttctaaccatttcattgacatgtaataaacggatggatgttcacccgagtgcttaaaagaatttcccatatataaaacccaaatatacttttataaataattgtgcctatagaaataaagatttagagttgtatattcaacctaactctacgtgaattatatagctctgcgcaaaattgcaagaggacatcccctagttgctagaataggaagaaaattctaattatttgtgtgattccatatttccattgtgaagagtctaactttaatgtccttgtctaagaaagaatctgatttgttttgttaatatgtactactacctaaatttgtgaccattaattggatataaaatgaacctcgtcactctattagttcatataaaactctcctcccgttcccaaaccttagacactgaccacaccccatcactagtaccgcaacgctatgcaattgcatattgcctttggtaagctgccaacaattcctctcccaagcctttctcatccactcccatgatacatcatttttccaaattgtttttcattcttatataggacgagattctctcatgatgtcactatttcctccctacgatggttacctggccgaatactaccatattcttcttttttattaaaaaaaatataagatagcccgcgcacatgcgtgacatattatttaatgtttcttgaaattttattatcaatatttatttgtgggtaattttttaaaatatatatattcatcctatcctaaacctgttcttttcataatttttttgggatttttaaacgtcgattatgactctcttctaattacggttgcaacatataagttataaatcttttaagtaatactttttgtttaggttaggctgtaacaaccctaaaatttgacaacattttaaaaccgatttagcttactttgattttctaaaaatataaccgtcgagttagtggtttatttaaagtattattttgcatgtttatttctgatgtttcttttctcgtttaattttgtcgcaaagtgcatatcatccctcaaataattcctttgatccgatttaattctatcccgaatgtcggactatctaaattccgcaccaattcaaatcctatctattttattcttccccatattttcttttctctatttccaccttaattttcttttttcatatatatttttttcctttttctgtttttcttccctatccctccctttctctgtttttccttttctttctctctctactcggctaggccaagccagaccgagccggggtgctaatgggcgatcgatcgccagggccattgcccagcaatcgcatccccccgcctccctcctatacgcagttctcccacttcttcccttcctcctccccttcttctcttcctattacagtaaaccacaaaaaagttttaaaaaatcaaatagttggaaaaatttatatatagaaatactatatataaaaaatttgaattcaaatttaaatttaaattcaaattcaaattcaaattcaaacttgaattcaaatttaaattcaaatttgaatcgggtatgtaaacttttgacttataaactttggatctataaactttaggtgtataaactttagatgtatatagaaaatatttgaattcaaatttaaatttgaatcgggtatataaactttagttctataaactttggatctataaactttaggtgtataaactttagatgcatatagaaaatatttgaattcaaattcaaatttgaatcgggtatataaactttagttctataaactttaggtctataaacttaactttaggtgtataaactttagatgtatagaaatactatatatgaaaaatatttgaattcaaattcaaatttgaatcggatgtttgaattcaaattaaaatttgaataggatatttgaattcaaattcaaatttgaatcgggtatataaacttttgacttataaactttagttctataaactttagatgtataaactttaggtgtatagaaatattatatataaaaaaatatttgaattcaaatttaaatttgaatcggatatataaaattttggtctctaaactttagatgtgtaaacttgaggtatataaattttaggtgcataaatttactaaaataggaaagtaatgcggtgacaaaaaaggaaataggtggagggagggaggggggagg

SEQ ID NO: 30521 - DNA, 2914 bp, Oryza sativa
tgatagtagtcttaaaagaatagcatttgtttcgaagacaaacagtattcttttcccctctttcccaactcacttctctcattttccacgcgcacacttttcaaactactaagcggtgcattttttgtgaaagttttttatatgaaagttgttttaaaaaaatcatattaatctattttttaagttttttaggctaactagaaaggtagcccgcgcagatgcgcgggcaatttatttattgtttacaaatataattggtaaattttgagataagtctaatggtttagaaaatttgaagattttttttcctaagagagtaggaaaggaaagaggagatgaggagagtacgtccgtaacagggaagggtgtggagaaggtgggtgcatatactttttttattcgatctaatagttaaagtattggacccaccaatttaaaagaaaatcaatggatagattttagagtgtcacttggcttaatccaaacaaattaaaattaaatcaggtctacttgaaaaaacacaactaaattgttttactttttcgcaattacgtagtacatttatgaagtgatatttgacatcctaaaatatgatatgaaattatttaaaattatcataacattaattattatatatttgcccaagatgtggtgatgtatttagaaccgcaatataaattttataagacacaaatattttatttaattaaagaaatacaaagggatcataaattgattatataatttaaaataatttaaaagatgaatgtttagagataattgatttgatattttttatttatattatagatctagtttatatttgcacatatttgtggagtaatatatttttatatggtaaaaagttatattttaaagaccattgattttggtctgacggtaatatgtattatcgattttaaattatttttaatctaaaatggtgggtttaataaggtatagagaaacagttagattagatataatatgtatagcttaaaataactaataactgtggttgtttttttttatcataactactaaaaaaatatagatcagtggagggggcagaaagtgttgtgcgtgtctaatggtggggtgaggtggaggggactttgtttttctatttttttctaaatcatttaggtcaaaaaccaattatcatgtattttgttttttagaaaatcttttttaattttaaagtcatcataatgacttaaaaaggtaatattagatacaccgatttaagctggacgatttaactggagattgcttggttcaaattagctacgtaatatcccggtaaagccatgtaaactgatttaattagctggatatgttatattaccgttaatttccttccacaaatcatgtataataactaatttaattagctatgtataatcttcgtgttaatctcctagctcccatatatatacacatacatacatacatacatacatacatatacatatatatatatatatatatatatatatattgccgtgcatataataaatatagctatgattagtagtaatacaatatgacagctaattaatctcaacttctaacaaccatagatactaatcatccttccggcaaaccatacatacgtacgggagaaaggtagatctaattcattggtataaaataatgggtccaccaatttaagtgaaaatcaatgacagataaagatctaatctaacaatgtaaaataatgggtccacaatttaagtgaaaatcgacagtgaaattatattgtgccatatggcggcctaggagcatttgtaggagcgccatgtgacggcttgaaagcgtttgtagaaagtttaatggacttttagtatataatagatagatacttaattaatctcactataatcgcgtgctttgttttctgtgtcgggaggcaaggttggtaaccatgcttccgaaagtgtttgtaggtgagatgtaaggtgactttgtttgaagcaaaaagtcttgagtttgaatttttcttagtacgtgtatatgaatatgggcacatgtatcatgtgatttgtgggaacgagagtatgaattttgcttaccacgtgtatatgaatatgggcacatttatcatctgatttgtgggaaagagtgtgtatatgaatatgggcacatgtatcatctgatttgtggggaagagtataatggtatagatgcctaaaaaatacatcaaatatttttttttgatttttttagcacctgcaaaaataaaaaacgggtgcacccctacacctataatactggttcaagaaccgacggtaattggtgccggaacctatatatgatataaacttttagaaccggcacattagtgcacggaagcaaggaatacatgtccctccgttaatatctcgttccatttatcggattggtatttcttatggaggcggtgtgctggtgcaaaccgagccgccgtcgtctctttgccctccggcgaggcggcgatacctccatcagttcgcgttcccgtagtagcgatctcagatttcgtatcggtctcgattgatcaatgccgcgtagagcagaatcggattcagaaggattaaccgttaatcacagcctctaagcaccgacttcaactcgaactccgtctccgacttgcttccttcaccgatttcaactcggactccgcttcggctgccgataaatcctagcgcgccgcccctcaccgtctccgcattcaccacaattccttccacccatcctcgcagcagcgctagctcgtcgtccatggcgcttccccgtcgctcgagtccccgctcctcgcgcccgatcatccaccgcgccgtcgacgccaaggggagagtagtctccaagaagccatcagcagggtcgcccgtcaagaagatgtcatccgcgccgtcgacggcgacgcccgtgt

SEQ ID NO: 30522 - DNA, 686 bp, Oryza sativa
tggagcgcaggaccaggaactgggtaatccgtttttgcaaggttcaatggagcaaccacgccgaggaagaagctacttgggaacgtgaggacgagttgaagacagcccatcccgatctcttcgccagttcttccgaatctcggggtcgagattgtcacgtcccaaaacgactctaaaatacatcctctaaattatgcttagaataattaaaatccgtgtgaaagcctccaacaattaaaaggtgcaaagttaaaagtcaaataaggcttgggggatttttgtatatttcctaaaagcctaaaatgcgtaaataaattttagtggaattttcagagcacaaataataattattaagaaataaacaaagttaaaatgattttataaagagaaaaactctaaaaagtcccctttccctccctctccctcttgggccggctcggctcatctccctccccctccctctcctctccctgcggcccatccggcctctccccgcgcgcgcgccgcttacgggcgggcccgcccgccaccatcgctgacgggtggggcccacccgtcatccccttcctcccgccgctcccgctgcctcgcccgcgccctagcgccgtcgccgccgtgaatcccgccgcctcccgccgtctccgcgtgcaataaagagggggaaatcactccccgtgatcccctct

SEQ ID NO: 30523 - DNA, 1190 bp, Oryza sativa
atgtgcccccccccccccgaatttttttatttttgttttatttgtttgatatttttttcacgcttagggacatacaagaaccaaccatagaaaaattgaactcaaatggacgtaatatgtgacatgtagaatttttcctctcctctcctctctccgaactagtgcagaggagagagatgtgcaacttttttatttttattttacttttttgatatttttttcacacttaggaactcacaggaaccaaccacgtaaaaaataaactcaaacggacgaaatatgtggcatatggaattttccaaagctccaccgaaaaacttctctcctcaaaaacacaatcttgcaagcggaatttggaggttttaatatcgccgaacccggcaaagcgggggagaattggatgtaactttttctgtagatgtccgtgcatatattatttgcctgattccgagtccgtatgagaaagttacgcctattttaatagatggcatattttgttcgtttcggtagagttttggaaaattctacatgtcacatattttgtccgtttgagtttattttttatacggttggttcctatgttctcctaagtatgaaaaaaaatatcaaaaaatgaaataaaaataaaaaaattgcatctctatgtactgtttaacttatatatgtcatttcatatggttatattttgaatatggttatattttgaattagattaagtaatttcatatagtggtagagtgcattatgtttaacatgctgatcaaagggttttactaaaggagttatggtctaattttagtgaaggtgcaaagtagactaagtggtatgctagatattttcagacttagctaagtggtagttcgagtttaaattttttttatggttggttgtatcgtgatcctgagtgtgaaaaaacatccgaaaaaataaaataaaaatgacaccgttgcaactccatacagagaaacaggaatggaggcggcggcactaggctggggcggcgccagcatggctggcgccctcctcctgccacatcggttcgcgtgcgccacggtggcaggaggacggcgccagccatgctggcgccgccccagcctagtgccgccgcctccattcctgtttctctgtatggagttgcctcggtgtcatttttattttattttttcggatgttttcgcacactcaggatc

SEQ ID NO: 30524 - DNA, 941 bp, Oryza sativa
tagatggaagagatgatggttccgcagataaaattttggctcatccatgactgagtctaatgaagcacggcataatttttggtaaagcggattcttggttgttagaagaggaatcaagtcattgagctgaggaatctttgttgttaattggagtttgaagaatcttcatttgtgctttgcacaggtgctaaagccaaaagttaactgctatacggtaatatgatatatcaaacccaagttggttggctaatgttgtagtgaagagaatataacgtggctctaaacaggaaagctggaaagaacgatatggttgggtggaatggattagtttggatggattctggataactcggttcaataagggcctaacgacaccaaatttgtgacttgaaggttagcttgtgtgtcgactgggaattggaacctgatgcatctcactctttgcttccgttccgtcaagcttcaagatttacctctcaatcgagtattgctttatacttgtctcagttgtctgatcttattgagaattgtaggatccaagctcgtgcatctcggagccagcatttggcaacaggaaaaatggctctaatgaacccagaaatgcagaaaagcggttcgcgtcatggtcctgtttctttcagcttgggattattataatccagattattagtagtaagctgaaagaatcagacaacttattgaagtagcttattataatctggagcccagcttattataatctgataagctcatttaggtgagctttttctagattattgggtgaaaaattacccaccatatgccaccccactccctcattatacttgcaaactcaataatctaggctctaataatctaggaaagaaacaactaacagcttattctactatagattataacaatctagtttatagtagattataataatttcaagctgaaag

SEQ ID NO: 30525 - DNA, 1088 bp, Oryza sativa
aaaaaaatctgcagctgatgggatcagctaggcccgggtggccgtttgaaaagttgttggcccgggtggccgtttgaaaagctgttggccgggtgccaaccttgtttcaattctaaagactgatacattgcacatactccgaccggacgagatgcactgtctcatccgtgtcgtttgagaagcactcacctagttgttttagaaaagagatcaaataaaataaattgcaaaaacaacagcctttccttgaagcctgcattaaacacttatttcccctggcttgctgagtactcccgtactcacccttgctctatataaatatcctcccccccagttgctgaagaagatgaagcaaatcctgctgatgaggagttcttccaggagcaagctggttacgatgagttttagggtttcagcctagttcccaagtcgcgcctgtgatggttggtccaagtcctggcttccatttcccttttgtaatgcagttgtgagctcgggatctgtccgcaccccaatatgactgtactcttactctataataaagagacctctgttgctgtgatattctatcttcctgtgataccagcactgtttcctgggactggtatcgattaacaggttaatttggaacgtcacgggctagttccagtcgggactagttcggggcgtgacaatagcaaaataaaatcataaagattcacgacataagaattatgttattagatctatcatgaaacaagctaacataagtgcaactcttttcatttaaaataattttagagtaaaatgtacgggcggtccttaaacttgtaggggtatgtcatctaggttcataaattctcaaaatgcatatctaagtcctaaaacttgtcatagtgtgtcatttaggtcccaaatcaccacaaccccttgagaatcctacgtggcggcgatgtggcatgccacacgtacatgacatggcattattttgactgacaaatgggatccattaattttctttttctctttttttttcttcttttctttttctttttcgttttcttcgcattcttcttttttttccttttttaggcacgggctacagagaa

SEQ ID NO: 30526 - DNA, 963 bp, Oryza sativa
attatctattctcgtaggaccaaagtgaaaaagtttactacataaggactaatcgcagaataagtggatttccaagggggttcgagtaagaatccgggtcaaaaacgggggaactgctttaaattcgcgcgagcacgatcgacgcgcacccagccacccacccgcgccccaaatcacgaggaggcgaagccgcccatctcatcgccggagctcgcgaattcgccgccgcgattccgaccaccgccgcgccggcgcccgcgcccgctacggtactccgccgccgtgctgagatcgccgggggagccatgtcgcggtccctgagcatgaggtcgtcgatgagcatgaggtcgcgccgcgacctgcctcctccccagcaggtgagggatccctcctctccccgtgccttgggtattgcgagtgtaacatttgcgcgaggtgcgcgggattcgctgttgcgtgcgcgatgcgctagtttgatctcggtgtttttcgaccttggggcgtagaggggcgagggggtcgattacccgactcttcgtggcgaatttgaggaaactagggttctagtaccgaatcatgtccaattgcgaatctcgccattttattgtgtggaactactagctggaaaaatcaatcgtaatatttctaagaaaaattaagattacttattgtggtttgatgatgataaaaaaaggcatcaatgatttactctccgcagtccgcaccacctggttgtgcgcataatcactagggccttgtccggttacgcccggattcaatccgggccgggaatgacaagtacagtaagaaatttatgatagatacaatgagagaccgggaattattccgggccgggagccaatttactcatgatagagacaataagagaccgggaatcaatccactagtcaagaggtgtggaactaatccggatgttttgttgtccctatcatgagtaaatta

SEQ ID NO: 30527 - DNA, 3095 bp, Oryza sativa
ggtataattttcttgcgatatatgttgatggtcgttattgatcagtttcaactgtcaatattacaaaaatagagaactagtgatgcttgcaatgcatacatatgctagaataataatattccactagtattaggtatactaacctcttgcagggaatgacactaaagtggaggagaatcgacatcaacatagacgataaatcaatcggacgatgtcgagagtcagacttatgaatgaatgggccaagaacgtagaattgacacgatgaattaggccaaaattcacaagtctacgaagtgaagcaacggaggaggccaccagccgaaattgggctggattgggccggccccaggttcggccgaacctccctcgcctccgttggatccaggttttggctggacggttgagatgaagccccaatgacggttggatggtattaccgaccattccaaccgtcacaaccgtcatagttcagctataaaaggacttcaccttctcacttcacacacacacctcaagcaatagctctctcatttctctcaattttagtttagtagtatctagctagtggaataggaatagagtagaaatcaagagtccggaagccgtcggaagagttcgggtatggctctagcagctttcctttcctcttttgtaagctttgtacttttattataatactcttctaaatacatttatggattgaaatactttccaagtatataaatacctactttacattatgttcttgttatactaaatatacggctagcttatctgggagatgctttggtgcgggtataatgtttgcttatgcagttactctatgtcatgacgatgatattggagtagtatctggtagtttagacgtggtgtctagattacgggatattattatttggggttatatattgcggatgagaggtgggccgctgatggtgacagctcagtacgtatttctccacgccgatatataatcctaagttaattccctgaggagagtattcctccatatttagccccggttgtatggtcatgacgggctgtcgtaaggaactcgacagtcaggggtggcttctcaaagtaccaggagggcatcggatagagggtattagctagtatatcagttaactagaatgtatgtatactatgtatattaaaagtataggaatagatcttctttctcttttctttccacttagctcagataatatattatgagaatgagaatgagtagtaatacttgtgtgtcactctacccttggattatcttaaccactacttagaatatgattatcacaagtaatatataaattattagttgagttctctctacatgatctttccacaggataaaataaatacgatacccttggaatactctccggtgaaatgctacaatggtatattcgtacgcttgcggatgaactctgtaaccataatataccaggagtatttctgcaccattgctgagaattatatttctagtaatgtcgttaagaaataccaacaatatattacaaaatttgtaggaatggttaatttattactacctagatagcctttccttaaattttctgttattttaataaaagacaatattcacccctctagctctcccaccacaaatggggatagtacatttgatcaggattcctttccacgaagtggttgggagtattcatagtaacagccaataaatggagaccatcaataactataatcctcagtgacgggccataacattatctttgtggggccgtcaccagtgcggggttaggttgcggcttgtcaatgataatctttatcgggccgccacctatcctcatcaccgatgagtgtcactggtgacgggtctggccaagaggcctatgatgagtgcctatatggttgcttctatatcggggtttattccagcccgtcaatagtatggcctatgtgacaggtgataggccccatcacaaattcctcattcacgactttaaattgattatgtggttacatatgcttgcctgactaatactatggcagattaggaaatacttagatgttagcactacaatggcatgtaccgtacacataatacatatgcgccggagctaaacctaacgtgccttgggaaattgattgacttgagaaaatacaggttgtctacagagtatatcgagtgtacttcccgttatgcatagcattgtacacttcacgacataaattgtcctatttgaaatcccctctcctactcccacctctgcgggaaagccaatctctccactgcatattggagttgtcctttatcataaaacatctattcaatttgcacctgcttacaatcatactgttattgggcaccaagaccatcattgacccttagacgacacatcaggaagtgtcacgaccggaattaacccaacgggcgttccttacgtgcgtgtattattccttatcccaggaggcaaggtacaccaaaagttgatacatttcagagtttatcaagcggaagcgtaaatagttaatttattacatgggcggcgaaggcccagcacacacaaagacaaacgagaaacagcggaagactagggcgacgaccacaggcgcttgacggcaggcacgagctagacaccaaagccttcatcttccaggggctcctcttctgggtttgggaaaaattgagcaagactgagtacaaccaccgtactcaacaagacacacccacaagtgcaggataaatgcaagggagtacaagggggttataatataaagggttagagtttgcagtaaacagcattaaaagacacttagttgctcaaagctattttgtaaacacgattccagagctatacaatattattaatcaaggccgtgaacccacacgaacctgccttaacccaaggcctacgatgattcagactcaactagcaacccgaccctgggtcccagctcgtcccaagccaacccaggccaaccattccacattttagttgttaagcaggttttaagaattaaaacactaacttgggtacattgctcggcttgcccataaccgagggcgcggctattcgaatagattatactctgatcagaggtgtacatcttta

SEQ ID NO: 30528 - DNA, 1094 bp, Oryza sativa
ttcatataaccgtaccatgtaataattttttttaggtagtacatatatacgtacattcctctccatccatatgcatagaataggaaggatcttttttgtttttttttctatttatgaacagtacatcgtacctttctctccatccattcgcatcagatccatattagaaggaatgattttaatagatttaatttaatggcctgaaatatcggactcactaatttaagtaaaaattaagggctatatgttttacttttttctcagaatttataggattttctctaatttattagagtgccactatagcacacaacatagtgataggttgagagcgtttgtagggagtttatttgatatttactatataatagatagttaatatagcatttcttattatttatgtgctgagctgctagctagaaaatttggataaaatagtgagcaggtgatgtaacaatgatatgatgtttttctttttttctcagaattttttagatttctctaatttattagagcgccacgtgacggcttagtagcgtttgtaggagtcatgtagcggcttaagagcgtttataaaaagtttagtggacttttatatataacctggttttttcggctttatctttataatttccgatcttacgatcgtacgttaagttcttacgaacgtaacatgtaatttgttttttttctgtgttttaggtagtacatacgtacattcctctccatccatatgcatcggataggaaggatcttttttggttttttctctgtttacgaatagtacatcgtaccttcctctccatccatttgcattagatccatattagaatgaatgattttaatagatttaatctaatggcatgaaatatcgggtcctctaatttaagtgaaaattaaggctagatgttttgattttttttctcaaaatttgtaggattttctctaatttattagagtgccacgtggcggcttaagagcgtttttaggaagccacgtggctgcttgagagcgtttttagtaagattaatggtgtcgacgggtgatacccgtagaccggatatagagggtattggggtacgtttgtacaaggg

SEQ ID NO: 30529 - DNA, 5817 bp, Oryza sativa
caagtatcatatattgttcgtaggtggtgaaacatagaagatatatatgattggtagattctttaagtttctgatttccagtgtacatactaattgctgtgtgaatgataatagcatgaatgatatccatgtacgagcgcaattccatgtttttcacgaaatagaagatcatgatgaggaaaatatgaattaccagagcagttgcgggtgacattctgccatgctgtccataataaagctaaataggaaaggggggtgctaggaaccagagcagaagggaagttaggaatatcttgcccgattaataatccatttcatatacgtgccggatatgatttactgattgtaatctcgagtttagcccaaattctgaatacctaccggatactgaaggttcatggattgtttgatttactgccaatagaaatatcggcaaaggggcaagaaaatctacatgtttttttttctttccaaaattttggcattcccaaattttcagtagcaaaaacaaatgaacatttaggacattattcccacagtatttttttatgtaaattactgccacgtgaatttcactaaaggaaaactatttacatagaggattgctatggcacgggattccgttccaacgggatactttatgaatcttccacctctcgtcttcccaatggtcaagctccaatgttgaagcaacagcaacccctagcctcttgcccccatcgaccacaacagtagagggaggaggaaggcgtcgatgagagggagaagagaagatgagacaacaacaattgacttgctggtcagccaaacggtaacaacgcactctctctctctccatgccttgactctaccggataccacatgtacccgaactaatacctaacaactgatacctatgggtactggttggtacctaaggtatcaggcacgatatcctgagatgaccttggtaggctggtacctgggtaccaggcatgatacccgaggtactaaacctagtaccaaggtatcaggcacgatacccgaggtaccaaccctggtacctaggtatcaggcacgatacctgaggtactgatcccctgatacctaaggtaacagttgtaacatacctatacacaacaccggtgagtaatgaagaaaaccgacaacctctcatccatttcatatacttcaaggtcaccatctatgtcgataccggccgcatccaccttcctgtcggtgtccagggcctttccttctcgtcacacatgacaacccccaaacctcacagccatagttggctctctcgcatgccctctccaacctccactctctcacatgctccgaatctggtgtaggaaggaagaaaagaggataggggatgtcatcggtgttgacggtcgttacagacaaatttcgacgttcaatataactaaaatattggagaattagctatgcttgcaatgtatatttatttcagaaaaatatagttccacatgtacttggagaataatatgttgcaggaattatcaaataaaataaagagaaagtgaagaaaacctcactcctaagcaagcttatggataagagggcccacaagtcaggtgtaactgtctggaaaccgccttaactaccacaaccgcctaaaagacccatctgtcagtgagcagaccgaaactggaggcctgttgggccggcccaggttcggccgaacccgaaacctggcggtgcccaaccagcttggccctccacgtgtacgctccagatgctctctcaatgtcggttgcaggggcaaaatggacatttcccatggctacaaccgtcataactgccctataaaaggaggagctcacttcacttctcaacccacttaagcaagctcaaattcctcttcatactttagtattagtatttttgtgctaagtggagtagagtagaatagtattcgaagtcctcgaagtcttcggaagagttttggtagctcttgtactctcttttgtaatactttcggaattaatgaaatactcttatttatgcatctacggtactttgttcagtctgagtactattcaaaatttatatctgtgtcatactaattgtgtgggtagcctaccagagaggtgctatggtgcgggtttaatgtccaatttatcggttgctctatgttgtgtgcacgggtgtagagtagcatttagtaatgtaagcgcgatgctaagattattaaatatcattaattgggcatatatgatgtgggacagtagaggtgggccgctgatggtgacagctcagtatgggtattcctccacgttagtatatattcctaagacaaattcctagggagggtactcctccgtatttagccccggtcggatagctattacaggttgtcgtaaggaactcggcaacccggggtggtctctcgaagtaccaggagggcattgtcaggggtataggccacacgattgtatgctagcagatgtaaattagggattgattgtatactagaagtataggaattgattgctttctatttcttcttctacttagttaaaattgattatcatgaggatttgaatagcttcgcttcgtgtcactatatccttatattaaaattaacccctgcgtagactttgataagtacacataatatatgtataaagtgtattagcatagtccacttctattatcttccctttggataaaaaatacgataccttggaatacttctgggtgaaatgctacaatggtatatccgtgcgcttgcggattacttctataaccataaatatacctggactgtttctgcgtcattgttgggaatgaatatctctagtaatgtcattaagaaataccaacagtcgacgtcggagacgatagtcttggagtcgaggagggagaggaggaggaaggccatttggatggaagagtggatggaggagtgatgaggacacaactagctcggatataaccatgactaccttatgtattaattaacaaaaggtgcatatgttctatattagatttacttgttatatatttgaacaaacgttgctacacaattagttttgtgtgttttcatttgtagaggtacttgcttgggcgaaaaaaaagagaccgagcatacggattgcatggatgattgaagaagttgattggggaccaaaccaacaccttctccaagtcttatttcatatcaccatgtcacttttggttctacacgttttggattcggattcgagtctcctgatagcatcaacttcaaacggacctagctgctgatctagaaggatttcatggccaataagtacttgttggaaagcttatgaagtctactttcagatggttttggtcccacgtcagaattcctaccgagccacgtacctcatctagtccgaatctgatttgagttttggaccttgtagttgtgtcgtgggcttaacccaagggggtgtgcaccctagggcaaccctaggacgtccctaatcatatttattcagtagccatcatcgtctagagtcgggttttgcttacattaatctgtcaagaatagtttcgccgcttgatcagtttgtggaaccccaaattcaagtgcttaatcattcatatgcaatttggttgcaatctatcttattcttccttgtgttcttcgtttcgcatgcagggattagccttctcggcgaggtcaaccgcgtttcggcatagttgataaccagaggagatgtggtgctgcaattatgtggctcagtagcgtgttcgttcagaagccagatcgagttctgtcgcgactccacccaaatcaactatttatcaatacctaatggaagatcggaacctaacatccttatcagttggtatcaaagcgcgattacccgttaggtaatttatcttcccacaactagaaaattgccacataaaaaaattttattctttacctaaacaatttgagcaattgcattgttgtattagattttgcttcgttgaattttagattgcatcatcgtgtcaactgctggtttagttctagatttaatttgtagttttgagtattgcgtctgtcatcacattgagtctagggttgatcagtcaagtcggtgtgagttgtacgtcaattttgggtccagttttgcatttcgtcggttgttgccgggaccttgaaaaattgaatctaatcattgtcgggtttccgtttttgggatttggagaaatttttgtacaacggttttggagttgctcgatttcaggagttcctttattgcagtcttagtgcgcgtgtgaggtagaggaaatctgatccatgctgtgactagtcccacctctcccgtccgtagcattaaaattgttaagtagcggatttgatatattttaataaaaatggaacctacgtgatgtgagcattccatttttgaggtgatctaattttagttttgtactttgcatttgagtccctgtaatattcatatttatatttgagtccctgttcaaggtcagtggtcggttcttgttgaaaaaaatagtaaaaaattgaaaaaaagaacaggcagaaaggtgcaaaaaaaagaaagaaaaaacggcacctaaaaaaagaaaaaaagggtagaaaggtgcttaaaaaaagccgcaccaagaaagaaaaaaaatcatttatcctttgagatgttttcagagtgcagagttgtgcatttattcatatctagtccgtagtgttgtcgggtgcttgcttgagctagagttgagtctaggctaggccagcacattgactagtactttgaactattattcaactttgcattttctgattagcataattgtgttcctttgctactatatattgtgcctcccaagctccacatatatacttctggtcagcaccactttgatccttgcaatcgccatatcacgtccttcaaggtgtcacgaaccaaccaccgattgtactgtccttagcacacttataagagcttggtaagcttggtatgtctgataatcttcttgagtccgtgtaagtatgttacaactttatcactaccgagctccacatatcagcctatagaatagggataagattggcacaatctgccttggtgaggatccacaaagacaaaaacatttgagtggcaagagagagagagtcaacaagaggaaaagagctggtttgcgaaaattgataaaaaaaactccaagagtctgacaggtgaagcaagaaggactggaatcgagatcgttccatttatcaattacccaagatggtaagttagccactgataaagttcacaggtacaggtatggttttgaataatttatatgcttgaattatatcttggagaatttcattctacactgacctttactcaaggatgagtaaagagctaagtgttgggggttttgttggcggtcattaaatgccaattctataccgccaacatctgcataaagtctagataataaaatatccaacatagtgataggtgttaaatctcacataatccatatgtgttggtatttatttgatgcatgtaataaacctaggagttaggaggaaaattggaccaaagtgagagagaaacatgtatccatacaaggatgggttgtgaacttcatcaaaataccggagaatcagtccaaaattcacagaaatagataaggacgaacaaagggagtccataagctggaggccaggccatgagggcccagcccaggcagttcaggcagaggtttggcatggacgtcccacattactccctgacgacggttgcggggcaattcagacaattcacaaagaggacaaccgtcgtacctgcctatataaggacatcatttcctccactttcacacacactt

SEQ ID NO: 30530 - DNA, 3033 bp, Oryza sativa
tcctgcagccctgaataagttgaccagacgttcctcaactttacgtcaagttcgtataacatccctataaaccacagtaccagaaagataaaagtacagcgaaggtccctcaacttgtcatcgagttacaaaatcatctcccaaccacaaaaccggataccggaggtccctcaactaacaaaaccgttcgcttgaggtcctctggtggttttgaccccggttttgtctgacgtggcgggtgagtcagcgtgggcctcacgtggaccccacctgtcagcattgccacatcagtcttctctcttttcctctgtggacccccgtttttataacaggaatcattcatgtaaacagtaccatttccctggatcaagtagtctggtacacaagttcatagctgaaataccaaaagcacatacacgagagtctagtgctaattattacatcataagcccgcaggcattgtcttaaatcatcggaccgagcggtccggaatacatccaacagaaatagataaggcagcggaattcaggcagcggcatgccattgccacaggcaacgaccgtactaagaccctcctggtagtaggcatagggatcctccgaagcttcatctcccgcttctgattaattttatatttgcaagggtgagtaccaaccgtactcagcaagtcaccacagcaacaatgcatatgaaaggggtatttcaaaggatggctatggctcttttgcgctaagccagttttgtaattcttttcacaaacctaagacctagcattgactgatcaaattttagtaccagtgtttgtatttaaacaacgacggttctgtccaccatccattgtgatcccaaggatagcttcccgccattgagtcgttatggttttctgaggacgcccaccttcccccttctcaagaagtggctccaacagcataaaaattcgtcatgcaacaacccatcccacacaagttaagaatttagagactagccaagtgtaatacatgtcctggtgctcaataaccgcgagcacggctattcgaatagatttggtttactcacactgcagtggatgtacactttacccgcactccgtgactgcccaacatatgagcttcgtcccaacacatgagacgcgtcacggcaaagcttttcgataacctcgcattggcagtatccgctccatgaacttaaatcctcatgcactctaggcgtccatgtttctagcagtgtgaggagttctggcgctcccgggaaagagaagtcttacacatattaaattatggttcaagttaagttctctctctcacacactcatggcagtcctaccaatggcgacaccgatgtagggcacgcctctcagccctacctcaacggctgtcccatcgtagcgcacctgcctcactcaggggtgaaccatctatgcagggatactgctccgctcggctatctaatccgctaggtctatacccattcgagaagtacggttgtatgggggtcgtttcatgcttaacttcatggctcggtccttaattgaccggggacggtactagcctttcctagataccacccaaatcctccgtccgccccagtcgaaaataattgtttaattttatttctcctttcacaaatcatgtcatcaacatcatggcaatgtggcgctcatgtctccacatgccgtatctcaattaccttcccaaaagtaattgcccaagcatcatttgataaatatgagtatgcatgattctagaatagcatttctaagcaattgtcataatcgactagggactcatacgtaaatatggttacgaaggaacaaggggcaaacaataatcaaggcatggcataatcacaagtatgatgttcatcattgcatgcaattttatttgtaaacaaaacaattttgcaattgggatcaacatgttcaaggaatagtgatgacttgccttgctcaaagtcttgcgggtcttggccttcacttggatccgcaactccctcgggctctatagttatgtgcgaaaattgatttgaattcggttagaattcaaataaaaatccaaataaatccaaatggaagtcgaacgcgtaaatcgattcttttatattaactttacttttcgcgaactagggcaaacccaatttcgatttttatatcctaaactattttgcgggtataaatattttgttatcataagtttttaatttaatctacccgagcattatatccatataataggttggaaatttctatcgcaagctaaatatcggacagaatcctaaaattatcttataatattatacaattaaattttagtataggactaaacgactaaatataatatacgtctaaaattcctagtgattaaatccgaatttctaccgtgaatcaattacttatagagattacccaaaataatctataatagtctataagaattcatctaatcgtttagttcttaattacatttaaactactaccgcgaattgatttcttgtagaaattaccaagaataatccataatttatattaaatttcgcaattctacgtctataactagtctataactaaatgctaattattttaaattttctaaacttccctaatctccctctaatttcctatctatttcccttttctttttcttcccttctttttctttttccttcctttctttttctttttttttctttctctctctcttttcttttctttttccttctctctctcccttttcttttctttttccttctccctctccctcccggtttctctcctccttcctttttctttctctccctcggtttctccctctctctctctctctctctcggctctctgctaccaggggcggcgacggcggccgagcaagtggtggaggcagcggcttaccgacggcggtggcggcgacggcggcgacagcgacggtggcgacgtcggcgcaaggtgcggcgcggcgcggcggcttcgtggcggtggcgcggcggctctatgcgacggcgcggcggcgtggaggcggcggcgtggaggcggcggcggcg

SEQ ID NO: 30531 - DNA, 1733 bp, Oryza sativa
  unsure (1)..(1733): unsure at all n locations
ccatgttaactgaanactgatttgcaacctccnacccggcgatctcttagagtctacctggaatcaacaactgaaattctagctcatctctaatgactattaattacttacaagcttcaaggttttattttatacggactaaaagggatcttgtccatggaaattacaaatgccatgctctgggtaaactactctgttacaaagacgtattgtccttgttagtgccacctatatgcaacgataaatacctggcatatgctgaaggagaaaatacctattaaaactccattcggcactcatacttatcatacggtgtgaatggctaaataatgcgggccttttctttattactccacctaacaaacatatgatgtactgaacagctactcatgcatacaacgccagggttaacctaaacacgactgagcaaacatacctctactaattggaatatcactcaatactggcaagctacagaaagaaccggctgttaatttgatgggttggattatcatgaccctagattatgttgagtagtccatgctaatatataaatcagctaattggaaatactatgtcgctgtttgggggagcttgtcccagctgtagcttttcccaaaagctgcttctgctagaaactgcccctaacagtccacagcttttgagaatatgtagttaaagattctgaaaaataaactaagaagccagaagctgggtttcagagcttttccagattcttagaagctggctaccaaacagctacttttcagaatctaaagctccccaaacaggccctatgttttctagcttgagccaactcgatctggctcacgagcctcttcacttgaacagttgcgaaacagacaagcaatgatagacattggagagattgaagcataggtggaggccaagtctagcgcaccacgccccttacccaggcattcgaacttgtgactcataagttgtaaactacacctgcgaggacaagctggcaaggagcggcgacgttatttccaatttcaattgagggggaagcgactagttggttgcgttgtcagcgtaggcgtaagtcaatattgtgtaatcgtacaaatgtggctcccttctacgctattttctgtgtgcatgacttggcggtgtagcatgagtatgcactcctgttgcgctgtcatctgccccaaaagaatagagagaattagggtttttactagtgcttatctttgagctagacaaataaaccaaactataataggctggctagcgcgagctaccgaataactcatgagctagctcgaacccagctcattctagaaatgaggttcggaggaggctttggctctgctcgtttggctatcgatcgagccaaaccaaaccaatataagcctgagtgttttttcctacccctacaaaggtttaaactcttaccataagcacagttgaaggctatcacaaaatacaagtttggtaactagtactccatttcaaaaaatagatttattctcttttcttttcgaatataagttgaatgaaattacgtggtttctttgaaacgtcagaaatcagtttaaataactctttacagcgtcgatcgctctgtccagctaccatttcacaatttttatgggataatagcagcatgaccggtagacacatgcacatatcacgatgatatcatatcttttttcaacgaccaaaatgaattttggtcggtataacgtggttgcacgcatatg

SEQ ID NO: 30532 - DNA, 3384 bp, Oryza sativa
atatatatatatatatatatatatatatatatatatatatatatatatatatatatatatatatatatatatatatatatatatatatgtatatatatatatgtgtggactctagactcgtcttttaatatttcttttcttttaatttcgaattttctgtaaattgtatttctatatagactttatgctcttcttccaatattatttatttttatttctaaatttttattatttctaattgtatttctatgtggactctaaactcatctttcaatattctttaattattaatttcgaatttctgttacttctaaattgtattcctatattgactttaaacttttcttcccatgtttttttaaaattttaaattttagttatttgtaaattgtattctatatggactctaaactctacttttaattttattatatttattttaaattttagttagttttaaattcctatatggactctatactctacttctaatattccttattttttaattccgaatttctattattttcttaattgtatttttatatgaactctatactctacttctaatattccttatttttaattccgaatttcagttatttcctaattgtatttctatatggactctgccttttctttttcttcgattaatgtgaaaatttctaaaccatgagagtgaacgtggaggctcatttttctatttctttaataatataaagatttttaaattaatcctttaacttctcaatattaaaaacaagcaaatgtaaatggataagcacatataaaattgaattggggttgatattctctatagcaaaagagaatgggtaacacattttgtgaaaaatatatttttatttatttcagatagtataatttctttcatccttagcaaagtacaggaattcagctagtcataaaaaaagactcaaaatttatacaaacaaattactgttatatacttgttgttgacggatcgttcggaaagggcccacctatcccgtaccgaataagaagagaagagataaaatttgctcgtgtgacacaaacaatttttttctttttaccaaatcaccgagggatagagttttcccacctgaattcattccaaacgcgagaccaagagttacgaaggtttacatagggattacatcataattaagagtggaggggggtaggagaaaatggcgttgatggtgtcgttcaatgccacaaacagattttgattttaaatatgagataaacccttgagtcctacttgaataaaagggataaatcacagaggagagaggacatttgcgataaaacccaaaatctaatcactcgatcaattaatgtctagccagtgttgatagcgctacgagggacttaatatctccagccagtgtcgatggcggacttcgctaccctaacagaaacggtaaatctaattgaagaggcctctccaattagtcttaaccagagacacccacgtgttaatactttatgagttttggttattattaatccattaagcaagtaggggaaatattcctatcatctatgcttcaaataaaattttctcttaaattaatcatccgatttacaatccgattacatcattgtgttcgtaataattaaatctttacaataaaatctcacatgattatactttgatgaaaaatcataaattacttttatgatatgtctaacttacttttagatttcagtaagttacttcttagacatataaaagtaaatttagtaaagcctaaaagtaatttacctaaattatagaagtaacttataacagaaagaaagtaactttaattaatgcctttttttcattgaacaaattatcatatatatatatatatatatatatatatatatatatatatgttacttttagatttgattaaaatacttcctatacattcataatgctctgaggtgattacttttattattattttagttaattccataatttgtgctgattaatttattttctagatagagtcatgtttttatctctacaacggatttacttcaaatgacatgctaaagttacctttattttgttctaagttacttttataatatatgtaaattaattttaggttttactgaatttacttttatatatctaagaagtaacttagtgaaatctaaaagtaatttagacatatcataaaagtaatttgttatttttcatcaaaatataatcatgtgagatcttgttgtaaagatttaattgttacgaacacaacggtataatcggatcgtagatcggatgagtagtttaagagaaaattatatttgaagtataggtggatggtgcctctatatagagtggtagctggtttagacaaatcagctgcgaccagcgcgcgacctcaagtcgatcaatgtgcgacctcaagtcgatcaagctggtagcctagctggtacccccgtttttcctatacggtgtaactaatggaagaataaagatcgcggcttcagtagcttcacaagaaaactagttagatcaatttcgttttagcagagatgatcgtgtaagactaaggctaaatcaaagtgaattggactcttaacacttccatccgagcgtgcaaacggcaaacatcagcagattggagggccaccagaaaggcacatttaaccccatccctttctccccttctttgttccttgcttgccgaccgagaactctgatcgtgacggggccagaacaaaccggcactacgtacactgaccggccgcttggactcggatgagctaattaatcaatcaatcagtccgatcgagagtttttattttcaattaattcctatcttccgttggactttgacgctttgattagaaattaatcgagtttgttaatttgccacgatcggatccgcggttgctttcagtgtggaacacacggcgctaattaagacttaaaaccagtagtagatattaattagaaggtgctttaattagcttagccactccagctccaatgcctagcttaaccacaattgttctgatcacgtcattgctgcagctagctagtactacgcctgatgcctcccaggctcccacccctctactgtgttctgccaccgttgacacgggacatagcccaataaaccaacgaccagatacatagttaattagaagttaatttttttttaagacagagacaaagtatgtatctatcttgacgaaacatgtgccacttaatccttgattggagaacacatcaaaatgggcaaaataaacgtacatgcgtacgtacgttgagatagctagtgtcggtgacatggggccgggggtatcgtgactagaggcttgggtagccgcggtcacccacgtggcctgaccccctcggggggggggggggggggc

SEQ ID NO: 30533 - DNA, 2781 bp, Oryza sativa
gtgataaggagtgagaatgcacatcgttttccgcgcgcacgcttcccaaactactaaacagtgtgttttttgcaaaaaatttctatatgaaagttgctttaaaaaatcatattaatctatttttaaaatttaaaatagttaatactcaattaattatgagttaatggcttatctcgttttatatatcttttcaattttctcaatccccttcttctcaaacacaatcttagtggagcttatacggagaagttgcaactgaagctcccataaacatttcggcatgctatttctgctgcgctgctaaccccgttcggtggtgggccccttctgtcagtcaccttccaattccccttgggcacttccccagtggcagttaccctattcattttttttcctcttcccggtcacaactccaattttgaactccaccgccgccatcgaggtcgtccgcggtccgcaccgagctccgtggattcctccgccgtcgccgagcctatctgagcgcgcgatggccacggatccgagaggtcggcggccgcggcaccacgcggcggtgaacgaagtgctctcgacgctcgccgccgccaacagcaccctcgccgacgtgcagcgccgcctcgacgccgacttccgcgccgcctacccggatcacgtcagtaagctagcccctcctccttgctggattctcccccacccccccgcgcggcgaggctgatgcgtttcgcggtctccccgcgtgctgcgtttttttttttcaggcgaatccggtgaagctggtggcgcggctgaagcggatccaggaagaggtagcggcggtcaagggactctgccgcgatctgctcacccagaagcaggttacccaaaacttcgaatcgaccaccaaatgcgcgggctccgcccttcttttttttttttccgcgactgacgcctatagtgttcgttgcgtgcacaggagttgatcgacgcaatgcggacaagcctcgcggtgcagcgcagcgccgtgcagcggctgctcgcctcctccgggctgccccccatgtccgaagaggacgccgccaccgacgccaatctcaaccaggtgaattcacccccaccgtcccctcctccagtcattcgtcaagacaaatctaacataattttaccaacctgtgtgcgcgcttgcagatcatcgatgagtggacggcgcatgttgggccagacacaggtcatcttctaccttgctctgctgttcgttgcagcgattgttactgattcgtgattggaaactgaccgcaaccgttagttgcaaatgctttgttactgattcgtgactggaatttgactgtaacgggtcccttttacaggagatgacaaggatgaggataccaaccaaatcttcttcgccgctgtcgtttagagcgagtgagagcggccacaacctagagcagaattctatgcaaagtcaggaggtctcatgctctgctgctcatgtcattgttttgtgtgttttggcgagaagagctgcccgtgctgcagcatgcggtctcaatttgcagatccatttctacaatgaaggccagcgtactggagctggccgcgatggagattctacttcacacatctgttgctgttgtggagagaattgattagaaaatcgtagactttgattggattgcggtgtggttagcaggagagtataaaactgagagcctgttagctcctctctcgcttttctttttgtgtgtgttattttacttttctcatactcaacctttgtagaatatgctgttgaatagtacaaagtgagggaaaaattttgcttcgtataagcaggttgatgcagattgtgatatgcttttttccctcttttttgaggaacagttgatgatgagtttgtcaacaaggaattgtgttgttgagtgcacacgaaaactgaggatttcttggtttgggaaagttattctgtgcttgcaatctcctttcaattctggacaagaacacttgctctgagcaagagcccagcaaaaaaaatcgctgggaacttccctgaacaaaagatacatctcagatagtcatgtactggttttgaaaaattatactacaatttctctcttgccatcatatagagcacagatagacaataacctaagctactaatctgcgcactataaacaggtacctgaacacaaacatcaatatgaaaataaatacataacccgaaacatgtaatataaattaggggcaattacttatttgaccttgttttgaactgtaattgccgatttgaccctactttttgaactttgcttatttgacgctccttttcgagtacgaagcttccgtctgaccctctttcgctgactccgttaaggttcaattttaaaaaaaaaagaaaatgtttccagagttcctaatggcaaaaatacactccaaagccaaaccctattctgactctttctctctctctctcactcgcgcgtacctctctctcacttgtgcgtgcgtgcggcggcggtgagtacgcgtgcggcgggggctagctaagggggcggcgagctgagggggcggcggcggcgtcaagcacagccccgccggcgcccgctcgttgtggtggagggcggcggtagcggcgcgtccggtccgggtcggcgccgatctgtggggggagacggcggcgagctgaggcagcggcggcgacgtgatgtacagccacgccggcgcccgctcgtggaggtggaggccagcggcggcggcggtttgatggggcgcggagcggcgccgatctgagggggtgagggcggc

SEQ ID NO: 30534 - DNA, 673 bp, Oryza sativa
  unsure (1)..(673): unsure at all n locations
tctgttttttgtttaggttntagttgaaaatgaaatttttttattcccctcttgttgtagagcatgcaaattgatgtggacaatttttttttaaaattacacagtacaatgcagacaattcactcctaagaatgcacgcacgcaaaccctagattatatattttgctaatacttgttatccttggtaattatgaagttctccttcactagttcactgtgacttttattattttggtaacctctatatccttttgggctttatctcccaccgttactcgtgatgaactataaaagttgccaaaaatatcactacttagtactccctccgtattttaatttatgacgccgttgactttataaccaacgtttgaccactcgtctgattcaaaatttttatgcaaatataaaaatacttatgtcatacttaaagaatatttgatgataaatcaagacacaataaaataaattataattacataaatatttttaataagataaaaggtcaaacgtttgtcaaaaagtcaacggcatcgtacatattttaatatggagggagtataacattgcttataaaggggccgggcacccctctcaatttggctctagcgccgcccctgcgagccgtggcaacggacgatgggctacgacaggggacgatggaggctgctcggcg

SEQ ID NO: 30535 - DNA, 714 bp, Oryza sativa
cctcgagtccgagctcctgcatcgagcccacccatgtcatcgcccctgcgacaccactaggtcggcatctcacctaccaagctcgggccctagatcagcagccgcctatgcttctcgacaaccgctgtcactgatgccaccggcgccccaccgcacaatagatttctccttgatagtagcgacctctcacctacctcttcctccctccctccagatttgccactatggttgagcttgtgcttgtgactcactcatcgagtagccgagttcgccaccaccgcttcctcgctcctcagttacagtgtgctcgctcacctccgccgtggttcggcagagtaccctctagcctctagagcctatgccttgctccgactacccacaccacgccacgctatagctcgcgtccctcagttcactgcccgctccctccctatcgaatctgaggtgctgatggatggccatggccaacacttgctggagctcttcctccactggcgtctgggacaacagagatagaatggggaatgttgtggagagtggagcttgataggtgcggccaacgagttttttttaaaaaaatttctaggtagatgccacgtagatcgacaagtcaacactatgtactaggtcaatatctacctcatccgaaattgttgtaaaaactgggggtggcaatttccccgttgggtccgaggacccgcccctatggagccg

SEQ ID NO: 30536 - DNA, 2529 bp, Oryza sativa
accagctcggcacccaattgaataagacaagtggccaaacgttgtaagtaaaaacttaaaatcccttatattatgggtcatagggagtattaaacttgctcgtagtggtctgaactattgaccttgctgtaaagaaattgtacggacgtgcgtggcaatccatgcatgccctgaccgcccgtgaccagttgcatagaccgtacacgagaggacagtaaatactgtagtactatgaccgttgatacagcttgctgccagtctctcgggtccaatcgaagagctctgtaccaataaagacaacgtgggagctattccgaggagaaaaaaaaacagtgatatgatcgttggtacagcttgatactggagtaccagtctgtggtcaaattgaggagctctctaagagcagctataggctataagccagctgcaaacatattttaagtaggtaaataagaagagagaagggcagcgggctataaatttatagccagctgcagcacggactccaagacacagtgtgtatgacaggtgggaccaggtattaatagtgtagtatataactattatatgaatgagctattagattggctataaatgaattggagctagtagttggctatactattgaacttgctctgatactcccttcattttataaataattcgttttataatataagatattttgatattttccttctactgtttcaccactcatcttatttaaaaagtttatacaaatataaaaaatgacaaattgtgcttaaagtgctttcgataataaagtaaataaaaaaatataaataataattttaaatttttttaataagataattggtcaaactgtgcaaacaaaatattaaaattttttatattagaaaacagagggagtaatgaaaacaacgtggcacagctattccgaggagaatttttttttcaaaaaacagagtagtactagtactacttaccagtacaccggtttgattataatattccttgctccagtccaaaagcgaacggtctccgagtatctcctccctccgttccataataaatgcagttttacactattcatattcaacgtttgaccgttcgtcttatttgaaattttttaatgattagtatttttattgctattagatgataaaatataaatagtattttatgtgtgactaaatattttcaaaatttttacaaatttttcaaataagacggacggtcaaacgttgggcacagatatctacggctgcacttattttgggacggaggtagtaattaaggtgtgtttagattcaaaatttggatccaaacttcagtccttttccaacacatcaacatgtcatatacacacaacttttcagtcacatcatctccaatttcaaccaaaatccaaactttggatccgactaaacacagcctaactttggttagtctatataagcagcggcagcagcctaagaatggagggctataagaagtctgaatgccgatgtggatgagagaggagaggagagagatgagaagcgggctgtaagtttacagctggcttaggcacaagaatcaagaaaatctatgagacaaacaggtggaccatatatttatagtgaaaagttaactattatatgagtaagctgatagatagactacgagtaagcagcttgctgtattattatccttgctgtaattaagatagaacaactgcagctagcgcttgtgtctgaaactctgaatatacctacagaaattgaaaacacccgaaataaagagaagagccctttgattataccacagaataccctcaacaaaagaaagtttcacaagaggtctaacctcttgtttatttttctatggaattgatcatatgaatgcaatcctatggaagttttcctatcatcttcctatgaattaaagggctctatagaaaaaattcttaggaaaataaatcctctaaaatttctttgctaatcctccatttcaaagcggcccgtacagccaactccacaccgcgttctgcagccacgtccgccggcatgagcaatagaacaaggatggtacctttctaaaccatgtacctttattacagtctctcgaatcaacatgcgctacagcctaattaatccataatctaaaccgggtcttagggaaacagtgatatgaccgttgatacagcttgctgccagtttctctggtccaatcgaggagctctataccaataaagacaacgtggcaactatttcaaggagcaaaaaaattttcaaaaaacagagaaaaagccctcactgggaccatggagtactactccctccgtcccataatataagggattttgagtttttgcttgcaacgtttgaccactcgtcttattcaatttttttttgtaaatataaaaaacgaaaagttgtacttaaagtactgtagataataaagtaagtcacatataaaataaataataatttcaaaaaatttttaataagacgagtgggtgccgagctgtgttcgctcgttagtgaggagtcgatccaatcacgg

SEQ ID NO: 30537 - DNA, 1302 bp, Oryza sativa
tatacgatgcacttgttttgctagcatgaatgatagaagacgtgagaaaaatgagcgaaagcagctcctctaacaatggagaagtgttactgattatgtggagcccactttttatgggccccttgtccctctaatgtgcgttagaggagcctcatcgctgacctgtctcttcactaggagacaattgagtaaaatatagagagatatggtattaaataacctattcatctattatttgtatcattttgtatatagcaaattttaaaagtctcttgatgatagtacatacaacttaagtgaatacactggactcaattggtgttgaatgagtgaaagattctaatacattttttttactgtttaggcctacatgtatatgtggttttctgatcttccatgtttcacaaagatcatatttttgtggttgtatgctaaggatatatctcaatccggttttgttcaagaaaggaaaggaatttacgatcttgagaagacaataaattttacattagaaaatatataaggttccttataacatgtacaacaacaacaaagacgtttcttagctatacaatgcagttgttttgctaacatgaatgctagaaaaagtgagaaaaatgagcgaaagcaactcctctaaagacatacgtgtgttactgattatgtggggctcactttctatgggcccacatgtccctctgacgtgcgttagaggagcctcatcgctgagctgtctcttcactaagagacaattgagtaaaagatagagaataacctactcactctattatcattttgtatatagcaaatttttaaaagtctcttgatgatagtatagacaatttaagtgaatacagtggactcaattggtgttgcatgagtgaaagattctaataatttgttttactgtttaggcctacatgtatatgtggttttctgatcttccatgtttgataaagaccacatttttatggttgtatgctcaggagatatctcaaaccggttttgttcaagaaaggaaaggaatacaatcttgaggagacattaaattttacattagaaaagatataaggttccttataacatgtacaacaacaataaagacgtttcttagctataccatgcagttgttttgctaacatgatgatagaataagtgagaaaaatgagcgaaagcaactcctctaacaacggagaagtgttactgattatgtggggctcactttctatgggcccacatgtccctctaacatgcgttagacgagtctcatcgctgacctgtctcttcactaagtgacaattg

SEQ ID NO: 30538 - DNA, 628 bp, Oryza sativa
tcgggtcttctatgattgatctattattttttatcgtttatttgcctatcgctttctaacaggagccgccgcacactccctcgacacatcggtagccaatgctacggatgatgtgctcgcatagggcgcccctcgccgccgtaacatatgtcaatggcgtaaccaggagattttccttgggcagtactagttcacaaatgcacatcacatactacaattttctacaccgaaaatatgatatacaagtacaaaactagtgaaaatatgatattattataatgtcttaaaacatcataagtggcttacttaacaagctaaaatgacacattcactaatcaatatccctgctcctcttcatgttttaccaatcctgcaaactgcaatgacacatttacttaacaaactgctctgcgctgatcttggacgtcgaagccgccgcacgcgcactcgacgcatcggtagccggcactgctgatgatgcactcggacagggcgcccctcgccgccataatatatcaatacagtggcgtagccaggagatttccttgggtagtcatagtttacaaattcacatcatatactaaaattttctacacctaagatatcatatacaagaacaaaattagtg

SEQ ID NO: 30539 - DNA, 764 bp, Oryza sativa
tgataatgtgattacctaaagctttccttgttccgcaaaacagcaagggaaaaagcctgcagaagagacgtgcgatgcaacgactaatatactactcaatccgtttcgaaatgtttaacgccgttgattttttatcatatgtttgaccattcgtcttatttaaaaaatttaagtaattattaattcttttcctatcatttgattcattgttaaatatatttttatgtagacatataattttacatatctcataaaagttttaaaataaaacgaacggttaaatatgtgctaaaaagttaatgatgtcaaacatttcgaacatttcgaaacggagagagcgctatagtacatgatacgttgcgaactgtgtggtacagtagaaaaagaaaattaatactcgacgcaacgacacctcattcactcatccatccatccatgcatatcttttctttcgtatacacaaaaaaatcacaccaatcaaaacaggagtaccaatgttttcggtagcgtagaatatagtactatcaatttatagttattgatttgataaatattagtagcaattcaaatatctagtattcagtattgctaaatgctacagtagtagtatttgattttggcatcaaaccaaatttaacccaaaagagggataaactaagaaaatacacgtccaaaatccgaatgggcttttagctaaaacggcccaaccacagggcgcagggagagctgcacagaaattaaagcataatcacgctcatcattag

SEQ ID NO: 30540 - DNA, 700 bp, Oryza sativa
aacagtcaaagcgacaagtaatatgggacagaggcagtaataaagagagcttagatgatgttttttctcccgaagatgaagattaagtttttttacgcaaaatgaggtggtattaaagtatgattgattgagttttaactattacaaacttcaaaaatagattaatatgatattttagagcaactttcgtatagaaagttttcgcacgaaacacaccgtttaacacagtttgaaaaacgtatcataaaattttttatcttcattcaattcttgttggacaaaataacgagaccctaacaagttcaagaacttaaagccgtttcaatggacgtccaaggtttccgtggagtgatatgtacatatattcaagttgcatgtttctacttttttattattatatatgataataaataagacacatataccgcatcacattggacatttactctagtgacatttgttgaagaaaaaaacatcttaattcaggccatgcattttcttgggcatctcaatgcaaaagaggagaatgacctcaattggatgcctccaaagatatattcttacatatcacattgagaacaaaagtgaacacattgatggccacctccaaagcccccactatttcaacgttgaggtacctttcatcgaatttggataatggtgtcgcaacatgtggacacttattccattgactattgcg

SEQ ID NO: 30541 - DNA, 820 bp, Oryza sativa
agtatgaaaagaaagacaatatctagacaatcaagccgttggatgtttcatagagtggtggatatcctatataatatatgtcaacgtcactacttaacctaatcggctgccttctagtaacagatgttagccgattggaggttagataacgatattgccggagattatatgagatatatgataactcgacgaattacataaataagattagagtatcataaagatggaagcactaatcctgagaacgcaggccgccataacaagttttacctctagttgaagatcgaaaccgatgcagctcaacccgaaagcaagaactcgtcgaaacgaaacgaaagtaaaagggtggcgatgcgccgagattgtattgaacatgtgttaaattgattacatggggctcggggtctatttatacccgagattacaaaatatgcccgtgtcggacacgacttttatctctaacaaactctaagataccataagtctttgcggcagacttttgtccaaacatatctctaagggaattacatgaaatatcctaattaatagatacaattgccttctcaggactctatccatacgtggcaatcatcatgaagcacattaacccaacccaacaacgcatgccgtgtcatattgtcggattcggcttgatcggctaaccctgtccaactcggactctaccgatcctgatcgtagccgattcgaacttcagccgatccttactctgtttccgaaacgatcttggacttggattccgcttcgatctgatcttcatcttcgatactcagattaccaaatttggtcgttaacaactatg

SEQ ID NO: 30542 - DNA, 1263 bp, Oryza sativa
cgtctttgttggcccttggagagtcatgctccattgctccgtttcaaggtcgaaggaaggcatgcagcctgtccgtatgagggaggaggcggcaacgcggttgaagtaggacaggaggaagtaagccgcgcctctgtacacgactccattggtgaagctccaatcaggtagtccggtgggttgtccgccttcctccactgaggtttcgtgtcgctggtggtgatgatctccgacacgtgggagtagtccctggactccacgatgcggagtagcttgtgctcgcctgtgtgagatgtgcggccaaacgcgagccaaacacggtctccgcctctggtgcgacggcgaggtaagtgcagccgcaggggatgtgcttgacgacgttgccggaaaggtcgacgaggttgatacgtggggtaggagaggtctccacgccaacggcgaggaggagggcggtgtgagggtggcgggcggcgtgcgcggcggcgaagagcgggtcggaggtgaaggaccgccacgagtggcagacggcgcggaggcggcagatgggcttggcggggaggcgaagcaggacctcgtgcagcatctccggtggcaacacgccgtccactgctcctccgtacccactgcaggcgccgccgacgaggacttgttaccgacgcgagcacgagtagtaggaccgccacgacggcgagaggcagcgcgcttgggcatcacggcggcgacggtcctcttccggcggggtctagaggacggcaaggaccggacgggcttccccatgtgttcctgcggttccgaattccgacggtggactgagggcggcagcgatcgaggctagggctcaagataatagccgatcgaagaggaggaggaattcgaacccggaacgacgctcacccggtgaccggcggcgtcgggttttacgagggaaactgttttaacagctcgagtggacgtccacccgtttattgcatgtcatctaaatggttatgaaaaaaattgaaaaaatatgaacaatatatatatatatatatatatatatatatatatatatgtatatgtaatatatcactccacaaacatgcaagttaaaattcaacttgtacaaattgtagcaaaaataacaaacaagactcaaattaatatgtatatttacagttaaatttgttatttttgttacaacttatagaagttgaatttgaacttgcatgtttgtggaatgatatattacatattgatctatcttgttaatttttttgaaaattt

SEQ ID NO: 30543 - DNA, 713 bp, Oryza sativa
aagtgtgtatgcacgtgcaaccgtagtagaccgtatagaacacatcatctccaactcagcagagttatcatgacatggataaactcagctcgctttggcttgcaaagggataaaatctatggccatttggtataattttgtttttggcttttccaataaatcaaatactctatccgtcctgaaatatagcaacatagtatcaaataatatcatatttgatataacttataagaatatgaaggaagtagtaattaggatatatttagtactaattagtactaaaatttttaggatggagaaagtactaatttgtactctcggttcaaaatatagcaacctatgactgggtgtgactcatcctaatacaatgaatttggacatacatacatatatatatatatatatatatatatatatatatatatccatattcgaatttggacagatatatccagattcgttgtactataatatatcacatctagtccttcgttgctatatttgggatggaggaagtaagaaattagcagactagcacaagtaatgtgtatttttttatgtattttattacaaatcttaatatagaataccttgaacatatgagccttgcaagaactaagataggtcaaccacaagtcttcatatcaattttcataactataaaaaaagtagccaaatggttacttattatcttttgagaacaaatccatgaa

SEQ ID NO: 30544 - DNA, 1905 bp, Oryza sativa
ttaaatgaaaattaccggttagatatttttcttttttctcagaattttctttaaattattagagcaccacgtggcagtttaggagcgttcgtaggagtccacgtggcggttcaagagcgttttaaggaagtttaatggacttttagtatataactaggaaggtagcccgcgcattcgcgcgggcatgtatcgtgcactgtatttgaaaatggatcatatttatcagagagcctccgccatgttttggaagtgcatttcctcagcaaatattcttcgtttcatcactttgataatttctctatgctatatactatatagtatttaattaatatgtataagcaattatatataatcttcatcatcatctaaaaaggagttagacctagtttgtttagaaaacatgtttatttaattaaaagcaaggtgttttttttctttgtttgttgaatgctatgggccctattgatgaaaatgtaagacctagctaaattcattgttccttttcccccgccatacggttttatgcagctcctagtcaccgtgttgagatgtggtcattgcacctacagaggttgccttgtgattcatcgcagttgtgatcacatttttggtggagcttagttactcatatttctatgtcttgttatatcataaaatctaaatggactccaaagttaatcatttaagtatatatatacaacaaaatatatttgcagatgattaatgtttatatatagggatgattcaccttttgaatggtctatgagcaaagaaaataaacggagttacccagaatgcttagaaggccaaaacaacacgcttgaacatatatcaatgatatactaaaagtgcattaagcaccatctaaagtcaattagatggtaacatagtttaaagcaaatacacggaagatcatttagcttgcttggattattttagcacatattttttaaaaaaatcatgaagtaatcggattttctctaactaaagccattggattttctatgcattggtggtttggacttcatattttagttagttgtatttgctgagacaatgtatatctaatttagctatgcatgtttgacaaacaacatatgatgatgcaacctgtattggattatttcgtaattcttttacagcaattcaaatcacacgtaaaagggcagggtgttctcccttaataaaaaaaatgtttcatagttcactttgtaatttttgtttggataactattgatttaatttagctatacatgtttgcagaatgatgtatagtgatgtaatatgtgcagccaacttgtttaaggtatttgaatcatatttggatggtatgcaaagcacatgggctgaatgtgtgttgatgtgaaaaacacacactggcctaggagatctgcttaactccagtgcagatcctaaatcttacttctgggttcgtcgtcaacaatgtggtcgaatgccatattttgtatataggaaaatataaggatacggatcttaaattcctagtttaattataaatagagcaataattatattagaaatcagacatgtagcttaaaaactatggttgttttaacatattgattatttctcttttagtttactcctacccaaaaatagggatgggattggcagtggtctgcgcgcatgtgaagggggcgaggaggtagatgcgatttatttttataacttctccaaataatgtaacttaaaaccaatgatgataggtttaattttttctcaaaatttttaagattatttatgattttcaggacatgacacgtggcagcgtaagatttttcgtaaattaaatctaatggttgaaaataatgggtccatcgatttaaatgaaatattttataattttaaaatgtgacatatggtgacttaagtgtgctctaaagg

SEQ ID NO: 30545 - DNA, 2301 bp, Oryza sativa
tcttcagatgctgtatggggaccattgaatgctggccacatcactgctgaaaggatttttaccttgtaaccatggccaagagcttccctacgaagtccaaggctaaacataagaagaatttgtattttacattttactgttgactgtttaattgacaatagtttcttgggatgttccttgtgctttgagcacagatgttgcagtttgcagtttgttgcaacaactctgaaaatcatctgaggaagatcagtcaaacatctgttttgagtaaagggagctgttcttatttggttaacttggattagttgtgtgctcaacttatgattcgaaagtagagaaaaaacagcctgctcagattggttacacatccatgtaactttgttcaaatccggacagacacacatcacatatagctgagtgtttttctcctctcaataaaatgatatttgacatatacactgtaccatagttcagcattagaaatttcaataattttttcttctcaaatgttctaaaattgccacaaactacatatttcggttttaaatttcctcgtggaaaaatttggccaatagtaggtcttgttgcaatcgcagacataaaaggtaaccaacgatgaattatggattatcatgaccacaagtggcgtaagctttctatacatctcaataaaaagcgttctttttctatccatgtccaccatcactatttatctaccaatacaggtgcctccatctatattcactagagaaaatgtttcatacatttattctttctttaccggttttcatatatttattctggattgacaagcacccaaacaagataataaaaaaaaaggtaaaatcagatgagcataatttgcagtttacaagcagtactctgaatttcgatccaatgcttctccggtacaaattttgaatggcacaaattgcgagaacagcgtaaaatatgttgtttcccagaagcaattttggcatgggaagcatcagaaattgggtgatgtactatagagctggatgaaatgcttgatatgtactgagggcacaataatgtttattccactgtcaccaatcattcttcttatcaccaacttgggatttcagctatgcagaaatatctggacagctttatatagttgatctgggcttgtcgtaatatataactatcgacattaccaaggtagcgactatgcagtggtcgccctatataacaaaatttaatgtcatgactggaaattatcttgttctcaatgtcattaacttggtgagctgtaatatatgttattatttttgttgttctcaaaattgttcttccaaggtgatcatctcaaattgtaaactaacattcttgcaatattaagtttaggattcaacgaattcaaatttgatttttgaggtcatgagacttatactatgatattttgcatggtttttgtagaaccatgtgatcattaatcttggttatgaacaattgtcaaagttagggtttgttttgaagtttcgattctagctcatgaattgagagacgagtgctttagatgcactttgtaaacacatattgatgcaataaaatcaatttactttcaagagtttcatcgtttttatgtttttctggatcctgacggtctaacggagtacaatgggcaattagaccggcggcggcgagtaagagaggagatcgacgggcggtcacttccgtggtaaggcagtggtccaaccggtagcaagacaacagtcagactggcgattgtactacggttagtccggagttaatctgattgtcagattgagctacattgccacttcatcaaggttgaggataacttatattttagctgaaagttatttggtttttggcattcaaagcattcaccctactctgataggtttagctcttgtattcgatcatacagttttgatgtgatttctttccatagcattatcattacacttattgacggcatgattttgaaaattgttttgaagaaaaattttcgtaaatattatgaacccagacaattcccttgatggtcatcaccattgttggatccactaatccacacttgccctaccatttctgattgtctgttatccaccccacaaattcctctgtctgcttactcaattacagatatctccaaaacaaggaaacaaacgaaatcgaatggcatgaacaactgaagaatggtacaactatgttaccactgcaggaagccagattagtgtcggttcttagtttgatcctgcccaatataatggtctcatctggataggaaagatatcatatgtgctttttaag

SEQ ID NO: 30546 - DNA, 4767 bp, Oryza sativa
cgcgcatatgcgcgggcatgtgcgtaaatttttttttacgaatgtccatgtgtggatggttttctatcaaaaatattctttcactttatcgtaaactaaaattaaactaattcgacgtgctttgaacgctggttacttagcaacatataaattgaactaaaattactttaaaccgtgttatttctaattcatgagaaaaatttgtgtcgaaacaatagatgtgttccctatgaatgtccaattatttttgttagattatgtttgaaattttaaatatattcattttattagtcttgataaaatgtttgaatatttctatttagaatgggttataaacccaacaaaaacaaattttaaattagataaatttcattttattttcaattctttttatctccttttttttggataaatccactttatgaagcatctttgaaatgctttgatctctgtaagtcagaatgaaaatatattgggttgatcctacaacctgccatggggtaaaggcatcaattctaaattatctcgttccaattaagtaagaaaaattaaaatagatgtcgtagtattttcttagcaaattaccactaaactggagtgtcatgtaacaattgcatgtttctagattattctatgctatatgtcacaaattcacaatatactgtaggaagttttacccaaaaaaatagatctggtcttttaattcctatctgtaattggcttatatattgctgaggccacatcatagttgtttcattcttaagattccttggtgcaaccaacgtgcccagtacaatcagtatgttgttcaactggacacgtgacttcatagatcatatatataatttagaagctatgatcattttatgattatttatttatctcatgaagtgatcatttattgataaaagcatcaatatcaaaatgtatgggtaaatagctcctatatataagctgagaaaaagttgatagaaagtcgttagatgtctaacaagatataagtaatgggtctaccagttttataaaaaattgagctgtgatattttgatttttagtgagcaattttagtattttcttttctttaaggtaaaatttgctacaggatattaaaaacatgtaattggccgagggacaccgtaagaacacgtatctgttgtggcacatcgaaaaaattggaaattagctactagaggcccgcgatattattttataatatccaaaggaaatgcagagagagacaataacaaaagtatgacttttcccctacctactaagtctggcttgcaaacaccttggacgcagcaaccgcacccgccgtcggtgaggttgctaattaccagttttttgcggtatcccatagcagatatatgttcttgcagtgtctcttaactaattatacttttttttgatgtcctgttgtaaattttaactttattgagaagaggcttcaatatggatgtgggttcataatgtaattttttgttagcagttaaatatagtcaatatgggcattaagttatggttttcgcttagaaaaataatagctggctagacctaataggtggagattcgtttgtggtcttttctttgctcataaaaataattttaattttaattatcatagagatataaaaagctgagaaaagtaatatcgcacactgcatgggaacggggatggaggaagggttgagatgtttcttttttttagaaaaatattgattgtagatctaatataatgtgttgatgtttaagtaaaaaaccgatggttgggtattatttttttctcagatttataaggtttttttttctaatttaagtgagacaagtagcagcttagcaaaacacccatacggaaggagaggaaggagagaaagggaagatggtttgggatgttttttattaaaaaaattagatacaataatgatgtaaaataatgtgtgtatcgatttaagtggaaaacaatggatggatgtttctctaatttaacaatgtcatacaacgatttaaaaatatttataagatgtttaatggacttttaacacctatttttgagattattttctataaagttaattttagttttaagtatgacagggataaaaaacagaaaggaatcgggagcctactaattgatcactctggcgtggtggactgtatgggggacgtgggtggttttggttttctaagataaatctaacgataatgggttcgccgatttaaataaaaatcgacgaagatttatctattttattaggatgccacgtggcggcttgagagtatttatagggtgccatgtcacggtttgggagtgtttgtaggatttttaatggatttttaagtataagatagatagatagaactaagtacatatggtttttctctttatcttatatggtagaaaattatattttatatttttctcccgattatactatgtacttatttttactttatcacacagatattttttcttccgccgaacggaacataagctttattgttttttttttccgaatcatcgtactgtacttatgatatgattttttgttttgccgacggtacgtattttcccttttatatagggaaggtattatatatacacctaatgattcgtaataggtccaccaatttaaataaaaatcaactatagatatagatatagatataatctaatggtttaaaatgataggtccaccaattaaatgaaaatcaacggtgagattagacagtgccacgtggcggtataggaatgtttatagagtaccacgtggtggcttgagggccttttttgcaagtttaatggacttttagtatataactaggaaggtagtcgcgcattcgcgcgggcatgcatcataggatgcgttgcttagataaatgtttaacatatttttgttagctttatgccatataatatttaatcgtcctttaagcaattttctataatcttcttcatcatctaaaataagacatatttagtatatttagaaaacatatctacaaattaaatctaatttaaaagctaggtgtttctttaggggctaacttttttctatcaaatcttaaaaatacattagttgctatcaaaagtgttctatttgtaccatctagctagcgcttcttttatttggtttatattgatgcaatttaattattagttacaaatgaataagatagagatgatatgcatgcatcctaggtctcgtttctctgtgatatatgtgatctattgtattttttaaaaagaaaaacctaatcaacttgacccttaaaaaataaatttagtagtaagaaatataacttctaaaccgactatgtactgtaaccttagtgtgttgcttatatttgcaataatatgcggagaaattcataatacagtggcgcacgatagagaaaaaaatcattaatctaaccacttaattaaaaaattgatgcgatgcaagaaaaatcattaatatctaagacaaaagaatgaagcaaaataagttacaagattttcagcaattagttcaaatgtagttcatattggcatttttttttctattttctgttttgttttatataagaccacgcgaatgtgcgggcatgcatcataggttaggtttgagaagcttataaggatataatattaccggagaaaatctgccacaatttaaaagtacgatatatattcacaatttttttcgttagtattgcttatataattttaacctattagttacatttataccatatcatattcaaataatttctataagcaattatttataatcttcttcatcatctaaatagaaggtagacttattttgtttagaaattaaacatgcctaccaaattaaatgtaaagtaaaagcaatgtgcttttttgttttttaattggattactgatgttagctagatcgcccattgtttattgacagatgtatggggtagcacatgaggctacactaaattcatgagtttgtaatatgattgcatagtttgagagataatccatctgtgaacatttcatttagagtgtgtgcgaggctccacatagcctattatgaatacgattagatggttaaatataatcgtgtaataattatttttggaatgtgatgtgtcataaatacgtggttgtataatatatgtaggaggaggacccgtaagatataatagtaaagcaaatagccaacatggtcttgaattgctgatttgattaaaaaaaactacagctgctcaagtgtatcttaaattaaacgtgaagatcatctaaaaataattgtttatttatagcaccaagatcactcctattgtaaatccctagcgcttgcacgttcacacctaaatcagtctccgtgagaaatagatctaataatttatgatgataaattatagtgtacatgtatatcgcgtatttagaaaaaaaaaatcaggaactggatacatgcatcaatcgagcacacggatgccatatataattatcctgcctaatgacaatgacaatcaagcaatcaaataagtaaacgtttgcagctaccacatataattgtccacgtacatgcatgtgggtcggggatagaagggtaacgggggatttagttttgatccaatggtcaatagtattgggtccaccgctttaaatgaaaattaccggttagatatttttcttttttctcagaattttctttaaattattagagcaccacgtggcagtttaggagcgttcgtaggagtccacgtggcggttcaagagcgttttaaggaagtttaatggacttttag

SEQ ID NO: 30547 - DNA, 739 bp, Oryza sativa
atgcggaagagataaaaccagatgaattaagagataaccaacaaaccaattgattttatctctataacaaacttgatttagttagttacttcgcgcgagcgctggtgaggcgcttatcaccagaccgtggcccagcagcagagaaacaaagcaaattacaaatcagatatttgacgccaggagaagctaagagataaaatcaaataaggatatgaacaaataacaaactgatcgatcaagccttatctgcaacgaacttgacgcggaggaaacggcgcgcggacgcggcgagcaccgaccccagacccctatataaggcgtcgacccctcggcagccaggggcattcacgaactcatccacacattcattcaccaacgcatctagcatccacaagccacccatcatcaacgcatctacccatccagcatcaacacatccatccatcaactctcatcggcgatccatccatcaactctcatcggcgatccatccatcgacgacacgcaccggcggcggcgagctacttcggccggagtcccggcgtccggcaggagagggcgtgcgcggtgatccgatcatcagcaagcgcaggagaggagcttgatggctagtccaggtaaaagctagcaagattgtttcgttttctttcatctaaacagcacgcacacatctatgcatagggatccatctgcacgtatcgtcgtcgccggggaagtcgcggtggccgattcatctacg

SEQ ID NO: 30548 - DNA, 654 bp, Oryza sativa
gaagctggtagtgtgggtgatatacctgatgctatatagttatataggggtcgacctatgttttgtttcagaagtttggttagatggagtccgcttagatggttttgaaacttatgaactcttttgaggtgtaatcaggggatgttgctaacttgggggaagctggcttatgagtctcttaggctttctcaacttgttgtcaattatgttggaattcaggtggatgatatacctgatgctatatagttatataggggtcgacctgtattttgtttcagaagttcggttagatgaagtcttcttagatggttttgaacttatgaactcttttaaggtctaatcaggggacgttgctaacttttggggaagctcaatgcttatgagtctctcaggctttctcaacttgtcaattatgttggaattcaggtggttttccttctgattataactgaatgaaagtcacaaaggatgtttaatgtttgttaagattttactatctctttggtttgttggttcggatccagatcctccgacattacggagtaatgtcacagtgtgacattccttccatccggcacgttcattctaaagcaacggctgtggattatttagtctataataaataaaattaatcagcagattatttcttaaata

SEQ ID NO: 30549 - DNA, 2390 bp, Oryza sativa
cactatagaatactcaagcttgacaaaggagggatcacaagtaaacatggaacacgcgaggaaataggtagtcccataatcccatgtactcctaattagcaaaacgtgcaattttagttgcaaagagtaaaacatttgtaaattagcaaggagggctaccggtttgaggaagaactggggagtgaagctcattagctgcaaacttgagggggatcaatcaataaaacatcacgcaccaacagaaaagagaaggtgagaatttcccccatactaccaccacaaccacatcctctagtaaattaaacttaaaacaatccatcaccactgtgtagtttttccctagcaccttagttcagcttttaatagaaaagaaggagcggtagcaggctagcagcagataaaatggaggaggaaagaataggagcacttacctaggggatgattgctcggtgaagtcgagctccatggggcgctggtcatggcgtctgggtctagagctccatgcgtgaccctattctagccatgggggggtccacttcttggagctgtgggttggagagcatagagagaaggattaagaggggaggtcttgctggtagcctgggcattgaggtcgccgagagcaacatggtggtagcagcagcagtactagagtagtagagtgaggatttgagggaaaagatatccactgctaatggcaaatggaggaaggaagaaggggattagctagctgatgcttttacctgcaggagtgataagaggggagagacggggagaggtttctgcaggtgagagaatagagaagaaaggaaaatgtggactgattgctagatgtacattagtaggctacacagaacaccaacctgagcatagtgacccaattctgtagtccaagtatagtttgataaattatctagcacatcacaactggagtttcggtacaataaaaaggttacaaatttgtaagcacatttgtatttgtaaattattgtatttctattagtatagtttaattaaatctcgacgcatttgacggaatacaacaagggaactagaggcggagtctggtcagttgggagcgccagctatttttgatttgaactacgagaattcaggcaagcgaacctttgatcttgatgatttgaattattttgcataaaccttattttgcttcatgaaactgtcaccttgcataaaatagatttaccaaactataagtcggatatataaggatgatgatagatactgggaggggcagttgatggagaaactgatcaccttcggaccttccaacacttattagggtgtccacagatggggattgactggaaacgggaccctttacatatggctataatataaggactaaaatcactctcacatgcatatgtgtgctgtataaaaatcatgtcaaccatatccttgttgcaaggcgagcaacgctttgtatcttatcaagttcttacactccgcatggtgtgtaatgatagatagtgctaagatgggagaccctataaaccccatagaacattagtacttggatgggagatgatataaaccccatcaagatagtagcacgtggtggagtggagtgtaatgtgctgaaataagagaagagcatctagctatctattagtccattaaattttctataaacgcttctaaaccgccacgtggcgctcctacaaatgttcttatatcgccacgtggcaggtggacccaatattttataaatcattaaattatactaattttcaccactacatcttatctccaagaatgaaaatctgtacacgctccactttccgttcgcatatttatcacgtaatatatttgaaaagaaaaacagaacgtgcacatatatgtacatactctccctccctccctgtctgaccctcttcccttccgtctcttctcctaatttctacctctaacaaccatacattataaaaattaattatacattaaacttcctacaaacgcttttaaaccgccacgtagcgctcctacaaacgctcctatatcgccacgtggtaggtggacctaatattttataaaccattaaattatactaattttcaccattacatcttatctccaagaaagaaaatatgtacacgctccactttctgttcgcatattcatcacgtaatatatttgaaaagaaaaatagaacgtgcacatatatgtacgtactctccctccctccctgtctgaccctcttcccttccgtctcttctctctcctaatttctacctctaacaaccatacattataaaaattaattatatattaaacttcctacaaacgcttttaaaccgccacgtagcgctcctacaaacgctcctatatcgccacgtggtaggtggacctaatattttataaaccat

SEQ ID NO: 30550 - DNA, 1111 bp, Oryza sativa
tcctaatttctacctctaacaaccatacattataaaaattaattatacattaaacttcctacaaacgcttttaaaccgccacgtagcgctcctacaaacgctcctatatcgccacgtggtaggtggacctaatattttataaaccattaaattatactaattttcaccattacatcttatctccaagaaagaaaatatgtacacgctccactttctgttcgcatattcatcacgtaatatatttgaaaagaaaaatagaacgtgcacatatatgtacgtactctccctccctccctgtctgaccctcttcccttccgtctcttctctctcctaatttctacctctaacaaccatacattataaaaattaattatatattaaacttcctacaaacgcttttaaaccgccacgtagcgctcctacaaacgctcctatatcgccacgtggtaggtggacctaatattttataaaccattaaattatactaattttcaccattacatcttatctccaagaaagaaaatatgtacacgctccactttccgttcgcatattcatcacgtaatatatttgaaaagaaaaatagaacgtgcacatatatgtacgtactctccctccctccctctctgacctccacccttccgtctcttctctctcctattttctacctctaacaaccatacatagtataaaaattaattagttagctaaataatctattagtacatatgtttttatataaaaattataatatatatacccttaattttcggtgacaaacccagaaaaaaatattgggacatcacttggatatataccctttcttttcaatgtcaaaccaagaaaaatattattatgacactgcacatataaattatttaattattaattgatattattaattaatatggcatgaattagttaaaatcgaataatctaccttgaaggtgaatgtagttacgccactatatattttgtatagcaaccaaatagcaataagatattatagaaatgaacatatattttgacatctggaaccattcgacaaacatgaaccatgaataaattttcatataaaagaataatttatctagcggccacaaagaaacat

SEQ ID NO: 30551 - DNA, 1538 bp, Oryza sativa
  unsure (1)..(1538): unsure at all n locations
gtgagagaatagagaagaaaggaaaatgtggactgattgctagatgtacattagtaggctacacagaacaccaacctgagcatagtgacccaattctgtagtccaagtatagtcttgataaattatctagcacatcacaactggagtttcggaacaataaaaaggttacaaatttgtaagcacatttgtatttgtaaattattgtatttctattagtatagtttaattaaatctcgacgcatttgacggaatacaacaagggaactagacgcgtagtctggtcagttgggagcgccagctatttttgatttaactacgagaattcaggcaagcgaacctttgatcttgatgatttgcactattttgcatacacattggtttgcttcatgaaactgtcaccttgcataaaatagatttaccaaactataagtcggatatataaggatgatgatagatactgggaggggcagttgatggagaaactgatcaccttcggaccttccaacacttattagggtgtccacagatggggattgactggaaacgggaccctttacatatggctataatataaggactaaaatcactctcacatgcatatgtgtgctgtataaaaatcatgtcaaccatatccttgttgcaaggcgagcaacgctttgtatcttatcaagttcttacactccgcatggtgtgtaatgatagatagtgctaagatgggagaccctataaaccccatagaacattagtacttggatgggagatgatataaaccccatcaagatagtagcacgtggtggagtggagtgtaatgtgctgaaataagagaagagcatctagctatctattagtccattaaatnttctataaacgcttctaaaccgccacgtggcgctcctacaaatgttcttatatcgccacgtggcaggtggacccaatattttataaatcattaaattatactaattttcaccactacatcttatctccaagaatgaaaatctgtacacgctccactttccgttcgcatatttatcacgtaatatatttgaaaagaaaaatagaacgtgcacatatatgtacgtactctccctccctccctctctgacctccacccttccgtctcttctctctcctattttctacctctaacaaccatacatagtataaaaattaattaggtagctaaataatctattagtacatatgtttttatataaaaattataatatatatacccttaattttcggtgacaaacccagaaaaaaatattgggacatcacttggatatataccctttcttttcaatgtcaaaccaagaaaaatattattatgacactgcacatataaattatttaattattaattgatattattaattaatatggcatgaattagttaaaatcgaataatctaccttgaaggtgaatgtagttacgccactatatattttgtatagcaaccaaatagcaataagatattatagaaatgaacatatattttgacatctggaaccattcgacaaacatgaaccatgaat

SEQ ID NO: 30552 - DNA, 749 bp, Oryza sativa
atctgttgccatgcaatgtggagcattgtatgcctggatctatcgacaactatacatgagacaatgtggatataggagtacgatgtgagatttccgagatatccagtgtaaatacatggtgaaatgtttaactaggtcggaaacatgtaaaccacagaatataagttctcaaaaagagttttatttgaaaaaaagaactcaatgatagctatatgaaattagatgggcatacaaaattcaagataaaactcaactttgtttgtgagatattaagtttacaaatagcaaagaaaaaaacacaaataaagaatactctttttttcctcactgtttatcaatttcatatgtcctgaaattttatatggttgtctaatataaccttcctgtatgtgagatattttagaaatttatgcgatagttttcccatgtttaatatccactgcatgtttttcccatatatcaatgtgcaactacacattacccattgaaagttttcgcatgtattgcctttccggttagaagcagacaatacacaatttcaaggatgtggtacacggcccttgggttctgcttaataacaattgcacctgagacaagttaacggtattccattatacaaagagaataatgctcttatgccacaaagttggatgcgaaaactctcattttgaacaaaagtttgaagcctttactaaaatgccacaaaattgagtaccaattcattcttttaccacaatacagtgagaaat

SEQ ID NO: 30553 - DNA, 622 bp, Oryza sativa
atttttgtcctatccccacccttcttctctgtgtccagcaaggacagacctagctctgtccggccaaagtttgagccagacctggcagccagcccactcctgcacgtccgacgccccactcctgcatgtccaacgcgcacgccatctccgtgcacctgagctcggcatgagctatgacaccctagctccagtagccagcttcaaccttagcattacctccgcctctggccgccagcagcacaacaatatgcgtcctgccctcagcaactggctctgtgcagcccacctactccgcgcacggctttcctcctgaaagccagttccacgcgccctgctcccggccgcagtggcggacctaggtcctaggcctgggtgtaaaagcccatagagagacatacatttttaagatataattttctgttgggccaaacacagtgggcaccagcccgtgcggccaagctccattcacaaactcatagaagagagaaagagggtgcagaagaagggaaaattgcacatttggtgggttaaaatggtaaagtgtggcagataaacgagtatacaactgaactttgtggcatttttacaaagccaacaaatcatgtggcaaataagagtatgg

SEQ ID NO: 30554 - DNA, 701 bp, Oryza sativa
gcgccattttaaataggggaaatcacacattctacttgcagagagcacatcaacctcaaaatatcccatcttaataacctcctatccaaatgctgcaagtctttcaccacagagaagttacctgggaactcggcagaggcaaaggctggggagaaccattgggacggcgagggccggaggccgcgggagaaggcggcagaatgtcgagggtgtggagccgagggtggggattggaggtagcgtgggagaggcatctgaattgacctgatcaactgcagagcaggaaactcacgttcgctggactgaacaattgtgtggggtctcaacggaagaagcaaaccgaaaaatcaatctgcatccacacactgcaaatttgtatcgtcatcaaacaaaacggtgctccaaataactatcaatctatattagatgaatgcacactaccatgctcggcaatcgcatttcttggatttttctcatcattgattcattgggcaacaaaatatcaagtcttaatctccctaaaaaaatatatccaatcttgaagcaagtaaaacatctgtgagttaaaagcatgtgaacaacgcaagcagaggaaaaaaaaagatgatatcaaaatagaaaagtttggttatagtaagcttaagagcatgtatagatctgagacaactatagtctctcgtgcactatagacgataccgaaa

SEQ ID NO: 30555 - DNA, 1574 bp, Oryza sativa
cctaccttacggccgggttagtcgacgcgcttgacaccaacatcgtataagttatcctccctaatgtcatatgtgccatccatatactgaccacctcgttgaaaacagtttgtgaccctcagatattcgacgtttcgccgaaacaaccgttgtttcgtggcatatggtaagtaatttctagaaaaatctctggggtccaactctccaaatccagtctctctagggtggggcccgtgattctgcagccatcataaaaaacctagctcgattccatgaccgaaaggcaaagttatcaaggtttaatttgcacagaattctccatctgcattccacagtgtcgcgcccgccagcctaccttaacggcgcggttagtcgacgcgcttgacaccgacatcgtctaagctatccaccctaacgtcctatgtgccatccctatactaaccacctcgttgaaaaccagttgtggaccctcagatattcgatgtttcgccgaaacaaccgctgcttcgtggcctatggtaagtaatttctagaaaaatctctgggggtccaactctccaaatccagtctctctagggtgaggcccgtgattctgcagccgtcaaaaaaaacctagctcgattccatgaccggaaggcaaagttatcaaggttttaatttgcacagaattctccatctgcattccacagtgtcgcgcccgccagcctaccttaacggcgcggttagtcgacgcgcttgacaccgacatcgtctaagctatccaccctaacgtcctatgtgccatccctatactaaccacctcgttgaaaaccagttgtggaccctcagatattcgacgtttcgccgaaacaaccgctgcttcgtggcctatggtaagtaatttctagaaaaatctctgggggtccaactctcaaaatccagtctctctagggtgaggcccgtgattctgcagccgtcaaaaaaaaacctagctcgattccatgaccggaaggcaaagttatcaaggttttaatttgcacagaattctccatctgcattccacagtgtcgcgcccgccagcctaccttaacggcgcggttagtcgacgcgcttgacaccgacatcgtctaagctatccaccctaacgtcctatgtgccatctctatactaaccacctcgttgaaaaccagttgtggaccctcagatattcgacgtttcgccgaataaaccgctgcttcctggcctatggtaagtaatttctagaaaaatctctgggggtccaactctcaaaatctagtctctcttgggtgaggcccgtgattctgcagccgtcaaaaaaaacctagctcgattacatgaccggaaggcaaagttatcaaaggttttaatttgcacagaattcttcatctgcatttcacaatggtgcgcccgctagccttacttaacggggcggtttggtcacagcgcttgacaccgacatttgtttaagctattcaaccctaaacggctatgtggccatccctatacttaccctccttctttgaaaacccaatttgtggacccctaaaatattccacgtttctggcgaaaattat

SEQ ID NO: 30556 - DNA, 1849 bp, Oryza sativa
  unsure (1)..(1849): unsure at all n locations
gtatagggatggcacatagnacgttagggtggatagcttagacgatgtcggtgtcaagcgcgtcgactaaccgcgccgttaaggtaggctggcgggtgcgaaactgtggaacgcagatggagaattctgtgcaaattaaaaccttgataactttgccttccggtcatggaatcgagctaggtttttttttacggctgcagaatcacgggcctcaccatagagagactggatttggagagttggaccccagagatttttctagaaatgacttaccattggccacgaagcagcggttgtttcggcgaaacgtcgaatatctgaaggtccacaactggttttcaacgaggtggttagtatagggatggcacataggatgttagggtggattgcttagacgatgtcggtgttaagcgcatcgactaaccgcgccgttaagttaggctggcgggcgcgacagtatggaatgcagatggagaattctgtgcaaattaaaaccttgataactttgccttctggtcatggaatcgagctaggttttttttgacggcttcagaaccacgggcctgacagaagagagactggatttggagagttggacccccagagatttttctagaaattacttaccattggccacgaagcagcggttgtttcggcgaaacgtcgaatatctgagggtccacaactggttctcaacgaggtggttagtatagggatggcacataggacgttagggtgtataggatcgacgatgtcggtgtcaagcgcgtcgactaaccgcgccgttaagttaagctggcgggcgcgacactgtggaatgcagatggagaattctgtgcaaattaaaaccttgataactttgccttccggtcatggaatcgagctaggtttttttttacggctgcagaatcacgggcctcaccatagagagactggatttggagagttggacccccagagatttttaaaaaacattttcccgaacgctagtgtattaatccccgtcccaggaaaagccggggtacaccacacaaacatgatacaaaaggcacatctttattatatcgataatatttacattattacaaaggcacttaaggcctgacaatcaaaaataaacagcagcggactagcgggcatacggttccatcttacaggcgctcaactggggtataagccacgactccacctaagacttcttctccaaagcttctcttactgaaggggggggggaaagattgagcaagaatgagtacaaccacagtactcagcaagccacaccggtggatgcatgattaatgcaagggggtacaaggggtaataatataggggttaagttttgtagaaaacagcatttaaaagtcacttagttgcccaaagccattttataaagacgatcctagagttacacagtgttattaatcaaggccgtgaaccctcacgaacctgccttaacccaaggcctacgatgattcagaccgaactggcaacccgaccctgggtcccagctcgtcccaagccaacccaggccaaccattccacattttagttgttaagcaaattttaagaactaaaacactaacttgggtacattgctaggcttgcccataaccgagggcgcggctattcgaatagattatactctgatcagaggtgtacatctttacccaaaagacacatctttctcacgtgtaaccacgtgccacataccaccacggtataccgacggaagacgtgacatagttcccaacccatcctagccataaacaagagtaccgacccaaccccacctaccggcggaaacccccggacaagcaggcaagattgaacccctaacaacaagaaacat

SEQ ID NO: 30557 - DNA, 2268 bp, Oryza sativa
tgaatgcgaaaacagttgtaataattagtcaatattaatcatccactgtccaacgctacaccacgttgtaacaggcccaaccatccacctgtactatccaatttcaatagactaaactaggatgagacaaatcacggtgaatctggttgaccgcccataaccgcgggcacggctattcgaatagttttactctgatcagaggtgtacaactgtacccacaagacacagccctacgacacgtttccatgcgccgacatgccaccacgacataccggaaagaggccgtgacaggaccattcgcataaccccctctagccaagcacaccacacctcaggtttcacccccgtccccagcgggcgacgggcagtccctgctcgtgcctaggtgaatccggaagccgcataggccgtcgcagggcccatccaaactccatcacgcccacccttgcctggatgcgtcagctagagaaaagctacactacaagcctagccgttgcccacgctggcttgtggtaagtacgaggaattcttctagggtttcccgagaaccggtccttaattaccatgggtgcgactagcaaaaccatgcacccacagtccaccatgtgattcattttaattaaccaacaccaaagcggtggtactaatccaacattaccattagaacctgcagtctatatttcaataggatttttccccaaaagtgtgctagttgaactaagcatggctaagcaattcctagtccaaagtctattcatgttataacccaagcctgcaacccatatccctagttagaacctaatccatacctcccattaaattccaactgactgtcaaataaatccaaaataagttttactaaaaccctaaccgatcttatttgaacaaatttcaattgaatgagcgatcaagatttttcccatgaactgaggaacaaatcccaattttcccaaaacaaatccaattgcaaagaacatatgcaaatgaaaagattcggaggtctcttagggtttccatttggcttgtcctacggtcacggtcggcttcaataccaacttgtcacacccagaaattcccaaatagaattccaagcagaatgtgcattaaaactcttgtccaggaccggccagggtacacaaacgacaatgttgacatacagatccatgtcttacaaacattataaaagtcttacataaatgcagcggaaattaaaaggataactggagctaagccttgacttggatagcagtggggaacaccattcgacaggcatcctcgatggcatggatgaaggctagtcctcagaaaagccaccatcggaagcatactagaagtctggggggagggggggagggaagatagagcaagactgagtactacccactgtactcaggaagtcataccggaacggagcgtatgatgcaaggaatataaccaaagaggactaaaggagttcatttgcataaagccaacatttgtaaatagtagttgaaagcggtaaaacagttgtagtaattaaccattatttaacccattcactgctcaacgctacaccacgttgagacatgcccaaaccacaacctgaactaatatgatccattaagctaagttaggatgagactaatcacggtgaatctggttgatcacccataaccgcgggcacgactattcgaatagttttactctgatcaaaggtgtacaactgtacccacaagacacagccccacgacacatgccagtaccacataccggaaagaggccgacatacctgtgtgccgacatgccagtacgacataccggaaagaggccgtgacaggacccttagcataactctctctaaccaagcacaccacacctcaggtttcacccccacttctcaaaaggcggcgggcagtcccctctcatgcctaggtgaatccggaagcgacaaaggccgtcgcagggcctatccgctccatcacgcccacccttgcttggatgtatcggctagaggaaagctacactacaagcccagccattgcccacgctggcttttggtaagtacgataagttcttccagggcatcccacgaaccagtccttaattgccatgggcgtgaccaccaaaaccatgcacccacaggccaccatttaacgtattttaattaaccaacaccaaagcggttgcactaatccaaaatcatgcattaatgtaattcccccattgtgtactagttgaactaagcatggctaagcaattcctaatccaacatctagtcatgttacaacc

SEQ ID NO: 30558 - DNA, 1592 bp, Oryza sativa
acggagtgatttttcgacacggaatcacccaacaaactccaatatgtccaaaaatcatgttttggtgctttttgaagtttttcattccggtgaaaaacattgcacccacgtgtgccaatatatatcaatattggcattaattgacaaaagttcgccgcgcgagtcacgaaatgatttttcgacgcggacacacccaatacactccaatatgtccaaaaatcatgttttggtgctttttgaaggttttctttatggggaaaaacatcgcactcatgtgtgccaacataggccaatattggcattaattgacaaaagttcgttgcgcgaatcacggagtgaattttagacacggacgcacccagtacactccaatatttccaaaaatcttgttttggtgcttcctgaacttttttattccggtgaaaaacatcgcacccacttgtggcaatattggccaatattggcattaattgacaaaacttcgccacgcgaaacacgaagttattttttgccaagaacgcacccaatacactccaatatgcaaaaatcatgttttggtcctttttgaagtttttcattccggtaaaaaacatcgcacccacgtgtgccagtataggccaatattggcattaattgacaaaagtttgccacgcgagtcacagagtgatttttcgacacagacgcacccaattctctacagtatgtccaaaaacatgtttgtgtgctttctgaactttttcattccggtgaaaaacatcgcagccacgtgtgttaatatatgccaatattggcattatttgacaaaaagttcgtcgcgcgagtcacggagtgatttttcgacacgaactcacccaacatactccaataagtccaaaaatcatgttttggtgctttttgaagtttttcattccggtgaaaaacatcgcacccacatgtaccaatacgggccaatattggcattaattgacaaaacttcgcgcgcgagtcacagagtgatttttcgacacagactcaccaaacagactccaatatgtcaaaaaatcaagttttggtgctttttgaagtttttcattctggtgaaaaacattacacccacgtgtgccaatatatatctatattggcattaatttgcaaaagttcgtcgcgcgagtcacggaatgatttttcgacacgaacgcacccaactctctacagtatgtccaaaaacatgtttgtgtgctttctgaacttttccattgcggtgaaaaacatcgcacccacgtgtgccaatataggccaatattggtattaattgacaaaagttcgtcacgcgagtcacggagtgattttttgacacgaactcacccaacatacttcaataagtccaaaaatcatgttttggtgctttctgaagtttttcattccggtgaaaaacatcgcacctacgtgtgccaatataggccaatattggcattaattgacaaaacttcgccgcggaatcacgaagttattttttgccacgaacgcacccaatacactccaatatgcaaaaatcatgttttgatgctttttgaagttttttatttcggtaaaaaacatcgcacccacgtgtg

SEQ ID NO: 30559 - DNA, 1679 bp, Oryza sativa
aaaagattttgaacaaataagacccttttctagaaaatacaatatatactctatgtctagatccatagtctgaaaagtatctcatcggttcaaaattacttaatattttattttagtacgaatgaagtagtaattgtgatgcaccagagccacccggaatttctggctatctatgacaaagctgacctttgcaaatttgcaaattgcaattcaaacccattaatgcatggttcacgataactgcaaagttgactactgaactcacggtgaaaattggcaattttttaattcatggctgaattagtgccagattgccacttagagtgataaatagttaaatatctcacaacccctctcacaacaacctggacggtgtcgctgatggcgtattgagctagctagctagtagcttagttgtcgaataccttaagggcaactaggaatggtatatatagagaagtttaattactataataatatacatagaaaagttattttagtatgataatgcatctaagaattaaagtcaggttttgatgtctgctaattgcttgcggtcctcttatttggaaagattggcatttaacacattttttcaaattaatactatatctttgtttttaaaatagactgggaaattgacctgtggtataacgttgaccatttattttattcaaaatttgatttcaaaaactttaaaaaatatataattcatgcttaatattcttttagtaataaaacaattgataataaaataaaatatgattatataattctttttaataagacgaataaccagacacgtcaatattatgctaaaatttaacggaatcatctgttagaataatctatttggagtgttgtgtagagaggatcctatcctgcgagagtgaccgacgcgacgctgggtcattgatttggacggctctccaacctgcaacgcaggcgctatttcagctagaaaattgaattgccaattttcgcagtgagttcaattgtcaactttgcagttgttatcagctatctcggggaattagtatattgctgtgcttaccatgcatacacgtgttgcaatgaacacaaaaaaaatgtcagcggtatcaaggtttcaagttcatatattgttgtgtttcccaaacacacgcaacatctgattaagctctaatatctggtatagtcaaagaagaaaatatcattacttgaattaatcagtactacgtcttactactatttatgtagggggtgcatctacgaccccttctattattggtggtattataatggtacaaatatatatctactagttgatttttatgtgctttaaaaatattttatttaggattttactaggaataaattggtattgttaatctgtcagaggtgaccgtgcgttgcaacaggaaaaataaaaaattatgacaaacattggacgagtagacaaggtgtttaatttattcagatagataagacagttaatttattcaaaacagtctatttctattatagctctaacatcaattaagttcttttgtaaagaaaataaaacttaactttgtgtaaattaataaaccaatccttgccatccacaatgcattacccccatttgaagttgtagacttgtagttgtgcctcagtaggagcagattaagttttctttttagcaatatatttcttgagaa

SEQ ID NO: 30560 - DNA, 663 bp, Oryza sativa
tgagggtagctagctcagattctttactggacaattatgtaatgtattgctctctcgtttccttcttgattaatgatcaatcagttcatctcctctcttgaaatcggcctgtgctctcctgatgctccatgccattgttgaaggcgaacattcaggccctgccgccgccgctgccgaagctctccaccgccgacgaacggtcgatctgcaggcacgccggcgagtcaggtttcagagtagactgttcatttcacttcctacaagtgtttgtgttcatcgtgcagatgcagaatcactgattcatcactcaccagagttctcaaggagattctttttctcatttgcaaaggtcatattcaaagaagcctccatatatgctggtgtgtgtacagtcctggtctcaagtctcaacgatgatctgcacaaataaaaaaaggatgaacaatgttagacaattatactgtcacttttcacatttcagatatcttccttcttttatcagtgtttactgtcaaaggttagattgctacaaataacaccatttcacttttatcagtgcaatggaaatagggagttctcaagcatcaagaaaccggcgtgccatattagctacagtttctgtataaaaacgcatgaatactttgttgaggtaaaacgtaaaag

SEQ ID NO: 30561 - DNA, 1162 bp, Oryza sativa
catcaggtggtgcaggctcccaatgaccggcagccgccacggccccggcggaagcctcggccggccggcgccattgccgcgcgcccgccttgccaccctgagcagcaggagaggggccacgacgagagccaagaagatgctcaggtactcggcgacatcttgcgccatgggcgccatggccgtgcaagctaggtgttcgatcactttaaggccaagctggagtgtagaatttgtacttcatataaagaagctgaaacaatgccaaaaaaaagaacgaaaaaacaaacatacaatgcagtttttgatgctgaagccagcaatttccactatcagtggagtgagatcattacttggattaatcacccaaatctgctggatatgcattatctagaaatgcatcagcagatcagaagagacaattcaaggttgtactattgctgtcaccagcttcagttacaagtgcagcatccaagcttttctttttcttttctttttttttgaattagcatccagctttcgatcgtcatcaacacctgcaatttcagctctagccatttcacggccggcccaaaacggaggcaaaatggcccacgtgggcccaaaagaacagcccatttttccctgggcccaaagaagggcccggttgcgttctgtgggccccgaagaaggtcacgatgtggcccacagatttgtgttcagccgtgaacaataatgctcacggtctttccactgaattcagtagtcaactttacagctgtcatgtcaccagagtgtgctgatcaagtaatttactttatccgtcccaaaacataagatacattattataattattatattagacacgtcctaatacgataaatttgaacagacgtgctcagatttgtttctattcgattctatctttatattttagttatattatgtatagattttagaacagaggtagtacattttttttgtccgatacaaataatgacattactcatggtattattgcctactttaatcactccaactgaatgcattagcttgcagggcatcatgaacagacaattcaagaattctactaccgctgccatcagcttcggtagttcagttacaaagtgcaacagtaatcttccaggttgtctttgtcatcaatggcagcattttcggttacat

SEQ ID NO: 30562 - DNA, 754 bp, Oryza sativa
gagtagagtgtccactagttgggggtttgtttaatctagggtggaccagggaattattaccattaccattattagggtcttaccaagggtaataggccttggttaattaaaccatgattaccccggaatttaaattaagcgataatgcaataatttaaatcaacataattttataaactgggattcaatatgttcaaagatgatgtgacttgccttgctcgctttcccaaacgtcggcttcaacctccacgaagagcggatcttccgaagctgcagcgtctacacgaccaacggaaaagaaaaggcttttactctaataaactccatataacaagcagaaacaaagcacaaaaatgggttcttgacttcttaaggaaaaattagagacttgaacggtccaattccgagttcaaatggccaagttatggccatttgaaggttatatgctctttaaatgaatatttgcaaatttcttcatttaaattttaatttaaaatttggatttattgcgtcagccgaggggaggggcgcgcggaccgggtccatgggagtggggcccacgcggcagcctcacggtctacggtggaccgggtgcacccggctcacaccggccggcgccgtgggtcccacgcgtcagccgcacccgagggcgcgggcggctgacggccgggccccacatggcagccgcggggcgcgcccgaaggcggccacgccggcacagccgacgggaggcggcgcacccgcgccccgatgg

SEQ ID NO: 30563 - DNA, 2047 bp, Oryza sativa
aaaaaaatatttagtttacaacatatatagatttgtctttatggtaaatgttatataaaaatatagtcaaagatatattttaaagaacatgttctaatttaaacgttaataattatatgaaaccagaaagatatgataaagatatgatgtatatagattggtatgaagaaaattacttcgggtcgctgtatcaggatgcttacgagatggcaggcctagacatgatgagtttgggccttggacatgggctcactatgggagagtaatctttttccatgtggatccataccttctaaccgttaatgttcgataggagagaagcgttatgccatcgtaaaaaaatatcgtatgtatagcagtgttgatttggctttcactaagaacaacataacaattttgtttagtttttggaaaccaaaatgtggagaataatccaattgtttggtttaagtttcaaataaataaatttggtcacgccaaattcggtatattttggattacccatcaatgttttattgaagaaaaaggaaaatctttttggcccaatagcaatatttgtttttcaataccattaaagcaaaagtgtggggtaaggttggcaaggttttgataggaatttaataattgggcgcttaaacacctttttagttttgcccattggaaattaaaaatgttagcttgccaaggactttactttgatcgtagaaagaaatccagttccctccttgggcactactagcagtagtttttccaattcgaagtaatactgattttctttttttaccatatccatgttttctaaaaacgtagtgtcccatatcaacgtatcgtatggtgtcggatgatgctccttacaagtcatgtgactttgttaccaacatgtgagcttggtgatccatgaactcacatatcagtgacaaaggcacacttactttgtaggtagattatttcaatccatcaataacctctcatatctaacaaagtggagaaccaaagtaaaactagaggaatataaaaataaaaggaaattgctatgcatacaacccagctgtctgactcaccgtacgacttaatttaattaacggttacaaacggctgcattgcaaaaaaagacatactattcatcgtaattgatccatggtcgtatatatctttactggacgctcattcggattggtcgcccgatcgaatttgagaaaaatcgggcgctgacatcagtccctgatttatgtgcaaaaactactttaaactgttttttctcttaaattacttatccaaatcatgatccgattgcaccattaatttcgttgtaattaaatcttcaaaacaagaccacacatggatatattccgacgaaaaaaatagcttattattgaattatttttaaatgttgcatgatatattggaattgttttactaagtagattgaaaatgtttcactcgtttaaatcgggtgttgtttcactttatataaaaataatgtttcagcaaatagcgaaagaatgtttcatttcactgtaacattagatctatatatagtgaaacattgtgagtacactaggtgaaacatttttcggtggaacaaaaaataaaccaaattcccttaatagggggtttccaaaatatgtggatttttcgttgcaatagaatatttcgttcactgcaacattagatctatatatagtgaaacattgtaagtacactaggtgaaacattttcgatggaacaaaaaataaactaaattcccttaacagagagtttctaaaatatgtgggtttttttgttgcaaaagaatattttaattcaatgcaacattagatctatacacactaaaattatgaatacactaggtgaaacattttttttgaaaaaatgggagggagaagtggatgggcccacgaggtggtcacgtagggggagggcgcgggcagggggagcgcccgatccgacacccccgcgccggtcacccggggtgaatcattttcgatctttacttgtacgtctagttgttaataagttgtacgagtagatagttacacaaaccgag

SEQ ID NO: 30564 - DNA, 1045 bp, Oryza sativa
aatttccacttcagttcatggggtttatgaatttatacatatggactagcaatcaagaaaagtgcagttttagttggatagtgggtcaataggtaagcatgggtggacccacttgcagccctagtggcttcttctccttattgaatgtacttaccttataaaacttcgtctttcactttatgcatattaacgtatgctttattggtgatatggcgcataatcttgataaccctaacacagagagaaggcatgatttatacttgctaattttggtgaacacaagtcattgttgattagataggctagggtgctagaccaataacagaattctcccctcgtgctgccacctccctgcatcgctccctcccgtagcacctcattcatccctcagcgctctgcagcacttcatagtccatacgtcacatccctggccacatctccttgttctggtccctccccacattagcccctttggcatcgttgatgcctgtatgccctatatgaggcagcagcagtagtggccaaggagagttcgtcatggttgtattgactttgtcgttgatagatgccaaaaagaggacagctatgtcatacccagtggtcaattgggtttataatttacgataaactttggcaaagggcccaactttttagcctataaaatttgagggccaggcctaaaatggggtgatctgaatttctatttttttacctaaaaatatttaagggctaggtagggttgtgaaagaacccatcaccctaggtagatataatttacacccatagttcaactcccatgtatgaagcttgaaaggttactcctttcttcaaagcgctaatgacgtagtgactgcataaaaatggtttgcctttggcatattgcttcaaaatcaagaaggaactggtaatttttttagaaaggtattgctcccaccaagtaggcctcttcacaattcatgttgcaccaatgacaaatcatgttttctatccatttcctaattaattgtgaggttaagcaatacatgttagttcacactagagcatg

SEQ ID NO: 30565 - DNA, 3947 bp, Oryza sativa
tgcgggcttatttgtagtggggtgggtgagaggcctccgtggctaggtgcacccgagggggagaacggattttttttttcaactctgagcatgagcaggaccctatcccgtcgaagtcacgtgactttgtcactgacatgtggtgtggccctgatgaaaacaccatgcatttgactgcagaggatctcaagtcatgtcagctacgttcggtgttaaggtaactttgggcctattcggctgccctagctgcggctgcggcgcagccggcacgaacagtttcgcactcactgtacgcagctgcagccgcagcagttggcctaccgaacaggccctttgttacttttagatttcaacgtttaactgcctactactccatataaaaaaagttgattatcatatctaagagcggaaaatagttacatgttccttcgacatcagcggagcgagagaaacactattgtttaccgtgcaggtgtttcctaagcctgctaaacggtgtgttataagttgtttttaaaaattatattgatccatttttcacatttaaaatagttaatactaaattaatcatacgctaatgactaatctcattttgtgtatcttctcttttcctctcctctcaaacacatctatgtttggttactgctataatttgccaaacatttcaggttttttagagcttaggttctgacaatgcatggtttgtaactctgaatatcacatggcttactccttctttttccaaacctagtagtaagaacttgtggacacacctgaccttagctgaacatctgatgtgttggcgattggtgttgcgaaatgtagtattgaacccaatttaagctaaataatacttaagtgggttgttagttgttacttgttagttatacacatctacccatttaaccaaacattgctgaacaattttgagtccattgctggttgccacatttttttgacatggcacaaccttcccacaattcacctaatcttttgcaaaattgtaccttacgataaattattggccatgtcttaatcaaggtttggcaaagacttacatgatagtatttgatagtgagagatttaagaccgaccgagactcaagggagctagatggtagctatacacatccatagattttataaactaagttaggatcaataatatgatgtatgcacacagttacactgtaaagttgcaaccgccgcacatgacatttttttttatagaagggtttttttttaccgctcacatatgtataggcaataaaataattgtgatcttttatgttgtgtgagtttttcttagtttgtgtgtgcttttatttattcaggtgtgagtttttgttgaattggtgttataattggatgtagctatttgagcaaaggccgggattatattccattattaaaaaaatatgtataggcagtaaaatgtgaagttgatgttgaaaatgagaatgataaaatctgaactattggttctaaattctggtcttacatttctttgttagtattgaggtagtcgcaatttggcagtattataaacaaaattagtttattctactttcatatcttattttcagtttatgacgataatctacacatggcactatataacttatttcatattaaactagtcacagagtggcgcgttgcgcaacaataaatatccacatataagtgttaacacgtgctcgtaaattattttgtgagtacatctgcactatttaatactcccttgttacataatataagagattttatccttactaattatcccacaatataacaatttatttgagaaataatataagagattttggtgtagtacttatcacttctatcaattcaaatccattttctacctattacacataactacccattcacccacaaccaattttatttaatagggataatttaatttgcgatccatattttaaaaattatatattatattatgagaggggtattttagagaagtagaaatcagagttacatcattttgttgcataatattaggatatagggggtgtttacacctagggatgtaaagatttggggtgacacgtcgggtattatatagagatgtcgcatgaggcgttagggcactaataaaaaaaactagtacagaatccggtcagtaaaccatgaggtgaatttattaagccctaattaatctgtccttagcaaatgtttactgtagcaccacattgtcaaatcatggatcaattaggcttaaaagattcgtctcgtaaattagtcataatatgtataattagttatttttcagactatatttaatacttcatacaggtgttcaaacgttcgatgtgatagggtgtaaaatttttgtgtgggatctaaacagggccatagtcattcaagtgcttgttgttggtgcatatcacacaccattctctagatcactatatattcaaacaacataataaactattatcacgatatactaagtactttttaggcatgttttttctgctgaatggaatgtaaatgatatattaagataacataatgtttaatacaaatatttaagtacaaatgcaacactttagtaattaatcaaataatttatttttgcaagtgtgtactctttctggattttaacgtacaacaccgctaatttttagacatacttttgactattcatcttatttaaaagttgtgtaaatatgaaatatacataaaaatacctctaataaaataaatactaacaaaataaatgataaataataaaataaatactaacaaaataaatgataattatgtgattttgttaaatacatctttaaaaatcaagagcatcatgtattaaaaaccaaaaccgaagacaacatatcgaagttccttgttttagtaaatacattttgtatttttacttgaactatgctattgatttttttctctatcattgacagtgtgcattgtagttttgaggctttttgttttgttcatttgaatagaactaagaatccaacggttcattttgcttgctgcctacatctgatggtggtcgttttgtagcctacgtggctcaatgaggatgagagaaagattaattctttcactactttagatattttccctatagtgcaggaaataccataaataggctaattgtagtcggccacaccaggacttcacaaagcaccaataggggttttcagaagacagaaattggtgttgtaggcttgtagtggcaacagcttaggatgcgttcgttcgttagagctaggaaagttcacctctagcaccgaaaaaagagcagttcattagcatatgattaattaattagtattagtcaaaaaaaaaacttggaaatggcttggtttggatttttttaaagccaccttttcttagaatttttttttaaaaaaatttcccgtttacctgttaaaaaaacgtgcgcccggaaaatgaggaagcggagttgggaacactcggtgccgaactcagccttaataccctcttcatcccataatataattaacgtgtgcatatattttaagattcaacattaaaaatatttggccaatggttagtataatatcattacattttattttttttaaaataatatcattggattcacatttaaatttacttttagatagttataattttggtgtaacaatccatatagtatatgagaaatataagtcaaagattctagtatatatgaaaaaaaaagtcaaatattagttttgaaaattgtacaagtttgatcatgcctatattatattaggatggtaggagtatcaaggttgatgttcggttggtattattggacggagtgactcattagcgcatgattaattaagtattagctatttttttaaaaaaataaattattaaatatgaattatgaagcaactttcagatagaattttctttgaaaaaaatacactgtttaatagtttgaaa

SEQ ID NO: 30566 - DNA, 3426 bp, Oryza sativa
agtcctccacgtggtggtggtggccaaggacattggcggtggccaagggtggtggcggcaacagtggtggtggtggaggtggccctctctctgcattcgtcttcccccttctcctcctccagatctgccagccgacagcagtggcgatggtggtggaggtggcccttcttctgcatccgcctccccccttctcctccaaatccagtgacggtggtggagaaagctggcgcagagagtgaggtggcagccggaagcctaaaaggaggtggtggtggaggccgtcacactcctccccccctcgccaagcacttcgttgttggctccattgggccttttttttattatctcattgaatactatacatgttggttgtggggtaagaactaatacctataatttctgtatgtactggtttcagaactcctaggtatagatgccaataaattagtgtcggcttgaaaactgacacttactggcttttaaccagtacctatgttggtttctgtcgtagtggcggccatgccctcgatcttgtggaggagtctcgtgctcgccggccactgtgctggtggaagatcgagcagagaaaagcagcaaagcagcactgaattcctccttgcgtgacgccattagcgccatagttgcaaaataacccacgcagccgttgcaaagattaacccgtgctgagctcccccccccccccaaaaaaaaaaaaaatctttctcttgagcttgttggtgctagcatctgaatggagcctcgctgaagaatgagccggtggaactcattggtgcaggcagagctcaagctagtgctcgggtccgttgtgctgcacggctcatcgtacgctctggaatctggatgcctcgcacagggcagacagagagggagcgaagagaagcagaaggaaagaggaagaagaaggccctgaaaagctggctctccattactttatttttttttctaaccaggcataccaagtagacgaaaaccacgcaaatgctttgcgccgagcgtccgatgcaagaagctatcgtcggacgcgcgcggcttcgttacatatctacatagatatatgtttgatgatgtcacagtatacaacatgcaaagaaatagctacaaacttgattttcaaacaacattttctcccgtactatttattcgatttacgatttgattgcaccgttatattcgttacaattaaatctctataacaagatctcacatgatcatattccgatgaaatatatatatatatatatatatatatatatatatatatatatatatgtttcaatcgttataattatatgtttcacgtatgagaaataaatgttccaattaggatttcactttgttgcaatttttaaattttctattgcaaccgatctttatttaatgtcaccgatagtattgttaagatgtttcaacatgtatttttcaatgtttcactattgcattcataaatattacctacaatgcatttgtcgagacatgcaagaaacacctcgtgcaacattcacaaatgaaataatgaaacatcacaaaatacctatttgaaacatcctgtgtgtgcaacactaaaaaacaccattgttaaaaagacatgaaaaatatacaacattgtcgagttccagctgaaacatttgttactcattcatgaaacattgaattataatgctggaaacatatatttttttaatcaaaatataatcatttgagatgttattgtaaagatttaattataaagatttaattataataaatgacatgaaaagtaagtcacctaaaaggtttctaaatgctaatataatactaatcaatacatgttagacttgttacaggatttgctgcatatagtgcacacgctgacacgcatgttgcatgctacagagttacaatcacaggcgcacggcaggatggcatgcatatgtcagcactcagcagcaagcaaaccaggcatccgatattaggaaaaatatcggacgtccgatgcggagtcgcctcccgaaaaccactctaatttggtaaaaactatcttagaagtgtaaattaaactgtattgatagttgagagcgtacgatatcaggttttaaatttaaagggtgtgatttagacaaacgtgatagtttgggatgtaaaatgggcttatcccttatcgctcaccttcaagagtcttgatgacattacgattcattctcatttagaaccctagctactttccaccccaaaatcttccttggtgccaccgcgcatcccctcctttcctcctcctccgaccactgtgcctcccctcctcctcggccaccgcacctcccctcctccttttctggccaccgcatctcccctcatcctccaaagctctggtggcgtggattgatgtttggttttgcaaatcgagcttggtagcgtgaatcgatctccgagggcgctagtcagacgctagcggatgatcgagctcgggtggtgtgaatcgatctccggccatgcaaatcgagcaccggtggtggatctagaccaagcggtgtggcaggtcgatcatgggcggagcagagaagtggacgatggcgagctcctctgcgcggcggtgtagtttgggggacggcgagctccctcccaggtctccatgatgagctccctcaccggccaccaagatgagctccctctcttccctctctccctttccttgcagtgcgggtcacaaactataggctagaactgacgaatcctagcacatcccaacgaggaacttgtgcccaaactaggatccgcgtacttcgcagagtaacgagggacgcagacgtggcatagaatctttgacatagctcgttgggggtagaatgacacctaatcacactgtgaaaagccctaacaagtgaaatatcacttgtccttataaacaccgtgctgttacggtggagttgtggatagatgtcttcactcactaagttcaaatcctgatgcttaaacatattatgcacacaaaggtgagctttaactaaaattttagcgagttgaaagatgtgccgctagactccatttctttaagtttatgtgagaagacaaatttgtgagtgtatacgtacgatgctacgtgtgtaatagtgtgtgtgcatgtgcgtatgacatgtaagtggaagaaactttacttgtccttggagtgccctgttattctttgtccttccccattcctcacctcaaacttaaacatccgcacggtcaccaaaaggacaacacgggaggaaaatgactgaatcccaaatcttgcttccctatgtttaaattgtagttttaaatttattgccaacaaatcttgcttaccgatataacctattatctccattttgaaatataaatgcttctaacatttaaaattagtactagatataaacacctctagcactattaggagtggggctgcaggaa

SEQ ID NO: 30567 - DNA, 852 bp, Oryza sativa
aggtttgaaatttcagttgaacatgtcattttcaaatttttattgttgattcgttgcttgaatatcctttatatgataataaatatctaaatattaatagtcttttccatcagtatcatatttcatttatggagtgatgtacttatatcatctaaatagtaacctggaacacatcacatatgttattgtgctatgagaagaaaaataacatgcattattgtagcttgacatgtgcaatatagtgaccactaatttgcacaaaggtttgaaatttaaaagttgaacatgtcattttcaaatttttattgttgatccattgcttgaatatccttttatatgataatcaatatctaaatattaatagtcttttccatcagtatcatgtttcatttatggagtgatgtacttatatcttctaaatagtaacctggaacacaccacacatgttattgtggtctaagaagaaaaacaacaggcattattgcagcttgacatgtgcaatatattgaccactaatttgtacaaaggtttgaaattttgaacatgtctttttcaaattcctattgttgatccttgaatatccttttatatgataatcaatatataaatattaattgtcttttcgactagtaccatgtttcatatatggagtgcggtacttatatattctaaatagcaccctggaacatagcgtggtcgttactgtggtacgagaagaaatatatcgggcattattgtggcttgactttggggcaatattgcggctattaatttgcacaaaagtttgaaatttcaaagttgaacatgtagttttcaaattattattattattgattctttgcttgaatatca

SEQ ID NO: 30568 - DNA, 2043 bp, Oryza sativa
agaactacaagagagagctgctgttcttctctgtccctctatgcttgtaatgacttgatccactacctcaacctctagtcgtgagtggagagctcccggtgcctcctaggcctacttccatgtgaaccagcactgtttgattccatgcacttatacttactgtatgaaagcttcatgatgcatgtactaattaattaattaatgctgtgatcgatgtttagtttttttcctttcacgttgcatcttgcatgttttcggcgaaaatacaattcactatgctgaactcaccgcacatgtgtattgacaattgcaagggatggccgtcgtcattgtaaacgcttccctaaaactgctcttccatctctttctgtgtctttctttttaagatgttggaacaattgtagatcgcaactcgtttaatttctttttcatctctttaggcatataattccttttaaaagaatagataataataggtttggcactttcaaaagctccttagtgagacggctaacctagacagttaacgttagcactccctggtgtagtcttggatgtgtgggtctcggtggtgggagggcgggggtcctcctactttgtaaatattttgttctttgttttttcttccccttgaaatgaaacgcagttctcctgcattttttagaaaaaaaaaagaataggtaaatgggtgactgtgtgaaagctttacaaagtcgaaaggcacattattttttttgtgctaaagtttgccggcctaagaagaaaaaggtagatcattacaaaatgctccacacactaaatggtgggcaatgccagatttcttccaccaacttgcaaattctttggctatgccataaacttaattaatgtaatttgtccatggaaagatttcagaccaaacttctgccgcatatatacatgcatcgaagctgaaggtccatagctacatgcatgtttggctgactaccaagcttgtgaaaccttcttatgtggtcatcttcctcaacttgattcgttggttggtgtcaacatagaggacaaaaaaattagaagttatccaggagagagctagcctatatctgcatcagcgtagcattatttgtttccagcctatctacaagttggaaggagaacatgatactgaaagttcatgtaacatgacaattctcgatgccttccaaacctagataagtattttggcttttgtgtatgggcatccatatgcatatatggacatgaagtcaccacgattcactatcactctcatgtttcaggcttagagttttctcatctctcatatatatggtccaaaaagatattgtatatatggttaaacattgtcaccttattaattcactacatgcaactatattaaattgggaacctagctagctacagggttgccagctgaaagtgagctgtgtaggttcagagtattctttaacttcaatccttctaatttttggcccaactgtgtttccttttcattaccctccttccattttgtttgaatgcgggaagtcacctgcttagagagaataaacttgctgttgggctgattttgccccaattactagtttggcccagctcaaaacaagaatgtaccccatccgttccatgaaaaacccaatcctacaactataaatctagataaatgtgtatccaggtttgtagctaggattgtttttttttaacagagtagtaaactctgttatgcttatcaatttgatattggagttgttgttttaacatctttctaaaatttgaatactatttattcttgtccaaagtttctaagtataaataaagttttcattcccgatgaacgtttgttagcataaagttatacaatttagaatttttgtggtagaaagttttttattcctttagaaaattgctagttaaactgcttttttactatcgtataaagtttctgaacatatattttttatttttgtagaaagtttatgagtaaaattctatttattatttgaatagactttggattgaaatggaagtttcataatgtagtaaaaaaaggtt

SEQ ID NO: 30569 - DNA, 1933 bp, Oryza sativa
aagcaactgtgctactcccaatgcttcccatgctgactagctaggcagttcactgtgtgtagagtttccaacagccctacagattacaaacgtgcactcacctgttccattttcagagcctgtctcaactctcttttatggaccagaaaggatatttgtgatgatcctctatggtgtccgggataggtaaatgggaaatagataaaagaagaaccaatttagggataatttgtaatgtagttcaatgtgcaccagcctactattgaatgtttgattaacttttaaaaaattcagatgtaagatggtgaggccttccagttgccttatgggatcaggattattcaattgagcattaaaaaggttgcgatgaaattaggtgagagaacactgattaatatagggatgtttcgtgtcgtcaagaattcgtggatgactatatctgacagaaattcagaagctatgaaaattgctgttaccaataggaacaaaaacatgcgagctcagctctcaaaacatgccagattcaaaatcctatccaaattataaaaacctgtgaaatacgactataattgatcaagatgctgcaatcggttaagaacactggcattccatttgcaaccatgtttaagccaatgcaactattgaatcaagatctccaattcaaaatcgaggtaacatcctgcacaacattgtcaatcaactaccagttctaccactgttcctcataggcaaaatgttggtcattgcaagaacctaaatcagctacctagtaagacataatttgccacatgctcacatgagatcacatactcaacatccgtactcaattgacccagccaattcatcacttcaaatttgaggtcttcaatttagcaaccatgcattttggtagaatcaaagcttgaccaaactagcacaagagttcccgatgcctcctaggcctaccacagacaaaaccacaggagctagcaaactccatgggctaattgtttttttaactttcattgcttgcaggttgcagcagttgtgtgattcttcaccctgcatgcccttttatggaccaaaacagatcatcacgcatatcacacaaggatgaataatgtactatttgattccgtgcagttattcagttgatcaccttttctgtcacatgtgccagcaaaaatatatagttcacccccatgttgaataatatatagttcatcatcgcttcgcttccattgaacttctccatcgtgtgccatcgatgccatggatctgagatcgatcgcgccaacagctagcgttgaactgaaaggaccagccatcacaataatgcctctgctactcgtgcagcgtcgctgcgtacgtaggcgaaagaaaaatctgttgtttttggttagaaggctttgtaaactctggctttcagaaacagagtacagaatgttatgtgcgcagttaagtaaaatccagaaaatcactgatgcagcaattcgttgagaaatttctcagtagttgcctcatacgagttaaacactgcaattcttgaataaactgtctgttttacacatcgagctcatgcgctttcagtttatgacacacaactacacaagtcaactaccagttctctgcataatccagtacatttttgcagtgttcttgtcgagaagatgacctctgacagcaggccagcgccacttagcattctgggcttatattccagccatagctagtatttggttcagtgtatatactccaatcatggagctattgtcattgcaaacacttgaaagtaagtctccatttgatcaaagctatgactaaatgaattatcatgattgagacagggcaagtagaacatagatagatctagagatcaaatctagctagtagcaacgctgaacatatctactagattagccaaacaaatggagtggtcatcacacctcgacaa

SEQ ID NO: 30570 - DNA, 10841 bp, Oryza sativa
gcatggagaatcctcttgtgggtacgtcttcgtgccacatgtgacaatatgccaatagagtggagtaatattaacccactctttctagtgttaatttatacaaggcactacatgatacactagctagtacaaagaatgttaatttctagtgttcaaagaatgttctttcacttctgaggtgtggaacaaaatctgcacttggaaggggttaggtcaaaactacctacctaacaatttggatttaaaaaattggtggagcgctctctcagccattcaaccgaagcccttgcaaaaaagaattttaggttgtctgataacctcctggtggaacatttagttggagcggaataggcgtattttccaaaaaaactcccacaacggttgatagggtggctaccctaattcttcaagacattgatcaaagacttttggctttccaacccccttgatgctgcccttgtttttttcccttttgctccattttttgttattgtgttttttgtgttttcttgtctgtaaataacttttatttcgtctaatatattccggcagtccttctgccgccgtttccctaaaaaaaaagatacactagctagtatgaatatgttatgtattataatttgatatctcatgacagtatgacattggcctccttagggatccgcaggtagcaaacttgatcaatccaccaatcttagggaacagatccttatatatcatgcagccatggtgcaaacttgtatcggggggtgccgatatactgaaattttgaacaaaacttggtcaaatttgaacaaaatattgccaaattcaaaaaaatgaataacaaattaaaaattcctgccgaaataatatcatgggggggggggtccgatagaaccgaaatttcggaaatttctttccaaaattttgaaccatggttatgtggatcagatcaacaatcgccatcgacaataaagccacagctgatcaacaaaatttgtttttgtttttgtttttttttcaccggactgacggtgaagaaaaggcccaaaaaattttattaagattaagaggagatgttgcatctaaatatgtggcatccccaaatgttatcgtgacaacactccaatcttgggcaatacaatggttctgttctctacgatgcagcctcctccatcgagcaaccacacacacttgtcactcataacacttcatccatcatctttggatgaggctgttgttcgattcaacttctgtcgagcactagtttggagggacatcacgtcggcttctccatcattctgcttccgagagggaaaggtgctcaaatatatcgaactattcgctacgacatgcaatagctaggacactgtagtagttcatcaggcaatgtttaatatgttcaggtagctagcgaccatgctccatatgttttgtgaaatcgtaggttgcccaatcaaactcaatgtctcctggtgcctccaaggcctatagcagcctccatgaacagacctagctatctctcattgcttgcactacttgtgcttatccatcaccagctcttttatagagcaaaacgagatcagtacatatatatcacacaaatacacaaggatgtacaccagaggcatgtgctcatgtacagatgttcagttaaccaacttttttccttcttttttttgaaataataaaataacacctacaaggcatgtattgatgtacacactttcagttagcaaactttttttcttcttcttgtcttttttggaaaaaaaatggcaaggatggacttagcattcattattgataaaaaataaatgatggggggaacataacgatcactcttgtcaatagcatactcttaacaactctcttccaaccaacctatgcatccttctcaaccacttttttttctgaagttgcagatcaaatatttcagttgatccaaaaaaagttgagcgatcaaatattttagttgatcaattggtgaaacattaagttatacatggtgaaataaaaaaaatagtaattaaaacatttaaaaattttgtggaatacaacaagaacacacattgaaatatattgctatcacttatgaaacaatgagttttagcgggttgaatcatttgtttttcttcatcaaaatataattatgtgatagcttgttgtaaaaaatgaattacaacaaatacaatgttgcgtttggatcgtagattggataaatagtttaggagaaaaattattttgaagatcattacatgcatgcgtgcatgcatggagtggagagagagtaattagtatggtaggaaaaagaataagagcaggtagttgcctaaattttatgaaatataatgaaaatgcacactgaatcgtatgatatcttatcataaatatttaattacaacgaatacgatggtgtaatcagatattatatcatataagcagtttagaaaaaaatactttaaagattgataaatgtatgtatggatgaagtaatgtagggagagcagtattgcagatactgcaatactatttttcttccatcggtagacccatgtgaagcggtgtccggcccaatcacttgatgtggcagatagatgcaactatttgacaccttacaaatggcaccttgtcaggccaatgtcaaaactctagtttctcccaatgtcctgagattcatacctgacaaatttatttgggaatacgcagaaaacttgttcatcattgtatcaagatggaatgggtctatagtacaaaacacaaaatgaaaagagcaacaacgaaactagaccctggtaaactgaacacgcacaaagtcagaaatgatcggccaaaattgactggttctttctgttcatgaagtgtactttaataagtgaaagaaaatcagtgatctcggatacaaggtttttatatactctgtctttcaggaacagagtacagactgttacgtgtgtgtgcagttaagaaaattcagaaattcacccagatgcattaatccattgaggaaattctcattagttaccagatatacgagttaaacactacaattctttgaaaccggctgtattacacatcgagctggtgtgctttcagttcatgacacaaatcaactgccagctctctgcgtaatccagtacatgcttgcgacaagatgaccttttccagaaggccagcactgctgagcatcctaggcctatattctggcaatatcttgttaggatataatatttgattcgatgtaattaattattcagtatgtatgtgccgatccattgtgcaattgtcactgcttagagttgtatgtagctcaccattcgattaaagctatgatttaataatcagctgatcagttcatttcaatttatggttgaaacaagggaagtaaaatttggctgcaatttcaaatatatatctccaagattaggcaaccaaatggagtgtttgtcacaccaccaggagaaagtcagggaccagtttagtataaatcgccaagattcagacgtaagatgtacatcagagatagtccgtttctttagttttgaagtatatgcaagtttaacgaacgttgtatttagcgattcaaaactatatatccactttggtatttacattcctgtacacacaacaaaatgaaccattaggatgagagcgaaatgctagttcaaatttatgctcgcttagctatgtactaagagaactaccaagctccagttcatgaatatgaatcatgtccatgattacggaaaatcctcttttccaatcaatggctcaacaaggtctcatccttgggcctcatgattatacatcatatcgctttgtcctacagacaattcccatgcatctttatcaggtaagagtatgatgctggtgttctgcccccctcaatgctctaccgaaaacacgacccactgtctcagcatccacacatattaggaaagctcccggtgcctcctaggcctagctaccatgggcaagcgacagttcacaagacactggagccagtttcacttctatgcgaagttgtgaactaacactcattatggacgactctgtcccttttcagctcatagctcttggttcctcttttataagccaaacgaggcctttatgtgcatataaggaccagtgagtgaatggtgaggcctttgtgtacataacccaaaaaaaaattatgtagatttctgcattttggtttctagaaaactgcagtagtgataatcaattaaatcacagcagcacatacataaaaccaaaacgtcattctttctggtagtgacagtaagcttggaacagtggattcatatgtacttggtactccctctgttccataatataaggcacaactacttttctttgatgttccataatataaggcatgcatgcatgcatacaattaactaggacatcttctccattgaattattattttttaaatcccccactctcaagatctctaattctattagatgcatgcattatatttattaggatggtccaaactaggagatgataataattgtttcttggtctttgtgttaagggtggttgtgccttatattttggaatggaggatgtaacacataaacgacgcatccaagaaagagtgtccatgctgctctgaaaatacaaggaattccatctgcgtagctactctcgttactctcatgtgttattttcaatgggtcatggacgatgtagactcagcaaagacagggatagtcgaactcccaatgcatcccatcctgaccatgggaattgtttcaataggatcagtgagcagagtttccaacatccatgcagattatagacatgcactcaccagttttaccgtgtctctctctctctctctctctctcactcatcagttaacagtgctagctctcatgccattcatatatggaggatgagaagtgttctctatatctacacaaggtcacaaaatgcacaattattcaagggagcatcaggtgctacagtatcaccatgctaccatgtggcaccatatatttgatgagtgagggagagacagtaaaactggtgatcatttttgtataaatcgccaaaattcagacgtaacatgtacatcagggatagtacgtatcttcagttttgaagtgtatccaatttcaacaaaatttggagttaggaattgaaatctaaatatctatgttggttttagtattctttgtactcacaagtcacaacagatgaaccattaggaagagcgaaatgctatattcaaatttacagtcgcccaatgtaccgagacaaagcctatgcttcagtaccacaatatgaacaagtccatatatcagtactgaatatcacctagtccatcatcagctcagcaaggcctttgtcctgaagagaattcccatgcatttgtatcctgctgaacatctacaagattcagatgctggtcttctgtccccctcagtgctctattcaaaacttgatccactatatctctgagtccacacatatcaggaaagctcccggtgtctcctaggcctagctaccatggataagcgatagctgacaagtcactggagctactattacactgttacttccattcgagcattagctgacaagtctctgcttctcatctcttgtgatttttcttttataggccaatgaaggtctaacaatttccgttgcattttgaggcgttcatgctttagcttgactagaattttcctgccaatatatatggttttgcattgcatcttgactccacacaactcgcgaccacatggaatgcacttgctcatcaccgcggagctttcttctgttcaccatgtcaccatggctagatgcattcagttttaaattgggagaccggaactgcgtataaatcaaaatattaggcgaaatttatttgaacatttctggccaactcaacctaaccagtagactgtgatctagaggtgcttgtggacattcagttggcagtaaccataccaaatttaattaaatggcatcatatttggacgctttgacacttcatccatcatttttggacaagagctaaatgtgtttcaagtaacatctgtcaagcactggtttgatggcttcatcacatcagctgcgacatcttagagggaactgtttgaactgcatgtaggacacagttaatgctcaagaccttttggtaaattcagggtagcccaatctaacacaagggctcctggtgcctcctagtcctaccacagcaaaagtcagaggagcagcctccatgaacagaactagctatcacccagtgtttgctctacttgtgcttattcatcacaagctattttatagagaggaaagagatcaacatatatatcacacaactacacaaggatgtacttctatttgattacaagttgttagttattcagtgcctatgagaggcatactcatgtatagatgttcagttaagcagttaaccacctttttccttctttttttttcgaaacgaaaatatagcacctacaaggcatgtattcatgtaaattgttcagttagccactttttttcttcaattcttggaatgatgaatcaaaatggactggtcggttgatttgacagttctctgttcatgattcttttttcttttttgcttgaacacatggacatgcaggagtgttcagcttccttggtcacatgaagtgtactctagcaaatgaaataaatcatctgcttgtcttggttccaaggttttacatactctgccttccaaaaaacagagtacagacctcaacgccttgtggcgaacgtcatctcgtcgacgacacataacatgaacacagttcacacataatttatttttaatcactaataaatgttgataaaagggaagtccatattcggtgaataagcagacatatgcagttgtcagagaagacagatggaggcgagatgagatcggactatcctatcatatcaagtcgccactagaccacaaaggagctggttttcccagtacgtactgcactctggggtaactcctcatgatgtttcccttgggttccatggcttataccgagcactccaaaattcgtaaaactctcattgaaaatacagcacttgtgataacgtaactctcgatgcctcccaaccctacatagccacaaaacgaagtaaatgcattttcagtttggtggtatctaaatgattctgaactcactgctatatatcggcatgtttgtcttagcctctaatatctttcatgggccaaaagagattgtatatgatatgcatctgaaatcgaaatgtactacatgtattaactcagcagcagatgcagtcatgtcagattgggcacttcatctgttggggcctatccccactacttcctttgtaagacgttttggggttcaaatagattcatgtatggatccatttgtatgcttcatatatgtgtctaaattcatatggatattaatgtatctagatgacggatggagatgtccaaatgtcttataatgtagaacatagggagtatatatgtttattgaaaaattaccgatctcactataaattaaactgcccatgctgttgtagataaatttcagttcgacccaatgaaattaggtgacagtgttgaacataaccgacaaatttcagtacagttatgaatttaatatcctaggagtcttccggttagattcacaaggtggtggactagctagcctcggttcgaagcatcatcctttctaattttttgatattaggtcgttctctaatatttgtgtttttttagagtgttattttcttagatatgggataacgtaactaaaattccagcttatgcatgatgtgatattttttttatagaaaccgttatacggctaatcaataaaaccacagcagcaacagttattactagcacattacaacagcggagaaactcctggtaacttcaaaatgatccaaagaggatgagtatggtgatgaaaaacaaacttgatctctgtctagcacaaggaacaatacaaagagaggaaacattccacttctgtagtacatgtttgtacattattgcttgcttttcaaagctacattggctcctcctcaatttgacatgctatgagcctgcagtcatcagtgttggcatgttttgctctgtccatgttccattaacttgtctaaaaaattagttgcacattatcagcacaagggctcagaagtcggaactcatgatgtttgaataactcttggacttcttgttaacagattacagctatattgtgcattgttgcaatttacacacggatcatatgagctcttaaaatcaagtattgagcaccttatctttactcatgcttctttgacttctcttttatggaccatgacaccatagtatgtaaggatgtattaatatttgattcaatacagttaactatgaaatgtctacatgttcattgtgcttgtgcatacagcagcaggactagaaatagtatcattcaagaagtagttacaatggcaagagaacaaagaaatgtagtgatgtacgatagttcgaaattcctcagtcgaggatagcatatttttacaaccttgatctttccatgtctgcactctctatagtataagcaggggagttgcactatgacgctgtgggtaggggcctagcttcctgtccaatttcccggaaattgctagagttgctagacaacatttttccaatacctcctaggcctcatggcaaagtgatagaagcagtctccatgacagatgtatatctaactatccatctgttactgctagctagctattcatctcttatagctagctagatatatggaccaagagaggccatgatctatcgattgaaggatgtactatatatttgattccatgtaattatatatgcagcatctataatccagtatcaagttatgtatagttcattgtgcaaccaacatatgcagagtctaccgtatctagcagtaatgctgagcatctcttgaggaatttagctgctaaatgttcatgaaggcattttcctgcaaatatatggcaccttgtcaggccaatgccaaggctgctcaaagcaattaggttcaaagttcagacttcagacttcaaacgtgacaaacttttgattgacgcatcattcattaggaaggagtgtaattttatcatttttgaaaaggtacctagaggtaccatatttctggtgtaaaattcagtacctctaggtactaaatacctcaaggtacaaaaaattttagtgtaaaatttagttacctcaaggtacttttttaaggactataaaattctttcctctaggaaggaaggtgtctggttagtacaaagcacaaaatgaaaaaaaaaattgtgatgacaaactgaataggcatggcattttcatcagtcataagaaataaggttgtttcttcatttcaaggaatgatcaatcaaaattcactggtctgtgttcatgaattgtacttgtgtaagtgaaataaaaacagatttcttggttacacggttttatatactctgtctttcagggacatagtactgtgtgttgtgtgtgcaattaacaaaattcaaaactcaggctggtacatcaatcagtcaacaaaattcacagaagttagctggtacaagactacaagagtaaaatactgcaattccttgaagagaatgaaactaactattttacacatcgatcaagctcgtgggctttcagtttatgacacgagtcaaccacaaattttctacataatccaagctagcatccaattaaccataaagctcatccttgcaatgccatttatcataaaaattcagttgactaccaacaattctctaaataattcaatacatatatcatatccttgcacaccaatgttgtacatggcctttgccagaatgcatatggaatctccaaaaagcacatcctttggacgtgccaatgttccagttcattgatcaaccgccacacgaccgtgtctctaatcaatcgaatctatggctgaataatttgtcaactcgctctattccactaagaagtcccgtgcatgtgtatcctgctgatgatttgaaagaccaaaatgctggtctctagtctcctgcaatgcttcagctcctggtgcaccaaacaaggaagttcctggtgcctcctaggcctaacatagcaatgcactagatctaattttactcttccatctgaaccagcactcaccacagacgactctttatctctcttagcttggagctcctgatttctcttttataagcctaatagagtttgtcggtatggaggtttgggtctttccatgaaatgtactatagcatcgagaaattttaaaaagcggaaaaaatctagaatgtccgatcttgtttcgtattatcgtgtatgcattcaactacattgtagttcaatgcatgtgcacctaccatattgtataaatgagttaagtgtgcctgaatatatgttctgtagagatctgttgtcatgtggacatgagtataagaaacatttttgtttgcatggacatgtatttaaaagataaaaaatgttagtaacagaaaacttgcattaaaaagaactgacactaatcgtattggtgtccaactatagttgctcaaaggtgctggttctatatttttttcatcccgtgaagaagagaaaagaccaataggtactgaatttaaattaaccggcacctatgagctggtacctagctattatgggttttgtagtagtgagtccttccaatgaataactaaacttcgtgctaattgatacaaaaacacagtgaactgttataacaccaatagcccatgagttatttattcatttcacgtcagggtagagaagttatttttttcccttcacatgtgcttctatggac

SEQ ID NO: 30571 - DNA, 3162 bp, Oryza sativa
ataaaaagactattgtgtctctcattaaataaggacctccattcctaaatacttataaatattactttctaccctatttagtggatccaaaataaaattaaagggatgactcatcttcttcctcctttagcccctcctattctccctccctttctcccttcattctatcattttatcaatatcgatctaacacccacgccagatcccctgcgagtagaataaaagatattgcgcacctctcattaaataaggctagatggtttgggaaacagagagagtggttggtgatagaaatacactagctagtagtagtactcatctaaaaatgcttttcatatttacgtacaaaatttaaatcctacaaatgtatatttggaaactgatgcaacaaaaaattgtgacttgtgagtatatatgaactatagggccgtaaaattgtagctttatattacacaatcctttaattgggacagtattatactactccagaaaaaataacttaaatgattaactaaacgtgacacgtttaaaattaccagaaaaaataattatcagatctgacacatgcagttagcaccacaacagtaggagtattaatttggttagattaactcaattagttaatgcgtgcgtgatccttacttaaatgcggttgctcccctggttggtcaaagagtctgcagcagcagcacatacagctagcaatggtcggtgcagaaaagtaaaatctggtttatagtcaatcaatttgcacggttaattaatcatctactactagcatctctgaacattttagtcagaaacagcgaggcaaatgtacatgtactacgtgcaagctagctagggtggcagaaggactgaaaaaataattttaacagcaacacattctcttttctttgggggtccaaccataatataacgtgtgtgtgtgttttcagttaaatattgctttccaatccaatggtccagatctgtcgttctatgatgtctattggaggctttactcattacacacatgtatatatttaagttcactgaattttgctattgatcaagtcaaaatattacatatcctgcatccaaaaaagctagcccaagtgcggatttagggctcggtgagacaccgaatggttacccgggctcgcagggcccaaacattgaatatatatatatatatatatatatatatatatatatatatatatatatatatatatgggggcaccatggtgcccgggcaacatggtatcaaatacacaaaatcattcaaatttttcaaaattttcaaattctgagtatatacctagttataataactcgattcatacctatacctatcaacaaaacaactcaaatttaactttatttcacaatccatgattacatacctaactaattatatgtatggatgctatatacctagaatcaaaatctaacaaaaacaagttcaaattcagttcaaacttgctttgaactagttagtaaagtagctaatgttaatatctaagtaattgaaaaaatttcatactcatttgaattaggtatatactcaatttcaacaatggtgcccgggcaccatggagcaccaaacaaatttactatatatatatatatatatatatatatatatatatatatatatatatatatatatatatatatatatatatatatcccaaattaaatgtttatttaattagaccgggcttcgtccaagaccaaattaatattcctcgtatatgaagggacatttataactggaaattaagggaaattataattccatggccatggaaatctggaaaagccagcactattccatgttatttttgcgaaattataattcctaacggttagcttaattataaatgtgtggtggtttagcttgcttgcacgcatgtgcccacaatagttaggagtttatatatgttaacaataaaatgcagggccagccatgcatggtcaatcagcattcatgagccatatatatatactattaagtttggtatacaactttttgttgttattaatataccaaatatttttggaggtcacacacacattaattaattcgcgtgtgcactgaggttaatggagctagctgtcatggtaattaattaagagattttccattgtttgtgccagatagatagccgtccggctctccatctggaagattagcgtagctagctcacagtggcctccctcccaacactacacgttagcatctctgatgctgctaaatatatgcttagtgtcattgttggtgatcaatggtgagacagtgatcaacatctatatgtaggagtgtgtgtgtgtgtgcgtgtgtctctatatatatatatatatatatatatatatatatatatatatatatatatatatatatatatatatatatagagagagagagagagacagagagagagagagagagagagtacagctggggatgaaagaaagctaatcaattaagcaagctaggatgattatgatatatcataggtgctacatacaactatgccaaatggatggttattaattgacacttgatgccaattttcttgtgaattcacgcaattgttggagtgcccacacaattgtatgggtggacattactaaaacatacccatcagatggcgttatatgattttgtagtttcaatggatgggtggttttcatcgcgatttaacccttaatttattgtcatatgggcgaatggtgtccagtcagtttcttttcacaaaattggcatcttaacttacgaagtgaactatataaataggatattaaatcaatatctatatatcatttcaaaagaagataatggttgtcaccctagcaattaactctaatgtatagagcattgtattaccaactgctttattaatactacaaaatagtcctcctacatacgatttatttcaagcaattaatattaacacacatgtataatttattttaatctatagcgaaacacgagtattaactagtggcttaagaagccaaaagggaattgaggaagacataaattaatgcagcagagtaaacattaattgacatcagagtatttaaatatttttcttgagtacctaaagtgcaccaatttcattgaatatgacatgagaaaaaactgctaaaaacggaactttacaaggaaaa

SEQ ID NO: 30572 - DNA, 1243 bp, Oryza sativa
tctcgtgcgcgccgccgctgtccctccccctcggtcgacgcgccgccgagagcatcgccgggaccagccggtgtcgcgccgcccggcgcttgcagccgtcgccgcgccgccgggagctgccgtcgctgcgccatcgggagccgccgtcgccgatttgtgtttaattgctcaagcactgatttgatgtgtttctttaaccggggacggagtaaccacgggaaaaaattcaccgcgtggtgatcgggactggtgaaaatatagccccattgtggttgacggaggcggggacggtgaaattttatcaccgcggtgacggggacgccgaggtgacccccgacggtgaattcaccggtaccatctctactctcactgctagtacaaaatacaacacgacgcatgaatcgcggaaccgatcggacggcggatgcgctaggtgccgttgcactgtacctaggtctagaaagcgagaccggggagagaagctgccgccgccgccgccgccgccgcgctcatgctcgaggaggaacaggttgctaacgggcgacgacgacgacctgaacgccgtcgaacgtacgcggcggcggcatttgctcgatcgagttaagagagacatcagtggagactggagagagacccggtcgcatacgtcatacgtctatgcttcctttttgaatgggctcatttgagaatcgaagcccatttctgtactcgacaatgttgggccaactatcttccggcctatgtggtataagttcactttaggtccctctatttgtcggtcagtccgattttcgtcccttcaccacgaaaccggtacgacccatcccccaacttgtgaaaccgggcaaacgaggtccctcggcagtatggagggtggtttttgccgacgtggcatctacatggcgcctacgtggttcctttcactagttcttcgttccacgtggcaatgacgtggcgtttacgtggcaattttatctccaaaaaataataaaaatagtgggacccatatgtcagctacataaaaagtaatttaaaaaggtggggcccatgtggtcccacatgtcaccctccctcttctctctatcccccctctctcccccctatacactgccaggagagaaggttgagcggcggcaccgagggggcgacggagcaaagcggcgcggcggctggcagtggacggagcgatggtgggcggctggcggtgggcagcgggaggaagcggagctgagcagcggcgggg

SEQ ID NO: 30573 - DNA, 859 bp, Oryza sativa
attacaactgtttaaatctttcaacttctgtttataaatgctcgctttatgcaaatgaaccactctagctctcctttgataattccctgcatcatacccctattccggtatgacttgctgagtacagtgggtagtactcagtcttgctctttttttttcccaaccccagagttcgggtatgtgtcagatggagatttctctgaggagtaggcttctccgtgccatcgagggtgcctgtggagtggtgttcccgctgcagttctagtcaaggcttagctcctgttgtcttcctttttccgctgcatttatgtaagacttttatgatgtttgtaagacgtggatctgaatgtcaacattgtcgtttgtgtaccccggccggtcctggacggggattttaatgcacattctgcttggaattctattcgggaatttctgggcgtgacagcgggagcggtgtcgtcggcgtcgctccgcccgccgcccgccgtcgctccatttcgccccgctgctgctccgcttcctcccgccgtcgctccgtccaccgcccgccgccgcgccgcttcgctccgttgccgcgccgcccaccatcgctccgcttcctcccgccgccaaccgcgcaccgtcggccgccacgccgcttcgctccgtcgccccctcggtgccaccgctcgcccttctctcatggcagtgtagggggagagagaggggggatagagaaaaggaggctgacatgtgggaccacatggccccaccttttttagttattttttgtgtagctgacatatgggtcccactattttaattattttttcgagataaaattgccacgtaatcgccacgtcaatgcccgtgggacgaa

SEQ ID NO: 30574 - DNA, 14223 bp, Oryza sativa
agcatcactgtgcacgatctctaaatttcgatcggctaattaattgtttttttaatgcagtaaggttgacccctcgaaattattaagttggatgctgtctgagaaataattaaagtattgggcagtgtttttctcgtgtgttttatttacttctagaactgaagacaataagagcaagtttaatagtatagccagctactagctccaattcatatatagccaatctaatagcttattcatacaatagttatgtactacactattaatacctggtcccacctgtcatacacacattgtgtcttggagtccgtgctacagctggctacaaatctgtagcccgctgctcttctctctccttatttatcttcttaaaatatattctccttatttatcttcttaaaatatatttgtagttggcttatagcctactattgtacctgctctaagtgagtacgttatataagaaattagccgagtcgtgccatatgcagcaggatatacctatatataataccttagagagaagagttaattatatcatgtttattgctgaaaatgatgctgggttaattaattaattgatgagatatggggttactgtaacaagaatatatacgagagcaaactaacaataatactccatctaagcatacgttttatccaaatatcatactagtagtattatttatcgttctatcatataattactttccatatcaattccaaataattgatatagactagctattcgagggggtcaaacagcacgtactacccactctgcagacacactttagagatggccttccatcttaacatggactgcagatacacaaaaaaaatgatacatactcttaactggatagcacaagaacatataaaaccgagcaattgggatccattcataactgcaattgggatccattcataactgatggacgacgctggcaaactgcaccataggacacctaggaaaggaattcgcaccctactactcctaacgtcttgggagatcgatatggaattaaggagaggtaccaaagggtgttctagcataaagagctcttgactttagttctcgctgcaaaaatcaaggaggctaaaacctggaccctagcatgagcggaacgcctagcgcagatcttaccttcgtttcctttttttccttgtaaagttccgtttttagcagttttttctcatgtcatattcaatgaaattggtgcactttaggtactcaagaaaaatatttaaatactctgatgtcaattaatgtttactctgctgcattaatttatgtcttcctcaattcccttttggcttcttaagccactagttaaatactcgtgtttcgctatagattaaaataaattatacatgtgtgttaatattaattgcttgaaataaatcgtatgtaggaggactattttgtagtattaataaagcagttggtaatacaatgctctatacattagagttaattgctagggtgacaaccattatcttcttttgaaatgatatatagatattgatttaatatcctatttatatagttcacttcgtaagttaagatgccaattttgtgaaaagaaactgactggacaccattcgcccatatgacaataaattaagggttaaatcgcgatgaaaaccacccatccattgaaactacaaaatcatataacgccatctgatgggtatgttttagtaatgtccacccatacaattgtgtgggcactccaacaattgcgtgaattcacaagaaaattggcatcaagtgtcaattaataaccatccatttggcatagttgtatgtagcacctatgatatatcataatcatcctagcttgcttaattgattagctttctttcatccccagctgtactctctctctctctctctctctctctctctctctctctctatatatatatatatatatatatatatatatatatatatatatatatatatatatatatatatatatatatagacacacgcacacacacacacactcctacatatagattttgatcactgtcacaccattgattaccaacaatgacactgagcatatatttagcagcagcagtgatgctcaagtgtagtgttgggagggaggccactttcagctagctaagctaatcttccagttggagagccggccggctagctagctggcacaaacaatggttaatctcttaattaattaccatgacagctagctccattaacctcagtgcacacgcgaattaattaatgtgtgtgtgacctccaaaaatatttggtatattaataacaacaaaaagttgtataccaaacttaatagtatatatatatggcttcatgaatgctgattggaccatgcatggctggccctgcattttattgttaacatatataaactcctaactattgtgggcacatgcgtgcaagcaagctaaaccaccacacatttataattaagctaaccgttaggaattataatttcgcaaaaataacatggaatagtgctggcttttccagatttccatggccatggaattataatttcccttaatttccagttataaatgtcccttcatatacgaggaatattaatttggtcttggacgaagcccggtctaattaaataaacatttaatttgggatatatatatatatatatatatatatatatatatatatatatatatatatatatatatatatatatatatatatagtaaatttgtttggtgctccatggtgcccgggcaccattgttgaaattgagtatatatccaattcaaatgagtatgaaactttttcaattacttaggtattaacattaactactttactaactagtttaaagcaagtttgaactgaatttgaacttgtttttgttagattttgattctaggtatatagcatccatacatataattagttaggtatgtaatcatggattgtgaaataaagttaaatttgagttgttttgttgataagtataggtatgaatcaaattattataactaggtatatactcacaatttgaaaattttgaaaaatttgagtgattttgtgcattagataccatggtgcccgggcaccatggtgccccatatgagtgtcctatatatatatatatgtatgttgcgcagcaaactgcatcactgcaacaaatttaatctgatcaggttgttgaaaagcaggtatatatacatatccatcactaattaatccacatgtataaattatactacctaaattaaaatttcaagttacatgtgtacggggtgcaatttttattagcaaattattaatgaaactttgcaggtggggtcacgtacaagctagaatgacggcatatgacgatgcatgtcactgttcaagaaaaggaacagcttaattaattaattgaacttgtaccctaattgctacaaaatccaaccaccattatcggccttggtacggggttacggacgcttaggttttaaggtgcctgctggctgtactgttaactaactctgtacagcatgcacaactcagggttaatttacaaactttacaacttattttctccgttccataaaaaatcaatctagtaatgtatgtaacacatcataattcaataaattagaacatgtttttgtccagatttattatactagattctttttttataggatgaggattacaaattaaggggccacacacccagctacagtagtcctcatgagatctgcctcacctaatgcagagatggccaatgtcctcctagcctagtagcttagttttctgctgaattttatgagggcaattaaggttttaactagacatggatgatctcttcgggttatactgtacttctttgatttcaccatcaatgttcgttactgcaatgtatccctctccccaaatactgtactttaaatgttacgcttataaacatttataagttgtctagcaggaattaaaaactacttttcaaatatgtttcataatataaggcgtgcgtgcatgcatgcatacaattaattactccttccatccctaaatataagggattgtgggcgtatgcgacatatctcttcctgtccagattcgttgtactagaatgtgccgcatctgaccaaaatcccttatatttagggacagagggagtagtatctttatctcccctaaattattgttttctaaatcatacattctcaagatctctaattctattggatgcatgtattgtattagtttaggttattcaaatcatgatgtgataataattgtttcttagtctttaggttatggtcttataggtggttatgcctaatattttaggaatggagggagtattgaataaaaagactattgtgtctctcattaaataaggacctccattcctaaatacttataaatattactttctaccctatttagtggatccaaaataaaattaaagggatgactcatcttcttcctcctttagcccctcctattctccctccctttctcccttcattctatcattttatcaatatcgatctaacacccacgccagatcccctgcgagtagaataaaagatattgcgcacctctcattaaataaggctagatggtttgggaaacagagagagtggttggtgatagaaatacactagctagtagtagtactcatctaaaaatgcttttcatatttacgtacaaaatttaaatcctacaaatgtatatttggaaactgatgcaacaaaaaattgtgacttgtgagtatatatgaactatagggccgtaaaattgtagctttatattacacaatcctttaattgggacagtattatactactccagaaaaaataacttaaatgattaactaaacgtgacacgtttaaaattaccagaaaaaataattatcagatctgacacatgcagttagcaccacaacagtaggagtattaatttggttagattaactcaattagttaatgcgtgcgtgatccttacttaaatgcggttgctcccctggttggtcaaagagtctgcagcagcagcacatacagctagcaatggtcggtgcagaaaagtaaaatctggtttatagtcaatcaatttgcacggttaattaatcatctactactagcatctctgaacattttagtcagaaacagcgaggcaaatgtacatgtactacgtgcaagctagctagggtggcagaaggactgaaaaaataattttaacagcaacacattctcttttctttgggggtccaaccataatataacgtgtgtgtgtgttttcagttaaatattgctttccaatccaatggtccagatctgtcgttctatgatgtctattggaggctttactcattacacacatgtatatatttaagttcactgaattttgctattgatcaagtcaaaatattacatatcctgcatccaaaaaagctagcccaagtgcggatttagggctcggtgagacaccgaatggttacccgggctcgcagggcccaaacattgaatatatatatatatatatatatatatatatatatatatatatatatatatatatatatatatatatatatatatgggggcaccatggtgcccgggcaacatggtatcaaatacacaaaatcattcaaatttttcaaaattttcaaattctgagtatatacctagttataataactcgattcatacctatacctatcaacaaaacaactcaaatttaactttatttcacaatccatgattacatacctaactaattatatgtatggatgctatatacctagaatcaaaatctaacaaaaacaagttcaaattcagttcaaacttgctttgaactagttagtaaagtagctaatgttaatatctaagtaattgaaaaaatttcatactcatttgaattaggtatatactcaatttcaacaatggtgcccgggcaccatggagcaccaaacaaatttactatatatatatatatatatatatatatatatattcaatgtttggaaataatcatgagagatgaaattagataaagttctcatgagatttactagaactcaggcccgggctatggtctaaattgctcaggacctggatctgttcgtgttaaaagttacttctttcactttttttttcatatatgacgctgctgagtttttgacaaacttttgactatttgtcttattcaatttttttataaataatcatgttaaagaacatttgataataaatcaagtcacgataaaataactaataattacataattttttttgataaggtgagtgatcacacgtatcttaaaaaaatttatggtgttatacattggaaacgaatgaagtaattctttttgaaaggagacacacaccaacatgctccctcatgcatatataggggcctcagccctcatgcatggtcggctgcatgcactctgcaaaagtacttttatgtatatatataaccaagattatattgttcatacacgggaggtttgttaattcgttagcatatggacactacatgcaggaggaccatggaaaatcgtctctctatctgtctcactctaccaaccgtccggctaggggcggattcaacgtgggtgcaggaggactcaagtcaagtcccccgcactcaccggatctatggatacccccttcaattttttcgtcatggttgataagatagaagatgctaaaaatctcttaatagcattttaatatagtttaatactgagatgatgtgtttataccggtgtactctggtatgttgagggacgtactctagtatgttgagtccctcaaactttttatttctggatccgcgcccctgcgtcggctgaatatatagttaaaaaatgtgttgggcttcttgaataagattgctacacgtactaccctcgagattaataggaccatatcacatgcattgcaaagcagatcaatgtaatgtaatgtacgtcgttgcaaatatgtatagccgacgaaattaattattagatcgatcatgatctgtatgcatgtacatgtgtacatgtctgcacatatatgttcatgcaggacagggacaaatcaagctagctagctagctatcgacacgatcgaaccactcaattggtagcacgtagtagtattaatttacgtgtgtcatgtgatgtatgcatgcatgcatgcatgaatgattgtgattttatacctatgaacgatttgtcgtatgtatgtatgtacttacgaatatgtaagttttgtttttaatcttaaaattctaagcacttagtatcttaaaatgcaaggtatttacttgtcggtcagcggacgaaataattatcctcggcggttttcatgctatatttggtggtttttaaccaccaaggacattctgttttcttttcttgtagagggaagttatcccacgtataaagaacaatctctacataaactttaatagaaaaaatataagagtattagagttattgggattcgtgtattaaagataatctattatatacatcacctcttaataatttatggatagatgatataaataaaattcaagtatacaacactactccataacagatttttccttacaactaaaatcaatttttcgcagacggctggatggcccgcgtgcacccaggtgtttacgaaaatcacatttcccatgcggccggcgcaaccgcatgcgaaaatctcatttttcacatgcggtcacctatacctaggtcgctcccgccgccatcgttctcagcgtccttcacgccagatccgttgtcgccgactccctgccattctagcccagtgtcggtcactcctgcccatcgtcggttgtcgaccctcccgccgctccagctacgttaccatccgcgtgcacgagagggatagggaaaggacgagtgagagagagagagagaggagggaggagaggataagagaggataggtggaggaattaatggagaggaattggtttttatacttagttcacaatgatttttgcaaactgaatctctataaggagggcaggaagcatatatgaaaatctgattttcgcaattctcatatgtggccgtttgaagaccctgggatagcgatttttataggcaaaaaaaacagttatggtttgcttacaatctaaagggcatctcgttcagaaaaatcaataaaaacttgctctcagtttacccatagctgctactccacaggcattaccaagctaactaaaatcgtgtcggtctgaaaatcaattaatcaatgagcttggacacaatgaattaattaaccagcggccactggagaccggtccactctacgtacctatcgatggctttcttggtccatccgtagactcgattgatcctagggtacaaattaatgtcaatcgtttgcttctctctccccaataaattaccaccggaaaattggtataattaccaatcgattcaatgggggttaatccggccaattaatccatactcgggggatacgtgagcgaggtagatatatagcatgcatttcttgatgaacgacaagaccggtggcttaattaatctgtactatagctgtgggtaaagtactgtggttgaaaattaatgacgcgatgtattgctaatggagtactccctccattccaaaatataagacacaaccattcttaacctaaaaatcaagaaacaattattattatctcttggtttggatcaccctaataaatataatgcatgcatctaataaaattagaaatattgagggtggaggatttaaaaaagtaataatttaatggagaagatgtcctaattaattgtatgcatgcatacatgccttatattatggaatataaaaaaagtagttgtgtcttatattatggaacggagggagtactatctatccccgaaagttactaatgccatatttgaaaagtttgaaattataagaaacaacttatgcgtatatagctggatggtaaaagtctctaaaaatgttgggtttctcgatcggtctcttgtttattttatagatattaaaattacgaattcttaaacctaagtgagaatccaatttctgtgaagctagaaactctagaataaactgcaaccgttatatatagtagatgattccccacgctttactgtgagaattaccaagcaattctcaatattatttttacaatcaagttagcagtaaaaagaaaaaaaataaaacatcagtgtttatcagtcaaatgatactcgtgctttagtgtgaaacatattgataagtatatgttaaatattttaaaagtgatagatatatttgttaaaatattgtgcaaaaatgatacgaggggtgatgattagatatgcttgtattttcatttgtagaattaaataaattgtagatcatgttttatatatgcttgcacgaggttaactatataattatagctagtgggtgatgatgtggtatggttgtatgcatgtttagctttaaattttatagaaaggataagctatatgaaacagagcctaattaaattactgttacgtactctgttgaacggttgtcaaaatattgttgatgactgggggagtactggtgtactagtgtactactacttcatgtgccctatgtctaccaccccatcccatagcctaattaatccctttgacaattaaatatactaaattaggaaccaataaatcacccatacaattaggtattgatataattatactatgtttgctgttaattagagtagatatatagcatccaagaatatatgtagtcaaacattaaaaatcttaaatcattaacagatcctataactccatttcaatttacatgggtattctagcatttaatttttttttcacaatacttgtcatgctcattttctaaagtatttttagaggtgactttcactgtctacctttagagcaaaggataataatgtgctataaatctactataaccttatttcgaggagagatgtaataaaaaataaagggtgttagctctcatacaagagttagcttaacacatgctctaagactacaaatacatcaaagtgagtgaaagaggtaggagaagaaaaattgaaaccaaccttatatatagctaatctattatactatatatgttagctttaagatgaacgaatagttgacaatgagctctactattagaaacttgctcttatcagtgaggcataatatagtactaatactttagagaagaactttttatgcttgctttataaaaatcgattgcgatgtaattaatgagggtaagggtaatttgccacacttacttatttggtgtgattttgctagaagcctagaatgacaaatagtaaaccatgaaaagaaggaaatataaaaatacttttactatgtgaaaatgtcactattagatttgctattaaagatactttcatattacttactccatccgtcccaaaatataagtatttttagcatagtgacaagtcaaacatttttaactttgactattaatagcaaataaataaaaaagatcaatcaggtaaaattgacattagtagatttatcgttagataaactatcacaatatgcaactctttttatttaaaacatcttacttttatagatattaatgatcaaattagcatctcagagaacgtgttagactttaaaaatgcttatattttgatacggaggaagtatattctcaataatatttataaatatacagtttgaaaaaaatatcgataaaacatgtgtattggagactattatgcatgcactgataagagcaagtctaaaactattagtttatcttaaaaccaacgtcaaaattaaaacacaagtaaggtagcagcttaaaacgccaatagtatgcatctgaacagtgacctcagtgacatttttcagatgtgcccctgccccctatatttgagacaagaaaccgtgtacctcgacagattagaaccccaccctcatgggctcaggactcctataggccagcttagtttcgatgatctattggcttcaccactgcatccactcacaaaccattacatttgccgtgcaaaattagcaagaaaattaagcatgcatgtgcagtagtaccctggactctgttcttgtggttgtacattcatacatatattatcagtactggctttagctatagggtgtacctccaacaaataatagtacatgaaatcaatcaatcaattaattcatgcatgcatatttagatcgatcaacagtgttcatgtactagctagctagagtacttcctatacaactgatcatatgctgctatgtcaagctttagatcgatcgatctctattgttactaattaattacttcctcattacaaaaaagttacacctattatttttgtcgctaagatcaaagagaaattaactcaggttgcatgtaacgaaaattaaggaatgtatatgcacacatgcaactaatactccctccgtccagaaaggaggacgttctaggttagttaggaaaaattagtgttatgtgaaaatgaccattttgccctcaatttataggattggggctaatcatttgaatgcttagtaagtattaagatgactcatcggattctgatcaaacatttaatttacctctatttaaatcttatatgtatagagactacaaatagaaacaacttatttagaaaaacttaaatatgaaataagtctaactaatcatgtggatggatggaatataattattaaagaatatcaatcgatcgatctctcttgttattagctagttaattatatataataattgtaggagctagctgatcgatcatcagagggagctaatagcattgaaaaatatctaagctactgtgtgcagtacatgtatccagtatcgtacctaagatatctatttcggtacgtactgttggtaattttaatatcatgcatgattcgcagaagtgtaagtacatacgtacagcttagcttagctgttccagttattattattattattattattattattattattattattattattattattattattattattattattattattattatacggaatacgcgcacacatacaacacggttacaacacggtcacaccacggttgttgtgtctcctcttaaagagacggagactagcgacacatctctagtctcactaaattcctaaattcctagaaagctcactcatatgtgcacaaaattttggcacatgttctaacttttctatttatttggctccctttttttataatggaatttatcccgatctttgctcaaaatattatggccaaataatatagagctagattgcaggatgaatgtttgcgacttacataactacggcttgattggaaaaataaaactaaatagtatgctccctcaatgacagatatttccatctaaggttggcaggagtatgcttccaagttatagttatatgtagtgcttgtctttctcaaatcagaaaagcagaatatctccaaaatcataggttgatctttgtcaatcgaatgtcgctccgtttggtattacaatatgttgtatggcaaatcttgtttggtgcaatgcaaacggtaatactataattaatatatagagagaatgatacgtcttgataacatattttgcctaactacaatttctgcaaaacagattgcaacaatcatgcatgactttattttacatcaacttaaaaaaaaaggcacaacacactataattaacaaggtatggtaaccacatattgccagagataattaattagcttttggtaaaattcatataaaacttttttaaaaacaacaataactacatcccgttatgcttttctttatatataaaaaaaacatgttatgcatcctcaaattgttggctagctagcttttcctccatcatggatgatgaaacgacactttggatgcatgttacatggtacacatgcttggagtggaagcaagccaagttaaagaaagaaaaaaaaagggagatctcatctctatatgatcatcaatctagtactacgacctgtatgcaaataaaaatagtactagcagcacatctctccaacaagatcatgtccctgaaaaatgcagaaaaggatgatatcgagcatatgatatgcatcgcatggtgacatgacatatagctttggacaactttggtcgatcgatatcgacatagatgagctttttacatgatcacttttttcatcgatcatgcatcaggttgcatcatctcatcttaaaaaaaaaaaaggagatttggagggagattgacatccctccaaatactattttaagaagagatatgagcgtgttggggattgaaaacgagatgtcgggattaaagccactacacttgacgtgcatctcgcatcatctcatctcgatgtgatcagtcgtactaagtacttgcatagttgcatgcaagctctcactgtaagcaaacaaatctagtgattgtgtactgatgtacttttgcaaggttaacttgcaaacttgccgggttaatttatggcagggagtagtgtggtcggttctgtttgctaggagtatatgtgtagtgccgtgcgtgcatatatgatgaatgcaggggtaatttatttgcagacgcgtgtactatgcacgacaacatcatcgataataatacagaggcgtcactaggacgtgtaaggatgtgtttgagaggggggatgagaagatatacaaaattaggtgaaacacgtactaacgtatgataattgatattaaatattttatatttgaaaaatagtttaatatgttttttaagcaaactttttgttaaattttctttaaaaaatacttcgtttatcagttcggaaagcgtgctcgtcaaaagagatagagttttcctcttgttgtgctgctgccgaatacagtctaagttatttttttatcatgtagttagtagagataaatcataaggacgagtgttgcaacatagtgggttatttgggaggtttcttaaaataaatagctcaattttatcatcctctctcattttctctgtcaattattcggccactctttctccctcttgaagcatgtgcatatatatatatagagaagctgttctagcttgtctgagaactcgtctccctctgtccctatcctcgacttctcgcaacagcggatcggattgtctggtgaccctaggtggcttgattgggatcgtcggatggatgcacgataaaatgtgatatttttatgaa

SEQ ID NO: 30575 - DNA, 1602 bp, Oryza sativa
ttaaggatataaaaactctatctttacatcatcactttccctgcagaaatataaatatgatattcttggaatactcctaggcgaaatacgacagcgatatccgtgcgcttgcagatttatctgtgatcataagaaataccaatatctcctaaccgtgactccttgatgttaaatattttctctccaacttttctttgatcgtcccttcagtaaggaatgttggagcacaatgcaaattcagagggacacacagctctggaactgaggccatgcttcatgctgctaaccctacttttcactactagaaaacacattttcggtgtcgtaggggttccattttcgcaggcgggtatgttattcggagacaaaaccccgccggcgaagacgatacccggggtggagggggctgtccgcctgcgaagatcgatctttgcaggcagaccatataagcgtcgcctgcaaagatcgatcttcgcaggcagcaggcgacgtgcgcctgccaagattgatcttcgccggcatcgcttatatggcccgcctgcaaagatggccctatatagtcttcttcctccccgagccctgttcattctcccgaagtttctctctcctaaagtgtcttaaatataggggggaggttttgaacttcaaaccttcggggatttttctacagtgcttagatctactcatttccaccctaggtatgcatttttttaagcttttagacctcaatttgtgatgtatttatgcatgcaaaattgtgaaggaaaagctccatgttttttaatttactttcttttgatatgttgatgctagatgtatgtgtatgcctcttgttgtagtggtttaatgtggtaacataaattctctttttttttattttgctatcacatccacctcctagttctagatctagatcttgtcatatatagagagagtataaaatttttaatgtctatttatttggtgcaatcaaaaaataattatattagtttgtaatatgccgatgatatgattttgttagattttcctaatatactaatttggcaggtctgtgtaaaaaaaattgaaataaactttgtttttttattaatttacaattaacctttatttagttttgaatagcgataagttttttcaataaaccctacaaatttggtattagttgtacaaatattttatgttcatttttttagatatatggaaagtcgggaatggatgtatcattggccgaggtttttatctccatatagaaatgaagtgtctaaatttattggtattgcgaaggcacacgctgagaagaacaatatgaggaagataattgtccatgagctgactataagaatgaaatagcctgggacttcgatgatgcttttaatgtgaaggagcacttagtaactcgtggatttatggacaagtacgaaatatggacacgtcatggcgaagaacaagtggaggggcctaaaaatgagaaggttccgacacaagttgaagacatggtgcatgacgatggttctgttgaggacaaaatcgatctagaggaaatgttacgtcatgcataacccgaggtgctaatggagtcggctagaagcttaaataactttg

SEQ ID NO: 30576 - DNA, 978 bp, Oryza sativa
cccccccccccccccacaaattttttatttttcttttatttgtttgatatttttttttcacgcttagggacaggcaagaaccaaccatagaaaaattgaactcaaatggacataatatgtgacctgtagaatttttcctctcatctcctctcttcgaactagtgcagaggagacagatgtgcaaattttttatttttattttatttttttgatatttttttcacacttagggacacacaagaaccaaccatataaaaaataaactcaaacggacgaaatatgtggcctgtagaattttccaaagctctaccaaaaaacttctctcctcgaaaacacaatcttgcaagcggaatttggaggttttagtatcgccaaacccggcgttgccagggagaatcggatgtaacattttctgtagattatttgcctgattccgagtccgtatgagaaagttacgcctattttaataaatgacacccgaatgacttttcggtagagctttggaaaattctacaagtcacatattttgtccatttgagtttattttttctattgttggtttctgtattctcctaagtgtgaaaaaaatatcaaaaaaaaataaaaataaaaaaattgcatctctctgtactgtttaacttatggctatcatttcatgtggttatattttgaattagagattaagtaacttcatatagtggtagagtgcattatgtttaacatgctgatcaaagggttttactaaagaagttatggtctaattttgatgaaggtgcaaagtaggctaagtggtatgctattttcggatatctagctaagtggtatattccgttcgagtttaaattttttttgtttttctctagtggttggttgtatcgtgatcctaagtgcgaaaaaacatccgaaaaaataaaacaaaaataaaaaggttgcaactctatataaagaaatagaaatggaggcgaggggtggggggga

SEQ ID NO: 30577 - DNA, 845 bp, Oryza sativa
acagatacagattaaatacagtcgtgaccgactaagtttcaaggtgtttccttgatatacaagttaggaaacaaacccaggatacacataagatattctatctatattcggtatcctatattcagtccaaatatcatcgccgtgtagatatgggatatccataatctccacagtagcccccgagacctttgcagtcaaccatcatagccttctcaaagacaataatccgagtgcttcaaacttttcatgccaaggcctgccgagtagtgaagacgaagactgtaaagggcgaaaagataaagaatatggtgcatcgaatagatgcacctaattaggtatagcccccaactatgtgattagtcaacaaactaaacatatagttgagaacaaaataatagcacaatcatgcatcatatgacaaaagcatacgcggcacccaaagaggcattctagccgactgctttttagtcacaataaaaggaatccgagtggttaacactctaaaaagttcacgaatgaacacacttgacaggcatccgaatataagactctaaagattacccaccaaatatcataaaaatcatggtaatgaataagtctaatagcctaggctatgactatttaccataatgaaaacaggcatataacataccgaggaaatgactatgataaaaacaagtcatttcaagttaacccagacagcttttgtagctaaaaaagcgtacaaaaacagcataacgccttttgtcgggcaccttttaatttgcatcgcaataattcaaagaattatatgaccgcgtaaaaaggattttatcagcattgggcaacactattgtgtacataaa

SEQ ID NO: 30578 - DNA, 1086 bp, Oryza sativa
tccattagttaagacattccgtgacaaaaatcttattatagcctttaagaacgtcatcgattttatgaccactttggagaaaaatctgaaagattagcttgcatttattttgtcgaggagttaaaaaacacgttagaaagataaaatcacaaaagaaaatgaaatcgtgacttagaagacattgtttctcataacagttcagctaacacgtattggcaacaatttgcctatagaactagctagatttttctcacggtcctagatgtaagaatgaaatgtcatttaggaggcagaacataaatgaaaatagccccttgctagcatcaaaccatggaccgattgtatcacggcggtcatcaacgataccagtaaaaaacgaaatgcctacctattcactctcaggatagagcagcagctatattttgtgactttaggtgaaaacaaatgaaaccgatatgcatgggatttaatgtggactattaagcatatatgaattttatttaggcagcaatgcttaatgtttttaacttataaattgatatttccgcgacccagccttcaaatatgaaaatttaacttcatgttacgcggagcgtcttgtttcggtgacaaggtaagattgaattaacaatgatatggcaaatggtcccatcgatacttacattttgaatagtggatttataaccgctataggttgggcatgttttatatggtgtaggattacgttatagggtatatactatttgccaaatgcgttttgactctgttctgatcgaaatgaaaagattgacctgcttaacacactccgttcacgtcgtgtagccatagtagcttagaaccgaatgtagggacacattgtaaagttgtaaatacaaccatagtagacggtgatcataattaatttcaacaatgtactaggatttatccttacagaggtattatgtttaaatgagatatgtagtaagtgcctttacgacgacatgtctaatactacaatagtttagactttctgtgacaaaaatcttattatagcctttaagaacgtcatcgattttatgaccactttggagaaaaatctgaaagatt

SEQ ID NO: 30579 - DNA, 2089 bp, Oryza sativa
ctccttgcccttgtttgctattggaatcaaccagcagatcttggattgccttcagatgcttggtaacctcctccttgtgagcttgagccaaaatcgcttgactctggatttcctcatgaattagcttgttgtctccttctacctctttctgaaactcctcaaagtttaaccgcagttcttctaccgcagcctcccacgccggcatcaagacttcttcctccaatccagcagcatgtcccctccccatggtgagaaatacagatctggagatttcacaggaaagaaccttggcctctcccaaccctctctgcacttctcaattctgcatcttctccaccaaattccaaagcctggctacggaattttacagaggaacttgtcctcaaaccctcaccagcttaggactcttcgaattggagaaaacttggccaattttcgactgatgctctgatacctttgtcagatcccggggtcaaatgtcaccaaaaatctgcagattcgagctaatttgggctaagtagctacctaataggattcctaaggcagaaattaagctaagaaaattaaaggatgccgcaagacaagcaagtaggaactagggtttatatttctcgatccctttttcatccacccagatcgccttatatggagtacgggatctgagtgaggaggctggatagctcagcaggctgtgattacattaagtttcagagttttaggacaaagaagtacagacacagtaattactgaaatgaaccagctccctcggatttacatcattgaaccggtatcttagcatctgcgccgcccattcccgcaactcctgtttctctttctgataaacaacttcttcagataagcaaggcctgacacgagcttgcggacagcatgaatggcgacggtggtggacgagctcgggtacggtcgtacggcgaattggatggtaaatcctgatagggctgcgaattgggtggcatatactgaaaattctgcggacgcgtagtgggctcccagcggacacgcggacgcgggttcatccaatccatctagctatgcggccttctcgtggggcggccttgcgagactttttgcggggcggccttgcgggcaagcgggctggcccgcttgccacctgcacccctaagcgagaggcggatgcggaggccatcgtgacgcgttcaacgtctcgtgcaagcgcaggtggggtcggcggaagacacggtgttagcggggcagagggaaagctggtgcagcgttggctttacaagctttgcagagggaggtgcaagggtaggcaaagggatccagggccggtcagtatcgccttgttgcgtcgagcatcggctttagcacactacaagagcttaggccttctatgactaattaattgtgacaattacagcctttttcttgtcattgtaccccttctatgacatactagtgacaaaatagctatagtcattgaatccctgtcattatcctccttctgtgactaatagacccaattgtcattaatcgtagtgacaattgcacgcttgtcaccggtctatgacaatggttatttgtcactatatttgtcataatacattagatgggatgctgacaagtgtctagccatctgacgtggcatatgacgtggcgtgtgacatggcatgtggagtatgacaaaaataattgtcacaaaaatgaagttggcccatttataacatggtctggttttgcaattataattcaaataagcctaactagcccatgggccagccaaccaattttggcccatttctcaacagcctttttatttttttcatgtaagcccagtagtatttcagcccattttacagttgatattgcagcccaagctcatttaaagaatcatcataaataataaacaacttacaattttataacaaaaataattagacatccaaacagatcatttcctccaaaattaatggttcatacagcctacatacaatagttctaaacattcaccatccatacaaatgaatcacaacaaaatacgtccaccaaagtcttacaagtccaacagatcaccaggtcaccaatcagtaataccaaacatacatcc

SEQ ID NO: 30580 - DNA, 807 bp, Oryza sativa
ccccggggcggcaaacgcgtgccccggcctttgccgcatgtcctggcagagacgggcggtggcgacagatcgacaatgacggtggactgtcggctgcgactgtttgaagggagggtggtgcggtgccagctgatggcccctgtgcgcccgcgcttcccatcccgccttcctggaccgaaagcggcggtgggttgaaaccgagattgtatcggcccactgcccagttatcttcatttatccaaaatttacattctagctcctgatctttggtcaaattactttccgcaaataatcagagactatacatttgctttcagcaccatgtaactctctgttattataaatatgagtttgttttagcattctatgcatttccatgtcctttatttttacacacgctttatttttttatgaatttacataaaatggcataaatatgccatgatttatcaaaaattttggctatcacaatgtaggtgagatagcaaccaaagagtttgatatcctcgctcttgatagttccaatgtccctgcttgggcaatggatgtcaaagttaatctaacaaccaatggactatacaaatgtataaataaaacagctgaagggaacgttgccccctctaacatgtctaaatacactgccttgaaagttatgaggaatcatatccatcaggatttgaaaatggagtacatgtatgaggacccatgcgctttgtggacatctttcaaaaatcgatatgaacatcataaagctactcttctcctagaggcaacgcatgagtggaaccacttatgcctacaggattt

SEQ ID NO: 30581 - DNA, 1070 bp, Oryza sativa
gagagagagagagaggttttattaaccacatggcgatgctatctgattacccatttacccatcattcaggaagcagcactaattattgggtagaagaccatttgggagtggttcgatacagttggggcgacatgcagtccggtcaaagtcattttagatgaatgctgtgctttttgttctgctacaatactaatatggtaggagtagcacttggttagaggactctacatagtttgcatgtcaaatatagataatatgctgaattcttgatgctgtgggagtcattgctaaatctagttatgaccttatttccatagtgacagggtctttcatattttttaatattcggagcttttggatttatttgtattggcgattttgtgctaacagtgatacttttgaaagcttgtctgattctagctttggcaaggacataagcaagtgaaacagacttattgtgtgcaaagtatttgtatttgataaccatctgtatctaggattgtcatgatagtttcagtgttatatatttgtctctgtaggcttgaagctaatatatatgattttcctgttgcccgtattactagcctgctatagagtatagacatgaccattaactttatatagttcttttgttactatatgtttggtgaaccctacgatagtgttatgacatctctttttttttcctatttatttcagattccttgtgaacatgctttctgtttagcctgtgctagaagtgattccagctgctatctgtaagcattctcctgaactttctggaacttgatcttgttagtttattgacttattctcagtaggataacatgcagtaacaaagtgatctttctgtatggaatgaagtttctcgtatgatctctgagaattcctgattgatgtgttaatttccttcagttgttaagttttctaccaaaatgagtttcaactgagtagatcataagatatactccctccgtttcaggttataagatgttttgactttgctcagagtcaaactgctttaagtttaactaagtttgtagaaaaaataataacattttcaaccaaga

SEQ ID NO: 30582 - DNA, 2120 bp, Oryza sativa
atgaatcgtatcgtcacttggattaagcaatgaatcagaattagtctcctccaaccctaggtccctctctcatccttagcaggcgtctaccccctatgaaccctaacataaagcgatcgaacactccagttgttttcttttaccacacaaaggccaatatataaccactctcggcacgagattacagaacatgctcacattatcaacaatcaaacacataaaagctgcagttttgaccacccaacatgcatccctacaaatgatatgccaaaaagtcggcaaaatcgtccacacaggcgcactcagaaagggagtgtgcgcacattaagtcttgacctgaaacagattaatcgaacacactagacgaaaggaggaggagaagaagaaaaaaaaagaaaccatccatcctttctattgaaccgcaattctttccaatcttcacatgctgctgctgctgctactcaaataaatccatgaacctgtctcgttaaggttaattggaggggaaggggatcaaacctaagcccggattggctcatctaagagggagaagaaggagtaatatacctttgagcccgatgcggaccgggatggcgcgtcgcaccggcgaacgaggccgcacagggaaggcgaggaggggggggcggcgggtggcctgtctctctccgagctccggctgccgccgcggatcggaagcggcggcggaggcggagtcgggaggggtggagtcgtggagaggaggaacgggggagaggagaccgatgagggaggaggaggcggctgccctgacgtggttggtgtggggcccacgcgtcagtgacacgcgcctccctctgacgtctacaattgaggaaccgcttttggaattcactattttttttttctcagctttcggctccaaataagccaaacggtatatttgcaaacaataaattatttgttaataaaacttttatatacgtgttttcagtgatctaaaagtaaaggccgaaaaataaatttcgacgaaaaatctcaaaatcaacttcaaatttaaagttgaaaattcaaattttggctgataagtataagtataagaaaaagatgaggtttgtttttttttcttcccatcccttgtaccatgcatgtaagatttttctctaatttttttcttctctatttctctcacctactatacagttaatgtattttttttattttgaagtatgtaaagagctagctctggtatgtgagtcgatattttttatttttctaattctgttaccaccacgtaagttttataattgacttatagtttactagtattaaacttgctctaagggtgtgttcttccccctactttctcaacttatgcatcctcgtttttcacgcgcatacttttcaaattattaaatggcgtgtttttaaaagttttctatataaaagttgctttaaaaattatattaatctatttttcaaattttattagtaatacttaattaatcatgcattaatctatcacttagtttaccagccgaacacagtctaaatagggttagccatcgaaattatagaccaagatttccacagtttaagatttatcgatttcccctgaaatttttggcttttctaaatagttaacactgttttacgtttcattgatcgccatgatctctactttctatggaaaatggcatatacttccatcgtccaatattaaggatgctcacatatactccctccataaaaaaaaaactcaacctagtaaagaatatgacccctcttaatacaatacatttggactacctattgttcagattcgttgtcctagaagggatcacattctcttctatattgatttttttttacggacggtttttgacggacggggtataaggcaatatgctcgctgggatgcttgcatatacagggcctttttttttcaatgccacactttgacacccgaatattagaagcgccacagtttattgctgattgtttagtgcacgtaaggtccatttatatataggtttaattagatccatgacattataaattttaccgttttaaaatatatactccatatgtttaactgttcaactataaaccgtgaaactttatatatatacaaaaggagctgg

SEQ ID NO: 30583 - DNA, 2566 bp, Oryza sativa
tcggcctgggcagggcgcctggcgactggcggctggggtggggagggttgaccggttgggatgggaaggggaggtgaggagaagagacagggttaaaaatgtgggcttttatttgctattgggctaataggcctgaaatgttgggtggtgggagggttcagtttagttttcttttaagttttgaatgggtataggttttttttttcctgtatatacatatacagaaaacctagacaacgatatcccgatagtaccttttatgagataccttttatgagatagtacattatacctgttgtggtaccagctgtatgatacctgatacctatgatacctattacccggtacctgtgatacctaggacctaatatatatgatactcatgtaagagaataattaatatgccttattccgttgtaacgggatcccgttttatagcagctctcgttacaatgggcccgccccttatgcctccgtttcccgatcgagggcgcacgcattgatttgacaaggaggagacttacgagctaatcaagccgggacaaccacaatcggcttggcacgccccgcgcacggcccggtccagccttatgaactattgggcctagagacaggcttacaagaggagatctcgatcgggatcgtgcattcgttccgtcctgcacgatccgatgggggtggttttgccgtcttgcctccgagccgacgccgtgcggtgccagtagctgtcgcccctggtgatctgcccgcgacggactggcggtgggccggtggctacgcgcgatgggaaggtccgcaaactggcctctctctatcttctcccgccgatttggccggttttttgggttatacgttgtacttgtacatgtccgaataagggtagatgatgctccattagcaacctgacgcaaagcctgctttatacagtctcgatttttgccctgagttggtcactgatcttaaggctgcgttcgagcgcaggagaaaggaagaaagattgtttcgttttccgtgcgcatgctttccgaactactaaacggtgtgttttttaaaaaaatttctataggaaagttgctttaaaaaatcatattaatcctttttaaagtttaaaataattaatactcaattaatcatatgctaatggctcaccatgttttgcgtatcttcctaatctttttaatccccttctcttcaaacacaccctcagggaagatagagaggaaatctcatggactgaaagaaaaggtcgtcactgtatacttctacagccttaactaattaacttctaacaggtgtcctaacagcacattctggaattcatccttgcaccctagtcacgtatcacctttttcttttctttttcagaaaatctacaaaacggaatcccgtctaaatggatagttaataacaacctacctattagagtatatgatagttagagtcatattatgataggattgatttgtgtggaatcattccttatctccttcttatgtactcctatatatactggccccctgaggctcaatacaattgatcgtattcctctctccctatactatcaaacatgatatcagagcgggtgatctagtcgcctctctcacgcttccgccgccatcgcccccgggagggttctgatctcccgggggtggccaccaatttttctttttttttcgttgtctgcaccgtcacccgggaggaattgatcttctaggcggctggttgtcgtccatctgcgttgttgttgtcaagagggatcgatctcggtctcctcggtcggcaaagttctttgtcgcatcaagcaacttcagtagcagatcgatctggagtgtgcgggcctgcaccatggaccgtggtgcagctgtcccctccttcccatcgtcagtgtggcacagggtctgggggggatccgtccctgccgtctcctcctccgcctgggccgcaaccgcctgcacccaccaggccgccggttcacgtccaacgctgtcagcccgttgccttgcgccggccccgcccacaccacagcactctcctcctactaccgccgggggaacgcagccctctgttacatccgtcggcctgccggcgctgatggtcgccgctggctgctgcctccccgcaaccgcattgtcctctcctcttcctcatccgtctcttccttatccactccctcctacagcattttcgtccaggacgccgtctccctcactcccctctatctccctttctcctccgccatgtcccaagggtgtagcgcccgttccgtcgtggcgcctagcgggaaaattatctcttaaaaaccctaattgcgaaatttgtttctttgcttgttgtctagtgtccgtgccatctcaagatctcaaatccccgatctatcgtcgagttcaattccggatccaaatccttccaaatcaaatccctccgcaaaagtctattttgcctcccccggggtcgatgggccgaatctctctcggcccatctccccctccctcccggcgctctctctctctccctctctccctccccctccgctctgcccgcgcgcgtgcgcgtgagccgctcgcgc

SEQ ID NO: 30584 - DNA, 1289 bp, Oryza sativa
gggcagaagtgctcttctcctgtctttcggccttcagagactgattctgctcccaaaaaaaaagaccccaaccacaacactgtgaagtgagtgaacgctgaccctttggtgtgctcaatgtttgtgttcggtacctccgtttcaaaatataagtattcatgcatgtttttcaaaatgtatttggacatttcttcctacagattcattctggaaaacacatataaatgtttctattttgaaacggagggagtaattatgatggtttttttacttgcgattgtgtgattggagaattgaaataatatttaataaatttactcggtagccgtatgcctctatcgtacaacaatcaacccttttgttgtattagatgatcctaattactcagtcccaaaaatacctatataatctattacaacaaacaatattactgtcagacctatctacagtaacgctgatttttcacaatcacgatacagtattactatagtaacgttcggagaatatcgtcaaaaaaaaggagcatgaagggacgactaagtttctattagttcgaatcgcttttcatgcagttaaattttttaaaaacattaggaacgagcatgaaaggatccagcagtttcttttaggaggaacatgaaagcagcaagtactttccagggaaaatttgaaccatgtactctcttggacccaaaataaatacattcttctagttgaactagagaagttcatttatttttggaatattggagtaaataattaaggattgagaataagcatcgaatgaacgagcaatttcgaaggaacagcatatggtcaactttcaagcccaaatctgtaggagtgtcgcggaataaactgaattattaattagtaattaccatcaatctaacttcgcctatctatttaagtttgtagaagcgctgaaatggatcaaacagttatagcaccatatgaacatttacacgctacttatatgtacgaaatgtaatcacggatcgaggacaaacattttagatagtttctttccatttataattagtctaaggacataacagcataaacattgtatatttaaagttttgttcaaagtacatcaagatcatcgtaaaactcttagtaattgataataagcttattacataaacatgataccccaccaaaaaagtttgtacgatcggttctccaacctttgaatgttgttctgtttttactgcactatgatccaaacctaccgtgtcagacaagtggtaagaaagatctatgtacgccgataaattatcggtcgg

SEQ ID NO: 30585 - DNA, 2384 bp, Oryza sativa
gatgtgcggcgacaacggaggggtggccgggcttcacttcgcagctgtgaatccaatggaggcagcggcgaagcttggcgatgacgggaggagcagcagggcttcgccggagatcaaaacgcgacggcgagcttcgggttgacggcgatgatggagctccggtggatttcggcttcagggagatggctgccgggctccctctccttcttgcgaacccaacggcggcagaggcgaccaaaagcggcggctaaggcggctgctagctgcggctggagatcggaacatgacggcaacccactggttcatggcgaggacggcttccggcgaagtttcggcgcaaggggaacggcggccggggtggagctcgaccttgcggagccgatggaggtgacggcgcaggaaggaggcagatgaggcggcggctagggacggctggagcggcgccggcgtttggagagagaaggagagcgcggggagagcgtttccggcgacggcggcggacgggaaatgagaggatagggagaggacgactagggggtcctttgtataggcacgggagctcgggatcaagcccacaacgacgggaaaaactcgggaaagtctagggttctcgccggaaaaaggaaggatttgatccgcgaaattggaaagaatttccatagaaaattttggggatttcttggggaaaaggaagaggagattgaggggattccattcccgcaactaatttggaaagaggagcaacggggaggtcggattggtgggaggaggcggcggcactgtgcacgagcacggctggctcggctctgtctggaggaggaagatggagtactgtagcgcgggggaggcaaaacagactttcggccgggctgagaggaagggagggaatgggctgaattcggcccaagactaggaaggatgattttattgcttttccaaataaattaaccaatgagatgatctttcaattgttaaaaatactttcaatgctcaaataattccaagaaaaatcttgaacatacttggacactcaaagtatttaatataataatatccagatcatttaatgattaatttattatttaaataattgctaaactgttctttgtattattaagaattgagctctgaaaaatccaagaaaattccagagagtataattaatcatggagaatttaataaaaattaaatccaaccatgctttacatttaggaaattttatttcccacatttaacttcacttgtaaattcgattaataatttattaaataatttataaatccttaaacgaaaatcaggctgtggcatcatctaaaggagcatcatcccctggagtgtaatcactgtcaggttcaccgtcagaaggtggctggctatcaatgggtgttgactcaaagtggtcaacactatcctcctatatggtgtttactctaccattgctttacccttacatccactaccagcagccttagtaactcctttacctttggatacatctacttcaacatccttttttgcacactcttcttcactgtccatttttaattccatgtatgcctcataatcactgtcatcatctgacccatcacacaaatcaataatttctggctcttcaacatacacatctaccacatccaattcaccagtacaatcacatatcaatttgcaagccttgtaatcataaagagcacgaaaacatgtttgcaatgctcatgcaggtgtccaaataatgttccagtgcagcaatgcttacgtaggaaacaaccagtgcagcaatgttctagtcatcacattgcaatgctcacgctggtgtccagataactcaggcaatgacaccttatttcaatctatatatgacagtgccttaaatccatcacaatatttcttctcaataccatctagaacatatacccccttcatatgaaacctaaccacaagagtgttactcgtccatgatatcgaaccccttcatgcagaacaacaaaatagaatgatttagggtgatattaaatttctgctacagatatgacaagtccaaatcccaacttttgcacagaatgccgaataaaatatccccttatcaagtacaacactaactaaataactcccaacctacaccaaatccaagataaaaaaaagacatctaccaatatttaaaattgttcttcccgcatcccactaataccatgcagccacagagaggaaagggaatacctaccaattgcttcggacttcggattacgggggaatccttgctgacactacccttgttggctgtcgcgcgaagctccaacttggcctctaggtcgcccaaggtggtccgccacatcctaagccatgcctagctgcaagtcgagctcgagctcatcagtgaccacacccag

SEQ ID NO: 30586 - DNA, 686 bp, Oryza sativa
ctataatcacaatactgttctaaatagatttgtcatatccatcacattagacagatctatcggctcatcgagtattagattatcatatacaatctcgtgctgcattggttaggttcgacctactagattgttgtttataatataagtcttgctaagccaataggttcatgctaatgttttatcggggtgctagccgatacgttatctggacattgcatcggcttataaggattacatacaagttgggtttagccgattgcaacaaaggtttcactgtttaaattaatcttttggattttatgacatcggacctccagccgatgtatgctttaaccttcggatcaatgcttattctatcatattgtattgctagccgattggtttatactagattatattgttattttattacatcatcatcagccgattgcctttctatcattatctatattggacatatagccgattgcttaaatcctatcgctatcggctagtatcggcatcggctattattggcatcggctggaactactccatcgccttgtcagccgatcggctatttaatctacggtttacatatcttgttagttgcaggatcaaactaactggcacgcccgcatctcatcaaactttggacctgcactggagatgaacagatctctcaggccagtttgtctttttcgcat

SEQ ID NO: 30587 - DNA, 5374 bp, Oryza sativa
cccagaagcaacaagataccagtccctgtccaagaaaatcgtgttctgtagtagtgattcatgaattccttctctacttgatcgatccattttctttgtttcttttttggcatagatcgaacacttggtggtgcgctcgtcggcgttcccagtgtccagagcgccaccatcgccccactttgtcattcccgtcgactcgaatcatctccggctgtaccattgcgccactgacgtcgcctaggtcccaggagaacgacgcccacatatgatcaagccaatacgccgccacgaacgcggtcggtcgccgttgctctcctactgcctctgcttctcttgccgccgagtcaccgacatgtgggcctggctgtttagccacttcattaggtgctaaggactttaattagtagaaatttaaatcttgtaaggttctttttgtaaaattgctttgtttgccatgtggacttatggacctaaatgcaattcacctaatgcccagggacttttttgtatagggtttagggcttaccctaaaacatgaaattactatttcatgcattcattacttgatataatagcttaatgagtatattgtactcacccttgctttaacccctctttcagaatcaatttggagtttttgccgaagccaggagtttaatcagataaattggtttcattccaacttagttcccaagtatagattagatagatggtttaattctatagcaaaacattagacttggctcatcctatagcttctacagtaatagttagccactaccctattatttcatgtaaagaaatctcctttggagccttaatcaaatgtatgcgatgaagattcagattgttgaacctgtatcaatctactaatacaggggttgatacagtttaaatatgtcggttaccgaatctttaattttgggacccgacatggtgtgtgggtgggggcccctgcgatttgggagcctagagcggccgtaccgcttgcgccccctcccccctgaggcggccctaactacatgggccttaaaaggccaaatggcatcttatgacgaattctgggcttgatggcgacgaaaatggatgccatagactctatgacgacagaaagatcgtcactagattaatgacaaaaagataagctttctttatagaacgccattagagacgcatgacaggtgacgaatcatattcgtcacacgaatgtcacagatttcatagcatgacttgaaattaaatttttatgacgtaaatgagcgtcacctatcataagattcttgtagtgatggcttgtttggctattagagaggcagtttgagacatacagcacacagtttcataccgtgtgcgtgcctagttggcaactggatcctagtagatgcaaattttgaatcattcaacccaacccaatccttcttctcttaatcttctcttcctacacttgtgtatttgtgtttgtgtgtgtgtgtgtctaagaggctagtagagttagctatcctaaaattttttgcacgttgcagctactaactgtgctgctggcttgtcgtcctctgcttcaacattaaagagagaactaatagatcggtgatccactttggtttcttggatgctatccagccacgtcaccatgcatgcgaattttgtggatggagtcagtggctctgcatgcacggagctgatttaattaattaacttgttgccagctagtacctaattaagcatgtgtgttaatttattattaattactttgctagtgttaatttatccttagttttttttattccaaactacgagtagcatgcatgcctttgtcagagagagaaaccgatggaatatgcctcgtttcaaaagtccatgcataatgtgcatgctttgtggattcgtgctgtattttcctgggtagataagaccaaagaatcccacttaccaactaggttttttaaaagtctggtacatcgtgaaccatgctgcttcacgtggtcggacctatatacgttaggatcaaatgtgctcaacgtggtctggcacatcatggaccatgctgcttcatgtggtcggatctagatgtattaggaataatccttttcgtagtagtgaaactaaagaacttcacatgccaattagtttttttagagtccgaacaaagatgaaactttttggaaaggtgctccagatgaccaagttcaattcaccaactgaaatcgcacattggattttacatgaaaaatgcaagatggacaaaaatgatttctttcggttctaaattaatactcccggccatttgggaggagcaatatgtacatatgcatgcatcacacttcagcatttttgtctttttttttccttggagttttaagaatgctcataattagggcatgcaagttgatccattgatatattcgcaatatttgacgatttgtttttcattttaaaaattgttgacgatattagcttaattttggtaaggaaaatatcggttaatttatccccaatttttatcaagagagaaaatgaaccatgagaattggggtgctaattaaccacaagcaaatattcatcttaatttgttgtatatatatatatatatatacacgagcatgcatgtaaagatggaaatatgtgaaaaatataatggtgctagtagatttgtctaaaacacttccataatactatgatcaggacactcgataaggacaaagttcaattttagggattgtgtcattatcaaaattatcaatgaataattggccatagggccgggattagcaagggtctactactgtcctgccatttcattaattaattagattaagtccccgattccttgcatcccaaattggcctacgagaaccgacaaaaatcgcaagatgggaggattgtggtaggttatcttcagcaactgtgcctctcaagtggccataacatattagccagaaggataaataatcatcaatctgccttcacagttttgatcatctcatgagacatatatataaaccacccattagcaagagtctcctaggtgaattaattaactatgttgatacacatatacttaattggtataagaaaaattagtggtcgttaattagtataaaagcatcaatcaaatggagactattagctagctaggagaccgggcaagcaaagcaaagcattgatcttgatgaatcctccagagagattaattgcatattgccagttcctcctgacctattatatgcatgcaagtgctctctgtacttgtgcggtgcaacgacgagcaagagtgcgtacgtttatagtagaactgagggggtgcgccttatatacaccggacgagcaacagtgcgtacgtttgtagtgacgtctccaattttagtttctatggtagtaaaatattcgacgtttgacacctcaaactgcagaaaaactggagctgtgaaatgttttcttttttcatatgcgtggagctctaaaatattgacagttttgtttttttctataaaaaaagccaagaagagttaacgacttgatgggtaggcgctcctggatggagggagatgagcttaaaaagttgtagtaaatggacccatgcagtggaaatgcggaatggagtggagcagtaataaaatttaaaatgccacgcgcagggcatctcgaccacgacaggactctccttgagatcttcaaacagtgtgtgcttgctagctgaactgcagcagtggaacagtaataaaatttaaaacggatgtacagtgtgttcacagtggacgagtgtgctctgtgttctctgcatgtgaatagatatggcgatctctgcttgtgaatagatttggcgactactattactgggtatacgtggttaggacagatgttagtttgttctgcttgtttggagatggatttgggagcaaatgtacatggttagggcgcaaatgttagtttattttgctgtggaggggagtgggttttgctagaagtagacccatgaattttgctattccaaaattcctcaactagctatcagcctcatcgtttggcatattttctgaatatgccaaacggcatatttgcaaacgaaaatcaatttgtgaataaaacttttatatatgtgttcttagcgatctaaaagcaaagggtgaaaaataaacttcgatgaaaaaaacctcaaaatcagctccaaatttaatgttaaaaaaaatcaaattttggctgataagcatatgaatatgccaaacgatgaggccctatatatctagctccaacaaatctgtgatgcctatatctcactagtcttgctatgtgctatgtcatgtacacgtgggtaaatacctaatttatgaattttgctgtctcatcatgattatggcaaatatacatatacctaactcatgaatttttctatgcctacttctcaccatttatgctatgtctaagctagaagattttgctatggccatacctactcttaaatttttctatgtcggccttgactcagccgccccaatagaagtgacgaaactactgttgttgcaagagttggattccttcaagaaagtgatagatgaatctgaggcatcaagggagcagcaatcgaagaaaattgaaagtttgattggcctaaatgctccatattttgctctgaaaagttgacagttatgttaccaatcatgtatcattgtcattttcatagccttcatcatggcgttgcgaatattgtgaatattccaatggatcaacttgcatgccctaagtgtgagcattcttaaaactccaaggtaaaaagtcaaaaatgctgaagtgtgatgcatgcatatgtacatattgctcctcccaaatggacatcatgcaggatcgggactggacaacacattaaaggctctcatgctacacgcttcttgcagctgtagttaaacaagggcatcaagcggtagttcgataacaataagattcattggccccaacatacccccatccattccaataaatatggcacgcatgtattttaagatttatctttaaccaagaattagtttaaatttacaaagataattgatagaaaattagcatcatttcaacgtgtttttcaatacgaataccacaattctatttatgcattactagtcatcaacctgtgcacttgcatgggctaaaaaaattatgtgacatcaattaactaacgtggaagctttattggtgcatccaattactaaatatatgatttattctttgtttctcaattctttcggtcaaaaacgtgcatgtgtgttattcatagaaacgtatgtagtatttgtaagaagtacaatatcgaatttccaaaaggtttcgaccttgtgcgataatatacacacacattaacctacataggcaagctagctagacctaa

SEQ ID NO: 30588 - DNA, 1024 bp, Oryza sativa
agaattttaaattgtttttttcaatttaaataatgacagaaattatgttagtattattaaaattacttctttagctcggaaaatttcaaaaaaatttaagagagcataattaattattgagaagttattaaaactattccaagtcatattttacaaggtaaaattttatttcacatatcaacttgtaacatacaaggaatttcaccttgaaaaatttttgtggaaaatttaaaactttttgaattcaaaagtttttggtgaacatagaagcatactagagcatataactcccttaaataaaataaaacacatagtttttctggccaaatcaaaactaagtccaaaagtaaaagtttacaaatcttgtggtaaaaaattttaaatcaaaaattttgctttgaccataaactgaaacctaatcttctcggttttgcattttcagcctaactaaaaaaatatatttaagttaaatataaaataaatggaaaggtaggtatcaaaatacacaaacctaaatagagataaaaagaacttgcttgtatatgcatattattcttttaagattgtttttggatattcttggtgcatctcataataggttgcatatgcatgctttgtctaaagaaaattcctaaaaataaatgaagcaacaataaatcccaaaaaaatctcataaatactaaacaacaccataagctcccagaaattttagttttaatttatcacatcaattggtaacacaaataaatccttgaactcagctaaaaaatctggaaacagcataccaattagcctaatttgcaccttcaccaaaattaaaccataactcgtcttgcaaaatctctaggttgcaaaatgtaacctcgtaaaatgagagccataagttaggttaacagtattctggactatggtcaatagattaactagtcaactttactaaattaccatggtaaaagcaaaagtaattaaactttggaacttggcaccttgaaccatcaaatccttgtatctacctgtcaccccc

SEQ ID NO: 30589 - DNA, 1860 bp, Oryza sativa
attctttggtcttatctacccaggaaaatacagcacgaatccacaaagcatgcacattatgcatggacttttgaaacgaggcatattccatcggtttctctatctgacaaaggcatgcatgctactcgtagtttggaataaaaaaaactaaggataaattaacactagcaaagtaattaataataaattaacacacatgcttaattaggtactagctggcaacaagttaattaattaaatcagctccgtgcatgcagagccactgactccatccacaaaattcgcatgcatggtgacgtggctggatagcatccaagaaaccaaagtggatcaccgatctattagttctctctttaatgttgaagcagaggacgacaagccagcagcacagttagtagctgcaacgtgcaaaaaattttaggctagctaactctactagcctcttagacacacacacacacaaacacaaatcacagtgtaggaagagaagattaagagaagaaggattgggttgggttgaatgtttcaaaatttgcatctactaggatccagttgccaactaggcacgcacacgctatgaaactgtgtgctgtatgtctcaaactgcctctctaatagccaaacaagccatcactacaagaatctgattataggtgatgctcatttacgtcataaaaattgaattttaagtcatgctatgaaatctgtgacattcgtgtgacgaatcatattcgtcacctatcatgcgtctctaatggcgttttataaagaaagcttatctttttgtcattaatctagtgacaatctttctgtcgtcatagagtctatggcgtccattttcgtcgccatcaagcccagaaaacgtcataagatgccatttggccttttaacgcccatgtagtcagggccggctcaggcgggagggggtgcgagcggtacggccgctctaggctcccaaatcgtagggcccccacccacacaccttgtcgggtctcaaaattaaagattcggtaaccgacatatttaaactgtatcaaccctggatcagtagattaataaaggttcaacaatctgaatcttcatcgcatacatttgattaaggctccaatggagatttctttacataaaataatagggtatttacaagattgtggctaactattactgtagaagctacaggatgagccaactctaatgttttgctatagaattaaaccatctatctaatctatacttgggaactaagttggaatgaaactaatttatatgattaaactcctgacttctgcaaaaactccaaattgattctaaaagagggggttaaagcaagggtgataacaatatactcatcaagctattatatcaagtaatgaatgcatgaaatagtaatttcatgttttagggtaagccctaaaccctatacaacaaggtccctgggcattaggtgaattgcatttaggtccataagcccacatggcaaacaaagcaattttacaaaaagaaccttacaacatttcaatttctactaattaaagtccttagcacctaatgaagtggctaaacagccaggcccacatgtcggtgactcggcggcaagagaagcagaggcagtaggagagcaacggcgaacgacggcattcgtggcggcgtattggctagatcatatgtgggcgtcgttctcctgggacctaggcgacgtcagtggcgcaatggtacagccggagatgattcgagtcgacgggaatgacaaagtggggcgatggtggcgctctagacaccgggaacaccgacgagcgcaccaccaagtgttcgatctatgccaaaaaagaaacaaagaaaatggatcgatcaagtagagaa

SEQ ID NO: 30590 - DNA, 3532 bp, Oryza sativa
ggatcgtcttggtatggataaggtgcggatggctgcctacttgtatattatgaatatggtgcaaatggctacctgcattgtatgtatgtatcctatgcatgtatatagttgatggatgtatatgtttgtttcacaatctctgaacaaactcttcatatctagtcctgcgtaccagggaattttaaatttgcacgttttcgccgatggacagaaggagatgattttcagatacacttagctcgtacccgtcagatgaaggtaaaaggaaacgagtaataatgttttaagtgtactattgagtagtccttcataagataacttagttgtgtttgtagcgtactatggcgtggtagacgagttagtaccatggctggcttgcatgccatgtgagtccatgttagtttagttaggctgcccaatgtgagtaagtgaccgaataggtttagaaatggtatatttctaggtctagctagcttgcctatgtaggttaatgtgtgtgtatattatcgcacaaggtcagaactttttggaaattcgatactgtacttcttacaaatactacatacgtttctatgaataacacacatgcacgtttttgaccgaaagaattgagaaacaaagaataaatcttatatttagtaattggatgcaccaataaagcttccacgttagttaattgatgtcataatttttctagcgcatgcaagtgcataggttgatgactagtaatacataaatagaattgttgtattcgtattgaaaaacacgttgaaatgatgccactagaacggataccctcatctcaatcgggcggtaagccccatctcaatcgggcacagcgtccgtcacaggctagaaatcactgatgtgaagagttatctcaatcgggcaaacggccgtcacgaatgaatatatctcaatcgggccctaagtaaagcccgtcacagatagctttgacccagacgaccagtcaaactatagcccgtcatagatgacctatctctatcggaccacaactagagcccgtcacagatgactactaacctttatcgggcctaaactagagcccgtcacagatgatactcatctcaatcgggcctaaactatagcccgtcacagatgcctactgacctcaatcgggcctaaactagagcccgtcacatatgatctcatctcaatcgggcatttagttatggcccgtcacagatgactataatacacaaaaaaaataaattttgttttttggctagcctcaagcctttgctagccatgcccgctgcaaaaatgacagaaacaaacacagatattcaatatccccagctccccagcctcaaccattcatatacatatgcattcacatacacagacatgaacatatttcacacaaccacacattcacagccatctcatatttcacatccattcacatatttcacattgaatatttatcatgtttcaccaacaaaaccgagttaattggaacaaatatttatttagcaagtcttagtataaacatatgaaacatatacataaatataaacatcacagttacatcatcacagttgcataataagtgttcatcattgcctaaacataaaagatcaacattgttcatcattttagtttaagcctaaacattcctttggagtattgtcacagtttctttccaaggtaccgtggtggtactgagtcgcatggtgacatgttgtgggattgtgtcttgtgggtacagtggtacacctctaatcagagtaaaactattcgaatagccgtgcccgcggttatgggtgagttgaacaatgtttttcatgattagtctcacactactcattattggtaattgtgttaattaatttgactcctggtttggaatggcatattcctggtatcgaggtttgatttgtacaaccggggtggttgttcagatgaggtggggcctatgcaacacgggtgtgttgtgtagtgtttatttaatactgattaattattcaactgttttactattctcctaaatatttattaaatgttgtttatgcaaatgaactttattatgccgtcctttgttatcctgtgcacttgcatatttgctgtgtggcttgttaagtatggcatatgctcattcttgcaatattcattcatcagaggaggagtacttcagtgaaggtgatgatctggaggactaggcttgatccgggttaagttgcttgtggagtggagtcaccatagctgttccatagtttgttttattttccgctgcgtagaattttattctttgagaggaactatctacctctgtaatgatttattatttgtgaatattaattcgctgtttattcatactctattatcaatttgttattgtgtgcctcggctgattcctggacgagggtttaacacacatgtaagcgtttggaattttggatggaaattccggaggtgacaaaaacccactcccctccacagcaaaataaactaacatttgcgccctaaccatgtacatttgctcccaaatccatctccaaacaagcagaacaaactaacatctgtcctaaccatgtatacccagtaatagtactcgccatatctattcacaagcagatatcgccatatctattcacaagcagagaacacagagcacactcgtcctctgtgaacactgcacatctgttttaaattttattactgttccactgctgcagttcagctagcaagcacacactgttctaagatctcaaggagagtcctgtcgtggtcgagatgccctgcgcgtggcattttaaattttattactgctccactccactccgcatttccactccatgggtccatttactgaaactttttaagctcatctccctccatcgaggagcgcctaccgataagccgtcaactcttcttggctttttttatagaaaaaaacaaaactgtcaatatttcagagctccacgtatataaaaaaagaaaacatttcacagctccaatttttctccagtttgaggtgtcaaacgtcgcatatttcactaccatagaaactaaaattggagacgtcactacaaacgtactcactctttactcgtccggcgtatataaggcgcaccctcagttctactcgtcgttgcaccgcacaagtacagagagcacttgcatgcatataataggtcaggaggaactggcaatatgcaattaatctctctggaggattcatcaagatcaatgctttgctttgcttgcccggtctcctagctagctaatagtctccatttgattgatgcttttatactaattaactatcactactaattttcttataccaattaagtatatgtgtatcagcatagttaattaattcacctaggagactcttgctaatgggtggtttatatatatgtctcatgagatgatcaaaactgtgaaggcagattgatgattatttatccttctggctaatatgttatggccacttgagaggcacagttggagaagataacctaccacaatcctcccatcttgcgatttttgtcggttctcgtag

SEQ ID NO: 30591 - DNA, 1098 bp, Oryza sativa
  unsure (1)..(1098): unsure at all n locations
ccgcatggcatcaagctcccctcccctcctcttccttccctccttagatcccgtcgaagggaaggggcgtcgtcgncggtccggccggagggtagcacggatccaaggcgaccggcgcggaggccgccactgacgatgatgatgttgacgaggaggcggcagcggcaagcaagagcgtcggcgccaccaccagattctagggtttcatttttaaagaaaatttatgttttttcgggtttttgttttcctgtggtggtgcttcacctgcacgcaaaaatcgtcattttcccagagccctaagtgcatgcgggccgtttacccgcacgcaaaaatcattttagccctcacacaaaaatcttggttgtagtagtgaatggtgaaagtgaaggtggaaagtgagagctaggtgtcaacatgaggggtagaaacgatttaaaggagttggcagtgaattgaggctatgatcccacttgtacttcactcaacctagcatgagtggctgtctagtggccccatgtagatgtttcctatgagaagatgagaggtatggtgaagtttgggtgtaaattggactttaattccctctctctctttctttctctctttgaaaatataatttaggatcaaagagatgattcgccaaggttgtttgtaggtatttggacgacaaataggcccatatatagatgtttcctagaaggcttggagtggtagagtggcattttgggtggaaattcaatttaaacccttctctcaccttttgagaaataaaagaagatttaaatgagagaagagcagatgatgtgttggctatggttgtatgatgagtgggccccacaaggacttggtcccacatttaagagagatgtagaaggagagaactagaagctctaaattttccatgtgttggcactatcacactaaactatattactctctttctctcatacatttaatttagaattaggggggtgggtgggggggtgggggacagggagacggcaaggtagacaaggatttgatggttcaaggtgccaagttccaaagtttacgtaatttatggctctcatttcatgtggttacatttcgaattagact

SEQ ID NO: 30592 - DNA, 3045 bp, Oryza sativa
cgatttttggcggttctcgtaggccaattagagatgcaaggaatcggggacttaatctaattaattaatgaaatggcaggacagtagtagacccttaatcccggccctctggccaattattcattgataattttgataatgacacaatcgctaaaatttaactttgtccttatcgagtgtcctgatcatagtattatggaagtgttttagacaaatctactagcaccattatatttttcacatatttccatctttacatgcatgctcgtgtatatatatataccacaaattaaaatgaatatttgcttgtggttaattagcacctcaactctcatggttcattttctctcttgataaaaattggggataaattaaccgatattttccataccaaaattaagctaatatcgtcaacaatttttaaaatgaaaaaaaaatcgtcaaatattgcgaatatatcaatggatcaacttgcatgccctaattatgagcattcttaaaactccaaggaaaaaaaagacaaaaaagctgaagtgtgatgaatgcatatgtacatattgctcctcccaaatggccgggagtattaatttagaaccgaaagaaatcatttttgtctatctcgcatttttcatgtaaatccagtgtgcgatttcagttggtgaattgaacttggtcatcaggagcacctttccaaaaagtttcatctttgttcagactctaaaaaaactactccctccgtttcacaatgtaagtcattctagcatttcccatattcatattaatgctaatgaatttaaacatatatatctatctagattcattaggaacattataaatgtgagaaatgctagaatgacttacattgtgaaacggaggaagtagttggcaagtgaagttctttagtttcactactacgaaaaggattattcctaatgcatctagatccgaccacatgaatcagcatgatccatgatgtgccagaccacgttgagcacatttgatcttaacgtatatagttccgaccacgtgaagcagcatggttcacgatgtaccagacttttaaaaaacctagttggtaagtgggattttttggtcttatctacccaggaaaatacagcacgaatccacacagcatgcacattatgcatggacttttgaaacgaggatattccatcggtttctctgacaaaggcatgcatgctagtagtttggaataaaaaaactaaggataaattaacactagcaaagtaattaataataaattaacacacatgcttaattaggtactagctggcaacaagttaattaattaaatcagctccgtgcatgcagagcctctgactccatccacaaaattcgcatgcatggtgacgtggctggatagcatccaagaaaccaaagtgaatcaccgatctattagctccctctttaatgttgaagcagaggacgacaagccagcagcacagttagtagctgcaacgtgcaaaaaattttaggctagctaactctactagcctcttagacacacacacacaaacacaagtgtaggaagagaagattaagagaagaaggattgggttgggttgaatgtttcaaaatttgcatctactaggatccagttgccaactaggcacgcacacgctatgaaactgtgtgctgtatgtctcaaactgcctctctaatagccaaacaagccatcactacaagaatctaattatatgtgatgctcatttacgtcataaaaattgaattttaagtcatgctatgaaatctgtgacattcgtgtgacaaatatgattcgtcacctatcatgcgtctctaatggcgttctataaagaaagcttatctttttatcattaatctagtgataatctttctgtcgtcatagagtctatggcgtccattttcgtcgccatcaagcccagaaaacgtcataagatgccatttggccttttaacgcccatgtagtcagggccggctcaggggggagggggtgcgagcggtacggccgctctaggctcccaaatcgtaggggcccccacccacacaccttgtcgggtcccaaaattaaagattcggtaaccgacatatttaaactgtattaaccctggatcagtagattaatacatgttcaacaatctgaatcttcatcgcatacatttgattaaggctccaatggagatttctttacataaaataatagggtatttacaagattgtggctaactattactgtagaagctacaggatgagccaactctaatgttttgctatagaattaaaccatctatctaatctatacttgggaactaagttagaatgacactaatttatatgattaaactcctggcttcggcaaaaactccaaattgattctaaaagagggggttaaagcaagggtgataacaatatactcatcaagctattatatcaagtagtgaatgcatgaaatagtaatttcatgttttagggtaagccctaaaccctatacaacaaggtccctgggcattaggtgaattgcatttaggtccataagcccacatggcaaacaaagcaattttacaaaaagaaccttacaacatttcaatttctactaattaaagtccttagcacctaatgaagtggctaaacagccgggcccacgtgtcggtgactcggcggcaagacaagcagaggcagcaggagagcaacggcgaccgacggccttcgtggcggcgtattggcttgatcatatgtgggcgtcgttctcctgggacctaggcgacgtcagtggcgcaatggtacagccggagatgattcgagtcgacgggaatgacaaagtggggcgatggtggagctctagacaccgggaacaccgacgagcgcaccaccaagtgttcgatctatgccaaaaaagaaacaaagaaaatggatcgatcaagtagagaaggaatttcatgaatcactactacagaaacgattttcctggatagggaccttttagattccgtgcgggcggtatctcgttgcttctgggaaaatcggctcattttcgcgtgcggtcca

SEQ ID NO: 30593 - DNA, 3532 bp, Oryza sativa
tactgcatgataaatgcagtgttactatgtcatttttacgagatgaagttcgaataggtgggccataggtaaagtttgtaggtggctttgagcaaggtctgaattatgtaggagtgttttgaataattttatacatttggtaaaaccatgttactgcatgtatatacccctgttactgtaaattacacattctgttactgcatgtggagggctaaagttcaaaatgtcaatctttgaaaagcaatatctcacaagatatgtattattttttaaaaccgtttccaccatgatgttatcgtgttactgcatgtggaggattaaacttcaaaatgcatctacgtactcccctcctcaagaaccatttttcctccctcttcttaagaaaattggtttcctccctccaatatagcgttactgcatgtatatgacgttattgcacttttgaccgtaatattgtggtgaattgcagtaattcaggaattgaaacaaaaatatatcggttaaaagtctcagatactaatcatacacttgttactgcacaaaagtaaaagtgttactgcacgacaattacacgttaccacgtgtttatgcagtaacactactcaaaaaatgtagttagacgctttcttactgcaaaacttatagtcttgcagtaccgttatcaagtaattgcagtaagacactatgttacgtgaaaattataatcgttactacatcttgtagtaatgacatgatgtgattgcagtaacgcaaaacaggcagtagtaaaacttttgatatagtattactacttgtggagagttaaatcttcaaaaacaaatctttgaagggtaatatctctcacaccatgtactatttttaaaaaccgtttgcaccatgatgttaaaaaaaagtgcttaccaaaagtagatccatcataagtatattatgagtaaattttaattttgttaccgcaagtaaagcattgtgttagtacacgatgaacaacacgttactacgtcattccgagacgagagctaagaagagagagggtcgtggggaaagtcaccgacgggtttgacctagaattgaccgacgtgggggacctctggctggcctttgaccgaggtgggaggtgggttttgggcccttggggggagaggaggtgggttggtgggagggagggtatagaatagtttttctaatatatatatatatatatatatatatatatatagagagagagagagagagagagagagagaaaaactattctacacccgggtatagaataactattctatacccccctacctccagggggcaaaacccaccccacacctcggtcaaagctccccatctcggtcaaacccgcccttcactttccccaccacctccactcttatcagctctcgtctcagaacaacgtagtaacgcgatgttcatcgtgcagtaacatcatgtcttacttgcagtaacaatattgaaatgtagtcataatataatcatgacggatctacttttgataagcactttttttctaacatcatggtgcaaatggtttttaaaagtagtacatgatgtgagagatattacccttcaaagattggttttttaaaaatttggctctccacgatactatatcataagtattactgctgatctgctatgcgttactgcaatcatgtaacgccgttactacaagatgtagtaacgattataagtttcatagtaacatagtgtgttaccgcgattacttgataacgttactgcaagaatatgtatagtaagaaaaaaaggtgcagtaacatggagagagagagatgaattggctcggtttacttatggggcaagtgtcacatcctgataaattcatcccaaaattaaaaattattttctaaaaggaataatagaattaattaaaattcgaaaagaaattggcaaacactaaaatacgtatcagaaaaattcgaatgtggtccggagaatttttgttaaattctccttggtttaaaaggagccctcaaattttacttgaattttcagagctccggaaataattattaagcaacaaaaacaattaacaaagtttactaaaagaaaaactaaagaaaataaatccccctcctccctttgggccccaaagcctccctcccttcctctcagcccggccgaaagtctgttttacctcccccgcgctacagtgctccttcttccagctcaggcagagcccgagctctccagccgtgccgtgcacagtgccgccgcctcctccttccaaatctcgcctccccgttgctcctttttccaaattagttgcgggaacggaatccccatcccttcctgattatttcccccaactttccccctttaatcccgcccccaatcaccgggatttaatccctcttctttgaccgccattgatgccgccggccacctcctccggcgcggttttcggcctctcccgtgaccggcactccatccttgccctataaaacgaagccctcctccttcctttggtccattttgctctctcccgagcccctagccacctccccatcacctgcccctctctcctgtaccgacggccatctccggccgcccctgccgcatcgcccgagcgccgtccggccgtgccgccgtcttctctggcatcgcagcagcctcctctcccccggcctgccctccgttttgcgcggagaccactggaggtgcgcccccgccggcaacagtggcgttgctgccactgtaccacctccagccgcctctgtctccttgcctgagcgccggccgacgtcgccaccacctccctcggctccgcgatgccgccatcatccccggcatcacctcctcctcgcccgaagctcgccggagtggcctcctcgtcggcgtccagtacctcccggtctccggtcggctcctgtacgtcgccggtacgccgatcgacgtcgccgtctcctccgtcgacgtcgcagcgttgtcctctcctccagctgctcctctgtttcgccggaacgccgtcgcccgtgccggcctctccatcctcgtcgtcgccaacgtccattcggccgccccttcctcctccccggctcgtcggctcgctgcgccgccaccgtcatcgtcatcgcagcggcgtgttcagcgccgtcctcttctccgtgcagccgctgctggctgccctcgtcgcctcctcaccggccccggtggtcatcatcgtcgtcctctcgtcgttcccggtcgtcgtggcgttcgtccctccgtcgagccgttctcgtccgtcgtccgcgtccgccaagcaagccgcggcagccccgtcctcgtcttcgtcctcgactccgcgtcgtcaagccttgtccaaggatcgccgccgaagtcgttccctcgccgttcgcctccgtcatccccgagctgtctccgccgcgcccgttcgtcgttgtcgttcccacgcctcgtcgcgtggtggtaaggatccgtcctctcgcttccccgtcctcgtccttttggtgtcgcgccgtacccgttgtgcggttgtcgaccccggtacccgtgtacc

SEQ ID NO: 30594 - DNA, 875 bp, Oryza sativa
aaagtgggaaggaccattcatagtcaaaaagaagacagaaacgggagcattcaagttagcatatcttgatggtgatgagttaaagcatacttggaatgctatttctttaaagaaattttatgcctaaaaaaaaaggagagagagagagaaagagaaaaaggagaacacgggagctcgagtttgtagtatactcactcagatgtaaatacgaatgatatccaagttaatgtatataaacaggacgtagggtttttatccataatggaggcccgaacctgtataaaaaacatgcctctgtgtatgattgcaatagaactccgcacgctcggagtcaaatactctcgactaacaaagtcgacaaaatagaactccgcacgctcggagtcaaatacattcgactaacaaagtcgacaaaatagaactccgcacgctcggagtcgaatactctcgactagcaaagtcgacaaaatagaactccgcacgctcggagtcaaatacattcgactaccaaagtcgacaaaatagaactccgcacgctcggagtcaaatacattcgactaacaaagtcgacaaaatagaactccgcacgctcggagtcaaatactctcgactaacaaagtcgacaaaatagaactccgcacgctcggagtcaaatactctcgactaacaaagtcgacaaaatagaactccgcacgctcggagtcaaatacattcgactaacaaagtcgacaaaatagaactcctcacgctcggagtcaaatactctcgactaacaaagtcgacaaaatagaactccgcacgctcggagtcaaatactctcgactaacaaagtcgacaaaatagaactccgcacgctcggagtcaaatactctcga

SEQ ID NO: 30595 - DNA, 2253 bp, Oryza sativa
tctctcattctccgaacataatttaaatgcacagcatctagaagtccttttcacttattcttaatttcattaaaaagcttagaaatgcttatattttagtaaaacataggcagtatatatgctcattaattcacctgaccttgatggtttatttttgatgattatatatattggaggagagaatttttcagaaaaaaaaaattgcagtgagagaattggaaaagatctgcaccaataatgggtaaagtatatattatatcagtagttcgttagagattctcgatggagagagatcgaaaggcgacgttggtccagaggaccagagaacaattttttccctcctagtcagcgtagaccatcttctactgtagcctacataattccattgcccagccagtggcgtgccgccacgtaggcgtctgttcatggtcattttctgctgaaattccattccgttactgataattttgtgacacgtcagcgtttgttcctcgcgtcaaaatcagaccatttgtcaaagggaatacttccacggatgggcgacacgtggatggctcccatcggtgatagggtgctcgatcccttttgcttaggagtatcagttcattatctgtgatgaaatccatcaccatgtgtcgatgcattgcatcctgcagtcagcaatcatatgtatgtttcagagaaactgtgaaaaagtcaaatttatattgctactcctatatgatcaggctggtcgattataaccaagggtcattttaagaaaaggaaattcgatcctgacaacgatggtggttggcatttctgtttactatttttgttgtaggttagtggtatttcttaaatttattttgataacgaaatcaaaccaacatccaaaagctcacttgttaaatcacttacttctggcatctacaaaatgaaaaaaaaggttctaacctaattaattaaaatatagggtcttttagggaaaaaactaaacgaaaaaactaacgcaccattatcgcaaaacaggaccaaacatattaaataagagaggagatcgcaaacatattcttgcgataaagagaaatataaaacttgataagcataacaaagacattgcatatcttggatggttacaaaagatatgagcagataagtgcagccataacattgaccaactccaacgcaagtgaaagcatatgaatgagcatcagccaccattttagtttctttgatagtcagcaaacaagcattaccgaacaagttggcaacccaaacccaaaatttgatgtcaccggttggatcatcagtaaccccgttacacaagaatcctaaatctggcatcattggttggatcatcggtaacctagcaaacaagacctaggtcttccccgtgatcctaacaaagggagaagtcattgataaagagatagaaaaagcaagatgctaaatatatttaacccatagacgaaagactaaccctagactatctaatacatttaaaacctgaaagacttttgagaaaacccaacaacttacttcacaacgacgagagacagagccttttcaacggatccccttatccctcgtgccaaccagaactcgagaaggcctgagaagttttatctacatgttgttttccttttcttttgagttaaaaatttacacggtataacactacaagaaatttgacatttgatggtgatctcaaaatgtcaaagtgaagtcctagctttgtcatagaacaagttatgtgacaaaattctagcgtcataaggctcgtcacggatgacacgtcggcaaaagtatctcgtgacaataataatgtgcatcgccatatatagaagcccagaacccataatgatgatatatggtcacaacaaagttgatttaattttttttacatatcatgtgcatgaagtttaattaggttatccgcagaccgcaaatacgtttaggcgattgacactaagaaaagtttaggcaatgatatatcgatcgactaatagcaaagctgttttctcaaccctatttaatttaagggagtatctaaaaaattgttgtaagatttttgaatgtaaaactttcaaatgtaactatagtataattgaagtgtaattacattgtaactgcactgtaactgcattgtaactacaatataacttatactcctataatatttgtattcaactatgatttgattggcttagcaccggggtcttacgcatgacatgtgtgaaatattcttaatctctagcaattttttttctt

SEQ ID NO: 30596 - DNA, 1753 bp, Oryza sativa
ttttatttctatctgaactcttatttttatttttttattctttggaacttattttattttttctgaattttagttaattaacctcatattctattctacatctactgttctctcaataatcatttttattttaaatttctgttatttctaaattgtattcttactctaactctcatttctatttatctactttcagaatttattttaatttttattccaaatttcaattaatctcatgttgtgttctagatggtctcttctttcaacaattcttattttttatactgatttttttgttatttttaaatcgtattcttacttgaactcttattttattttttataattttcaaatgtattttattttttattcttaattataattaatctcgtattatgttctaggggattactcttttagaattttttattctaaattttagttatttgtaaattttattgttacttgagctttttttttataattttgaaatttattttatttttaattcttaattataattattctcgtattatgttatgcatggactattctttcattattccttatttttttattctaaattttagttatttctaaattatatttttcaaattttagaatttattttatttttattccgaattttaattaatatctaattatgttctatatggactctttttcagtattccttattttattttgaattttagttatttttaaatatatttctacttgaaacttttttctttttatctaatccacagtgagcgtggtgccttctttcgagatttgcttttatagttttgtataatacagtagacaggtagaccgtagattcaagatttgatctaatactaacaaaaacatgatcaatatttaatgagatatttttagttattatcttttctcatctatgtatgtacgtggctaccaaaaatcaggagcattcagtctgtttgtttcctagtcctttccttgcatatggccatatacgtcagttggacttgatttttttttattacccgacgataatcaagccatgcaatccggttcagagagcacttgaagttggaacagaagtatatgtaagatttctttctttgtcagtccaagcaagattagtctatagtatttttccttctcttatacatacatatatccgatcaatctcgactgttaaaatctgaagctatcatgatctgatggtgtagatttctctttttcttcgattaatgtggcaatttctagccttcaaagcgaacttggtgtcttctttcaagactgtttttaataatataacttgggtttcgtttttataatttttagaagtcccatcaaacgctgtcattatactcctctacgactcgtccgctgtctcatctctttattgtcattgggattttaaaactcgaacataattatcgtttgggttcattttttttactatctagaagtcctgctaaaccatcagcggcttttccattgtacttctctacagctcgcccgctgcctcacctgttactgtcattaagatttaatcaaacataattattattggggtttactttttactttttagaagtcctgccaaccgctgtgcccgtattgcttaactgcatgttcattgtcgctattaggattctatttggggttttcttaatagtttttggatttcccatcaaccatcaccaatctactcctttatacgcatgttgcttctctcatttttactatcatttatcatttg

SEQ ID NO: 30597 - DNA, 6004 bp, Oryza sativa
catcacacatagaccccactatgattgtaatgagagagcaagtgcacaggaataaatttggtccatttagtgctcaccatgtgcatatactactacagttacatactactctcaacaagtaaacgtaagatgagaaacccaaaagtcaaggaataatatttctcaggaagggacgacgctgctataaataagtactaattcaggacaagcagtatgcacagtgaacattctatttacctgccaatgccttgaaaccttactctaataaattccaaagcagtactaaaaagggtttttttttccagtttctggacataaactgaactcgagataaatttgaaaatatattgttcatttttttccacaaaaatatccaggatgcaatttttttggcataaatataccatcgatctcgctgaaccattgagcgaaaatgacatgagcatgacgacgcaggtgatgtcgcgcggggatagtgcgagaccgcgcggtgtcgcgcgctacaccctgtctcgcagaacagaacagcgagaccaatcggtctctcatatggaatcagcgacagcgaacgtccatgtcttttggctactctttaattaatgattaattacctaagtaacaattaaataataatcagtgattaactatcctgattagcgattaattaataaataaataatcgctaatcaggataattaatcaattggaagcagccagccgttcggtcccacccgctggtaatgcgagaccgctcggtctcgcagcctcgccgcacgacaccacgcggtctcgcagccatcgtcgtgcaacggttgtgcgagatcgacagtatatttgtcaaacaaactgcatcccgaatattcttgagaaagaaaacaaatgaacactatattttcaaatttaattcaactgaactcctctaacacggtatgagcattgtgcgcatcgaaatggcaatcttagcctatctgcactaacagcctgccccttggatgattgatagtgaaatcctccagaaaattgtgcaagctaaaaacaaaaaagggtgtatagtttttagctggcctcaattgttttgattaatgccctccacccagaagaagttggttatgatattataatcagagccccagatgaagccaacagcaagaggtttggccatgggtgtgtacagaagcttctagtgatatatagtactacatttttattagtagtatgaccaatagcacacaggcaaaacactcttatgggctgataattatactactaacgataccaacaaataaagcaattgagaattgcatgatagtggtactactgtcatttaaagaaaaaagataaaaagctgaactaattatgcagattaggcctgacagagaaacatgttgtggaaagcaagctgctgttcataccagtcttgtccttgctttctgaagacatcagctcttgatcctagcttcaggcaggccatggtggagctcctccaaaatggtcaggacgatggataccactacatcaatgaaccaccagcccaccagagtttcttcagatcaaaggctgaatggttcgagctttccacacactcttacaccaaaccctaataaggaaattgagaaaaaagtaacaagaacaccactttcccccgaggaaaaaaaactcaatccactctaaaatcgccaaagtgaagaacacggactgaataccatcagagggcgaagctgaagatcgtgcagattacacggagcagccagacgaagttgcacatctacagaacaagagattacttcaacccccaaaaggaaaaacaaatcctcccaaaactcctgaaattcccacacccacgcaaggaaagcagatgcctttcgaagccaaaaaaaactctgatctacaccaacctaaaccccccaacagaaaaatccctcgctaaaccatcaacaccgacacccccaagaacccccccaaaatcgaaactttgagacaggaactcgagccccccaaatcagaactccaagagaagaaaccaccaaccaaagaatcaacccaagaaaccagcaatccctgctcctgcagtggtagaagaactgggagagagagagagtaaagtgaagtgcaggccgaaacaggggggtggttcttgggtttgtttgggtctttgggtgcggatgtggtcctaggaatgtttatggcagggggcatacaagaacattcttttttgtggcctcatcacagtttcccatggagaagaggacagaggaggagaatggaatggaaattggaagggggaagaggagaggagatgtgatgactgatgaaggaaggaggaggaggtggaggagaggtggtgatggtcagggtgtggggcccactgccagcaggctctcgatccactttgggtgtactgtactgtggctccctgatttctgattctctgtcccagatggaccgtttaggctgagtttatttccaaactttttcttcgaaatataaattttttcatcacatcaaaacttgtttacacatataaacttttaacttttctgtcacatcaattcaatttcaaccaaatttttaattttaacgtgaactaaatacacccttaatggaagatcatgtcacttgcaacttaacttcctctcaatagtgtagttattttttttcagatttcgagaaattatagttatagaaattaaaaaataaattagaagtcacaaactagaaaagtacagtttttctatatttttgtaaattgatctgtttctcataattttaaacttcctcaaacagatgtgtcttctttcaaccattattgacagccatggaagaaggtggtggtagaataatcctccttgaacagtagtaggagtacactggttaggctcagatcaattcatcagtcagttggtaggttattggctttttgcatcaggtcatacctgtgggccctccagattgaggtctagatgattctcactttggcatctactcctacagtcatactccactctgatgtccatccagtttagctctggaaaggaacagtctatatgattcatgccggccatactttggcatattgggccattttagagcttgtttattttaatacgaaaataaatgttaccatttggtgataaagttaacgattgataatatcaaattttggtaaaattagaaatataaaggtgttgttttgtttgatgccttactaaaatttggtatagttttaggagtagaaggttaaagaattattaaattttggtagagtttggcaagattatggtggtaaaatcttgttacctctgaatttagttaggttttattttgacagtgtagtgaacaattcttagctaatcaatttattggtagtttcaaaagtttagtagagtaccgcattggtttaccaaaaaaattgtctcgatccaagctctaaccatgcactgtactgaagtcgccaatgattagtaagggttggtttggtttgaggcctaaatttggcttatcaatatttgacaatttcaatattgtttagtgtctatttggtttgaagctaaattttggcatgcctaagaaaatagatcatttcaatagttaacttaggctattttggcttcaatccaaatacaactttgccttcccaaaattagtcatgcgaaaacttaccaaaatttggtattgccaaatattggtaaggtcaatttaggtcccaaaccaaaccagccctaaggcacattttggtgcatccaaaacagcctttcccatgttcaggctttcattttgttaacttaccattggcaaccaaaacttaaattttgaaagttgattttaggggaaacaatttatgctaatatattttccaacttttatttctaaacagctaataattcatatataacagttttactaataaattattttcagtttatttatttgtttcttttaggattatcagttatacctcaactgatcagaaccaagtaacttttttacttgcacacttggcttcagatgtacagctaattcgatataattgtactccaaaatctcttatattatgagactgggggaataataagaatgctaaatattttcaattaccacgaagatcttttttaaaaaataccttcatttcaagggaagcctgaaacaaaaatttacctttgcatctcagtatggaataacactaaaaaaaggcagatatgaagagatggaatatcttaggaagcttgtaatacctgtacttttggcattttttttttcacacaaaaagttggtgctgtctctgttcagccagccacgcatgattagggtccatgccatgctttggattggggcttggaatcggatgcctgccttgtgtttgaaggcaacatgcatggttctactagattccactggagcttggatggacactcccaatcatacaagagagaagcaaaacaaaaaggaagaatggatgttgcaactgtaagaagaataggagtatgtgaaataaactcaggtagagtactagttacatttttaccgcgtattttatactgaaaaagggtttctctctcgcgctacaataaatatctagagatgcttgtggtcaggcttcaagaatttgcagtgtcaatatgttttagatatttagaagaggtacattagtgtcacatacataatattataaatttataatattggattttttttaatactctgtgttattttaaacacgatatatggagacgtatacgtacgttcatatgggcgcacatatatacatcatatcacaatgaaccatatacccatcttacttctactagtcagacaatatgatagacaatatgcataggttccattacaaggaaccggtatactttacacccatttcaccgatacactattagcactaaactaaggccttgtttagttccaaagtttttttttcaaacgtccaattttccatcacatcaaacatttcatacacacacaatttttctatcacatcgtaccaatttcaactaaatttttaaacttcagcgtgaactaaacacagcctaatcgatgtttaaaactaataactttttttatctatatagtaacggcctatatgttttagccgaataatcgtccatcatcgtcatctcagcgcacgcccaaaatagttgcttgagaataaagggatgaacgaacgaacagtaaaagccagagagttctattctctatagtctctatgcttatgctaccgatgaatctagactgttgggttcgaatccgacggtcacagtcacacttcctctaccaaagcagtgcacacagatgatatcaacccttggaagaatttttagataatgaaaatagattacatctccggattctgtcataagacacacagccataagtttaatagtaataaaaaaggtaaagataaaaataaatcaaaatgataaataatgtgatgggacaaatccccaactcccattattattgaatagcgttaaactcataatttgtttagctagcaattcaaactacgccacacgtagtaaaataagagaccttttggctaccgattataagagtgtacccttgaaacaattaaaagtattttttgggtggttgtaaaatttcatttttacatgagtctgtggacccgtcgaaatgtttatggtgtgaaaatgaaatgcacgagatcattccaaagtgttatgtctatgtgcgggcggtgcctagttacagtttctgtgggttgggccaaaattaggcccaccttgctatgatgcagtgctatggatgagtgaactaatgggccctagctaggccgtcagctcgttcatgaatctttcaggatgaattttttttatttttaattttttttattaaaagttttacaaatataattttccattttgaaaattgacggaagtagtcgcctaccgccctctgggagggcgatttttaaaaatcgccatcccagagggcggcgaaaatgacgtggcagacggccgttcgctctcgggcg
